United States Patent Application Publication US 2007/0054278 A1 - sequence listing, part 5

SEQ ID NO: 4550 - DNA, 3006 bp, Homo sapiens
gcggcaacgcgcggagccggcggaagtggggctcgggtcccgcggcggggctggaggcagcgagcgccgtcgtctgcccgggcccgcccatcggggtccccaaccccatccggaccccgccgcccgagcgcgcggccccggaagcacccgcctcccggcatggtgctcaaggccttcttccccacgtgctgcgtctcgrcggacagcgggctgctggtgggacggtgggtgccggagcagagcagcgccgtggtcctggcggtcctgcactttcccttcatccccatccaggtcaagcagctcctggcccaggtgcggcaggccagccaggtgggcgtggccgtgctgggcacctggtgccactgccggcaggagcccgaggagagcctgggccgcttcctggagagcctgggtgctgtcttcccccatgagccctggctgcggctgtgccgggagagaggcggcacgttctggagctgcgaggccacccaccggcaagcgcccactgcccccggtgcccctggtgaggaccaggtcatgctcatcttctatgaccagcgccaggtgttgctgtcacagctacacctrcccaccgtcctgcccgaccgccaggctggagccaccactgccagcacggggggcctggctgccgtcttcgacacggtagcacgcagtgaggtgctcttccgcagtgaccgctttgatgagggccccgtgcggctgagccactggcagtcggagggcgtggaggccagcatcctcgcggagctggccaggcgagcctcgggacccatttgyctgctgttggccagcctgctgtcgctggtctcagctgtcagtgcctgccgagtgttcaagctctggcccctgtccttcctcgggagcaaactctccacgtgcgaacagctccggcaccggctggagcacctcacgctaatcttcagtacacggaaggcggagaaccctgcycagctgatgaggaaggccaacacggtggcctctgtgctgctggacgtggccctgggcctcatgctgctgtcctggctccacgggagaagccgcatcgggcatctggccgacgccctcgttcctgtggctgaccacgtggccgaggagctccagcatctgctgcagtggctgatgggtgctcccgccgggctcaagatgaaccgtgcactggaccaggtgctgggccgcttcttcctctaccacatccacctgtggatcagctacatccacctcatgtcccccttcgtggagcacatcctttggcacgtgggcctctcggcctgcctgggcctgacggtggccctgtccctcctctcggacattatcgccctcctcaccttccacatctactgcttttacgtctatggagccaggctgtactgcctgaagatccatggcctgtcctcactgtggcgtctgttccgggggaagaagtggaacgttctgcgccagcgcgtggactcctgttcctatgacctggaccagctgttcatcgggactctgctcttcaccatcctgctcttcctcctgcctaccacagccctgtactacctggtgttcaccctgctccggctcctggtggtcgccgtgcagggcctgatccatctgctsgtggacctcatcaactccctgccgctgtactcactgggtcttcggctctgccggccctacaggctggcggctggcgtgaagttccgtgtcctccggcacgaggccrgcaggcccctccgcctcctgatgcagataaacccactgccctacagccgcgtggtgcacacctaccgcctccccagctgtggctgccaccccaagcactcctggggcgccctgtgccgcaagctgttccttggggagctcatctacccctggaggcagagaggggacaagcaggactgagggaactgctggctcgcctggcaccaccacacggccacagccagccatctgctctgccagggtggcaccagctcagctggcgcatgtccygtgctttgtggacgctgctgtgtgctcctgaacacggcaggccctgctatcacaccttgggcttggaggtcattgggagtgagcagatgtgggggtggccagccaggctggccgcactccatcactggcactgcctgccttgggacccgcttcccacctgctgcggtcaccatggtggcgagcacagcaaccccaggtgtccagagcactgccccatgcccaccctgyrtacccaggtccagagggtccgtccaccacagcagccccaggtggagggctggtctccctgggggctccccagtggctctgccctggctgtgggggtggagggaccttgccaggatgaacccyccagtcccaggcaccctctagctccctcagccgaacagcaccctgcatctgggggattgaagcagtcgctgacccccgtccccagcgggcccgggccctcactccctgaaccacacggggtttatttgcggatgttccctggagaggtcgctttgtgaagaaaccatcagcaggctgtgagcatcgccaggctgctgtgggggcgggagcagcctcagtgtcaagggccygcccactgacccagccgtacctattcgtccacggtgccccgtagcagcaggtcctgcrgccaaatctgtctcccttcatgggcctcccagggaaggaggaagccctgctgtgcagacacctctgtggccccccaggrgtgtgagyggcctggggagggggccgtggcactgaggccgaaagtgcctgccagacggcacggtctgggtgcgggtgttccctgtgagcccgagtccgcttcaggaggggagcctgcaggtgccggctggtgaggggatgacgcgctgtgggtgggaggaggcagcgcccatytcagcagcaccaggactgcctgggactccctggcaacccagcaccggggaagccgtcagctgctgtgacaataaaacctgccccgtgtctggagcgcaggctcggtcccgggtccatgtg

SEQ ID NO: 4551 - DNA, 2892 bp, Homo sapiens
cctgagcctccaktagcttctctgggcctggcagagcctcccggcatggtgctcaaggccttcttccccacgtgctgcgtctcgrcggacagcgggctgctggtgggacggtgggtgccggagcagagcagcgccgtggtcctggcggtcctgcactttcccttcatccccatccaggtcaagcagctcctggcccaggtgcggcaggccagccaggtgggcgtggccgtgctgggcacctggtgccactgccggcaggagcccgaggagagcctgggccgcttcctggagagcctgggtgctgtcttcccccatgagccctggctgcggctgtgccgggagagaggcggcacgttctggagctgcgaggccacccaccggcaagcgcccactgcccccggtgcccctggtgaggaccaggtcatgctcatcttctatgaccagcgccaggtgttgctgtcacagctacacctrcccaccgtcctgcccgaccgccaggctggagccaccactgccagcacggggggcctggctgccgtcttcgacacggtagcacgcagtgaggtgctcttccgcagtgaccgctttgatgagggccccgtgcggctgagccactggcagtcggagggcgtggaggccagcatcctcgcggagctggccaggcgagcctcgggacccatttgyctgctgttggccagcctgctgtcgctggtctcagctgtcagtgcctgccgagtgttcaagctctggcccctgtccttcctcgggagcaaactctccacgtgcgaacagctccggcaccggctggagcacctcacgctaatcttcagtacacggaaggcggagaaccctgcycagctgatgaggaaggccaacacggtggcctctgtgctgctggacgtggccctgggcctcatgctgctgtcctggctccacgggagaagccgcatcgggcatctggccgacgccctcgttcctgtggctgaccacgtggccgaggagctccagcatctgctgcagtggctgatgggtgctcccgccgggctcaagatgaaccgtgcactggaccaggtgctgggccgcttcttcctctaccacatccacctgtggatcagctacatccacctcatgtcccccttcgtggagcacatcctttggcacgtgggcctctcggcctgcctgggcctgacggtggccctgtccctcctctcggacattatcgccctcctcaccttccacatctactgcttttacgtctatggagccaggctgtactgcctgaagatccatggcctgtcctcactgtggcgtctgttccgggggaagaagtggaacgttctgcgccagcgcgtggactcctgttcctatgacctggaccagctgttcatcgggactctgctcttcaccatcctgctcttcctcctgcctaccacagccctgtactacctggtgttcaccctgctccggctcctggtggtcgccgtgcagggcctgatccatctgctsgtggacctcatcaactccctgccgctgtactcactgggtcttcggctctgccggccctacaggctggcggctggcgtgaagttccgtgtcctccggcacgaggccrgcaggcccctccgcctcctgatgcagataaacccactgccctacagccgcgtggtgcacacctaccgcctccccagctgtggctgccaccccaagcactcctggggcgccctgtgccgcaagctgttccttggggagctcatctacccctggaggcagagaggggacaagcaggactgagggaactgctggctcgcctggcaccaccacacggccacagccagccatctgctctgccagggtggcaccagctcagctggcgcatgtccygtgctttgtggacgctgctgtgtgctcctgaacacggcaggccctgctatcacaccttgggcttggaggtcattgggagtgagcagatgtgggggtggccagccaggctggccgcactccatcactggcactgcctgccttgggacccgcttcccacctgctgcggtcaccatggtggcgagcacagcaaccccaggtgtccagagcactgccccatgcccaccctgyrtacccaggtccagagggtccgtccaccacagcagccccaggtggagggctggtctccctgggggctccccagtggctctgccctggctgtgggggtggagggaccttgccaggatgaacccyccagtcccaggcaccctctagctccctcagccgaacagcaccctgcatctgggggattgaagcagtcgctgacccccgtccccagcgggcccgggccctcactccctgaaccacacggggtttatttgcggatgttccctggagaggtcgctttgtgaagaaaccatcagcaggctgtgagcatcgccaggctgctgtgggggcgggagcagcctcagtgtcaagggccygcccactgacccagccgtacctattcgtccacggtgccccgtagcagcaggtcctgcrgccaaatctgtctcccttcatgggcctcccagggaaggaggaagccctgctgtgcagacacctctgtggccccccaggrgtgtgagyggcctggggagggggccgtggcactgaggccgaaagtgcctgccagacggcacggtctgggtgcgggtgttccctgtgagcccgagtccgcttcaggaggggagcctgcaggtgccggctggtgaggggatgacgcgctgtgggtgggaggaggcagcgcccatytcagcagcaccaggactgcctgggactccctggcaacccagcaccggggaagccgtcagctgctgtgacaataaaacctgccccgtgtctggagcgcaggctcggtcccgggtccatgtg

SEQ ID NO: 4552 - DNA, 1369 bp, Homo sapiens
gccggcgggccttgtggtctcatcgcgcgcaggatccgggccgggcgggggcgggggcggggcgcgtccgcggaggggggcggttggcggctcccgagcccagcgccgcgctcagtccggaccccgtgaccggcggccgaggccccgcctccgtcagtctgtccttcgggycctcagcrcagccgtgccgcccttcctagggtgtggagagcgggccccgccctgaaggggcaccgtgggctggggggcctgttttggagcaggcaccggtggccgagctccgtgaccatgaaggtcaaggtcatccccgtgctcgaggacaactacatgtacctggtcatcgaggagctcacgcgcgaggcggtggccgtggacgtggctgtgcccaagaggctgctggagatcgtgggccgggagggggtgtctctgaccgctgtgctgaccacccaccaycactgggaccacgcgcggggaaacccggagctggcgcggcttcgtccsgggctggcggtgctgggcgcggacgagcgcatcttctcgctgacgcgcaggctggcgcacggcgaggagctgcgggtgagcgcgcgctcccgggaggggcggggagggcgccccgggtccacccgccctcacaggtccgcctgctcctccgccgcagttcggggccatccacgtgcgttgcctcctgacgcccggccacaccgccggccacatgagctacttcctgtgggaggacgattgcccggacccacccgccctgttctcgggcgacgcgctgtcggtggccggctgcggctcgtgcctggagggcagcgcccagcagatgtaccagagcctggccgagctgggtaccctgccccccgagacgaaggtgttctgcggccacgagcacacgcttagcaacctggagtttgcccagaaagtggagccctgcaacgaccacgtgagagccaagctgtcctgggctaagaagagggatgaggatgacgtgcccactgtgccgtcgactctgggcgaggagcgcctctacaaccccttcctgcgggtggcagaggagccggtgcgcaagttcacgggcaaggcggtccccgccgacgtcctggaggcgctatgcaaggagcgggcgcgcttcgaacaggcgggcgagccgcggcagccacaggcgcgggccctccttgcgctgcagtgggggctcctsagtgcagccccacacgactgagccacccagaccctcggagggtgggcaacctggtgcttcccgggtggacacacaggaccactcagtggggcctgtgtgggcgccgagacctgggtgtctgggaagtggggcacacggggcctccsaactatgaataaagctttgaaaggc

SEQ ID NO: 4553 - DNA, 1398 bp, Homo sapiens
gccggcgggccttgtggtctcatcgcgcgcaggatccgggccgggcgggggcgggggcggggcgcgtccgcggaggggggcggttggcggctcccgagcccagcgccgcgctcagtccggaccccgtgaccggcggccgaggccccgcctccgtcagtctgtccttcgggycctcagcrcagccgtgccgcccttcctagggtgtggagagcgggccccgccctgaaggggcaccgtgggctggggggcctgttttggagcaggcaccggtggccgagctccgtgaccatgaaggtcaaggtcatccccgtgctcgaggacaactacatgtacctggtcatcgaggagctcacgcgcgaggcggtggccgtggacgtggctgtgcccaagaggctgctggagatcgtgggccgggagggggtgtctctgaccgctgtgctgaccacccaccaycactgggaccacgcgcggggaaacccggagctggcgcggcttcgtccsgggctggcggtgctgggcgcggacgagcgcatcttctcgctgacgcgcaggctggcgcacggcgaggagctgcggttcggggccatccacgtgcgttgcctcctgacgcccggccacaccgccggccacatgagctacttcctgtgggaggacgattgcccggacccacccgccctgttctcgggcgacgcgctgtcggtggccggctgcggctcgtgcctggagggcagcgcccagcagatgtaccagagcctggccgagctgggtaccctgccccccgagacgaaggtgttctgcggccacgagcacacgcttagcaacctggagtttgcccagaaagtggagccctgcaacgaccacgtgagagccaagctgtcctgggctaagaagagggatgaggatgacgtgcccactgtgccgtcgactctgggcgaggagcgcctctacaaccccttcctgcgggtggcagaggagccggtgcgcaagttcacgggcaaggcggtccccgccgacgtcctggaggcgctatgcaaggagcgggcgcgcttcgaacaggcgggcgagccgcggcagccacaggcgcgggccctccttgcgctgcagtgggggctcctsagtgcagccccacacgactgagccacccagaccctcacagggctggggcctgcgtccctcctcgtgacctcggccagctggacccacatgagggccacctctggaaccttcttcgaggccctggccagccatctgcccagcctcggagggtgggcaacctggtgcttcccgggtggacacacaggaccactcagtggggcctgtgtgggcgccgagacctgggtgtctgggaagtggggcacacggggcctccsaactatgaataaagctttgaaaggccgt

SEQ ID NO: 4554 - DNA, 1366 bp, Homo sapiens
gccggcgggccttgtggtctcatcgcgcgcaggatccgggccgggcgggggcgggggcggggcgcgtccgcggaggggggcggttggcggctcccgagcccagcgccgcgctcagtccggaccccgtgaccggcggccgaggccccgcctccgtcagtctgtccttcgggycctcagcrcagccgtgccgcccttcctagggtgtggagagcgggccccgccctgaaggggcaccgtgggctggggggcctgttttggagcaggcaccggtggccgagctccgtgaccatgaaggtcaaggtcatccccgtgctcgaggacaactacatgtacctggtcatcgaggagctcacgcgcgaggcggtggccgtggacgtggctgtgcccaagaggctgctggagatcgtgggccgggagggggtgtctctgaccgctgtgctgaccacccaccaycactgggaccacgcgcggggaaacccggagctggcgcggcttcgtccsgggctggcggtgctgggcgcggacgagcgcatcttctcgctgacgcgcaggctggcgcacggcgaggagctgcggttcggggccatccacgtgcgttgcctcctgacgcccggccacaccgccggccacatgagctacttcctgtgggaggacgattgcccggacccacccgccctgttctcgggtacccgcagcgcggagcgcgcccaccccgcctcccgccggccccgccccatctgctctgacccgccctcccccgccaggcgacgcgctgtcggtggccggctgcggctcgtgcctggagggcagcgcccagcagatgtaccagagcctggccgagctgggtaccctgccccccgagacgaaggtgttctgcggccacgagcacacgcttagcaacctggagtttgcccagaaagtggagccctgcaacgaccacgtgagagccaagctgtcctgggctaagaagagggatgaggatgacgtgcccactgtgccgtcgactctgggcgaggagcgcctctacaaccccttcctgcgggtggcagaggagccggtgcgcaagttcacgggcaaggcggtccccgccgacgtcctggaggcgctatgcaaggagcgggcgcgcttcgaacaggcgggcgagccgcggcagccacaggcgcgggccctccttgcgctgcagtgggggctcctsagtgcagccccacacgactgagccacccagaccctcggagggtgggcaacctggtgcttcccgggtggacacacaggaccactcagtggggcctgtgtgggcgccgagacctgggtgtctgggaagtggggcacacggggcctccsaactatgaataaagctttgaaaggc

SEQ ID NO: 4555 - DNA, 1640 bp, Homo sapiens
caggatccgggccgggcgggggcgggggcggggcgcgtccgcggaggggggcggttggcggctcccgagcccagcgccgcgctcagtccggaccccgtgaccggcggccgaggccccgcctccgtcagtctgtccttcgggycctcagcrcagccgtgccggtgaggcgggcggcgggggaacgcggctgtcccgggtcaggggtcttgcggcggcagggcggggggccgaggggcggggcctgggaggaaggcgtggcctttggggactggggctcggactgggggcggagccggggctggttggggaccggccgggttccgctcctgctggagcccggtgcgtggaattccacgcgagtgccggggagttcctggggagccgggcttctcttttggcccccagcgtgttgaccgagcccgcttcgcacagcccttcctagggtgtggagagcgggccccgccctgaaggggcaccgtgggctggggggcctgttttggagcaggcaccggtggccgagctccgtgaccatgaaggtcaaggtcatccccgtgctcgaggacaactacatgtacctggtcatcgaggagctcacgcgcgaggcggtggccgtggacgtggctgtgcccaagaggctgctggagatcgtgggccgggagggggtgtctctgaccgctgtgctgaccacccaccaycactgggaccacgcgcggggaaacccggagctggcgcggcttcgtccsgggctggcggtgctgggcgcggacgagcgcatcttctcgctgacgcgcaggctggcgcacggcgaggagctgcggttcggggccatccacgtgcgttgcctcctgacgcccggccacaccgccggccacatgagctacttcctgtgggaggacgattgcccggacccacccgccctgttctcgggcgacgcgctgtcggtggccggctgcggctcgtgcctggagggcagcgcccagcagatgtaccagagcctggccgagctgggtaccctgccccccgagacgaaggtgttctgcggccacgagcacacgcttagcaacctggagtttgcccagaaagtggagccctgcaacgaccacgtgagagccaagctgtcctgggctaagaagagggatgaggatgacgtgcccactgtgccgtcgactctgggcgaggagcgcctctacaaccccttcctgcgggtggcagaggagccggtgcgcaagttcacgggcaaggcggtccccgccgacgtcctggaggcgctatgcaaggagcgggcgcgcttcgaacaggcgggcgagccgcggcagccacaggcgcgggccctccttgcgctgcagtgggggctcctsagtgcagccccacacgactgagccacccagaccctcacagggctggggcctgcgtccctcctcgtgacctcggccagctggacccacatgagggccacctctggaaccttcttcgaggccctggccagccatctgcccagcctcggagggtgggcaacctggtgcttcccgggtggacacacaggaccactcagtggggcctgtgtgggcgccgagacctgggtgtctgggaagtggggcacacggggcctccsaactatgaataaagctttgaaaggccgt

SEQ ID NO: 4556 - DNA, 1260 bp, Homo sapiens
gccggcgggccttgtggtctcatcgcgcgcaggatccgggccgggcgggggcgggggcggggcgcgtccgcggaggggggcggttggcggctcccgagcccagcgccgcgctcagtccggaccccgtgaccggcggccgaggccccgcctccgtcagtctgtccttcgggycctcagcrcagccgtgccgcccttcctagggtgtggagagcgggccccgccctgaaggggcaccgtgggctggggggcctgttttggagcaggcaccggtggccgagctccgtgaccatgaaggtcaaggtcatccccgtgctcgaggacaactacatgtacctggtcatcgaggagctcacgcgcgaggcggtggccgtggacgtggctgtgcccaagaggctgctggagatcgtgggccgggagggggtgtctctgaccgctgtgctgaccacccaccaycactgggaccacgcgcggggaaacccggagctggcgcggcttcgtccsgggctggcggtgctgggcgcggacgagcgcatcttctcgctgacgcgcaggctggcgcacggcgaggagctgcggttcggggccatccacgtgcgttgcctcctgacgcccggccacaccgccggccacatgagctacttcctgtgggaggacgattgcccggacccacccgccctgttctcgggcgacgcgctgtcggtggccggctgcggctcgtgcctggagggcagcgcccagcagatgtaccagagcctggccgagctgggtaccctgccccccgagacgaaggtgttctgcggccacgagcacacgcttagcaacctggagtttgcccagaaagtggagccctgcaacgaccacaagagggatgaggatgacgtgcccactgtgccgtcgactctgggcgaggagcgcctctacaaccccttcctgcgggtggcagaggagccggtgcgcaagttcacgggcaaggcggtccccgccgacgtcctggaggcgctatgcaaggagcgggcgcgcttcgaacaggcgggcgagccgcggcagccacaggcgcgggccctccttgcgctgcagtgggggctcctsagtgcagccccacacgactgagccacccagaccctcggagggtgggcaacctggtgcttcccgggtggacacacaggaccactcagtggggcctgtgtgggcgccgagacctgggtgtctgggaagtggggcacacggggcctccsaactatgaataaagctttgaaaggc

SEQ ID NO: 4557 - DNA, 1456 bp, Homo sapiens
cagcrcagccgtgccggtgaggcgggcggcgggggaacgcggctgtcccggcccttcctagggtgtggagagcgggccccgccctgaaggggcaccgtgggctggggggcctgttttggagcaggcaccggtggccgagctccgtgaccatgaaggtcaaggtcatccccgtgctcgaggacaactacatgtacctggtcatcgaggagctcacgcgcgaggcggtggccgtggacgtggctgtgcccaagaggctgctggagatcgtgggccgggagggggtgtctctgaccgctgtgctgaccacccaccaycactgggaccacgcgcggggaaacccggagctggcgcggcttcgtccsgggctggcggtgctgggcgcggacgagcgcatcttctcgctgacgcgcaggctggcgcacggcgaggagctgcggttcggggccatccacgtgcgttgcctcctgacgcccggccacaccgccggccacatgagctacttcctgtgggaggacgattgcccggacccacccgccctgttctcgggcgacgcgctgtcggtggccggctgcggctcgtgcctggagggcagcgcccagcagatgtaccagagcctggccgagctgggtaccctgccccccgagacgaaggtgttctgcggccacgagcacacgcttagcaacctggagtttgcccagaaagtggagccctgcaacgaccacgtgagagccaagctgtcctgggctaagaagagggatgaggatgacgtgcccactgtgccgtcgactctgggcgaggagcgcctctacaaccccttcctgcgggtggcgtgagtatggctgttgtcccggggcctccaccgttacgtggacccttaggaaggcatctggggactgcgtgttgggctgagtgagcatctctggcttgggggaggctgctcattaagtgcctgcctgcccgcccacccctcggcgccatgctcccgcgtgggcagcgggccctgcgcctcactgcacccctccctgcagagaggagccggtgcgcaagttcacgggcaaggcggtccccgccgacgtcctggaggcgctatgcaaggagcgggcgcgcttcgaacaggcgggcgagccgcggcagccacaggcgcgggccctccttgcgctgcagtgggggctcctsagtgcagccccacacgactgagccacccagaccctcacagggctggggcctgcgtccctcctcgtgacctcggccagctggacccacatgagggccacctctggaaccttcttcgaggccctggccagccatctgcccagcctcggagggtgggcaacctggtgcttcccgggtggacacacaggaccactcagtggggcctgtgtgggcgccgagacctgggtgtctgggaagtggggcacacggggcctccsaactatgaataaagctttgaaaggcc

SEQ ID NO: 4558 - DNA, 668 bp, Homo sapiens
tcatgactacacagttaagggtcgtccatctgcttccccttctcctagcctgctttgtgcaaacaagtcccaagcaggagaagatgaagatggattgccacaaagacgagaaaggcaccatctatgactatgaggccatcrcacttaataagaatgaatatgtttccttcaagcagtatgtgggcaagcacatcctcttcgtcaacgtggccacctactgtggtctgacagcgcaatatcctgaactaaatgcasyccaggaggagctgaagccctatggtctagttgtgttgggctttccctgcaaccaatttggaaagcaagaaccaggagataacaaagagattcttcctgggctcaagtatgtccgtccagggggaggatttgtacctagtttccagctttttgagaaaggggatgtgaatggtgaaaaagaacagaaagtcttcagtttcttgaagcactcctgtcctcatccctctgagattttgggcacattcaaatctatatcctgggaccctgtaaaggtccatgacatccgttggaactttgaaaagttcctggtggggcctgatggaatccctgtcatgcgctggtcccaccgggctacggtcagctcagtcaagacagacatcctggcgtacttgaagcaattcaaaaccaaatag

SEQ ID NO: 4559 - DNA, 550 bp, Homo sapiens
tcatgactacacagttaagggtcgtccatctgcttccccttctcctagcctgctttgtgcaaacaagtcccaagcaggagaagatgaagatggattgccacaaagacgagaaaggcaccatctatgactatgaggccatcrcacttaataagaatgaatatgtttccttcaagcagtatgtgggcaagcacatcctcttcgtcaacgtggccacctactgtggtctgacagcgcaatatcctggtatgtccgtccagggggaggatttgtacctagtttccagctttttgagaaaggggatgtgaatggtgaaaaagaacagaaagtcttcagtttcttgaagcactcctgtcctcatccctctgagattttgggcacattcaaatctatatcctgggaccctgtaaaggtccatgacatccgttggaactttgaaaagttcctggtggggcctgatggaatccctgtcatgcgctggtcccaccgggctacggtcagctcagtcaagacagacatcctggcgtacttgaagcaattcaaaaccaaatag

SEQ ID NO: 4560 - DNA, 4371 bp, Homo sapiens
cccctgctgctctcaagtttcccgttggcggcgcggcccgggcgcttcaggtagcctctcggctctctctgctccgctccgcgcccaggtagggcaccgacgggggctgcacgcggctggccggcttcctccctgctgaggcggccctccctcctcccgcggggccctcctggccggggatccgcagcgctgcgccctctgaacgcccggcccccgcgcctgctgcggggcgcggcctggccgggccctggccccggctggcctcagtgcccagcagccccgctccgctctgcccagcgcgtcccctttgctccagccctgcggccgtccctttcggccggcggcatggccctgtcgtccgaacccgctgagatgccgcggcagtttcccaagctgaacatctctgaagtggatgagcaagtccggctcctggcggagaaggtgtttgctaaagtgctccgagaagaggacagcaaagatgccctgtccctgttcactgtcccagaggactgccccatcgggcaaaaggaagccaaggagagggagctgcagaaggagctggcagagcagaagtctgtggagaccgcaaaaagaaagaaaagtttcaagatgattcggtcccagtccctgtctctgcaaatgccgccacagcaagattggaagggccccccggcagccagtccggccatgtctcccacaacccctgtggtcactggagccacttccctgcccacgccagcaccctatgccatgcctgagttccagcgggtcaccatcagcggagattactgtgccgggatcactttggaggactatgagcaggcagccaagagtctggccaaggccctaatgatccgggagaagtatgcgcggctcgcctaccaccgcttcccgcggatcacatcccagtacctgggtcatccgygggcggatactgcacctccrgaagagggccttccagacttccaccctcctccactgcccmaggaagacccctactgcctggatgatgcaccccccaacctggattacttggtccayatgcaggggggcatcctctttgtgtatgataacaagaagatgctggagcaccaggagccgcacagcctaccctaccccgacctggagacctacacggtggacatgagccacatcctggctctcatcaccgatggccccacgaaaacctattgtcaccggcgactgaactttctggaatccaagttcagccttcatgagatgttaaacgaaatgtccgagttcaaagagttgaagagtaacccccaccgggacttctataacgtgagaaaggtggacacacacatccatgcggccgcctgcatgaaccaaaagcatctgctgygcttcatcaagcacacataccagacggagcctgacaggactgtggcagagaagcggggccggaagatcaccctgcggcaggtgtttgacggcctgcacatggacccctacgacctcactgtggactcactggatgtccacgcgggccggcagacattccaccgctttgacaagttcaactccaaatacaaccctgtgggggccagtgagctgygtgacctgtatttgaaaactgaaaactatctgggaggagagtactttgctcggatggtcaaggaggttgcccgggagctggaggagagcaagtaccagtactcagagccacggctctccatctacggccgcagtcctgaggagwggcccaacctggccyactggttcatccagcacaaggtctactctcccaacatgcgctggatcatccaggtgccccggatttatgacatatttaggtcaaagaagctgctgccaaactttgggaagatgctggagaacatcttcctgccccttttcaaggccactatcaacccccaagatcatcgagagcttcacctcttccttaaatatgtgacggggtttgacagcgtggatgatgagtccaagcacagcgaccacatgttttccgacaagagcccaaacccggacgtctggaccagtgagcagaacccaccctacagctactacctgtactacatgtaygccaacatcatggtgctcaacaacctcygcagggagcgcggcctgagcacgttcctgttccggccgcactgtggggaagccggctccatcacccacctggtgtctgccttcctcactgctgacaacatttcccacgggctgctcctcaagaagagtccggtattgcagtatctctactaccttgctcagatccccattgccatgtctcctcttagcaacaacagtttgttcctcgaatattccaagaaccctctgagggaattcctacacaagggactgcatgtttctctttccaccgatgaccccatgcagttccactacacgaaggaagcacttatggaagaatatgccattgcagctcaagtgtggaagctgagcacctgcgacctgtgtgagatcgccaggaacagcgtgctgcagagcggcctctcgcatcaggaaaagcmaaagtttctgggacaaaattattataaagaaggacctgaaggaaatgatattcgaaagacaaatgtggctcagatccggatggcattccgatatgagaccttatgcaatgagctcagcttcctgtctgatgctatgaaatcagaagagatcaccgccttgaccaactaggtccagcatttgacatgcattttaactttttggttcaatttcaagtctgctgtggctaatagtggtcaagattccgaactaggactttcctctgtgaagaggatgcctctgaagaaattttaaactggtgattttggttgcactgctcactttaagagttaacatgctcacttgttagtatttctgagtaacaagatggtgacttctccttggggatctgggagctgagcacttgtctatacttgttcctaattttccaagtatttctcttgaaactgccagtgcctgaactgttggggccaggattttccctggtcagatgccaagtaacatgtggttttctgccatacttttctccattggcccaggtaggctaattggtagttgttcatttcagcctctggatggctggctgccttaaacacaatcaatttcaaagctccatttcataaaggggctactttgaaggagttaagatggaagacttccttcttgacaaattgtgtttttagtgaatttcttaaaccgttttatttagccctccttccctctttctagttggaagccaaatgtactcatgaaaacagccactcctattctgagtcttggtttcttcacctagaaagtgagggtttggactagatgagtggctttcagggtgttctgtgaatctcctcatgaatactttagggtrggggagggaagggagtgagtgatgctcaggggctgtcaaagtgactgcgttcatcagttttacactggggctgctacataatattttcatttgaacgaagaacttcaaaaagcacaggactagatgatctctgttccttttggctctaatatgctacaactgtaggccaattatcactttaccaattaagagttaggccagataagtgaaatttaacttaagggcacacagctaataagtaataggcctaaactggatttccttattccaaatcctgtcttttccccactattccattagaccccacaaatgttagttgtgtgtgtgtgtgtgtgtktttttaatcactgtaaccggrtgcatttttttaaggcaraatttctcccttatctactrtgatgacttcagaagatacaatggtcccaggggccaagtagaaagcatttttaaagattaatctgaattaagctttatcagtgtactctttatctgtgttactagtgcctggtatgtagtaggtgctcaataaatgcatattgaataactaagtgaatttcttttggcaactttttaaggacatgtgctcttagtacttaagaggctgctcaaggaccttcctatctatttctgtggtcaaattcagactacaggaggtctttttgaatcattatagttagaagaagaatccagtttctgcctgtgaacttatttgactttagattgtctcatcttgtgactttataatgcctgtcccctccactggtcaattcagcatatggaagtataaatgcagtctttttactaggcagatatatatgctatcttacagctaattatgaaattgaatgaaaatccattgttatcttagggattagttttgaaaagcccccrtttatatacatttgccctaacataggaagtattgtgtagtttctcattgtcattttatctgtatcaagtatctttttttaaattgttaaataaagtcagctaggactgtg

SEQ ID NO: 4561 - DNA, 4290 bp, Homo sapiens
aacagcaccacagaaatagccattttgctcatggttatttcccaggaccacasgatttgcctaagtcactgggaggctatgtgtctgttctgagccttcccactctcctaaagggcagatgaagatcagagctttgcaccctgtgatgccattttaatcaaccctgcttggttttagaggattgctccygtgggtcacttgaggcaggctccaccttccccaggaggagtggcagagtccagccagcgctcggagctggaggcccacgtgggagcagtgagcggctctgagatgccgcggcagtttcccaagctgaacatctctgaagtggatgagcaagtccggctcctggcggagaaggtgtttgctaaagtgctccgagaagaggacagcaaagatgccctgtccctgttcactgtcccagaggactgccccatcgggcaaaaggaagccaaggagagggagctgcagaaggagctggcagagcagaagtctgtggagaccgcaaaaagaaagaaaagtttcaagatgattcggtcccagtccctgtctctgcaaatgccgccacagcaagattggaagggccccccggcagccagtccggccatgtctcccacaacccctgtggtcactggagccacttccctgcccacgccagcaccctatgccatgcctgagttccagcgggtcaccatcagcggagattactgtgccgggatcactttggaggactatgagcaggcagccaagagtctggccaaggccctaatgatccgggagaagtatgcgcggctcgcctaccaccgcttcccgcggatcacatcccagtacctgggtcatccgygggcggatactgcacctccrgaagagggccttccagacttccaccctcctccactgcccmaggaagacccctactgcctggatgatgcaccccccaacctggattacttggtccayatgcaggggggcatcctctttgtgtatgataacaagaagatgctggagcaccaggagccgcacagcctaccctaccccgacctggagacctacacggtggacatgagccacatcctggctctcatcaccgatggccccacgaaaacctattgtcaccggcgactgaactttctggaatccaagttcagccttcatgagatgttaaacgaaatgtccgagttcaaagagttgaagagtaacccccaccgggacttctataacgtgagaaaggtggacacacacatccatgcggccgcctgcatgaaccaaaagcatctgctgygcttcatcaagcacacataccagacggagcctgacaggactgtggcagagaagcggggccggaagatcaccctgcggcaggtgtttgacggcctgcacatggacccctacgacctcactgtggactcactggatgtccacgcgggccggcagacattccaccgctttgacaagttcaactccaaatacaaccctgtgggggccagtgagctgygtgacctgtatttgaaaactgaaaactatctgggaggagagtactttgctcggatggtcaaggaggttgcccgggagctggaggagagcaagtaccagtactcagagccacggctctccatctacggccgcagtcctgaggagwggcccaacctggccyactggttcatccagcacaaggtctactctcccaacatgcgctggatcatccaggtgccccggatttatgacatatttaggtcaaagaagctgctgccaaactttgggaagatgctggagaacatcttcctgccccttttcaaggccactatcaacccccaagatcatcgagagcttcacctcttccttaaatatgtgacggggtttgacagcgtggatgatgagtccaagcacagcgaccacatgttttccgacaagagcccaaacccggacgtctggaccagtgagcagaacccaccctacagctactacctgtactacatgtaygccaacatcatggtgctcaacaacctcygcagggagcgcggcctgagcacgttcctgttccggccgcactgtggggaagccggctccatcacccacctggtgtctgccttcctcactgctgacaacatttcccacgggctgctcctcaagaagagtccggtattgcagtatctctactaccttgctcagatccccattgccatgtctcctcttagcaacaacagtttgttcctcgaatattccaagaaccctctgagggaattcctacacaagggactgcatgtttctctttccaccgatgaccccatgcagttccactacacgaaggaagcacttatggaagaatatgccattgcagctcaagtgtggaagctgagcacctgcgacctgtgtgagatcgccaggaacagcgtgctgcagagcggcctctcgcatcaggaaaagcmaaagtttctgggacaaaattattataaagaaggacctgaaggaaatgatattcgaaagacaaatgtggctcagatccggatggcattccgatatgagaccttatgcaatgagctcagcttcctgtctgatgctatgaaatcagaagagatcaccgccttgaccaactaggtccagcatttgacatgcattttaactttttggttcaatttcaagtctgctgtggctaatagtggtcaagattccgaactaggactttcctctgtgaagaggatgcctctgaagaaattttaaactggtgattttggttgcactgctcactttaagagttaacatgctcacttgttagtatttctgagtaacaagatggtgacttctccttggggatctgggagctgagcacttgtctatacttgttcctaattttccaagtatttctcttgaaactgccagtgcctgaactgttggggccaggattttccctggtcagatgccaagtaacatgtggttttctgccatacttttctccattggcccaggtaggctaattggtagttgttcatttcagcctctggatggctggctgccttaaacacaatcaatttcaaagctccatttcataaaggggctactttgaaggagttaagatggaagacttccttcttgacaaattgtgtttttagtgaatttcttaaaccgttttatttagccctccttccctctttctagttggaagccaaatgtactcatgaaaacagccactcctattctgagtcttggtttcttcacctagaaagtgagggtttggactagatgagtggctttcagggtgttctgtgaatctcctcatgaatactttagggtrggggagggaagggagtgagtgatgctcaggggctgtcaaagtgactgcgttcatcagttttacactggggctgctacataatattttcatttgaacgaagaacttcaaaaagcacaggactagatgatctctgttccttttggctctaatatgctacaactgtaggccaattatcactttaccaattaagagttaggccagataagtgaaatttaacttaagggcacacagctaataagtaataggcctaaactggatttccttattccaaatcctgtcttttccccactattccattagaccccacaaatgttagttgtgtgtgtgtgtgtgtgtktttttaatcactgtaaccggrtgcatttttttaaggcaraatttctcccttatctactrtgatgacttcagaagatacaatggtcccaggggccaagtagaaagcatttttaaagattaatctgaattaagctttatcagtgtactctttatctgtgttactagtgcctggtatgtagtaggtgctcaataaatgcatattgaataactaagtgaatttcttttggcaactttttaaggacatgtgctcttagtacttaagaggctgctcaaggaccttcctatctatttctgtggtcaaattcagactacaggaggtctttttgaatcattatagttagaagaagaatccagtttctgcctgtgaacttatttgactttagattgtctcatcttgtgactttataatgcctgtcccctccactggtcaattcagcatatggaagtataaatgcagtctttttactaggcagatatatatgctatcttacagctaattatgaaattgaatgaaaatccattgttatcttagggattagttttgaaaagcccccrtttatatacatttgccctaacataggaagtattgtgtagtttctcattgtcattttatctgtatcaagtatctttttttaaattgttaaataaagtcagctaggactgtg

SEQ ID NO: 4562 - DNA, 4330 bp, Homo sapiens
tgaagagggccaggacactgcattcaggataccacagccattttgttttggataactgggattacctggggacttcagggctcttggaaattttccactcatatttcatattcacgagagaatttccagcccaggcttttcctgctctggctcactgctgctcacagatatgcaaaacagagacctcctactccagccggcagacaggacccagccagctgcacgcacgcactgactcagctgagcctcctgggtggcaggcagcacctcacccgggtgcatcacttgagtggcatcttcaggaccagtcatggagccaggctcagctgagatgccgcggcagtttcccaagctgaacatctctgaagtggatgagcaagtccggctcctggcggagaaggtgtttgctaaagtgctccgagaagaggacagcaaagatgccctgtccctgttcactgtcccagaggactgccccatcgggcaaaaggaagccaaggagagggagctgcagaaggagctggcagagcagaagtctgtggagaccgcaaaaagaaagaaaagtttcaagatgattcggtcccagtccctgtctctgcaaatgccgccacagcaagattggaagggccccccggcagccagtccggccatgtctcccacaacccctgtggtcactggagccacttccctgcccacgccagcaccctatgccatgcctgagttccagcgggtcaccatcagcggagattactgtgccgggatcactttggaggactatgagcaggcagccaagagtctggccaaggccctaatgatccgggagaagtatgcgcggctcgcctaccaccgcttcccgcggatcacatcccagtacctgggtcatccgygggcggatactgcacctccrgaagagggccttccagacttccaccctcctccactgcccmaggaagacccctactgcctggatgatgcaccccccaacctggattacttggtccayatgcaggggggcatcctctttgtgtatgataacaagaagatgctggagcaccaggagccgcacagcctaccctaccccgacctggagacctacacggtggacatgagccacatcctggctctcatcaccgatggccccacgaaaacctattgtcaccggcgactgaactttctggaatccaagttcagccttcatgagatgttaaacgaaatgtccgagttcaaagagttgaagagtaacccccaccgggacttctataacgtgagaaaggtggacacacacatccatgcggccgcctgcatgaaccaaaagcatctgctgygcttcatcaagcacacataccagacggagcctgacaggactgtggcagagaagcggggccggaagatcaccctgcggcaggtgtttgacggcctgcacatggacccctacgacctcactgtggactcactggatgtccacgcgggccggcagacattccaccgctttgacaagttcaactccaaatacaaccctgtgggggccagtgagctgygtgacctgtatttgaaaactgaaaactatctgggaggagagtactttgctcggatggtcaaggaggttgcccgggagctggaggagagcaagtaccagtactcagagccacggctctccatctacggccgcagtcctgaggagwggcccaacctggccyactggttcatccagcacaaggtctactctcccaacatgcgctggatcatccaggtgccccggatttatgacatatttaggtcaaagaagctgctgccaaactttgggaagatgctggagaacatcttcctgccccttttcaaggccactatcaacccccaagatcatcgagagcttcacctcttccttaaatatgtgacggggtttgacagcgtggatgatgagtccaagcacagcgaccacatgttttccgacaagagcccaaacccggacgtctggaccagtgagcagaacccaccctacagctactacctgtactacatgtaygccaacatcatggtgctcaacaacctcygcagggagcgcggcctgagcacgttcctgttccggccgcactgtggggaagccggctccatcacccacctggtgtctgccttcctcactgctgacaacatttcccacgggctgctcctcaagaagagtccggtattgcagtatctctactaccttgctcagatccccattgccatgtctcctcttagcaacaacagtttgttcctcgaatattccaagaaccctctgagggaattcctacacaagggactgcatgtttctctttccaccgatgaccccatgcagttccactacacgaaggaagcacttatggaagaatatgccattgcagctcaagtgtggaagctgagcacctgcgacctgtgtgagatcgccaggaacagcgtgctgcagagcggcctctcgcatcaggaaaagcmaaagtttctgggacaaaattattataaagaaggacctgaaggaaatgatattcgaaagacaaatgtggctcagatccggatggcattccgatatgagaccttatgcaatgagctcagcttcctgtctgatgctatgaaatcagaagagatcaccgccttgaccaactaggtccagcatttgacatgcattttaactttttggttcaatttcaagtctgctgtggctaatagtggtcaagattccgaactaggactttcctctgtgaagaggatgcctctgaagaaattttaaactggtgattttggttgcactgctcactttaagagttaacatgctcacttgttagtatttctgagtaacaagatggtgacttctccttggggatctgggagctgagcacttgtctatacttgttcctaattttccaagtatttctcttgaaactgccagtgcctgaactgttggggccaggattttccctggtcagatgccaagtaacatgtggttttctgccatacttttctccattggcccaggtaggctaattggtagttgttcatttcagcctctggatggctggctgccttaaacacaatcaatttcaaagctccatttcataaaggggctactttgaaggagttaagatggaagacttccttcttgacaaattgtgtttttagtgaatttcttaaaccgttttatttagccctccttccctctttctagttggaagccaaatgtactcatgaaaacagccactcctattctgagtcttggtttcttcacctagaaagtgagggtttggactagatgagtggctttcagggtgttctgtgaatctcctcatgaatactttagggtrggggagggaagggagtgagtgatgctcaggggctgtcaaagtgactgcgttcatcagttttacactggggctgctacataatattttcatttgaacgaagaacttcaaaaagcacaggactagatgatctctgttccttttggctctaatatgctacaactgtaggccaattatcactttaccaattaagagttaggccagataagtgaaatttaacttaagggcacacagctaataagtaataggcctaaactggatttccttattccaaatcctgtcttttccccactattccattagaccccacaaatgttagttgtgtgtgtgtgtgtgtgtktttttaatcactgtaaccggrtgcatttttttaaggcaraatttctcccttatctactrtgatgacttcagaagatacaatggtcccaggggccaagtagaaagcatttttaaagattaatctgaattaagctttatcagtgtactctttatctgtgttactagtgcctggtatgtagtaggtgctcaataaatgcatattgaataactaagtgaatttcttttggcaactttttaaggacatgtgctcttagtacttaagaggctgctcaaggaccttcctatctatttctgtggtcaaattcagactacaggaggtctttttgaatcattatagttagaagaagaatccagtttctgcctgtgaacttatttgactttagattgtctcatcttgtgactttataatgcctgtcccctccactggtcaattcagcatatggaagtataaatgcagtctttttactaggcagatatatatgctatcttacagctaattatgaaattgaatgaaaatccattgttatcttagggattagttttgaaaagcccccrtttatatacatttgccctaacataggaagtattgtgtagtttctcattgtcattttatctgtatcaagtatctttttttaaattgttaaataaagtcagctaggactgtg

SEQ ID NO: 4563 - DNA, 1403 bp, Homo sapiens
caattcagaggctgctgcctgcttaggaggttgtagaaagctctgtaggttctctctgtgtgtcctacaggagtcttcaggccagctccctgtcggatggcttttatgaaaaaatatctcctccccattctggggctcttcatggcctactactactattctgcaaacgaggaattcagaccagagatgctccaaggaaagaaagtgattgtyacaggggccagcaaagggatcggaagagagatggcttatcatctggcgaagatgggagcccatgtggtggtgacagcgaggtcaaaagaaactctacagaaggtggtatcccactgcctggagcttggagcagcctcagcacactacattgctggcaccatggaagacatgaccttcgcagagcaatttgttgcccaagcaggaaagctcatgggaggactagacatgctcattctcaaccacatcaccaacacttctttgaatctttttcatgatgatattcaccatgtgcgcaaaagcatggaagtcaacttcctcagttacgtggtcctgactgtagctgccttgcccatgctgaagcagagcaatggaagcattgttgtcgtctcctctctggctgggaaagtggcttatccaatggttgctgcctattctgcaagcaagtttgctttggatgggttcttctcctccatcagaaaggaatattcagtgtcyagggtcaatgtatcaatcactctctgtgttcttggcctcatagacacagaaacagccatgaaggcagtttctgggatagtccatatgcaagcagctccaaaggaggaatgtgccctggagatcatcaaagggggagctctgcgccaagaagaagtgtattatgacagctcactctggaccactcttctgatcagaaatccatgcaggaagatcctggaatttctctactcaacgagctataatatggacagattcataaacaagtaggaactccctgagggctgggcatgctgagggattttgggactgttctgtctcatgtttatctgagctcttatctatgaagacatcttcccagagtgtccccagagacatgcaagtcatgggtcacacctgacaaatggaaggagttcctctaacatttgcaaaatggaaatgtaataataatgaatgtcatgcaccgctgcagccagcagttgtaaaattgttagtaaacatagrtataattaccagatagttatattaaatttatatcttatatataataatatgtgatgattaatacaatattaattataataaaggtcacataaactttataaattcataactggtagctataacttgagcttattcaggatggtttctttaaaaccataaactgtacaaatgaaatttttcaatatttgtttctt

SEQ ID NO: 4564 - DNA, 1433 bp, Homo sapiens
aaacagaaggaaaggcagaggaggagggagagagagagaagagaagaaaaagaaaaaagaacatcaataaaaagaagtcagatttgttcgaaatcttgaggagtcttcaggccagctccctgtcggatggcttttatgaaaaaatatctcctccccattctggggctcttcatggcctactactactattctgcaaacgaggaattcagaccagagatgctccaaggaaagaaagtgattgtyacaggggccagcaaagggatcggaagagagatggcttatcatctggcgaagatgggagcccatgtggtggtgacagcgaggtcaaaagaaactctacagaaggtggtatcccactgcctggagcttggagcagcctcagcacactacattgctggcaccatggaagacatgaccttcgcagagcaatttgttgcccaagcaggaaagctcatgggaggactagacatgctcattctcaaccacatcaccaacacttctttgaatctttttcatgatgatattcaccatgtgcgcaaaagcatggaagtcaacttcctcagttacgtggtcctgactgtagctgccttgcccatgctgaagcagagcaatggaagcattgttgtcgtctcctctctggctgggaaagtggcttatccaatggttgctgcctattctgcaagcaagtttgctttggatgggttcttctcctccatcagaaaggaatattcagtgtcyagggtcaatgtatcaatcactctctgtgttcttggcctcatagacacagaaacagccatgaaggcagtttctgggatagtccatatgcaagcagctccaaaggaggaatgtgccctggagatcatcaaagggggagctctgcgccaagaagaagtgtattatgacagctcactctggaccactcttctgatcagaaatccatgcaggaagatcctggaatttctctactcaacgagctataatatggacagattcataaacaagtaggaactccctgagggctgggcatgctgagggattttgggactgttctgtctcatgtttatctgagctcttatctatgaagacatcttcccagagtgtccccagagacatgcaagtcatgggtcacacctgacaaatggaaggagttcctctaacatttgcaaaatggaaatgtaataataatgaatgtcatgcaccgctgcagccagcagttgtaaaattgttagtaaacatagrtataattaccagatagttatattaaatttatatcttatatataataatatgtgatgattaatacaatattaattataataaaggtcacataaactttataaattcataactggtagctataacttgagcttattcaggatggtttctttaaaaccataaactgtacaaatgaaatttttcaatatttgtttctt

SEQ ID NO: 4565 - DNA, 1354 bp, Homo sapiens
gcggccgcccgcgagcggggcggtgccacgtacggctccggaagaagcgacggmmtctgctagggcacaagagagacgggcgctcgsgctctcgcagtcctcttccgtcagtgtcttttgcttcgactcccggcggagcgcgcaacgtggagtgacgtgcaggggccaagtgcaacccaggcagccacggctgtttcggagctcrggactctaaaatggcagagcagctttctccaggaaaggcggtggatcaggtgtgcaccttccttttcaaaaagcctgggcggaaaggggctgctggacgcagaaagcgcccggcctgcgacccagagcccggagaaagcggcagcagtagcgacgaaggctgcactgtggttcgaccggaaaagaagcgggtgacccacaatccaatgatacagaagacccgtgacagtggtaaacagaaggcggcttacggcgacttgagcagcgaagaggaagaggaaaatgagcccgagagtctcggcgtggtttataaatccacccgttcsgcgaaacccgtgggaccagaggatatgggagcgacagctgtctatgagctggacacagagaaagagcgcgatgcacaagccatctttgagcgcagccagaagatccaggaggagctgaggggcaaggaggatgacaagatctatcggggaatcaacaattatcagaaatacatgaagcccaaggatacgtctatgggcaatgcctcttccgggatggtgaggaagggccccatccgagcgcccgagcatctacgtgccaccgtgcgctgggattaccagcccgacatctgtaaggactacaaagagactggcttctgcggcttcggagacagctgcaaattcctccatgaccgttcagattacaagcatgggtggcagatcgaacgtgagcttgatgagggtcgctatggtgtctatgaggatgaaaactatgaagtgggaagcgatgatgaggaaataccattcaagtgtttcatctgtcgccagagcttccaaaacccagttgtcaccaagtgcaggcattatttctgcgagagctgtgcactgcagcatttccgcaccaccccgcgctgctatgtctgtgaccagcagaccaatggcgtcttcaatccagcgaaagaattgattgctaaactagagaagcatcgagctacaggagagggtggtgcttccgacttgccagaagaccccgatgaggatgcaattcccattacttaggtttcccataattcttaaatttaaaaaataaacgttttgttcttttggaagtcttacttcgtgtccttcctttgtagagaaagtgacagagcaggcgggtggtgaag

SEQ ID NO: 4566 - DNA, 4155 bp, Homo sapiens
  misc_feature (1)...(4155): n = A,T,C or G
tgcagagtggttacatgggtgtaagcacaggtaaaaattcactgagctgtacacttaagatttgtgcattttactgtatatacattatatctcaaaataaaactagaaatataagaaaaagccaaccacgacggactgaaaacaaacatacaaatttggacgtgcgatgatcttttagtcattatggtttcagatttgctgttagttactgattgatatttaatcaaagtgacgtgaaacactttttcccctcttgagctgatcgttcagtaagctaagttacttaaaaggatcttgtgatctttttataagaccagaaagcctttaatttacctgttattaagtaagatggagtagtaacggtttccaaaatttgtataacacacgatgaagtctctagggggcagggtaaacacagattttttttttcacttcatccttctctgcggcgatgtctttatggagttcgtcaggcaacggtatcagatagcaaatgggtttttaactaatctttccctaaggtactgtagttctatattctatcctatagattctcaaaatccacttttacactaggatgccactggagggcagttctgatttggatatatcttaaaaatgatttgcttttatgttttcatctccctgcgttataaagcaccatcctctgaatttggtcgttgcatcgggtcaaaagttctgcagcttgaaaaaccctgcaaaaacatccggaaaggagggagaacactacaactcccagaacgcaatgctttccctctcgccagcctgtcccctccagctgctcaatgaccagcctctgtgagcctcctctcagccctattggtcagtttgctcgtcagtgagtgaggcggagggaggggaggaacagagaatcccggatggtacgtttcccgccaccgcggggcgcgcagcggaaaacccgaagaagaagaagcttttgattggacagtcgctagtccgacctcagagaactcagccaatcataatgcttatatgctcccaaggtycccgcctcttcctcgaggtaacctttggtggcgggaagagttcggaagttttcgcgccggggtggagtcatcctgggaacctccacgcgactttggtggaggtagttctttggcagcgggcatggcgggtaccgtggtgctggacgatgtggagctgcgggaggctcagagagattacctggacttcctggacgacgaggaagaccagggaatttatcagagcaaagttcgggagctgatcagtgacaaccaataccggctgattgtcaatgtgaatgacctgcgcaggaaaaacgagaagagggctaaccggcttctgaacaatgcctttgaggagctggttgccttccagmgggccttaaaggattttgtggcctccattgatgctacctatgccaagcagtatgaggagttctacgtaggactggaaggcrgctttggctccaagcacgtctccccgcggactcttacctcctgcttcctcagctgtgtggtctgtgtggagggcattgtcactaaatgttctctagttcgtcccaaagtcgtccgcagtgtccactactgtcctgctactaagaagaccatagagcgacgttattctgatctcaccaccctggtggcctttccctccagctctgtctatcctaccaaggatgaggagaacaatccccttgagacagaatatggcctttctgtctacaaggatcaccagaccatcaccatccaggagatgccggagaaggccccagccggccagctccccmgctctgtggacgtcattctggatgatgacttggtggataaagcgaagcctggtgaccgggttcargtggtgggaacctaccgttgccttcctggaaagaagggaggctacacctctgggaccttcaggactgtcctgattgcctgtaatgttaagcagatgagcaaggatgctcagccctctttctctgctgaggwtatagccaagatcaagaagytcagtaaaacccgatccaaggatatctttgaccagctggccaagtcattggccccaagtatccatgggcatgactatgtcaagaaagcaatcctctgcttgctcttrggaggggtggaacgagacctagaaaatggcagccacatccgtggggacatcaatattcttctaataggagacccatccgttgccaagtctcagcttctgcggtatgtgctttgcactgcaccccgagctatccccaccactggccggggctcctctggagtgggtctgacggctgctgtcaccacagaccaggaaacaggagagcgccgtctggaagcaggggccatggtcctggctgaccgaggcgtggtttgcattgatgaatttgacaaaatgtctgacatggatcgcacagccatccatgaagtgatggagcagggtcgagtgaccattgccaaggctggcatccatgctcggctgaatgcccgctgcagtgttttggcagctgccaaccctgtctacggcaggtatgaccagtataagactccaatggagaacattgggctacaggactcactgctgtcacgatttgacttgctcttcatcatgctggatcagatggatcctgagcaggatcgggagatctcagaccatgtccttcggatgcaccgttacagagcacctggggagcaggatggcgatgctatgcccttgggtagtgctgtggatatcctggccacagatgatcccaactttagccaggaagatcagcaggacacccagatttatgagaagcatgacaaccttctacatgggaccaagaagaaaaaggagaagatggtgagtgcagcattcatgaagaagtacatccatgtggccaaaatcatcaagcctgtcctgacacaggagtcggccacctacattgcagaagagtattcacgcctgcgcagccaggatagcatgagctcagacaccgccaggacatctccagttacagcccgaacactggaaactctgattcgactggccacagcccatgcgaaggcccgcatgagcaagactgtggacctgcaggatgcagaggaagctgtggagttggtccagtatgcttactttaagaaggttctggagaaggagaagaaacgtaagaagcgaagtgaggatgaatcagagacagaagatgaagaggagaaaagccaagaggaccaggagcagaagaggaagagaaggaagactcgccagccagatgccaaagatggggattcatacgacccctatgacttcagtgacacagaggaggaaatgcctcaagtacacactccaaagacggcagactcacaggagaccaaggaatcccagaaagtggagttgagtgaatccaggttgaaggcattcaaggtggccctcttggatgtgttccgggaagctcatgcgcagtcaatcggcatgaatcgcctcacagaatccatcaacygggacagcnaagagcccttctcttcagttgagatccaggctgctctgagcaagatgcaggatgacaatcaggtcatggtgtctgagggcatcatcttcctcatctgaggaggcctcgtctctgaacttgggttgtgccgagagagtttgttctgtgtttcccaccctctccctgacccaagtctttgcctctactcccttaacagtgttgaattcaactgaaggcgaggaatgttggtgatgaagctgagttcaggactcggtggaccctttgggaatgggtcatgaaagctgccatggggtgaggaaagaggagacagtgggagaggacaatgactattgcatcttcattgcaaaagcactggctcatccgccctacttcccatcccacacaaacccaattgtaaataacatatgacttctgagtacttttgggggcacaactgttttctgtttkctgtttttttgttttgttttttttctccagagcactttggtctagactaggctttgggtggttccaattggtggagagaagctctgagkcacgtcatgcaggtcaagaaagctttctttgcagtagcaccagttaaggtgaatatgtattgtatcacaaaacaaacccaatatccagatgaatatccgagatgttgaataaacttagccatttcgtacacatggtcttaa

SEQ ID NO: 4567 - DNA, 1112 bp, Homo sapiens
trggcgggctggcccatggctgagacctctctcccagagctggggggagaggacaaagccacgccttgycccagcatcctggagctggaggagctcctgcgggcagggaagtcttcttgcagccgtgtggacgaagtttggcccaaccttttcataggagatgcaaacagcatcaagtgtgcggagacaggcggctgaaagccrgcagcacgaactgcccgtcagagaagtgcacagcctgggccagatactcccacaggatggactcactgcagaagcaggacctccggaggcccaagatccatggggcagtccaggcatctccctaccagccgcccacattggcttcgctgcagcgcttgctgtgggtccgtcaggctgccacactgaaccatatcgatgaggtctggcccagcctcttcctgggagatgcgtacgcagcccgggacaagagcaagctgatccagctgggaatcacccaygttgtgaatgccgctgcaggcaagttccaggtggacacaggtgccaaattctaccgtggaatgtccctggagtactatggcatygaggyggaygacaaccccttcttcgacctcagtgtctactttctgcctgttgctcgatacatccgagctgccctcagtgttccccaaggccgcgtgctggtacactgtgccatgggggtaagccgctctgccacacttgtcctggccttcctcatgatctrtgagaacatgacgctggtagaggccatccagacggtgcaggcccaccgcaatatctgccctaactcargcttcctccggcagctccaggttctggacaacsractggggcgggagacggggcggttctgatctggcaggcagccaggatccctgacccttggcccaaccccaccagcctggccctgggaacagcaggctctgctgtttctagtgaccctgagatgtaaacagcaagtgggggctgaggcagaggcagggatagctgggtggtgacctcttagcgggtggatttccctgacccaattcagagattctttatgcaaaagtgagttcagtccatctctataataaaatattcatcgtcataaagacaggtgatctttt

SEQ ID NO: 4568 - DNA, 792 bp, Homo sapiens
gtgaccacagaggcagaggggtrggcgggctggcccatggctgagacctctctcccagagctggggggagaggacaaagccacgccttgycccagcatcctggagctggaggagctcctgcgggcagggaagtcttcttgcagccgtgtggacgaagtttggcccaaccttttcataggagatgcggccacggcaaacaaccgctttgagctgtggaagctgggcatcacccacgtgctgaacgccgcccacaagggcctctactgtcagggcggccctgacttctacggcagcagtgtgagctacctgggggtgccagcccacgacctccctgattttgacatcagtgcctacttctcctctgcggctgacttcatccaccgtgccctcaacacgcctggggccaaggtcctggtgcactgtgtggtgggcgtgagccgctctgccacgctggtcctggcctacctcatgctgcaccagcggctgtccctgcgccaggcggtgatcaccgtgaggcagcaccgatgggtcttccccaaccgaggcttcctgcaccagctctgcaggctggaccagcaactgcggggtgccggccagagctgaggggccagagctggtccttactccctgccatggggctctgccactttgccaccctggcactgatcctgctggtgctgctggaggctctggcccaggcggacacacagaagatggtggaagcccagcgtggggtcggccctagagcctgctactccatctggctcctcctggcgcctacaccccctctca

SEQ ID NO: 4569 - DNA, 611 bp, Homo sapiens
gtgaccacagaggcagaggggtrggcgggctggcccatggctgagacctctctcccagagctggggggagaggacaaagccacgccttgycccagcatcctggagctggaggagctcctgcgggcagggaagtcttcttgcagccgtgtggacgaagtttggcccaaccttttcataggagatgcggccacggcaaacaaccgctttgagctgtggaagctgggcatcacccacgtgctgaacgccgcccacaagggcctctactgtcagggcggccctgacttctacggcagcagtgtgagctacctgggggtgccagcccacgacctccctgattttgacatcagtgcctacttctcctctgcggctgacttcatccaccgtgccctcaacacgcctggggccaaggtcctggtgcactgtgtggtgggcgtgagccgctctgccacgctggtcctggcctacctcatgctgcaccagcggctgtccctgcgccaggcggtgatcaccgtgaggcagcaccgatgggtcttccccaaccgaggcttcctgcaccagctctgcaggctggaccagcaactgcggggtgccggccagagctgaggggccag

SEQ ID NO: 4570 - DNA, 927 bp, Homo sapiens
cagccctgttccgctcaggcagagtcctgcccctgcacccactcccccattcccggccccaggccatgccccaggatggactcactgcagaagcaggacctccggaggcccaagatccatggggcagtccaggcatctccctaccagccgcccacattggcttcgctgcagcgcttgctgtgggtccgtcaggctgccacactgaaccatatcgatgaggtctggcccagcctcttcctgggagatgcgtacgcagcccgggacaagagcaagctgatccagctgggaatcacccaygttgtgaatgccgctgcaggcaagttccaggtggacacaggtgccaaattctaccgtggaatgtccctggagtactatggcatygaggyggaygacaaccccttcttcgacctcagtgtctactttctgcctgttgctcgatacatccgagctgccctcagtgttccccaaggccgcgtgctggtacactgtgccatgggggtaagccgctctgccacacttgtcctggccttcctcatgatctrtgagaacatgacgctggtagaggccatccagacggtgcaggcccaccgcaatatctgccctaactcargcttcctccggcagctccaggttctggacaacsractggggcgggagacggggcggttctgatctggcaggcagccaggatccctgacccttggcccaaccccaccagcctggccctgggaacagcaggctctgctgtttctagtgaccctgagatgtaaacagcaagtgggggctgaggcagaggcagggatagctgggtggtgacctcttagcgggtggatttccctgacccaattcagagattctttatgcaaaagtgagttcagtccatctctataataaaatattcatcgtcataaagacaggtgatctttt

SEQ ID NO: 4571 - DNA, 1316 bp, Homo sapiens
trggcgggctggcccatggctgagacctctctcccagagctggggggagaggacaaagccacgccttgycccagcatcctggagctggaggagctcctgcgggcagggaagtcttcttgcagccgtgtggacgaagtttggcccaaccttttcataggagatgcagctggtccttactccctgccatggggctctgccactttgccaccctggcactgatcctgctggtgctgctggaggctctggcccaggcggacacacagaagatggtggaagcccagcgtggggtcggccctagagcctgctactccatctggctcctcctggcgcctacaccccctctcagccactgtcttcagtctccacagaaacagcatcaagtgtgcggagacaggcggctgaaagccrgcagcacgaactgcccgtcagagaagtgcacagcctgggccagatactcccacaggatggactcactgcagaagcaggacctccggaggcccaagatccatggggcagtccaggcatctccctaccagccgcccacattggcttcgctgcagcgcttgctgtgggtccgtcaggctgccacactgaaccatatcgatgaggtctggcccagcctcttcctgggagatgcgtacgcagcccgggacaagagcaagctgatccagctgggaatcacccaygttgtgaatgccgctgcaggcaagttccaggtggacacaggtgccaaattctaccgtggaatgtccctggagtactatggcatygaggyggaygacaaccccttcttcgacctcagtgtctactttctgcctgttgctcgatacatccgagctgccctcagtgttccccaaggccgcgtgctggtacactgtgccatgggggtaagccgctctgccacacttgtcctggccttcctcatgatctrtgagaacatgacgctggtagaggccatccagacggtgcaggcccaccgcaatatctgccctaactcargcttcctccggcagctccaggttctggacaacsractggggcgggagacggggcggttctgatctggcaggcagccaggatccctgacccttggcccaaccccaccagcctggccctgggaacagcaggctctgctgtttctagtgaccctgagatgtaaacagcaagtgggggctgaggcagaggcagggatagctgggtggtgacctcttagcgggtggatttccctgacccaattcagagattctttatgcaaaagtgagttcagtccatctctataataaaatattcatcgtcataaagacaggtgatctttt

SEQ ID NO: 4572 - DNA, 4620 bp, Homo sapiens
gtatggtctgaatatgcgttgcttggcagctcgggtcaactataagactttgattattatctgcgcactcttcactttggtcacagtacttttgtggaataagtgttccagtgacaaagcaatccagtttccacggcgttcgagtagtggcttcagagtggatgggtttgaaaaaagagcagcagcatctgagagtaacaactatrtgaaccacgtggccaaacaacagtctgaggaagcattccctcaggaacagcagaragcaccccctgttgttgggggcttcaatagcaatgtgggaagtaaggtgttagggctcaaatatgaagaaattgactgtctcataaatgatgaacacacaattaaagggagacgagaggggaacgaagtctttcttccattcacttgggttgagaaatattttgatgtttatggaaaggtggttcagtatgatggctatgatcggtttgaattctctcatagctattccaaagtctatgcacagagagccccctatcaccccgatggtgtgtttatgtcttttgaaggctacaatgtggaagtccgagacagagtcaagtgcataagtggggttgaaggtgtgccattatctacacaatggggacctcaaggctatttctatccaatccagattgcacagtatggattaagtcattacagcaagaatctaactgagaaacctcctcacatagaggtatatgaaacagcagaagacagagacaaaaacaagcctaatgactggactgtgccaaagggctgctttatggcgaatgtggctgataagtctagattcaccaatgtcaaacagtttattgcaccagaaaccagtgaaggtgtatccttgcaactgggaaacacaaaagattttattatttcatttgacctcaagttcttgacaaatggaagtgtgtccgtggttctagagaccacagaaaagaatcagctcttcactatacattatgtctcaaatgctcagctaattgcttttaaagaaagagatatatactatggcattgggcccagaacttcatggagcacagttaccagggacctggtcactgacctcaggaaaggagtgggtctttcaaacacaaaagctgtcaagccaaccaaaataatgcccaagaaggtggttaggttgattgcaaaaggtaagggattcctcgacaacattaccatctctaccacagcccacatggctgcattttttgctgctagtgattggctagtaaggaaccaggatgagaaaggtggctggccaattatggtgacccgtaagttaggggaagggttcaagtctttagagccaggatggtattctgccatggcccaagggcaagccatttctacattagtcagggcctatctgttaacaaaagaccatatattcctcaattcagctttaagggcaacagccccttataagtttctatctgagcagcayggagttaaagctgtgtttatgaataaacatgactggtatgaagaatatccaaccacacctagctcttttgttttaaatggctttatgtattctttaattgggctgtatgacttaaaagaaactgcaggggaaaaactcggaaaagaagcaaggtccttgtatgagcgtggcatggaatctcttaaagccatgctgcccttgtatgacactggctcaggaaccatctatgacctccgtcacttcatgcttggcatcgctcctaacctggctcgctgggactatcataccacccacatcaatcagttgcagctactcagtaccattgatgagtccccartcttcaaagaatttgtcaagaggtggaaaagctaccttaaaggcagcagggcaaagcacaactagagctcacaaccaaaactgcacttcagcctctgctgtacacagaaactacaggctctgtctcaggagagcataggcacattttaaaaggttatgtactaggtttttgtggattctatcaaagtgataagtgatccttaaaaccagccttctaaaataattgcattccatgggttgggtatttagaaatgtaggtggcatttagaacacaatgtttaatcaatgggctgaacaaagatgcttcactttgccttgcccatcaccctatacagtttcgcagatagtctagtcactctatgtgagaaagataatggtaagtagttgctactggccaactgtctagcacttacctgaaaacttagtatggagctcttttaaaatgtgattatttatatttatgttgaaagcggactttaaaaaaaataatgtgctgtaacacagtaaatatgtacttgtagcctggatagcagactgtgttcaactttttaaaaagatgtttcctttctawagattaatttcttgggagcaaatgagtatttgytgcatttgttcaatttgttgtatatggtgaatatttaattatggttttcttgaaacgtgtaaattaaaaacacaatcagtgttcaggcttcagttatataatgtaagcacaactaaaatgaaacttgttgactgcacaagaaattacaaaaatgtttctgttttgaaacttgatctacaatcagtaaaagtttgataatcagtatatcccttcccaacccccattgtgacagtttctttttgtcactgtctagaattttgtattttatttcagactataccttggagttttgtatattttgagagagatatttttgggacattattttggaaacttattacaaatctaaatttggaaaggagctagtagctttaaggccaccaccatattttacttttttaggatttttccccctttaaataaaaatattagatcaaatactatatgcaagaaatcatagcaaagtttttttttcctaccaagatcattcttgatcatcagcttcccaaactagtaagtctgtgcatcattgggtgtttttttttaatttaattttaaattatcccagctattagatagaagggatgttactgcacttatgtgtaatcagatctttatttaggtatacatatcctcctataccgcacataaatagatttcagagcccccatacaatgggcagtgtctgctatagggcttcaggcattaaataaaaccgagggttgttgattttgctgtgacagtacactaaatcaatrctatatcttatacagtttgaaaatatgataccctacactttcaggggaccgagtctgacaaacacaatacatttatctgtgacctatatcaagtacacatttaggagccaggtaggttacctgcttacacactatattttaattgaattcaaactatcaagcactacttagaaactggaaaacatatatatgttagcatcaaagggggcagaagcaaagaagatacagatctgcactgaagacattagactggccatagaaaagtaagcttgaactcccaattgatgtgaccacactcttcttaattttgttcacagtaaaaacacttttttgagttattaggcttacccctagcttttgacctttgcatttcatrtatgttagatgtctcagcaagaatatctggtctcccctaatttttattcccagtgccgatgttcaaaataaactttctccagtctgggaaccttttttacttccccatatttgttattatttagaatggttcatacgtctgctttgtttgcatactggtcttcagattatgagactcgatgataacagtatggtactgcttctgtgacaaatatcgtgccttaacaatgtggctgtccttttccactgaagaaggaaagacgttttgatctagaaatagcgttgtgatttccttgctgttggttttacactgccttccacattgcaacagcaagttgatttcttgtgatcccagaattttctaagaggatgagttgaatctatagcagcattgtcagtacagagggttttaaattatgtaaaatgtttacttattctgagcttagagagaatggggagggtatttttaaattttattgttttatttctttaagtttttctttgctttaagattataggtattaggtttgtttttgtttttccacttatcttgagttcactttgatgttaaatctattgctacttcagttgtaaaaccagccaaaagtttctggatgaaggtcaagtttgaccttttaggagttattgtacataaaggcttcatccacgaaccatccagcgcacagaagcaagtgcaaaaatgacacaagcacaactctccagacgtggctccttctcctttctcagtgcagactctcactgaaagctgctattttcatcctccttgtggttgcttttcttgtttctcttccattgtacatgtgggttatataccatatgttaaatatgcaataaagtgtttacaggatgyccttctgaagggtagtcctttgtaaagctgtacagactttgcagtttaagcacaatgtgcacatgttagttttatatacagcaaaacttgattttttgcagatggaaaggtattttgtttctatacaaagtaaatggattgtttgtgcttaatgtaaagccgctttataaaactgtaaaataaagtttttttcttaaaaagaatatacctg

SEQ ID NO: 4573 - DNA, 2043 bp, Homo sapiens
tcctcccggggtttgtagcggaggaggagcgggcgccatggcggttctactggagaccactttaggcgacgtcgtcatcgacttgtacaccgaagaacggccgcgtgcctgcttgaatttcttgaaactgtgcaaaataaaatattacaattattgccttattcacaatgtacagagggattttatcatacaaactggcgatcckacagggactggccgtggaggagagtctatctttggccaactgtatggtgatcaagcaagcttttttgaggcagaaaaagtcccaagaattaagcacaagaagaaaggcacagtgtccatggtgaataatggcagtgatcaacatggatctcagtttcttatcaccacaggagaaaatctagattatcttgatggtgtccatacggtgtttggtgaggtgacagaaggcatggacataattaagaaaattaatgagacctttgttgacaaggactttgtaccatatcaggatatcaggataaatcatacggtgattttagatgatccatttgatgaccctcctgatttattaatccctgatcgatcaccagaacctacaagggaacaattagatagtggtcgaataggagcagatgaagaaattgatgatttcaaaggaagatcagctgaggaagtagaagaaataaaggcagaaaaagaggctaaaactcaggctatacttttggagatggtgggagacctacctgatgcagatattaaacctccagaaaatgtactgtttgtgtgtaaattgaacccagtgaccacagatgaggatctggaaataatattctctagatttgggccaataagaagttgtgaagttatccgagactggaagacaggagagtccctstgttacgcttttattgaatttgaaaaggaagaagattgtgagaaagcattcttcaaaatggacaatgtgcttatagatgacagaagaatacatgtggattttagccagtcggttgcaaaggttaaatggaaaggaaaaggtgggaaatacaccaagagtgatttcaaggagtatgaaaaagaacaggataaaccacctaatttggttctgaaagataaagtaaagcccaaacaggatacaaaatacgatcttatattagatgagcaggccgaagactcaaaatcaagtcactcacacacaagtaaaaaacacaagaagaaaacccatcactgttctgaagagaaagaagatgaggactacatgccaatcaaaaatactaatcaggatatctatagagaaatggggtttggtcactatgaagaagaagaaagctgttgggagaaacaaaagagtgaaaagagagaccgaactcagaaccgaagtcgtagccgatctcgagagagggatggccattatagtaatagtcataaatcaaaataccaaacagatctttatgaaagagaaaggagtaaaaagagagaccgaagcagaagtccaaagaagtccaaagataaagaaaaatctaagtatagatgaaagatgaagaggcagaattgagaggctaacatatttactcttgtctaacttaagagtgccaggaaagcagatgcttagattttgtgtcaaagcttgttatttttttcatactaggattatggtctttagattaatactgattatatagagcacggaaagataaagaattgaacattttctttgtatacttttttacactaattttattgttatacataaatggtagtcttcatttttgaagtcttacattttcactctttttttaatgaagtatttcatactacaaaaatacataaacgtatatataaagggataataaatgtaaatatctgtgtactcatcagccagcttaagatacagatgttgtcgacattttagaagttccctaaggccctctccctctcaaataattatttggaattttgtgtttgtcatttgtctattatagttttacaacatacgtatgtatctgtaagtgaaatgttaattttgtatgtttctgaattttatataaatggcaaaatgtt

SEQ ID NO: 4574 - DNA, 1431 bp, Homo sapiens
tcctcccggggtttgtagcggaggaggagcgggcgccatggcggttctactggagaccactttaggcgacgtcgtcatcgacttgtacaccgaagaacggccgcgtgcctgcttgaatttcttgaaactgtgcaaaataaaatattacaattattgccttattcacaatgtacagagggattttatcatacaaactggcgatcckacagggactggccgtggaggagagtctatctttggccaactgtatggtgatcaagcaagcttttttgaggcagaaaaagtcccaagaattaagcacaagaagaaaggcacagtgtccatggtgaataatggcagtgatcaacatggatctcagtttcttatcaccacaggagaaaatctagattatcttgatggtgtccatacggtgtttggtgaggtgacagaaggcatggacataattaagaaaattaatgagacctttgttgacaaggactttgtaccatatcaggatatcaggataaatcatacggtgattttagatgatccatttgatgaccctcctgatttattaatccctgatcgatcaccagaacctacaagggaacaattagatagtggtcgaataggagcagatgaagaaattgatgatttcaaaggaagatcagctgaggaagtagaagaaataaaggcagaaaaagaggctaaaactcaggctatacttttggagatggtgggagacctacctgatgcagatattaaacctccagaaaatgtactgtttgtgtgtaaattgaacccagtgaccacagatgaggatctggaaataatattctctagatttgggccaataagaagttgtgaagttatccgagactggaagacaggagagtccctstgttacgcttttattgaatttgaaaaggaagaagattgtgagaaagcattcttcaaaatggacaatgtgcttatagatgacagaagaatacatgtggattttagccagtcggttgcaaaggttaaatggaaaggaaaaggtgggaaatacaccaagagtgatttcaaggagtatgaaaaagaacaggataaaccacctaatttggttctgaaagataaagtaaagcccaaacaggatacaaaatacgatcttatattagatgagcaggccgaagactcaaaatcaagtcactcacacacaagtaaaaaacacaagaagaaaacccatcactgttctgaagagaaagaagatgaggactacatgccaatcaaaaatactaatcaggatatctatagagaaatggggtttggtcactatgaagaagaagaaagctgttgggagaaacaaaagaggatggccattatagtaatagtcataaatcaaaataccaaacagatctttatgaaagagaaaggagtaaaaagagagaccgaagcagaagtccaaagaag

SEQ ID NO: 4575 - DNA, 8499 bp, Homo sapiens
atraatgatggatagctctctgaagcatgttagggatttgggctcagtccaaaagacagtggaaagccattgaaggctattattattaatttattttattttattttattttttcgatagagtctccttcccaggctggagtgcagtggcaatcttggctcactgcaacctccgcctcccaggttcaaggaattcttgtgcctcagcctcctgagtagccgggattagaggcatgtgccaccacgcccagccagttttttgtatttttagtagaaacagggtgttaccatgttggccaggctggtctctaactctgggtctgaagtgatccacccgccttggccttccaragtgctgggattacaggcgtacrcaccatcacacccagctaatttttgtgtttttagtagaaacagtgtcaaccttgttggccaggctggtttggtactcytggcctcaagtgatctgcccgccttggcctcccagagtgctgggattactggcatgagccaccatgcatagccaccattgaagggttttaagcagaggagtgataaaatacttgccctttggaaaaaaatcattctggcgtccacattcagactggtttagaggagagtaatactgaagacatgcccccccgaatcaaggtagcaattgcggagatgaaaagaaatgagttcaaaagatacttaaatgtgaccattgaacaggatttgactcattggatatgaggccatggagcagtgtctggctaggtggatggatgttggtgctgtttagttaaataggaaactggaagagaagcaggcttgcaagaakggtaatattttggacgtgtaacttgtctggcaagatgttgaagaggtaaaggaggcagcacagcatcatgggccttggaggcagaagccgctttgatttactcagaacaccaaatcagtctccattttcttgactcagactacacccaagagattgcttccttccctgtgcttcctggccacttgctactctagctaggaagatctgcctcccttagctgaagtctaagatgtgtagcttattgatgcctctcctcttcttgttctgctgttgctgaakataatggggatgccagggcagacataccattcaacttgaatcttccttacccactttgtatagtcttacatrtcattgataccttgttttctggtacgcctaaaaggagtagaacttcaagtggtatttaaaagctttaagaaaagtcaaatttttacttttttcttcccatctgaggaatggatttattttctttttaaagaaatccaaatttttaaaagaagggatcttatttttaaaacgaagatcgataatatctactatgtactaaatgtcattctttaaaagttgttccctcataatttagtaaattacttccttttttaaaaaaaggaaagaaagagtgtttgtcttacaggctaacatcacaaacaataagtttcttctcatccatctccatttataaactagtgtgactgtcttctgagcacagtattaaacctggacagggagagggagggtgttagagaatgagaggaaaagagagagaatacctacatataaggtgaccctaaagaaaagcctttcacccttcggaagatcttttcattttcatttttctttttttcaaacaccaacttgtaccagagggaagatctttttttaaaagtgtttcactaaaatttgtaaggaaataatgagctagataaaatattacagtgtttatttaatgaatttactcatatttaaaataatatctaaaaagagtaatttaggaatattgaggcaatgagacttgaaggttataaatagtggcagtgagaaaaggaatattatagataagctgttgaaaagaaaagatgctaagttttctagtgcttccttctgtttccaagggattatagaaatcggagtttgtttgacctgtttcacaggcatctcctttgtggactcattgtgtctcttccttaggctaatagtcaccatttatcatggacggttgtcatgagtgttgaagcacacttaacctgcttcgtcagagggtacttggcatcaccggtgcacagctggtgtcctagcaggagactaactagctgacacaccgtgctttgttagcctaataatcttatttgttaaaacttgccatttgttggatttttctattttaccccattataaacttcttattgagatcagatgacttctgaatagcatttgctgtatttttccaaggtaaagaatatctttttcagatttttctttctttctttaatttcagaaatagaagaaatcttttctaccgaccttgtgccaggagatgtcatggtcattccattaaatgggacaataatgccttgtgatgctgtgcttattaatggtacctgcattgtaaacgaaagcatgttaacaggagaaagtgttccagtgacaaagactaatttgccaaatccttcagtggatgtgaaaggaataggagatgaattatataatccagaaacacataaacgacatactttgttttgtgggacaactgttattcagactcgtttctacactggagaactcgtcaaagccatagttgttagaacaggatttagtacttccaaaggacagcttgttcgttccatattgtatcccaaaccaactgattttaaactctacagagatgcctacttgtttctactatgtcttgtggcagttgctggcattgggtttatctacactattattaatagcattttaaatgaggtacaagttggggtcataattatcgagtctcttgatattatcacaattactgtgccccctgcacttcctgctgcaatgactgctggtattgtgtatgctcagagaagactgaaaaaaatcggtattttctgtatcagtcctcaaagaataaatatttgtggacagctcaatcttgtttgctttgacaagactggaactctaactgaagatggtttagatctttgggggattcaacgagtggaaaatgcacgatttctttcaccagaagaaaatgtgtgcaatgagatgttggtaaaatcccagtttgttgcttgtatggctacttgtcattcacttacaaaaattgaaggagtgctctctggtgatccacttgatctgaaaatgtttgaggctattggatggattctggaagaagcaactgaagaagaaacagcacttcataatcgaattatgcccacagtggttcgtcctcccaaacaactgcttcctgaatctacccctgcaggaaaccaagaaatggagctgtttgaacttccagctacttatgagataggaattgttcgccagttcccattttcttctgctttgcaacgtatgagtgtggttgccagggtgctgggggataggaaaatggacgcctacatgaaaggagcgcccgaggccattgccggtctctgtaaacctgaaacagttcctgtcgattttcaaaacgttttggaagacttcactaaacagggcttccgtgtgattgctcttgcacacagaaaattggagtcaaaactgacatggcataaagtacagaatattagcagagatgcaattgagaacaacatggattttatgggattaattataatgcagaacaaattaaagcaagaaacccctgcagtacttgaagatttgcataaagccaacattcgcaccgtcatggtcacaggtgacagtatgttgactgctgtctctgtggccagagattgtggaatgattctacctcaggataaagtgattattgctgaagcattacctccaaaggatgggaaagttgccaaaataaattggcattatgcagactccctcacgcagtgcagtcatccatcagcaattgacccagaggctattccggttaaattggtccatgatagcttagaggatcttcaaatgactcgttatcattttgcaatgaatggaaaatcattctcagtgatactggagcattttcaagaccttgttcctaagttgatgttgcatggcaccgtgtttgcccgtatggcacctgatcagaagacacagttgatagaagcattgcaaaatgttgattattttgttgggatgtgtggtgatggcgcaaatgattgtggtgctttgaagagggcacacggaggcatttccttatcggagctcgaagcttcagtggcatctccctttacctctaagactcctagtatttcctgtgtgccaaaccttatcagggaaggccgtgctgctttaataacttccttctgtgtgtttaaattcatggcattgtacagcattatccagtacttcagtgttactctgctgtattctatcttaagtaacctaggagacttccagtttctcttcattgatctggcaatcattttggtagtggtatttacaatgagtttaaatcctgcctggaaagaacttgtggcacaaagaccaccttcgggtcttatatctggggcccttctcttctccgttttgtctcagattatcatctgcattggatttcaatctttgggttttttttgggtcaaacagcaaccttggtatgaagtgtggcatccaaaatcagatgcttgtaatacaacaggaagcgggttttggaattcttcacacgtagacaatgaaaccgaacttgatgaacataatatacaaaattatgaaaataccacagtgttttttatttccagttttcagtacctcatagtggcaattgccttttcaaaaggaaaacccttcaggcaaccttgctacaaaaattatttttttgttttttctgtgatttttttatatatttttatattattcatcatgttgtatccagttgcctctgttgaccaggttcttcagatagtgtgtgtaccatatcagtggcgtgtaactatgctcatcattgttcttgtcaatgcctttgtgtctatcacagtggagaacttcttccttgacatggtcctttggaaagttgtgttcaaccgagacaaacaaggagagtatcggttcagcaccacacagccaccgcaggagtcagtggatcggtggggaaaatgctgcttaccctgggccctgggctgtagaaagaagacaccaaaggcaaagtacatgtatctggcgcaggagctcttggttgatccagaatggccaccaaaacctcagacaaccacagaagctaaagctttagttaaggagaatggatcatgtcaaatcatcaccataacatagcagtgaatcagtctcagtggtattgctgatagcagtattcaggaatatgtgattttaggagtttctgatcctgtgtgtcagaatggcactagttcagtttatgtcccttctgatatagtagcttatttgacagctttgctcttccttaaaataaaaacagaaaaatatatcgtcctaacagttaaattaacaatcaatccataaagtcctatatcttcattcagcaacccaaatattacatacatttccagaattttcttgattgttactttcagtgatattctttatattgggtacaggagaagtttggtgtttggtaggtttttcaacattagtttttgagactagtttacctcttcacatttatgctcacaaccctcttgttagaaaagtctgtgtttatatacaggctgtaagtttgtgattgataaaaagaagatgagtgttaattagcctccagtgaaaatatactgaaagcctgttttcatttgattccaatgtttcttccaaagaattctgtataaacatatgccaattccctatgatggtctagagttaggaatgagtgtttatggtgttgcttatagaacaactcaggtaatctccatttctggttttatattttctgtacaaactgcctgggttttatttttctaatcagcaaggtgcttcactgccttcttgagacgcctctcaaagctcttaaatggctcctgtgctatgtgtggtgttggcagtctaatttgcttctgttaaatgttgtagaacctttttcactaggaaataagattcatttctttcggcagtagatgtagattcatcttttaacgtttcttcaaatttgtttctgtcaggctttgtgttattttaaatggttttttaaaattttcttctatgttttcaattacctaaagacataggataatagttttttttaagttagaattttacctcataaaattttttgaggtttgatgtatgtctctgtcttatcaataatgaggcttaaaaaatactggatttgaatggctgccgttttttcaaagcaatatgaatttgatgagtttgttttatgccattaggtggcgccagaggtcagaacatgtctattttgaattggatcrttacaaatgagcatatttgatgcggaaatttctgggagaaaaaaaattgaggaaataaagttaaaaaattgacattcattgagccaaaagagatgtggagaaacatttttcacctttctgtttggcctgattaacatttaaattcttgccaaaattaaggtaacttttaaaaaacaccttttataggtggatccagcagtctggcaacgcccacagttaccacaacacagaaaactgatcgtgctataaaatggacgctaaactatgaaaacagtgtgacattgttctctgttcttccagagccagtaacatgcttgctcgtgctttctacttctagctgatcattcttttcccaacatatatttacaaatttaccaaattttacctagaattttaggaccaaatggttctcactctttatgctgcaaagacctggatgatgtttggtaactatagaaaaatagaaattacactcaggatcactgttactgctattgccactgatgattcctgcaaaaatataatcgaagttttccatcaaatgtataatatgctattaatacacattagatgataacagttgttccatgaatgattctatgaagctatgcatcttagacctcttgagctgtgaattagcactattttctatagttacttattctctggatcattttataatttccatattaatttcaaatatgctcgtgttattcttcagtgatttccacaattgtgcattttattctttggtttaagtactgaagcatataatgaaagtaattgctaagtagcagcttaaaaattcaattatccgattgtatttaacatctttaagagcatgatcataaagagctatttttgacaccccccccccacttttttaacatttagagttartaagggttttatatctcttctgtccatattgttttcaaaggaatgaggtgtttaggtggctggaaaagcatttgtaggaagttagatttgaatatagacaaggtgggttattcacgttgagaatgttatttgaagaatgcctgtgaagccaggtgtgggttctactcagtgccatagatagactgagtcttctctcgtaggtyaccattacatagtaattttgattctgaatttcacattaaattatttgagtttatacagacctaaattttaaaatctgtacatatattattttgatgtattaagatgaatattgctgatttaaattttatttatgcacatacttaaaggacagaaatgtctgggaaagtaattgttaaataatgatatgtaactttttaactttttaaataaataacaagatttttaatgtgtgtctccctcagggttgtttaaagttttttttctccctcaagtataaatagtggtaactatatgttttgtatcttctagcaccaactgctgtaaagcaatgctgcaaataatgcttgaatacaagtggctaagccaacaacagaataaatacttttatagtagttttataatcctgaaattcgaaagctttcccaattgcacttgcatctaaacaaaactgttgcagtttttactctatttattttgttccccatgtttatgaaagtcctgcacagtttcaaaggcatggtaaataatatatcaatgtttatgtagtctgttacagaaacagctatagataacattatccagtgaagagcaaaattcaagctttagaaaatattcatgcatgcaattttgacatatctaaaaataggtttttgtatatttatggtgggaggtggttgggaacttttaacaaaatggggtgttaatttttgtacagtctgtgggcatttacacatttttaatgtattaaaatttggtaattatgtgtacattaaattaataaaagttacttctagttatgatttgtgaattccctaagaccttggatttttttaagtaactttatatcagaaatgatactgcatctttatatttttaaaattgtattgctgctcaagaatggtaccctcttgtcaaaaaggcatacattcataattgtacattcagcattgtaaataatcttatgaaaccttttttgattgaagctattcaaaataaaaattttaatgaatgaaataac

SEQ ID NO: 4576 - DNA, 5785 bp, Homo sapiens
atraatgatggatagctctctgaagcatgttagggatttgggctcagtccaaaagacagtggaaagccattgaaggctattattattaatttattttattttattttattttttcgatagagtctccttcccaggctggagtgcagtggcaatcttggctcactgcaacctccgcctcccaggttcaaggaattcttgtgcctcagcctcctgagtagccgggattagaggcatgtgccaccacgcccagccagttttttgtatttttagtagaaacagggtgttaccatgttggccaggctggtctctaactctgggtctgaagtgatccacccgccttggccttccaragtgctgggattacaggcgtacrcaccatcacacccagctaatttttgtgtttttagtagaaacagtgtcaaccttgttggccaggctggtttggtactcytggcctcaagtgatctgcccgccttggcctcccagagtgctgggattactggcatgagccaccatgcatagccaccattgaagggttttaagcagaggagtgataaaatacttgccctttggaaaaaaatcattctggcgtccacattcagactggtttagaggagagtaatactgaagacatgcccccccgaatcaaggtagcaattgcggagatgaaaagaaatgagttcaaaagatacttaaatgtgaccattgaacaggatttgactcattggatatgaggccatggagcagtgtctggctaggtggatggatgttggtgctgtttagttaaataggaaactggaagagaagcaggcttgcaagaakggtaatattttggacgtgtaacttgtctggcaagatgttgaagaggtaaaggaggcagcacagcatcatgggccttggaggcagaagccgctttgatttactcagaacaccaaatcagtctccattttcttgactcagactacacccaagagattgcttccttccctgtgcttcctggccacttgctactctagctaggaagatctgcctcccttagctgaagtctaagatgtgtagcttattgatgcctctcctcttcttgttctgctgttgctgaakataatggggatgccagggcagacataccattcaacttgaatcttccttacccactttgtatagtcttacatrtcattgataccttgttttctggtacgcctaaaaggagtagaacttcaagtggtatttaaaagctttaagaaaagtcaaatttttacttttttcttcccatctgaggaatggatttattttctttttaaagaaatccaaatttttaaaagaagggatcttatttttaaaacgaagatcgataatatctactatgtactaaatgtcattctttaaaagttgttccctcataatttagtaaattacttccttttttaaaaaaaggaaagaaagagtgtttgtcttacaggctaacatcacaaacaataagtttcttctcatccatctccatttataaactagtgtgactgtcttctgagcacagtattaaacctggacagggagagggagggtgttagagaatgagaggaaaagagagagaatacctacatataaggtgaccctaaagaaaagcctttcacccttcggaagatcttttcattttcatttttctttttttcaaacaccaacttgtaccagagggaagatctttttttaaaagtgtttcactaaaatttgtaaggaaataatgagctagataaaatattacagtgtttatttaatgaatttactcatatttaaaataatatctaaaaagagtaatttaggaatattgaggcaatgagacttgaaggttataaatagtggcagtgagaaaaggaatattatagataagctgttgaaaagaaaagatgctaagttttctagtgcttccttctgtttccaagggattatagaaatcggagtttgtttgacctgtttcacaggcatctcctttgtggactcattgtgtctcttccttaggctaatagtcaccatttatcatggacggttgtcatgagtgttgaagcacacttaacctgcttcgtcagagggtacttggcatcaccggtgcacagctggtgtcctagcaggagactaactagctgacacaccgtgctttgttagcctaataatcttatttgttaaaacttgccatttgttggatttttctattttaccccattataaacttcttattgagatcagatgacttctgaatagcatttgctgtatttttccaaggtaaagaatatctttttcagatttttctttctttctttaatttcagaaatagaagaaatcttttctaccgaccttgtgccaggagatgtcatggtcattccattaaatgggacaataatgccttgtgatgctgtgcttattaatggtacctgcattgtaaacgaaagcatgttaacaggagaaagtgttccagtgacaaagactaatttgccaaatccttcagtggatgtgaaaggaataggagatgaattatataatccagaaacacataaacgacatactttgttttgtgggacaactgttattcagactcgtttctacactggagaactcgtcaaagccatagttgttagaacaggatttagtacttccaaaggacagcttgttcgttccatattgtatcccaaaccaactgattttaaactctacagagatgcctacttgtttctactatgtcttgtggcagttgctggcattgggtttatctacactattattaatagcattttaaatgaggtacaagttggggtcataattatcgagtctcttgatattatcacaattactgtgccccctgcacttcctgctgcaatgactgctggtattgtgtatgctcagagaagactgaaaaaaatcggtattttctgtatcagtcctcaaagaataaatatttgtggacagctcaatcttgtttgctttgacaagactggaactctaactgaagatggtttagatctttgggggattcaacgagtggaaaatgcacgatttctttcaccagaagaaaatgtgtgcaatgagatgttggtaaaatcccagtttgttgcttgtatggctacttgtcattcacttacaaaaattgaaggagtgctctctggtgatccacttgatctgaaaatgtttgaggctattggatggattctggaagaagcaactgaagaagaaacagcacttcataatcgaattatgcccacagtggttcgtcctcccaaacaactgcttcctgaatctacccctgcaggaaaccaagaaatggagctgtttgaacttccagctacttatgagataggaattgttcgccagttcccattttcttctgctttgcaacgtatgagtgtggttgccagggtgctgggggataggaaaatggacgcctacatgaaaggagcgcccgaggccattgccggtctctgtaaacctgaaacagttcctgtcgattttcaaaacgttttggaagacttcactaaacagggcttccgtgtgattgctcttgcacacagaaaattggagtcaaaactgacatggcataaagtacagaatattagcagagatgcaattgagaacaacatggattttatgggattaattataatgcagaacaaattaaagcaagaaacccctgcagtacttgaagatttgcataaagccaacattcgcaccgtcatggtcacaggtgacagtatgttgactgctgtctctgtggccagagattgtggaatgattctacctcaggataaagtgattattgctgaagcattacctccaaaggatgggaaagttgccaaaataaattggcattatgcagactccctcacgcagtgcagtcatccatcagcaattgacccagaggctattccggttaaattggtccatgatagcttagaggatcttcaaatgactcgttatcattttgcaatgaatggaaaatcattctcagtgatactggagcattttcaagaccttgttcctaagttgatgttgcatggcaccgtgtttgcccgtatggcacctgatcagaagacacagttgatagaagcattgcaaaatgttgattattttgttgggatgtgtggtgatggcgcaaatgattgtggtgctttgaagagggcacacggaggcatttccttatcggagctcgaagcttcagtggcatctccctttacctctaagactcctagtatttcctgtgtgccaaaccttatcagggaaggccgtgctgctttaataacttccttctctgtgaattagcactattttctatagttacttattctctggatcattttataatttccatattaatttcaaatatgctcgtgttattcttcagtgatttccacaattgtgcattttattctttggtttaagtactgaagcatataatgaaagtaattgctaagtagcagcttaaaaattcaattatccgattgtatttaacatctttaagagcatgatcataaagagctatttttgacaccccccccccacttttttaacatttagagttartaagggttttatatctcttctgtccatattgttttcaaaggaatgaggtgtttaggtggctggaaaagcatttgtaggaagttagatttgaatatagacaaggtgggttattcacgttgagaatgttatttgaagaatgcctgtgaagccaggtgtgggttctactcagtgccatagatagactgagtcttctctcgtaggtyaccattacatagtaattttgattctgaatttcacattaaattatttgagtttatacagacctaaattttaaaatctgtacatatattattttgatgtattaagatgaatattgctgatttaaattttatttatgcacatacttaaaggacagaaatgtctgggaaagtaattgttaaataatgatatgtaactttttaactttttaaataaataacaagatttttaatgtgtgtctccctcagggttgtttaaagttttttttctccctcaagtataaatagtggtaactatatgttttgtatcttctagcaccaactgctgtaaagcaatgctgcaaataatgcttgaatacaagtggctaagccaacaacagaataaatacttttatagtagttttataatcctgaaattcgaaagctttcccaattgcacttgcatctaaacaaaactgttgcagtttttactctatttattttgttccccatgtttatgaaagtcctgcacagtttcaaaggcatggtaaataatatatcaatgtttatgtagtctgttacagaaacagctatagataacattatccagtgaagagcaaaattcaagctttagaaaatattcatgcatgcaattttgacatatctaaaaataggtttttgtatatttatggtgggaggtggttgggaacttttaacaaaatggggtgttaatttttgtacagtctgtgggcatttacacatttttaatgtattaaaatttggtaattatgtgtacattaaattaataaaagttacttctagttatgatttgtgaattccctaagaccttggatttttttaagtaactttatatcagaaatgatactgcatctttatatttttaaaattgtattgctgctcaagaatggtaccctcttgtcaaaaaggcatacattcataattgtacattcagcattgtaaataatcttatgaaaccttttttgattgaagctattcaaaataaaaattttaatgaatgaaataac

SEQ ID NO: 4577 - DNA, 6886 bp, Homo sapiens
caggagatttatggttacaatttgagtcgctggaagcttgccatagtttctttaggagtgatttgctctggtgggtttctcctcctcctcctctattggatgcctgagtggcgggtgaaagcgacctgtgtcagagctgcaattaaagactgtgaagtagtgctgctgaggactactgatgaattcaaaatgtggttttgtgcaaaaattcgcgttctttctttggaaacttacccagtttcaagtccaaaatctatgtctaataagctttcaaatggccatgcagtttgtttaattgagaatcccactgaagaaaataggcacaggatcagtaaatattcacagactgaatcacaacagattcgttatttcacccaccatagtgtaaaatatttctggaatgataccattcacaattttgatttcttaaagggactggatgaaggtgtttcttgtacgtcaatttatgaaaagcatagtgcaggactgacaaaggggatgcatgcctacagaaaactgctttatggagtaaatgaaattgctgtaaaagtgccttctgtttttaagcttctaattaaagaggttctcaacccattttacattttccagctgttcagtgttatactgtggagcactgatgaatactattactatgctctagctattgtggttatgtccatagtatcaatcgtaagctcactatattccattagaaagcaatatgttatgttgcatgacatggtggcaactcatagtaccgtaagagtttcagtttgtagagtaaatgaagaaatagaagaaatcttttctaccgaccttgtgccaggagatgtcatggtcattccattaaatgggacaataatgccttgtgatgctgtgcttattaatggtacctgcattgtaaacgaaagcatgttaacaggagaaagtgttccagtgacaaagactaatttgccaaatccttcagtggatgtgaaaggaataggagatgaattatataatccagaaacacataaacgacatactttgttttgtgggacaactgttattcagactcgtttctacactggagaactcgtcaaagccatagttgttagaacaggatttagtacttccaaaggacagcttgttcgttccatattgtatcccaaaccaactgattttaaactctacagagatgcctacttgtttctactatgtcttgtggcagttgctggcattgggtttatctacactattattaatagcattttaaatgaggtacaagttggggtcataattatcgagtctcttgatattatcacaattactgtgccccctgcacttcctgctgcaatgactgctggtattgtgtatgctcagagaagactgaaaaaaatcggtattttctgtatcagtcctcaaagaataaatatttgtggacagctcaatcttgtttgctttgacaagactggaactctaactgaagatggtttagatctttgggggattcaacgagtggaaaatgcacgatttctttcaccagaagaaaatgtgtgcaatgagatgttggtaaaatcccagtttgttgcttgtatggctacttgtcattcacttacaaaaattgaaggagtgctctctggtgatccacttgatctgaaaatgtttgaggctattggatggattctggaagaagcaactgaagaagaaacagcacttcataatcgaattatgcccacagtggttcgtcctcccaaacaactgcttcctgaatctacccctgcaggaaaccaagaaatggagctgtttgaacttccagctacttatgagataggaattgttcgccagttcccattttcttctgctttgcaacgtatgagtgtggttgccagggtgctgggggataggaaaatggacgcctacatgaaaggagcgcccgaggccattgccggtctctgtaaacctgaaacagttcctgtcgattttcaaaacgttttggaagacttcactaaacagggcttccgtgtgattgctcttgcacacagaaaattggagtcaaaactgacatggcataaagtacagaatattagcagagatgcaattgagaacaacatggattttatgggattaattataatgcagaacaaattaaagcaagaaacccctgcagtacttgaagatttgcataaagccaacattcgcaccgtcatggtcacaggtgacagtatgttgactgctgtctctgtggccagagattgtggaatgattctacctcaggataaagtgattattgctgaagcattacctccaaaggatgggaaagttgccaaaataaattggcattatgcagactccctcacgcagtgcagtcatccatcagcaattgacccagaggctattccggttaaattggtccatgatagcttagaggatcttcaaatgactcgttatcattttgcaatgaatggaaaatcattctcagtgatactggagcattttcaagaccttgttcctaagttgatgttgcatggcaccgtgtttgcccgtatggcacctgatcagaagacacagttgatagaagcattgcaaaatgttgattattttgttgggatgtgtggtgatggcgcaaatgattgtggtgctttgaagagggcacacggaggcatttccttatcggagctcgaagcttcagtggcatctccctttacctctaagactcctagtatttcctgtgtgccaaaccttatcagggaaggccgtgctgctttaataacttccttctgtgtgtttaaattcatggcattgtacagcattatccagtacttcagtgttactctgctgtattctatcttaagtaacctaggagacttccagtttctcttcattgatctggcaatcattttggtagtggtatttacaatgagtttaaatcctgcctggaaagaacttgtggcacaaagaccaccttcgggtcttatatctggggcccttctcttctccgttttgtctcagattatcatctgcattggatttcaatctttgggttttttttgggtcaaacagcaaccttggtatgaagtgtggcatccaaaatcagatgcttgtaatacaacaggaagcgggttttggaattcttcacacgtagacaatgaaaccgaacttgatgaacataatatacaaaattatgaaaataccacagtgttttttatttccagttttcagtacctcatagtggcaattgccttttcaaaaggaaaacccttcaggcaaccttgctacaaaaattatttttttgttttttctgtgatttttttatatatttttatattattcatcatgttgtatccagttgcctctgttgaccaggttcttcagatagtgtgtgtaccatatcagtggcgtgtaactatgctcatcattgttcttgtcaatgcctttgtgtctatcacagtggagaacttcttccttgacatggtcctttggaaagttgtgttcaaccgagacaaacaaggagagtatcggttcagcaccacacagccaccgcaggagtcagtggatcggtggggaaaatgctgcttaccctgggccctgggctgtagaaagaagacaccaaaggcaaagtacatgtatctggcgcaggagctcttggttgatccagaatggccaccaaaacctcagacaaccacagaagctaaagctttagttaaggagaatggatcatgtcaaatcatcaccataacatagcagtgaatcagtctcagtggtattgctgatagcagtattcaggaatatgtgattttaggagtttctgatcctgtgtgtcagaatggcactagttcagtttatgtcccttctgatatagtagcttatttgacagctttgctcttccttaaaataaaaacagaaaaatatatcgtcctaacagttaaattaacaatcaatccataaagtcctatatcttcattcagcaacccaaatattacatacatttccagaattttcttgattgttactttcagtgatattctttatattgggtacaggagaagtttggtgtttggtaggtttttcaacattagtttttgagactagtttacctcttcacatttatgctcacaaccctcttgttagaaaagtctgtgtttatatacaggctgtaagtttgtgattgataaaaagaagatgagtgttaattagcctccagtgaaaatatactgaaagcctgttttcatttgattccaatgtttcttccaaagaattctgtataaacatatgccaattccctatgatggtctagagttaggaatgagtgtttatggtgttgcttatagaacaactcaggtaatctccatttctggttttatattttctgtacaaactgcctgggttttatttttctaatcagcaaggtgcttcactgccttcttgagacgcctctcaaagctcttaaatggctcctgtgctatgtgtggtgttggcagtctaatttgcttctgttaaatgttgtagaacctttttcactaggaaataagattcatttctttcggcagtagatgtagattcatcttttaacgtttcttcaaatttgtttctgtcaggctttgtgttattttaaatggttttttaaaattttcttctatgttttcaattacctaaagacataggataatagttttttttaagttagaattttacctcataaaattttttgaggtttgatgtatgtctctgtcttatcaataatgaggcttaaaaaatactggatttgaatggctgccgttttttcaaagcaatatgaatttgatgagtttgttttatgccattaggtggcgccagaggtcagaacatgtctattttgaattggatcrttacaaatgagcatatttgatgcggaaatttctgggagaaaaaaaattgaggaaataaagttaaaaaattgacattcattgagccaaaagagatgtggagaaacatttttcacctttctgtttggcctgattaacatttaaattcttgccaaaattaaggtaacttttaaaaaacaccttttataggtggatccagcagtctggcaacgcccacagttaccacaacacagaaaactgatcgtgctataaaatggacgctaaactatgaaaacagtgtgacattgttctctgttcttccagagccagtaacatgcttgctcgtgctttctacttctagctgatcattcttttcccaacatatatttacaaatttaccaaattttacctagaattttaggaccaaatggttctcactctttatgctgcaaagacctggatgatgtttggtaactatagaaaaatagaaattacactcaggatcactgttactgctattgccactgatgattcctgcaaaaatataatcgaagttttccatcaaatgtataatatgctattaatacacattagatgataacagttgttccatgaatgattctatgaagctatgcatcttagacctcttgagctgtgaattagcactattttctatagttacttattctctggatcattttataatttccatattaatttcaaatatgctcgtgttattcttcagtgatttccacaattgtgcattttattctttggtttaagtactgaagcatataatgaaagtaattgctaagtagcagcttaaaaattcaattatccgattgtatttaacatctttaagagcatgatcataaagagctatttttgacaccccccccccacttttttaacatttagagttartaagggttttatatctcttctgtccatattgcgttgagaatgttatttgaagaatgcctgtgaagccaggtgtgggttctactcagtgccatagatagactgagtcttctctcgtaggtyaccattacatagtaattttgattctgaatttcacattaaattatttgagtttatacagacctaaattttaaaatctgtacatatattattttgatgtattaagatgaatattgctgatttaaattttatttatgcacatacttaaaggacagaaatgtctgggaaagtaattgttaaataatgatatgtaactttttaactttttaaataaataacaagatttttaatgtgtgtctccctcagggttgtttaaagttttttttctccctcaagtataaatagtggtaactatatgttttgtatcttctagcaccaactgctgtaaagcaatgctgcaaataatgcttgaatacaagtggctaagccaacaacagaataaatacttttatagtagttttataatcctgaaattcgaaagctttcccaattgcacttgcatctaaacaaaactgttgcagtttttactctatttattttgttccccatgtttatgaaagtcctgcacagtttcaaaggcatggtaaataatatatcaatgtttatgtagtctgttacagaaacagctatagataacattatccagtgaagagcaaaattcaagctttagaaaatattcatgcatgcaattttgacatatctaaaaataggtttttgtatatttatggtgggaggtggttgggaacttttaacaaaatggggtgttaatttttgtacagtctgtgggcatttacacatttttaatgtattaaaatttggtaattatgtgtacattaaattaataaaagttacttctagttatgatttgtgaattccctaagaccttggatttttttaagtaactttatatcagaaatgatactgcatctttatatttttaaaattgtattgctgctcaagaatggtaccctcttgtcaaaaaggcatacattcataattgtacattcagcattgtaaataatcttatgaaaccttttttgattgaagctattcaaaataaaaattttaatgaatgaaataac

SEQ ID NO: 4578 - DNA, 5712 bp, Homo sapiens
atraatgatggatagctctctgaagcatgttagggatttgggctcagtccaaaagacagtggaaagccattgaaggctattattattaatttattttattttattttattttttcgatagagtctccttcccaggctggagtgcagtggcaatcttggctcactgcaacctccgcctcccaggttcaaggaattcttgtgcctcagcctcctgagtagccgggattagaggcatgtgccaccacgcccagccagttttttgtatttttagtagaaacagggtgttaccatgttggccaggctggtctctaactctgggtctgaagtgatccacccgccttggccttccaragtgctgggattacaggcgtacrcaccatcacacccagctaatttttgtgtttttagtagaaacagtgtcaaccttgttggccaggctggtttggtactcytggcctcaagtgatctgcccgccttggcctcccagagtgctgggattactggcatgagccaccatgcatagccaccattgaagggttttaagcagaggagtgataaaatacttgccctttggaaaaaaatcattctggcgtccacattcagactggtttagaggagagtaatactgaagacatgcccccccgaatcaaggtagcaattgcggagatgaaaagaaatgagttcaaaagatacttaaatgtgaccattgaacaggatttgactcattggatatgaggccatggagcagtgtctggctaggtggatggatgttggtgctgtttagttaaataggaaactggaagagaagcaggcttgcaagaakggtaatattttggacgtgtaacttgtctggcaagatgttgaagaggtaaaggaggcagcacagcatcatgggccttggaggcagaagccgctttgatttactcagaacaccaaatcagtctccattttcttgactcagactacacccaagagattgcttccttccctgtgcttcctggccacttgctactctagctaggaagatctgcctcccttagctgaagtctaagatgtgtagcttattgatgcctctcctcttcttgttctgctgttgctgaakataatggggatgccagggcagacataccattcaacttgaatcttccttacccactttgtatagtcttacatrtcattgataccttgttttctggtacgcctaaaaggagtagaacttcaagtggtatttaaaagctttaagaaaagtcaaatttttacttttttcttcccatctgaggaatggatttattttctttttaaagaaatccaaatttttaaaagaagggatcttatttttaaaacgaagatcgataatatctactatgtactaaatgtcattctttaaaagttgttccctcataatttagtaaattacttccttttttaaaaaaaggaaagaaagagtgtttgtcttacaggctaacatcacaaacaataagtttcttctcatccatctccatttataaactagtgtgactgtcttctgagcacagtattaaacctggacagggagagggagggtgttagagaatgagaggaaaagagagagaatacctacatataaggtgaccctaaagaaaagcctttcacccttcggaagatcttttcattttcatttttctttttttcaaacaccaacttgtaccagagggaagatctttttttaaaagtgtttcactaaaatttgtaaggaaataatgagctagataaaatattacagtgtttatttaatgaatttactcatatttaaaataatatctaaaaagagtaatttaggaatattgaggcaatgagacttgaaggttataaatagtggcagtgagaaaaggaatattatagataagctgttgaaaagaaaagatgctaagttttctagtgcttccttctgtttccaagggattatagaaatcggagtttgtttgacctgtttcacaggcatctcctttgtggactcattgtgtctcttccttaggctaatagtcaccatttatcatggacggttgtcatgagtgttgaagcacacttaacctgcttcgtcagagggtacttggcatcaccggtgcacagctggtgtcctagcaggagactaactagctgacacaccgtgctttgttagcctaataatcttatttgttaaaacttgccatttgttggatttttctattttaccccattataaacttcttattgagatcagatgacttctgaatagcatttgctgtatttttccaaggtaaagaatatctttttcagatttttctttctttctttaatttcagaaatagaagaaatcttttctaccgaccttgtgccaggagatgtcatggtcattccattaaatgggacaataatgccttgtgatgctgtgcttattaatggtacctgcattgtaaacgaaagcatgttaacaggagaaagtgttccagtgacaaagactaatttgccaaatccttcagtggatgtgaaaggaataggagatgaattatataatccagaaacacataaacgacatactttgttttgtgggacaactgttattcagactcgtttctacactggagaactcgtcaaagccatagttgttagaacaggatttagtacttccaaaggacagcttgttcgttccatattgtatcccaaaccaactgattttaaactctacagagatgcctacttgtttctactatgtcttgtggcagttgctggcattgggtttatctacactattattaatagcattttaaatgaggtacaagttggggtcataattatcgagtctcttgatattatcacaattactgtgccccctgcacttcctgctgcaatgactgctggtattgtgtatgctcagagaagactgaaaaaaatcggtattttctgtatcagtcctcaaagaataaatatttgtggacagctcaatcttgtttgctttgacaagactggaactctaactgaagatggtttagatctttgggggattcaacgagtggaaaatgcacgatttctttcaccagaagaaaatgtgtgcaatgagatgttggtaaaatcccagtttgttgcttgtatggctacttgtcattcacttacaaaaattgaaggagtgctctctggtgatccacttgatctgaaaatgtttgaggctattggatggattctggaagaagcaactgaagaagaaacagcacttcataatcgaattatgcccacagtggttcgtcctcccaaacaactgcttcctgaatctacccctgcaggaaaccaagaaatggagctgtttgaacttccagctacttatgagataggaattgttcgccagttcccattttcttctgctttgcaacgtatgagtgtggttgccagggtgctgggggataggaaaatggacgcctacatgaaaggagcgcccgaggccattgccggtctctgtaaacctgaaacagttcctgtcgattttcaaaacgttttggaagacttcactaaacagggcttccgtgtgattgctcttgcacacagaaaattggagtcaaaactgacatggcataaagtacagaatattagcagagatgcaattgagaacaacatggattttatgggattaattataatgcagaacaaattaaagcaagaaacccctgcagtacttgaagatttgcataaagccaacattcgcaccgtcatggtcacaggtgacagtatgttgactgctgtctctgtggccagagattgtggaatgattctacctcaggataaagtgattattgctgaagcattacctccaaaggatgggaaagttgccaaaataaattggcattatgcagactccctcacgcagtgcagtcatccatcagcaattgacccagaggctattccggttaaattggtccatgatagcttagaggatcttcaaatgactcgttatcattttgcaatgaatggaaaatcattctcagtgatactggagcattttcaagaccttgttcctaagttgatgttgcatggcaccgtgtttgcccgtatggcacctgatcagaagacacagttgatagaagcattgcaaaatgttgattattttgttgggatgtgtggtgatggcgcaaatgattgtggtgctttgaagagggcacacggaggcatttccttatcggagctcgaagcttcagtggcatctccctttacctctaagactcctagtatttcctgtgtgccaaaccttatcagggaaggccgtgctgctttaataacttccttctacctcttgagctgtgaattagcactattttctatagttacttattctctggatcattttataatttccatattaatttcaaatatgctcgtgttattcttcagtgatttccacaattgtgcattttattctttggtttaagtactgaagcatataatgaaagtaattgctaagtagcagcttaaaaattcaattatccgattgtatttaacatctttaagagcatgatcataaagagctatttttgacaccccccccccacttttttaacatttagagttartaagggttttatatctcttctgtccatattgcgttgagaatgttatttgaagaatgcctgtgaagccaggtgtgggttctactcagtgccatagatagactgagtcttctctcgtaggtyaccattacatagtaattttgattctgaatttcacattaaattatttgagtttatacagacctaaattttaaaatctgtacatatattattttgatgtattaagatgaatattgctgatttaaattttatttatgcacatacttaaaggacagaaatgtctgggaaagtaattgttaaataatgatatgtaactttttaactttttaaataaataacaagatttttaatgtgtgtctccctcagggttgtttaaagttttttttctccctcaagtataaatagtggtaactatatgttttgtatcttctagcaccaactgctgtaaagcaatgctgcaaataatgcttgaatacaagtggctaagccaacaacagaataaatacttttatagtagttttataatcctgaaattcgaaagctttcccaattgcacttgcatctaaacaaaactgttgcagtttttactctatttattttgttccccatgtttatgaaagtcctgcacagtttcaaaggcatggtaaataatatatcaatgtttatgtagtctgttacagaaacagctatagataacattatccagtgaagagcaaaattcaagctttagaaaatattcatgcatgcaattttgacatatctaaaaataggtttttgtatatttatggtgggaggtggttgggaacttttaacaaaatggggtgttaatttttgtacagtctgtgggcatttacacatttttaatgtattaaaatttggtaattatgtgtacattaaattaataaaagttacttctagttatgatttgtgaattccctaagaccttggatttttttaagtaactttatatcagaaatgatactgcatctttatatttttaaaattgtattgctgctcaagaatggtaccctcttgtcaaaaaggcatacattcataattgtacattcagcattgtaaataatcttatgaaaccttttttgattgaagctattcaaaataaaaattttaatgaatgaaataac

SEQ ID NO: 4579 - DNA, 6883 bp, Homo sapiens
caggagatttatggttacaatttgagtcgctggaagcttgccatagtttctttaggagtgatttgctctggtgggtttctcctcctcctcctctattggatgcctgagtggcgggtgaaagcgacctgtgtcagagctgcaattaaagactgtgaagtagtgctgctgaggactactgatgaattcaaaatgtggttttgtgcaaaaattcgcgttctttctttggaaacttacccagtttcaagtccaaaatctatgtctaataagctttcaaatggccatgcagtttgtttaattgagaatcccactgaagaaaataggcacaggatcagtaaatattcacagactgaatcacaacagattcgttatttcacccaccatagtgtaaaatatttctggaatgataccattcacaattttgatttcttaaagggactggatgaaggtgtttcttgtacgtcaatttatgaaaagcatagtgcaggactgacaaaggggatgcatgcctacagaaaactgctttatggagtaaatgaaattgctgtaaaagtgccttctgtttttaagcttctaattaaagaggttctcaacccattttacattttccagctgttcagtgttatactgtggagcactgatgaatactattactatgctctagctattgtggttatgtccatagtatcaatcgtaagctcactatattccattagaaagcaatatgttatgttgcatgacatggtggcaactcatagtaccgtaagagtttcagtttgtagagtaaatgaagaaatagaagaaatcttttctaccgaccttgtgccaggagatgtcatggtcattccattaaatgggacaataatgccttgtgatgctgtgcttattaatggtacctgcattgtaaacgaaagcatgttaacaggagaaagtgttccagtgacaaagactaatttgccaaatccttcagtggatgtgaaaggaataggagatgaattatataatccagaaacacataaacgacatactttgttttgtgggacaactgttattcagactcgtttctacactggagaactcgtcaaagccatagttgttagaacaggatttagtacttccaaaggacagcttgttcgttccatattgtatcccaaaccaactgattttaaactctacagagatgcctacttgtttctactatgtcttgtggcagttgctggcattgggtttatctacactattattaatagcattttaaatgaggtacaagttggggtcataattatcgagtctcttgatattatcacaattactgtgccccctgcacttcctgctgcaatgactgctggtattgtgtatgctcagagaagactgaaaaaaatcggtattttctgtatcagtcctcaaagaataaatatttgtggacagctcaatcttgtttgctttgacaagactggaactctaactgaagatggtttagatctttgggggattcaacgagtggaaaatgcacgatttctttcaccagaagaaaatgtgtgcaatgagatgttggtaaaatcccagtttgttgcttgtatggctacttgtcattcacttacaaaaattgaaggagtgctctctggtgatccacttgatctgaaaatgtttgaggctattggatggattctggaagaagcaactgaagaagaaacagcacttcataatcgaattatgcccacagtggttcgtcctcccaaacaactgcttcctgaatctacccctgcaggaaaccaagaaatggagctgtttgaacttccagctacttatgagataggaattgttcgccagttcccattttcttctgctttgcaacgtatgagtgtggttgccagggtgctgggggataggaaaatggacgcctacatgaaaggagcgcccgaggccattgccggtctctgtaaacctgaaacagttcctgtcgattttcaaaacgttttggaagacttcactaaacagggcttccgtgtgattgctcttgcacacagaaaattggagtcaaaactgacatggcataaagtacagaatattagcagagatgcaattgagaacaacatggattttatgggattaattataatgcagaacaaattaaagcaagaaacccctgcagtacttgaagatttgcataaagccaacattcgcaccgtcatggtcacaggtgacagtatgttgactgctgtctctgtggccagagattgtggaatgattctacctcaggataaagtgattattgctgaagcattacctccaaaggatgggaaagttgccaaaataaattggcattatgcagactccctcacgcagtgcagtcatccatcagcaattgacccagaggctattccggttaaattggtccatgatagcttagaggatcttcaaatgactcgttatcattttgcaatgaatggaaaatcattctcagtgatactggagcattttcaagaccttgttcctaagttgatgttgcatggcaccgtgtttgcccgtatggcacctgatcagaagacacagttgatagaagcattgcaaaatgttgattattttgttgggatgtgtggtgatggcgcaaatgattgtggtgctttgaagagggcacacggaggcatttccttatcggagctcgaagcttcagtggcatctccctttacctctaagactcctagtatttcctgtgtgccaaaccttatcagggaaggccgtgctgctttaataacttccttctgtgtgtttaaattcatggcattgtacagcattatccagtacttcagtgttactctgctgtattctatcttaagtaacctaggagacttccagtttctcttcattgatctggcaatcattttggtagtggtatttacaatgagtttaaatcctgcctggaaagaacttgtggcacaaagaccaccttcgggtcttatatctggggcccttctcttctccgttttgtctcagattatcatctgcattggatttcaatctttgggttttttttgggtcaaacagcaaccttggtatgaagtgtggcatccaaaatcagatgcttgtaatacaacaggaagcgggttttggaattcttcacacgtagacaatgaaaccgaacttgatgaacataatatacaaaattatgaaaataccacagtgttttttatttccagttttcagtacctcatagtggcaattgccttttcaaaaggaaaacccttcaggcaaccttgctacaaaaattatttttttgttttttctgtgatttttttatatatttttatattattcatcatgttgtatccagttgcctctgttgaccaggttcttcagatagtgtgtgtaccatatcagtggcgtgtaactatgctcatcattgttcttgtcaatgcctttgtgtctatcacagtggaggagtcagtggatcggtggggaaaatgctgcttaccctgggccctgggctgtagaaagaagacaccaaaggcaaagtacatgtatctggcgcaggagctcttggttgatccagaatggccaccaaaacctcagacaaccacagaagctaaagctttagttaaggagaatggatcatgtcaaatcatcaccataacatagcagtgaatcagtctcagtggtattgctgatagcagtattcaggaatatgtgattttaggagtttctgatcctgtgtgtcagaatggcactagttcagtttatgtcccttctgatatagtagcttatttgacagctttgctcttccttaaaataaaaacagaaaaatatatcgtcctaacagttaaattaacaatcaatccataaagtcctatatcttcattcagcaacccaaatattacatacatttccagaattttcttgattgttactttcagtgatattctttatattgggtacaggagaagtttggtgtttggtaggtttttcaacattagtttttgagactagtttacctcttcacatttatgctcacaaccctcttgttagaaaagtctgtgtttatatacaggctgtaagtttgtgattgataaaaagaagatgagtgttaattagcctccagtgaaaatatactgaaagcctgttttcatttgattccaatgtttcttccaaagaattctgtataaacatatgccaattccctatgatggtctagagttaggaatgagtgtttatggtgttgcttatagaacaactcaggtaatctccatttctggttttatattttctgtacaaactgcctgggttttatttttctaatcagcaaggtgcttcactgccttcttgagacgcctctcaaagctcttaaatggctcctgtgctatgtgtggtgttggcagtctaatttgcttctgttaaatgttgtagaacctttttcactaggaaataagattcatttctttcggcagtagatgtagattcatcttttaacgtttcttcaaatttgtttctgtcaggctttgtgttattttaaatggttttttaaaattttcttctatgttttcaattacctaaagacataggataatagttttttttaagttagaattttacctcataaaattttttgaggtttgatgtatgtctctgtcttatcaataatgaggcttaaaaaatactggatttgaatggctgccgttttttcaaagcaatatgaatttgatgagtttgttttatgccattaggtggcgccagaggtcagaacatgtctattttgaattggatcrttacaaatgagcatatttgatgcggaaatttctgggagaaaaaaaattgaggaaataaagttaaaaaattgacattcattgagccaaaagagatgtggagaaacatttttcacctttctgtttggcctgattaacatttaaattcttgccaaaattaaggtaacttttaaaaaacaccttttataggtggatccagcagtctggcaacgcccacagttaccacaacacagaaaactgatcgtgctataaaatggacgctaaactatgaaaacagtgtgacattgttctctgttcttccagagccagtaacatgcttgctcgtgctttctacttctagctgatcattcttttcccaacatatatttacaaatttaccaaattttacctagaattttaggaccaaatggttctcactctttatgctgcaaagacctggatgatgtttggtaactatagaaaaatagaaattacactcaggatcactgttactgctattgccactgatgattcctgcaaaaatataatcgaagttttccatcaaatgtataatatgctattaatacacattagatgataacagttgttccatgaatgattctatgaagctatgcatcttagacctcttgagctgtgaattagcactattttctatagttacttattctctggatcattttataatttccatattaatttcaaatatgctcgtgttattcttcagtgatttccacaattgtgcattttattctttggtttaagtactgaagcatataatgaaagtaattgctaagtagcagcttaaaaattcaattatccgattgtatttaacatctttaagagcatgatcataaagagctatttttgacaccccccccccacttttttaacatttagagttartaagggttttatatctcttctgtccatattgttttcaaaggaatgaggtgtttaggtggctggaaaagcatttgtaggaagttagatttgaatatagacaaggtgggttattcacgttgagaatgttatttgaagaatgcctgtgaagccaggtgtgggttctactcagtgccatagatagactgagtcttctctcgtaggtyaccattacatagtaattttgattctgaatttcacattaaattatttgagtttatacagacctaaattttaaaatctgtacatatattattttgatgtattaagatgaatattgctgatttaaattttatttatgcacatacttaaaggacagaaatgtctgggaaagtaattgttaaataatgatatgtaactttttaactttttaaataaataacaagatttttaatgtgtgtctccctcagggttgtttaaagttttttttctccctcaagtataaatagtggtaactatatgttttgtatcttctagcaccaactgctgtaaagcaatgctgcaaataatgcttgaatacaagtggctaagccaacaacagaataaatacttttatagtagttttataatcctgaaattcgaaagctttcccaattgcacttgcatctaaacaaaactgttgcagtttttactctatttattttgttccccatgtttatgaaagtcctgcacagtttcaaaggcatggtaaataatatatcaatgtttatgtagtctgttacagaaacagctatagataacattatccagtgaagagcaaaattcaagctttagaaaatattcatgcatgcaattttgacatatctaaaaataggtttttgtatatttatggtgggaggtggttgggaacttttaacaaaatggggtgttaatttttgtacagtctgtgggcatttacacatttttaatgtattaaaatttggtaattatgtgtacattaaattaataaaagttacttctagttatgatttgtgaattccctaagaccttggatttttttaagtaactttatatcagaaatgatactgcatctttatatttttaaaattgtattgctgctcaagaatggtaccctcttgtcaaaaaggcatacattcataattgtacattcagcattgtaaataatcttatgaaaccttttttgattgaagctattcaaaataaaaattttaatgaatgaaataacactt

SEQ ID NO: 4580 - DNA, 772 bp, Homo sapiens
ggctgcgccgagccccctgcgcgctgcacatggggcgcctgacggaagcggcggcagcgggcagcggctctcgggctgcaggctgggcagggtcccctcccacgctcctgccgctgttcccacgtcccccaggtgcgcggccaccatggcgtccagcgacgaggacggcaccaacggcggcgcctcggaggccggcgaggaccgggaggctcccggcgagcggaggcgcctgggggtcttggccaccgcctggctcaccttctacgacatcgccatgaccgcgggacggagactcattctgtcgcccaggctggagtgcattggcgcgatctccgctcactgccaacctcagcctccggagttcaagcgattctcctgcctyggcctccggagtagctgggactacaagcgtgggccaccacgccccattaatttttgtatttttggtagagacagggtatcaccatgttggccagggtggtctcgaactcctgacctcaaatgattcccccacttcggcctcccaatgtgctgggattacaggtgtgagccatcgcaccgggcctaatattttattttaattttttaaaaatagagatggcctctcactgtgttggctaggctggtctcaaactcccggcctcaagcaatcctcccacctcaacctccaaaagtgctgggattaccacttccggcttaatattttaaactttctccagggtttatagaaaaatgtgattgacaaaaatttaataaatctttacctatggtg

SEQ ID NO: 4581 - DNA, 1295 bp, Homo sapiens
gtagagctggctgcgccgagccccctgcgcgctgcacatggggcgcctgacggaagcggcggcagcgggcagcggctctcgggctgcaggctgggcagggtcccctcccacgctcctgccgctgttcccacgtcccccaggtgcgcggccaccatggcgtccagcgacgaggacggcaccaacggcggcgcctcggaggccggcgaggaccgggaggctcccggcgagcggaggcgcctgggggtcttggccaccgcctggctcaccttctacgacatcgccatgaccgcggggtggttggttctagctattgccatggtacgtttttatatggaaaaaggaacacacagaggtttatataaaagtattcagaagacacttaaatttttccagacatttgccttgcttgagatagttcactgtttaattggaattgtacctacttctgtgattgtgactggggtccaagtgagttcaagaatctttatggtgtggctcattactcacagtataaaaccaatccagaatgaagagagtgtggtgctttttctggtcgcgtggactgtgacagagatcactcgctattccttctacacattcagccttcttgaccacttgccatacttcattaaatgggccagatataatttttttatcatcttatatcctgttggagttgctggtgaacttcttacaatatacgctgccttgccryatgtgaagaaaacaggaatgttttcaataagacttcctaacaaatacaatgtctcttttgactactattattttcttcttataaccatggcatcatatatacctttgtttccacaactctattttcatatgttacgtcaaagaagaaaggtgcttcatggagaggtgattgtagaaaaggatgattaaatgatctctgcaaacaaggtgctttttccagaataaccaagattacctgagtccaagttttaataacaagaataaacaactttgtgaaatatcatggattgtatggtttcttaaaatataacttgagacacgtggtatttgccagtatttgtgttcctcttgtgccagatctattttttacaagaactgtgcaaatatcagtaacttttgggtaggtattgattattaggaaaataattaggtgtattatctgggggaaaaaaaaacttttgctaagttttttttgaaacatgctcaaagctttttaaatcaatatttagaaattagtttaacgatttactattatacctgctagtgatatttatgtgatatttataaatgaaaataaatgc

SEQ ID NO: 4582 - DNA, 3100 bp, Homo sapiens
tccgtgytgtggggctcagctggttcatttatgttgtttttcctgtacctaagttcccgctgtaggtggtacctttgcagacggtgcgatgggggaagcagagaagtttcactacatctatagttgtgacctggatatcaacgtycagcttaagataggaagcttggaagggaagagagaacaaaagagttataaagctgtcctggaagacccaatgttgaagttctcaggactatatcaagagacatgctctgatctttatgttacttgtcaagtttttgcagaagggaagccttyggccttgccagtgagaacatcctacaaagcatttagtacaagatggaactggaatgaatggctgaaactaccagtaaaataccctgacctgcccaggaatgcccaagtggccctcaccatatgggatgtgtatggtcccggaaaagcagtgcctgtaggaggaacaacggtttcgctctttggaaaatacggcatgtttcgccaagggatgcatgacttgaaagtctggcctaatgtagaagcagatggatcagaacccacaaawactcctggcagaacaagtagcactctctcagaagatcagatgagccgtcttgccaagctcaccaaagctcatcgacaaggacacatggtgaaagtagattggctggatagattgacatttagagaaatagaaatgataaatgagagtgaaaaacgaagttctaatttcatgtacctgatggttgaatttcgatgtgtcaagtgtgatgataaggaatatggtattgtttattatgaaaaggacggtgatgaatcatctccaattttaacaagttttgaattagtgaaagttcctgacccccagatgtctatggagaatttagttgagagcaaacaccacaagcttgcccggagtttaagaagtggaccttctgaccacgatctgaaacccaatgctgccacgagagatcagttaaatattattgtgagttatccaccaaccaagcaacttacatatgaagaacaagatcttgtttggaagtttagatattatcttacgaatcaagaaaaagccttgacaaaattcttgaaatgtgttaattgggatctacctcaagaggccaaacaggccttggaacttctgggaaaatggaagccgatggaygtagaggactccttggagctgttatcctctcattacaccaacccaactgtgaggcgttatgctgttgcccggttgcgacaggccgatgatgaggatttgttgatgtacctattacaattggtccaggctctcaaatatgaaaattttgatgatataaagaatggattggaacctaccaagaaggatagtcagagttcagtgtcagaaaatgtgtcaaattctggaataaattctgcagaaatagatagctcccaaattataaccagcccccttccttcagtctcttcacctcctcctgcatcaaaaacaaaagaagttccagatggcgaaaatctggaacaagatctctgtaccttcttgatatcgagagcctgcaaaaactcaacactggctaattatttatactggtatgtgatagtggaatgtgaagatcaagatactcagcagagagatccaaagacccatgagatgtacttgaacgtaatgagaagattcagccaagcattgttgaagggtgataagtctgtcagagttatgcgttctttgctggctgcacaacagacatttgtagatcggttggtgcatctaatgaaggcagtacaacgcgaaagtggaaatcgtaagaaaaagaatgagagactacaggcattgcttggagataatgaaaagatgaatttgtcagatgtggaacttatcccgttgcctttagaaccccaagtgaaaattagaggaataattccggaaacagctacactgtttaaaagtgcccttatgcctgcacagttgttttttaagacggaagatggaggcaaatatccagttatatttaagcatggagatgatttacgtcaagatcaacttattcttcaaatcatttcactcatggacaagctgttacggaaagaaaatctggacttgaaattgacaccttataaggtgttagccaccagtacaaaacatggcttcatgcagtttatccagtcagttcctgtggctgaagttcttgatacagagggaagcattcagaacttttttagaaaatatgcaccaagtgagaatgggccaaatgggattagtgctgaggtcatggacacttacgttaaaagctgtgctggatattgcgtgatcacctatatacttggagttggagacaggcacctggataaccttttgctaacaaaaacaggcaaactcttccacatagactttggatatattttgggtcgggatccaaagcctcttcctccaccaatgaagctgaataaagaaatggtagaaggaatggggggcacacagagtgagcagtaccaagagttccgtaaacagtgttacacggctttcctccacctgcgaaggtattctaatctgattttgaacttgttttccttgatggttgatgcaaacattccagatattgcacttgaaccagataaaactgtgaaaaaggttcaggataaattccgcttagacctgtcggatgaagaggctgtgcattacatgcagagtctgattgatgagagtgtccatgctctttttgctgcagtggtggaacagattcacaagtttgcccagtactggagaaaatgaaactgggattgacccatcaakatgcttggctcaataagaaaaccackttaggagcaacctttgtatattggagacttcagagtaaccagcaaggaagagaaatcttaatcttcaagttaccatattttccaaatattacatggtacctgagttctgcttccttggatgtcattgcttaaatatagtcttgaagggcttgttttgaaatattgtatatattttttcaaatgtatacattgttaataaattaagaaatgagaaacattcttatttatgtacatgttatgagagttctggaggaagtaatatgttgaaatagtaaaacattttagtttttgagtttaaaat

SEQ ID NO: 4583 - DNA, 2341 bp, Homo sapiens
aaggcgggaggcggagctcgtactcaagagccgcctcccgggcggctggggcggtccccgagctgctttccgcgttctcccctctccgcgggcagtgctagctcgccgcggccgcctccggggaccacctggcttcatgtgtggatttccayggctcttgcccagaggcgggtacactgtgttccaatgtgccacggaactcacgcagtggcactttgtggcttcatgaaggaagaggcaggccacgcaacacttcctccccaagccaaggagaagtatcacttttagaggcagaggagcggaaggcagtgggtgtgaccaaaagtgccatttgttaaagactgttggagcagaactactgagaaaaaccaggcattgtatcttcagttgtcatcaagttcgcaatcagattggaaaagctcaacttgaagctttcttgcctgcagtgaagcakagagatagatattattcacgtaataaaaaacatgggcttcaacctgactttccacctttcctacaaattccgattactgttgctgttgactttgtgcctgacagtggttgggtgggccaccagtaactacttygtgggtgccattcaagagattcctaaagcaaaggagttcatggctaatttccataagaccctcattttggggaagggaaaaactctgactaatgaagcatccacgaagaaggtagaacttgacaactgyccttctgtgtctccttacctcagaggccagagcaagctcattttcaaaccagatctcactttggaagaggtacaggcagaaaatcccaaagtgtccagaggccggtatcgccctsaggaatgtaaagctttacagagggtcgccatcctcgttccccaccggaacagagagaaacacctgatgtacctgctggaacatctgcatcccttcctgcagaggcagcagctggattatggcatctacgtcatccaccaggctgaaggtaaaaagtttaatcgagccaaactcttgaatgtgggctatctagaagccctcaaggaagaaaattgggactgctttatattccacgatgtggacctggtacccgagaatgactttaacctttacaagtgtgaggagcatcccaagcatctggtggttggcaggaacagcactgggtacaggttacgttacagtggatattttgggggtgttactgccctaagcagagagcagtttttcaaggtgaatggattctctaacaactactggggatggggaggcgaagacgatgacctcagactcagggttgagctccaaagaatgaaaatttcccggcccctgcctgaagtgggtaaatatacaatggtcttccacactagagacaaaggcaatgaggtgaacgcagaacggatgaagctcttacaccaagtgtcacgagtctggagaacagatgggttgagtagttgttcttataaattagtatctgtggaacacaatcctttatatatcaacatcacagtggatttctggtttggtgcatgaccctggrtcttttggtgatgtttggaagaactgattctttgtttgcaataattttggcctagagacttcaaatagtagcacacattaagaacctgttacagctcattgttkagctgaatttttcctttttgtattttcttagcagagctcctggtgatgtagagtataaaacagttgtaacaagacagctttcttagtcattttgatcatgagggttaaatattgtaatatggatacttgaaggactttatataaaaggatgactcaaaggataaaatgaacrctatttgaggactcyggttgaaggagatttatttaaatttgaagtaatatattatgggataaaaggccacaggaaataagactgctgaatgtctgagagaaccagagttgttctcgtccaaggtagaaaggtacgaagatacaatactgttattcatttatcctgtacaatcatctgtgaagtggtggtgtcaggtgagaaggcgtccacaaaagaggggagaaaaggygacgaatcaggacacagtgaacttgggaatgaagaggtagcaggagggtggagtgtyggctgcaaaggcagcagtagctgagctggttgcagvtgctgatagccttcaggggaggacctgcccaggtatgccttccagtgatgcccaccagagaatacattmtctattagtttttaaagagtttttgtaaaatgattttgtacaagtaggatatgaattagcagtttacaagtttacatattaactaataataaatatgtctatcaaatacctctgtagtaaaatgtgaaaaagctttgagtgttcctt

SEQ ID NO: 4584 - DNA, 2219 bp, Homo sapiens
gaccacctggcttcatgtgtggatttccayggctcttgcccagaggcgggtacactgtgttccaatgtgccacggaactcacgcagtggcactttgtggcttcatgaaggaagaggcaggccacgcaacacttcctccccaagccaaggagaagtatcacttttagaggcagaggagcggaaggcagtgggtgtgaccaaaagtgccatttgttaaagactgttggagcagaactactgagaaaaaccaggcattgtatcttcagttgtcatcaagttcgcaatcagattggaaaagctcaacttgaagctttcttgcctgcagtgaagcakagagatagatattattcacgtaataaaaaacatgggcttcaacctgactttccacctttcctacaaattccgattactgttgctgttgactttgtgcctgacagtggttgggtgggccaccagtaactacttygtgggtgccattcaagagattcctaaagcaaaggagttcatggctaatttccataagaccctcattttggggaagggaaaaactctgactaatgaagcatccacgaagaaggtagaacttgacaactgyccttctgtgtctccttacctcagaggccagagcaagctcattttcaaaccagatctcactttggaagaggtacaggcagaaaatcccaaagtgtccagaggccggtatcgccctsaggaatgtaaagctttacagagggtcgccatcctcgttccccaccggaacagagagaaacacctgatgtacctgctggaacatctgcatcccttcctgcagaggcagcagctggattatggcatctacgtcatccaccaggctgaaggtaaaaagtttaatcgagccaaactcttgaatgtgggctatctagaagccctcaaggaagaaaattgggactgctttatattccacgatgtggacctggtacccgagaatgactttaacctttacaagtgtgaggagcatcccaagcatctggtggttggcaggaacagcactgggtacaggttacgttacagtggatattttgggggtgttactgccctaagcagagagcagtttttcaaggtgaatggattctctaacaactactggggatggggaggcgaagacgatgacctcagactcagggttgagctccaaagaatgaaaatttcccggcccctgcctgaagtgggtaaatatacaatggtcttccacactagagacaaaggcaatgaggtgaacgcagaacggatgaagctcttacaccaagtgtcacgagtctggagaacagatgggttgagtagttgttcttataaattagtatctgtggaacacaatcctttatatatcaacatcacagtggatttctggtttggtgcatgaccctggrtcttttggtgatgtttggaagaactgattctttgtttgcaataattttggcctagagacttcaaatagtagcacacattaagaacctgttacagctcattgttkagctgaatttttcctttttgtattttcttagcagagctcctggtgatgtagagtataaaacagttgtaacaagacagctttcttagtcattttgatcatgagggttaaatattgtaatatggatacttgaaggactttatataaaaggatgactcaaaggataaaatgaacrctatttgaggactcyggttgaaggagatttatttaaatttgaagtaatatattatgggataaaaggccacaggaaataagactgctgaatgtctgagagaaccagagttgttctcgtccaaggtagaaaggtacgaagatacaatactgttattcatttatcctgtacaatcatctgtgaagtggtggtgtcaggtgagaaggcgtccacaaaagaggggagaaaaggygacgaatcaggacacagtgaacttgggaatgaagaggtagcaggagggtggagtgtyggctgcaaaggcagcagtagctgagctggttgcagvtgctgatagccttcaggggaggacctgcccaggtatgccttccagtgatgcccaccagagaatacattmtctattagtttttaaagagtttttgtaaaatgattttgtacaagtaggatatgaattagcagtttacaagtttacatattaactaataataaatatgtctatcaaatacctctgtagtaaaatgtgaaaaagctttgagtgttcctt

SEQ ID NO: 4585 - DNA, 2424 bp, Homo sapiens
aaggcgggaggcggagctcgtactcaagagccgcctcccgggcggctggggcggtccccgagctgctttccgcgttctcccctctccgcgggcagtgctagctcgccgcggccgcctccggggaccacctggcttcatgtgtggatttccayggctcttgcccagaggcgggtacactgtgttccaatgtgccacggaactcacgcagtggcactttgtggcttcatgaaggaagaggcaggccacgcaacacttcctccccaagccaaggagaagtatcacttttagaggcagaggagcggaaggcagtgggtgtgaccaaaagtgccatttgttaaagcttatcttccttgccagattttaaamactattatggaaaatctcaagcattcacaaaagtagagagaaagaaaggactctcagactgttggagcagaactactgagaaaaaccaggcattgtatcttcagttgtcatcaagttcgcaatcagattggaaaagctcaacttgaagctttcttgcctgcagtgaagcakagagatagatattattcacgtaataaaaaacatgggcttcaacctgactttccacctttcctacaaattccgattactgttgctgttgactttgtgcctgacagtggttgggtgggccaccagtaactacttygtgggtgccattcaagagattcctaaagcaaaggagttcatggctaatttccataagaccctcattttggggaagggaaaaactctgactaatgaagcatccacgaagaaggtagaacttgacaactgyccttctgtgtctccttacctcagaggccagagcaagctcattttcaaaccagatctcactttggaagaggtacaggcagaaaatcccaaagtgtccagaggccggtatcgccctsaggaatgtaaagctttacagagggtcgccatcctcgttccccaccggaacagagagaaacacctgatgtacctgctggaacatctgcatcccttcctgcagaggcagcagctggattatggcatctacgtcatccaccaggctgaaggtaaaaagtttaatcgagccaaactcttgaatgtgggctatctagaagccctcaaggaagaaaattgggactgctttatattccacgatgtggacctggtacccgagaatgactttaacctttacaagtgtgaggagcatcccaagcatctggtggttggcaggaacagcactgggtacaggttacgttacagtggatattttgggggtgttactgccctaagcagagagcagtttttcaaggtgaatggattctctaacaactactggggatggggaggcgaagacgatgacctcagactcagggttgagctccaaagaatgaaaatttcccggcccctgcctgaagtgggtaaatatacaatggtcttccacactagagacaaaggcaatgaggtgaacgcagaacggatgaagctcttacaccaagtgtcacgagtctggagaacagatgggttgagtagttgttcttataaattagtatctgtggaacacaatcctttatatatcaacatcacagtggatttctggtttggtgcatgaccctggrtcttttggtgatgtttggaagaactgattctttgtttgcaataattttggcctagagacttcaaatagtagcacacattaagaacctgttacagctcattgttkagctgaatttttcctttttgtattttcttagcagagctcctggtgatgtagagtataaaacagttgtaacaagacagctttcttagtcattttgatcatgagggttaaatattgtaatatggatacttgaaggactttatataaaaggatgactcaaaggataaaatgaacrctatttgaggactcyggttgaaggagatttatttaaatttgaagtaatatattatgggataaaaggccacaggaaataagactgctgaatgtctgagagaaccagagttgttctcgtccaaggtagaaaggtacgaagatacaatactgttattcatttatcctgtacaatcatctgtgaagtggtggtgtcaggtgagaaggcgtccacaaaagaggggagaaaaggygacgaatcaggacacagtgaacttgggaatgaagaggtagcaggagggtggagtgtyggctgcaaaggcagcagtagctgagctggttgcagvtgctgatagccttcaggggaggacctgcccaggtatgccttccagtgatgcccaccagagaatacattmtctattagtttttaaagagtttttgtaaaatgattttgtacaagtaggatatgaattagcagtttacaagtttacatattaactaataataaatatgtctatcaaatacctctgtagtaaaatgtgaaaaagctttgagtgttcctt

SEQ ID NO: 4586 - DNA, 1753 bp, Homo sapiens
ataccagctctgagatttccagctcagcgatgcccccaggtccctgggagagctgcttctgggtggggggcctcattttgtggctcagcgttggaakttcaggggatgcacctcctaccccacagccaaagtgcgctgacttccagagcgccaacctttttgaaggcaccgatctcaaagtccagtttctcctctttgtcccttcgaatcctagctgtgggcagctagtagaaggaagcagtgacctccaaaactctgggttcaatgccactctgggaaccaaactaattatccatggattcagggttttaggaacaaagccttcctggattgacacattyattagaacccttctgcrtgcaacgaatgctaatgtgattgccgtggactggatttatgggtctacaggagtctacttctcagctgtgaaaaatgtgattaagttgagcctcgagatctcccttttcctcaataaactcctggtgctgggtgtgtcggaatcctcaatccacatcattggtgttagcctgggggcccacgttgggggcatggtgggacagctcttcggaggccagctgggacagatcacaggcctggacccygctggacctgagtacacsagggccagtgtggaagagcgcttggatgctggagatgccctcttcgtggaagccatccacacagacaccgacaatttgggtattcggattcccgttggacatgtggactacttcgtcaacggaggccaagaccaacctggctgccccaccttcttttacgcaggttatagttatctgatctgtgatcacatgagggctgtgcacctctacatcagcgccctggagaattcctgtccactgatggcctttccctgtgccarctacaaggccttccttgctggacgctgtctggattgctttaacccttttctgctttcctgcccaaggataggactggtggaacaaggtggtgtcaagatagagccgctccccaaggaagtgaaagtctacctcctgactacttccagtgctccrtactgcatgcatcacagcctcgtggagtttcacttgaaggaactgagaaacaaggacaccaacatcgaggttaccttccttagcagtaacatcacctcttcatctaagatcaccatacctaagcagcaacgctatgggaaaggaatcatagcccatgccaccccacaatgccagataaaccaagtgaaattcaagtttcagtcttccaaccgagtttggaaaaaagaccggactaccattattgggaagttctgcactgcccttttgcctgtcaatgacagagaaaagatggtctgcttacctgaaccagtgaacttacaagcaagtgtgactgtttcctgtgacctgaagatagcctgtgtgtagtttaacctgggcaggacacatctccctgcatttttttttttttttttgagagagaggtgtgatgagggatgtgtgtgtgcagcttattgtagaccattactactaaggagaaaagcaaagctctttcttattttcctcataatcagctaccctggaggggagggagaactcattttacagaacttggtttcctttgccgatctyatgtacatacccattttagctttyccatgcatacttaactgcacttgctttatctccttgggcattcktacttaggattcaatagaaacatgtacagggtaaacaattttttaaaaataaaacttcatggagtatctgaatcatttaat

SEQ ID NO: 4587 - DNA, 2313 bp, Homo sapiens
atatgagctcaggcctggctgggctccaggagaatctttccacaaggcaagagataacacaaagtcaaggtgaagatcagggtagccctttaaaaggcctccttgtgccctagagttgccacagctcttctactccacygctgtctatcttgcctgccggcacccagccaccatgtgggagctcgtggctctcttgctgcttaccctagcttatttgttttgrcccaagagaaggtgscctggtgccaagtaccccaagagcctcctgtccctgcccctggtgggcagcctgccattcctccccagacayggccatatgcataacaacttcttcaagctgcagaaaaaatatggccccatctmttckgttcgtatgggcaccaagactacagtgattgtcggccaccaccagctggccaaggaggtgcttattaagaagggcaaggactkctctgggyggcctcaaatggcaactctagacatcgcgyccaacaaccgtaagggtatcgccttcgctgactctggcgcacactggcagctgcatcgaaggctggcgatggccacctttgccctgttcaaggatggcgatcagaagctggagaagatcatttgtcaggaaatcagtacattgtgtgatatgctggccacccacaacggacagtccatagacatctcctttcctgtcttcgtggcggtaaccratgtcatctccttgatctgcttcaatacctcctacaagaatggggaccctkagttgaatgtcatacagaattacaatgaaggcatcatagacaacctgagcaaagacagcctggtggacctagtcccctggttgaagattttccccaacaaaaccctggaaaaattaaagagccatgttaaaatacgaaatgatctgctgaataaaatacttgaaaattacaaggagaaattccggagtgactctatcaccaacatgctggacacactgatgcaagccaagatgaactcagataatggcaatgctggcccagatcaagaytcagagctgctttcagataaccacattctcaccaccataggggacatctttggggctggcgtggagaccaccacctctgtggttaaatggaccctggccttcctgctgcacaatcctcaggtgaagaagaagctctacgaggagattgaccagaatgtgggtttcagccgcacamcaactatcagtgaccrtaaccgtctcctcctgctggaggccaccatccragaggtgcttcgcctcaggcccgtggcccctatgctcatcccccwcaaggccaacgttgactccagcatcggtgagtttgctgtggacaagggcacagaagttatcatcaatctgtgggcgctgcatcacaatgagaaggagtggcaccagcsggatcagttcatgcctgagygttkcttgaatccagcggggacccagctcatctcaccrtcagtaagctatttgcccttcggagcaggacctcrctcctgtataggtgagatcctggcccgccaggagctcttcctcatcatggcctggctgctgyagaggttcgacctggaggtgccagatgatgggcagctgccctccctggaaggcatccccaaggtggtctttctgatcgactctttcaaagtgaagatcaaggtgyrccaggcctggagggaagcccaggctgagggtagcacctaaaggctgtaactcacagcccctgtccaccctatgtggccccacaacacagatttagagatacaaccccccacccttctccgccattcttccctactcccaacccactctgccttctttttcagcttgtggcaatgccagtgatgtgcataaacagtttttttttttccataaggtccctgagtagttcatttatgtattcatttgctcactcattctttcaacaccgattttattgagcacctactatgtgccattcactttctcaggacactcgagctccgtggtctctgaagcttacattctagtgagggctaacaagtgaataagttcagagactcgtaagtgctttgaagtcaatcacaatttgtgtgatgtgatgagaaaatggcagaggcagtgggtggctgctttgaacaaggggtcaggaaaagtgttgcatgctgagaagcaggtaaaaaggcctccaggtgggagaggtcagcatggccagtgaaggggagagtgggccctgatgaggtcagagtggacatagtggtccgttcccactgtagctgggattacaggaggccaggagggaggttgggttttattctaattatgacaggaagtcactg

SEQ ID NO: 4588 - DNA, 1803 bp, Homo sapiens
atatgagctcaggcctggctgggctccaggagaatctttccacaaggcaagagataacacaaagtcaaggtgaagatcagggtagccctttaaaaggcctccttgtgccctagagttgccacagctcttctactccacygctgtctatcttgcctgccggcacccagccaccatgtgggagctcgtggctctcttgctgcttaccctagcttatttgttttgrcccaagagaaggtgscctggtgccaagtaccccaagagcctcctgtccctgcccctggtgggcagcctgccattcctccccagacayggccatatgcataacaacttcttcaagctgcagaaaaaatatggccccatctmttckgttcgtatgggcaccaagactacagtgattgtcggccaccaccagctggccaaggaggtgcttattaagaagggcaaggactkctctgggyggcctcaaatggcaactctagacatcgcgyccaacaaccgtaagggtatcgccttcgctgactctggcgcacactggcagctgcatcgaaggctggcgatggccacctttgccctgttcaaggatggcgatcagaagctggagaagatcatttgtcaggaaatcagtacattgtgtgatatgctggccacccacaacggacagtccatagacatctcctttcctgtcttcgtggcggtaaccratgtcatctccttgatctgcttcaatacctcctacaagaatggggaccctkagttgaatgtcatacagaattacaatgaaggcatcatagacaacctgagcaaagacagcctggtggacctagtcccctggttgaagattttccccaacaaaaccctggaaaaattaaagagccatgttaaaatacgaaatgatctgctgaataaaatacttgaaaattacaaggagaaattccggagtgactctatcaccaacatgctggacacactgatgcaagccaagatgaactcagataatggcaatgctggcccagatcaagaytcagagctgctttcagataaccacattctcaccaccataggggacatctttggggctggcgtggagaccaccacctctgtggttaaatggaccctggccttcctgctgcacaatcctcaggtgaagaagaagctctacgaggagattgaccagaatgtgggtttcagccgcacamcaactatcagtgaccrtaaccgtctcctcctgctggaggccaccatccragaggtgcttcgcctcaggcccgtggcccctatgctcatcccccwcaaggccaacgttgactccagcatcggtgagtttgctgtggacaagggcacagaagttatcatcaatctgtgggcgctgcatcacaatgagaaggagtggcaccagcsggatcagttcatgcctgagygttkcttgaatccagcggggacccagctcatctcaccrtcagtaagctatttgcccttcggagcaggacctcrctcctgtataggtgagatcctggcccgccaggagctcttcctcatcatggcctggctgctgyagaggttcgacctggaggtgccagatgatgggcagctgccctccctggaaggcatccccaaggtggtctttctgatcgactctttcaaagtgaagatcaaggtgyrccaggcctggagggaagcccaggctgagggtagcacctaaagatacaaccccccacccttctccgccattcttccctactcccaacccactctgccttctttttcagcttgtggcaatgccagtgatgtgcataaacagttttt

SEQ ID NO: 4589 - DNA, 1585 bp, Homo sapiens
acggcgggtcgccagcgcckcagtagctcgcgcggtgcctgtcggtagtcgcgtgcggggcggcggggcggcggggcggccggcggcggccatgggagatatcccagccgtgggcctcagctcctggaaggcttctccagggaaagtgacmgaggcagtgaaagaggccattgaygcagggtaccggcacttcractgtgcttacttttaccacaatgagagggaggttggagcagkgatccgtkgcaagatcaaggaaggcgctgtaagacgggaggatctgttcattgccactaagctgtggtgcacctgccataagaagtccttggtggaaacagcatgcagaargagtctcaaggccttgaagctgaactatttggacctctacctcatacactggcccatgggtttcaagcctcctcatccagaatggatcatgagctgcagtgaactttccttctgcctctcacatcctcgagtgcaggacttgcctctggacgagagcaacatggttattcccagtgacacggacttcctggacacgtgggaggccatggaggacctggtgatyaccgggctggtgaagaacatcggggtgtcaracttcaaccatgaacagcttgagaggcttttgaataagcctgggttgaggttcaagccactaaccaaccagattgagtgccacccrtatcttactcagaagaatctgatcagtttttgccaatccagagatgtgtccgtgactgcttaccgtcctcttggtggctcgtgtgagggggttgacctgatagacaaccctgtgatcaagaggattgcaaaggagcacggcaagtctcctgctcagattttgatccgatttcaaatccagaggaaygtgatagtgatccccggatctatcaccccaagtcacattaaagagaatatccaggtgtttgattttgaattaacacagcacgatatggataacatcctcagcctaaacaggaatctcygactggccatgttccccataactaaaaatcacaaagactatcctttccacatagratactgaggacgctwccccttccttgtttctgctcagcccagatgcacagacacyattggcaatgttgaccctcctctgtcatcacagcgccagggcagctgtgcctgggacaggagccacacagtcagagggggatgtaagagccaccttctctgacaaatctggagaattgagtgtgttctaagtgaaggcaatggggtttctccaagacagcctgtgtggcctctactctgaacaaatacactgatgagtcatcagtgaaatttgccttcacattttaagaaaactttatcttatggagttatttaagccatctacagagctgaggaaacagtgtaatgtgtctctgccccattgcgcagctccacccattgtgccccaggccagcccgcgtcacmtacacttccttctgtgccctgccagtgaccyccaggttattctaaagcagagtccttcccttcccccagtgagaaggaaaatgggataagtctgggacactgtttcagttcaataaagaggcttttttcttccttaaaa

SEQ ID NO: 4590 - DNA, 1653 bp, Homo sapiens
acggcgggtcgccagcgcckcagtagctcgcgcggtgcctgtcggtagtcgcgtgcggggcggcggggcggcggggcggccggcggcggccatgggagatatcccagccgtgggcctcagctcctggaaggcttctccagggaaagtgacmgaggcagtgaaagaggccattgaygcagggtaccggcacttcractgtgcttacttttaccacaatgagagggaggttggagcagkgatccgtkgcaagatcaaggaaggcgctgtaagacgggaggatctgttcattgccactaagctgtggtgcacctgccataagaagtccttggtggaaacagcatgcagaargagtctcaaggccttgaagctgaactatttggacctctacctcatacactggcccatgggtttcaagcctcctcatccagaatggatcatgagctgcagtgaactttccttctgcctctcacatcctcgagtgcaggacttgcctctggacgagagcaacatggttattcccagtgacacggacttcctggacacgtgggaggccatggaggacctggtgatyaccgggctggtgaagaacatcggggtgtcaracttcaaccatgaacagcttgagaggcttttgaataagcctgggttgaggttcaagccactaaccaaccagattgagtgccacccrtatcttactcagaagaatctgatcagtttttgccaatccagagatgtgtccgtgactgcttaccgtcctcttggtggctcgtgtgagggggttgacctgatagacaaccctgtgatcaagaggattgcaaaggagcacggcaagtctcctgctcagattttgatccgatttcaaatccagaggaaygtgatagtgatccccggatctatcaccccaagtcacattaaagagaatatccaggtgtttgattttgaattaacacagcacgatatggataacatcctcagcctaaacaggaatctcygactggccatgttccccatgtaaatatggctccttctttttaaaacagagggaagaatatacagattgaatkattggtgtctgaatagaactaaaaatcacaaagactatcctttccacatagratactgaggacgctwccccttccttgtttctgctcagcccagatgcacagacacyattggcaatgttgaccctcctctgtcatcacagcgccagggcagctgtgcctgggacaggagccacacagtcagagggggatgtaagagccaccttctctgacaaatctggagaattgagtgtgttctaagtgaaggcaatggggtttctccaagacagcctgtgtggcctctactctgaacaaatacactgatgagtcatcagtgaaatttgccttcacattttaagaaaactttatcttatggagttatttaagccatctacagagctgaggaaacagtgtaatgtgtctctgccccattgcgcagctccacccattgtgccccaggccagcccgcgtcacmtacacttccttctgtgccctgccagtgaccyccaggttattctaaagcagagtccttcccttcccccagtgagaaggaaaatgggataagtctgggacactgtttcagttcaataaagaggcttttttcttccttaaa

SEQ ID NO: 4591 - DNA, 868 bp, Homo sapiens
atgacggactacctgatcaggggcggcaccgactatgtgcccgataactggctccccgcgcagcagctctttgccagcgccgactgcctcacctacgacgacttcctgattctcccaggattcacagacttcatagctgatgaggcggacctgacctcagccctgacccggaagatcacgctgaagactccgctcatttcctcccccacggacactgtgacaggccgacatagccattgcaatggctctgatgggaggtattggtttcattcaccacaactgcaccccagagttccaggccaaggaggtgcggaaggtcaagaagtttgaacagggcttcatcacggacccggtggtgctgaccccctcgcacactgtgggtgatgtgttggaggccaagatgcggcatggcttctctggcatccccatcactgagacgggcaccataggcagcaagctgaagaacagagactaccctctggcctccaaggattcccacaagcagctactgcgtggggcagctgtgggcacccctgaggatgacaaataccgcctggacttgctcacccaggygggggtagacgtcgtagtcttggacttgtcccaagggaactcggtgtatcagattgccacggtgcattacatcaaacagaagtacccccacctccaggtgattgggatgacagccgcccaggccaaaaacctgattgacgctgcggtggacgggctgcgcataggtatgggctgcggctccatstgcatcacccagraagtgatggcctgcggtgggccccagggcactgcattgtacaaggtggccgagtatgccctgtgctttggtgtgtccatcatagcmgatggcggcatm

SEQ ID NO: 4592 - DNA, 1555 bp, Homo sapiens
cggcagcatggccgcagcgcgggggcagcagcagcaggcggctgcgcgcggatgtcgcagggtttcgcggcagcatgacggactacctgatcaggggcggcaccgactatgtgcccgataactggctccccgcgcagcagctctttgccagcgccgactgcctcacctacgacgacttcctgattctcccaggattcacagacttcatagctgatgaggcggacctgacctcagccctgacccggaagatcacgctgaagactccgctcatttcctcccccacggacactgtgacaggccgacatagccattgcaatggctctgatgggaggtattggtttcattcaccacaactgcaccccagagttccaggccaaggaggtgcggaaggtcaagaagtttgaacagggcttcatcacggacccggtggtgctgaccccctcgcacactgtgggtgatgtgttggaggccaagatgcggcatggcttctctggcatccccatcactgagacgggcaccataggcagcaagctggtgggcatcgtcacctccagagacatcaactttcttgctgaggaggaccacaccaccctcctcagtgttggctccagcaggcctgatgttgaaagaggcaaatgagatcctgcagcatagcaagaaagggaagctgtctttcgtcaatgatccgatgagctggtggccatgatcacctgcaccgacctgaagaagaacagagactaccctctggcctccaaggattcccacaagcagctactgcgtggggcagctgtgggcacccctgaggatgacaaataccgcctggacttgctcacccaggygggggtagacgtcgtagtcttggacttgtcccaagggaactcggtgtatcagattgccacggtgcattacatcaaacagaagtacccccacctccaggtgattgggatgacagccgcccaggccaaaaacctgattgacgctgcggtggacgggctgcgcataggtatgggctgcggctccatstgcatcacccagraagtgatggcctgcggtgggccccagggcactgcattgtacaaggtggccgagtatgccctgtgctttggtgtgtccatcatagcmgatggcggcatmtagaccgtggggcacgtggttaaggccctggcccttggagcctccacagtgatgatgggctccctgctggccaccaccacgtaggaccccggcgagtatttcttctcagatggggtgcggctcaagaagtaccagggcatgggctcactggatgccatggagaagagcagcagcagccagaaatgatacgtcagcaaggggaataaggtgaagatcgcgcagggtgtcttgggctccatccaggacaaaggatccattcataagttcgtgtcctacctcatagcgggcatccagcctggctgycaggatattgggccgcagcctgtctgtccttcagtccatgatgtactcaggagaactgaattttgagaagcaaaccatgtcggcccagatcaagggtggcgtccatggcctgcactct

SEQ ID NO: 4593 - DNA, 7083 bp, Homo sapiens
atgccctcagactcagaaagcagcagctccctcagcagtgtgggcactaccgggaaggcgccgtccccaccacccctcctcactgaccrgcaagtgaatgagaaggtggagaacctctccattcagctgcggctgatgacccgggagagaaacgagctccgcaagcgcctggcstttgctacgcatggcacggcctttgacaagaggccctaccacaggctgaatcctgactatgagaggctgaagatccagtgcgtgcgagccatgtcggacctgcagagcctgcagaaccagcacaccaacgccttgaagaggtgtgaggaggtggccaaggagactgacttctaccacacactccacagccggctcctgagtgaccagactcggctgaaggatgacgtggacatgctgaggcgggagaatgggcagctgctgcgggagcgaaacctgctgcagcagtcatgggaggacatgaagcggctccacgaggaggaccagaaggagatcggtgacctccgtgcccagcagcagcaggtgttgaagcacaacgggtcatccgagattctcaacaaactrtatgacacggccatggacaagttggaggtggtcaagaaggactatgaygcccttcggaagaggtacagtgagaaagtcgccatccacaatgcagacctgagccgcctggagcagctgggggaggagaaccagcggttgctgaagcagacagagatgctgacccagcagagggacacggccatccagctgcagcaccagtgcgccctytccctgaggaggtttgaggcgatccaccatgagctgaacaaggccacggcgcagaacaaggacctgcagtgggagatggagctgctgcagtcagagctgaccgagctgagaaccacgcaggtgaagacagcaaaggagtcggagaaatacagggaggagcgggacgctgtgtacagcgagtacaagctcatcatgagtgagcgtgaccaggtcatctctgagctggacaagctgcagaccgaagtggagctggccgagtccaagctcaagagcagcacatctgagaagaaggcggccaatgaggagatggaggcgctgcggcagatcaaagacacggtgacaatggatgctgggagagccaacaaggaggttgaaatccttcgaaagcagtgcaaggctctgtgccaggagctgaaggaagccctccaggaggcggatgtggccaagtgccggcgggactgggccttccaggagcgagacaagattgtagcagagcgtgacagcatccggacactgtgtgacaacctgaggcgggagcgggaccgtgcggtgagcgagctggctgaggccctgcgcagcctggatgacacccgcaagcagaagaatgatgtcagccgcgagctgaaggagctcaaggaacagatggaatcccagttggaaaaggaggcccggttccgacagctgatggcccacagctcccacgactcggccattgacacggattccatggagtgggaaacggaagttgtagagttcgagagggagacggaggatattgacttgaaggcactggggtttgatatggcagaaggtgtgaatgagccttgtttcccgggggactgtggcatatttgtcactaaagtggacaaaggaagcattgctgatggccgcttaagggtcaatgactggctgctgagaatcaacgatgtggacctcatcaacaaggacaagaagcaggccatcaaggcgctcctcaatggggagggggccatcaacatggtcgtgcggcggaggaagtccctgggtgggaaggtggtcacgccgctgcacatcaacctcagtggacagaaagacagtggcatcagtctggagaatggagtgtatgctgcygctgtgctgcctggaagccctgccgctaaagaagggtcccttgctgtgggagacaggatcgttgcgatcaatggcattgcactggacaacaagtctctgaatgaatgtgaatctctgctgcgsagctgccaggactccctgaccctgtccctcctgaaggtattccctcagagctcctcgtggagtggccagaacatttttgaaaatatcaaagactctgataagatgctgagttttcgagcccatggcccggaggtccaggctcataacaaacggaacttgatacagcacaataactccacgcagacagacatcttctacacggacaggctggaagacaggaaggagccaggccccccaggaggcagcagctcctttctgcataagccattccctgggggacccttgcaggtctgcccccaggcctgtcccagtgcctctgagcgtagcctgagctccttccgctcagatgcctctggggaccgtggctttgggctggtggacgtgcgtggccggcggccactgctgccctttgagaccgaggtgggcccctgtggggttggggaggcctccctggacaaggcagactctgaaggctccaacagcggcgggacctggcccaaggccatgctcagctccacggcagtgcctgagaagctctctgtttataaaaagccaaagcaaagaaagtccatctttgaccctaacactttcaaacgcccccagacaccccccaaaatagactacctgcttccaggtcctgggcctgctcactctccccagccctccaagagggcggggcctctgacacccccaaaacctcccagaaggagcgactccattaagttccagcacaggctggagactagctccgagtcagaagccactctggtgggcagctccccatccactagtcccccgagcgccctgccccctgacgtggaccccggggagcccatgcacgcatcaccccctcgcaaggccagggtccgcattgcttccagctactaccctgaaggagatggggactcctcccacctgccggccaagaaatcctgtgatgaggacctcacctcccagaaggtggatgagctggggcagaagcgtcgccggccaaaatctgctcccagttttcggccgaagcttgctccagtagtgattcctgctcagttcctggaggaacagaagtgtgtcccggccagtggagaactctccccggagctccaggagtgggcaccttactcgcctgggcattccagccggcacagcaaccccccgctataccctagcaggccgtctgtgggyactgttccccggagtttgacccccagcaccactgtgagctccatcctgcggaaccccatctacactgtgcgcagtcacagggtcggcccctgcagctctccacctgcggcccgagatgctggcccccagggtttgcatcccagtgtccagcaccagggacgcctgagcctggacctgagccacaggacctgcagcgactactccgagatgagagccacccatgggtccaactcactgccctccagcgcccgcctgggttcttcgagtaacttgcagttcaaggcggaacgcattaaaatcccatcaacaccaagatatccgcggagtgtcgtgggctcygagagaggttcagtgtcacattctgaatgcagcactcctccacagtcacccctgaacatcgacaccctgtcctcttgtagccagtcccagacctcagcctccacattgcccagaatcgctgtcaaccccgcgtccctcggggagcggagaaaggacaggccttatgtggaggagccacgccacgtgaaggtgcagaagggctcagagccgctgggcatctccatcgtgagtggagagaagggcggcatctacgtctccaaggtgaccgtggggagcatcgctcaccaggctggcctcgagtatggggatcagttactggagttcaacggcataaacctgcggagcgccacggagcagcaggcgcggctcatcatcgggcagcagtgtgataccatcaccatcctggcccagtacaacccccacgtgcaccagctcagcagccactcccggtccagctcacacctggaccctgccggtacccactccactctccagggcagtggcaccaccaccccggagcatccatctgtcatcgacccactgatggagcaggacgaggggcctagcaccccccmagccaagcagagcagctccaggattgcgggagatgccaacaagaagaccctggagccacgcgttgtcttcatcaaaaagtcccagctggagcttggggtgcacttgtgtggtgggaacctgcatggggtgtttgtggccgaggtggaggatgacagtcctgccaagggtcctgacggcctcgtgccaggggacctcatcctggagtatggcagcctggacgtgcggaacaagacagtggaggaagtctatgtggagatgctgaagcccagggatggcgtccgcctgaaggtgcagtaccgccctgaggagttcacgaaggccaagggcctgcctggtgacagcttctacatcagggycctgtacgaccggctggcagatgtggagcaagagttgagctttaagaaggaygacatcctctacgtggatgacaccttaccccagggcacgttcgggtcctggatggcttggcagctggacgagaatgcccagaagatccagcgcgggcagattcccagcaaatatgtgatggaccaagaattctccaggaggctcagcatgtctgaagtcaaagatgacaatagcgccacaaagacgctgtcagcggctgcacgccgrtccttttttcggaggaaacacaagcacaaacgcagcgggtccaaggacgggaaagacctgctcgccttggatgccttttccagtgactccattccactctttgaaggcaaattcggtgagcctggcctatcagcgggtccagaaggtggactgcaccgctctgaggcctgtcctgattctggggcctttgctggacgtggtgaaggagatgctggtgaatgaggctcctggcaagttctgcagatgtccccttgaggtgatgaaggcctcccagcaggccattgagcggggtgtcaaagattgcctgtttgtcgactataagcggagaagcggccatttcgatgtgaccactgtggcgtcaataaaggagatcacagaaaagaaccgacactgcctcctggacattgctccgcacgctattgagcggctccaccacatgcacatctaccccattgtcatcttcatccactacaagagcgccaagcacatcaaggagcagagagaccccatctacctgagggacaaggtgactcagaggcattccaaagagcartttgaggcggcgcagaagcttgagcaggagtacagcaggtacttcacaggggtcatccagggaggagccctgtcaagcatttgcactcagatcttggcaatggtcaatcaagaacaaaataaagtcctgtggattccagcctgcccgctctaggagaatgctgtgctgtggatgactgcagctggccgcctgaggggacrccagactcagctcttttctagcgactgaaagtagaagtctgtcygtctatgaacatgcrggggaaggatccggaaccaggacccagaagcacctcctttgtagacagagggccacggctgcgtgcgatccaggcccaggmccacacactctgcccgtgtcacacgtgtgctttaacacaaaacagataacactaaagacgggttcagcacccacctttctttagccagctgatcagagatgctgcaaagagaacctttcggatcactcgtttacaagccttttctaagtatttggtggtttatgtttacttgaacggctccatgttgccggtgcccagcccctgtcccctctgtcaaccccctgtcgctttggtgttggtttcgttcccgtcttcagcaaaacgaccttggaacctcaatgggggctgctttgctttgggaggttcttgttggtgggaccagagctttgacaaacctcctgctccttggtggcacctctcctggaaggacrtcacaactccaggtgctcagactgcctgtggcagcagaaccagtgcctttggcattttcctcccacaatggggaaggtgactttggcattcttacaaactcgtctctcggcctttctctcctgccttccacagcctctcgtttctcctccatctgtgcttattacttgaggactgtgtctgctccgtgagagctgcgtgggcagggctgcagtggggtccaggtggtgttcagctgtgctgatgcctgccattgggtcctccttaggctctgtaagtcgtgacagccttcatcagtgcaatgtttgcagggtaattcttaaactttttagagggtggcaggtacatcagttctttttgatatgaaaacattcatgtttcagacattgaattgagagcttttaggggaagcataatggttattgtcactatcaacagtctaaaaagaaaaactgaggtctttttaatcttgattacagcactcacggcatgcaccctactcagtgtgggtgtcttcgtttgggggctttttttttttttgcacttctgaggctagatatgtctggctgaagatttgatgtggttcctccttaagctatgcgtcctgttaataataggtactgtactgggctctgtgtaagtgtcgttggggtaggacctatattttaatactgttcctaacatttcattttactagcgagaaatctttgatttcattttattctttgtaattctagacactagattgtagtttagccataactgatgttttttaaaaagggatatattttcttgcacagttgttcaaaaaagagacaagtttcagtcctcaatgctgtcctttgttttacaggtacaagttttctagctcagacaaactatgaaaaactgtagactattctcaaggtattaactcgcagaccctctgggggtaggggctgttttytaagttacaggcagagtgggactgagatggtacagtgtgcacaracaggtactgagctgacagactggrattttctgtactaaaatgttactttgtatcaaaagttaaacaggctttagtacaacaaataaaggtcaatttctgtaa

SEQ ID NO: 4594 - DNA, 4037 bp, Homo sapiens
tagcagacactcttgcccttgcatctgcaggaacagaagtgtgtcccggccagtggagaactctccccggagctccaggagtgggcaccttactcgcctgggcattccagccggcacagcaaccccccgctataccctagcaggccgtctgtgggyactgttccccggagtttgacccccagcaccactgtgagctccatcctgcggaaccccatctacactgtgcgcagtcacagggtcggcccctgcagctctccacctgcggcccgagatgctggcccccagggtttgcatcccagtgtccagcaccagggacgcctgagcctggacctgagccacaggacctgcagcgactactccgagatgagagccacccatgggtccaactcactgccctccagcgcccgcctgggttcttcgagtaacttgcagttcaaggcggaacgcattaaaatcccatcaacaccaagatatccgcggagtgtcgtgggctcygagagaggttcagtgtcacattctgaatgcagcactcctccacagtcacccctgaacatcgacaccctgtcctcttgtagccagtcccagacctcagcctccacattgcccagaatcgctgtcaaccccgcgtccctcggggagcggagaaaggacaggccttatgtggaggagccacgccacgtgaaggtgcagaagggctcagagccgctgggcatctccatcgtgagtggagagaagggcggcatctacgtctccaaggtgaccgtggggagcatcgctcaccaggctggcctcgagtatggggatcagttactggagttcaacggcataaacctgcggagcgccacggagcagcaggcgcggctcatcatcgggcagcagtgtgataccatcaccatcctggcccagtacaacccccacgtgcaccagctcagcagccactcccggtccagctcacacctggaccctgccggtacccactccactctccagggcagtggcaccaccaccccggagcatccatctgtcatcgacccactgatggagcaggacgaggggcctagcaccccccmagccaagcagagcagctccaggattgcgggagatgccaacaagaagaccctggagccacgcgttgtcttcatcaaaaagtcccagctggagcttggggtgcacttgtgtggtgggaacctgcatggggtgtttgtggccgaggtggaggatgacagtcctgccaagggtcctgacggcctcgtgccaggggacctcatcctggagtatggcagcctggacgtgcggaacaagacagtggaggaagtctatgtggagatgctgaagcccagggatggcgtccgcctgaaggtgcagtaccgccctgaggagttcacgaaggccaagggcctgcctggtgacagcttctacatcagggycctgtacgaccggctggcagatgtggagcaagagttgagctttaagaaggaygacatcctctacgtggatgacaccttaccccagggcacgttcgggtcctggatggcttggcagctggacgagaatgcccagaagatccagcgcgggcagattcccagcaaatatgtgatggaccaagaattctccaggaggctcagcatgtctgaagtcaaagatgacaatagcgccacaaagacgctgtcagcggctgcacgccgrtccttttttcggaggaaacacaagcacaaacgcagcgggtccaaggacgggaaagacctgctcgccttggatgccttttccagtgactccattccactctttgaagattcggtgagcctggcctatcagcgggtccagaaggtggactgcaccgctctgaggcctgtcctgattctggggcctttgctggacgtggtgaaggagatgctggtgaatgaggctcctggcaagttctgcagatgtccccttgaggtgatgaaggcctcccagcaggccattgagcggggtgtcaaagattgcctgtttgtcgactataagcggagaagcggccatttcgatgtgaccactgtggcgtcaataaaggagatcacagaaaagaaccgacactgcctcctggacattgctccgcacgctattgagcggctccaccacatgcacatctaccccattgtcatcttcatccactacaagagcgccaagcacatcaaggagcagagagaccccatctacctgagggacaaggtgactcagaggcattccaaagagcartttgaggcggcgcagaagcttgagcaggagtacagcaggtacttcacaggggtcatccagggaggagccctgtcaagcatttgcactcagatcttggcaatggtcaatcaagaacaaaataaagtcctgtggattccagcctgcccgctctaggagaatgctgtgctgtggatgactgcagctggccgcctgaggggacrccagactcagctcttttctagcgactgaaagtagaagtctgtcygtctatgaacatgcrggggaaggatccggaaccaggacccagaagcacctcctttgtagacagagggccacggctgcgtgcgatccaggcccaggmccacacactctgcccgtgtcacacgtgtgctttaacacaaaacagataacactaaagacgggttcagcacccacctttctttagccagctgatcagagatgctgcaaagagaacctttcggatcactcgtttacaagccttttctaagtatttggtggtttatgtttacttgaacggctccatgttgccggtgcccagcccctgtcccctctgtcaaccccctgtcgctttggtgttggtttcgttcccgtcttcagcaaaacgaccttggaacctcaatgggggctgctttgctttgggaggttcttgttggtgggaccagagctttgacaaacctcctgctccttggtggcacctctcctggaaggacrtcacaactccaggtgctcagactgcctgtggcagcagaaccagtgcctttggcattttcctcccacaatggggaaggtgactttggcattcttacaaactcgtctctcggcctttctctcctgccttccacagcctctcgtttctcctccatctgtgcttattacttgaggactgtgtctgctccgtgagagctgcgtgggcagggctgcagtggggtccaggtggtgttcagctgtgctgatgcctgccattgggtcctccttaggctctgtaagtcgtgacagccttcatcagtgcaatgtttgcagggtaattcttaaactttttagagggtggcaggtacatcagttctttttgatatgaaaacattcatgtttcagacattgaattgagagcttttaggggaagcataatggttattgtcactatcaacagtctaaaaagaaaaactgaggtctttttaatcttgattacagcactcacggcatgcaccctactcagtgtgggtgtcttcgtttgggggctttttttttttttgcacttctgaggctagatatgtctggctgaagatttgatgtggttcctccttaagctatgcgtcctgttaataataggtactgtactgggctctgtgtaagtgtcgttggggtaggacctatattttaatactgttcctaacatttcattttactagcgagaaatctttgatttcattttattctttgtaattctagacactagattgtagtttagccataactgatgttttttaaaaagggatatattttcttgcacagttgttcaaaaaagagacaagtttcagtcctcaatgctgtcctttgttttacaggtacaagttttctagctcagacaaactatgaaaaactgtagactattctcaaggtattaactcgcagaccctctgggggtaggggctgttttytaagttacaggcagagtgggactgagatggtacagtgtgcacaracaggtactgagctgacagactggrattttctgtactaaaatgttactttgtatcaaaagttaaacaggctttagtacaacaaataaaggtcaatttctgtaa

SEQ ID NO: 4595 - DNA, 2187 bp, Homo sapiens
cagggccgggaacctgggcaagccaataaaggctgcggcgcgcggctgcgcgggactcggccttctgggcgcgcgcgacgtcagtttgagttctgtgttctcyccgcccgtgtcccgcccgaccsgcgcccgcgatgctggcgctgcgctgcggctcccgctggctcggcctgctctccgtcccgcgctccgtgccgctgcgcctccccgcggcccgcgcctgcagcaagggctccggcgacccgtcctcttcctcctcctccgggaacccgctcgtgtacctggaygtggacgccaacgggaagccgctcggccgcgtggtgctggagctgaaggcagatgtcgtcccaaagacagctgagaacttcagagccctgtgcactggtgagaagggcttyggctacaaaggctccaccttccacagggtgatcccttccttcatgtgccaggcgggcgacttcaccaaccacaatggcacaggcgggaagtccatctacggaagccgctttcctgacgagaactttacactgaagcacgtggggccaggtgtcctgtccatggctaatgctggtcctaacaccaacggctcccagttcttcatctgcaccataaagacagactggttggatggcaagcatgttgtgttcggtcacgtcaaagagggcatggacgtcgtgaagaaaatagaatctttyggctctaagagtgggaggacatccaagaagattgtcatcacagactgtggccagttgagctaatctgtggccagggtgctggcatggtggcagctgcaaatgtccatgcacccaggtggccgcgttgggctgtcagccaaggtgcctgaaacgatacgtgtgcccactcyactgtcacagtgtgcctgaggaaggctgctagggatgttagacctcggccaggacccaccacattgcttcctaatacccacccttcctcacgacctcatttctgggcatytttgtggacatgatgtcacccaccccttgtcaagcattgcctgtgattgcccagcccagattcatctgtgccttggacatggtgatggtgatgggttgccatccaagtgaaagtcttttccttgaccaagggggacagtcagttttgcaaaaggactctaatacctttaattaacaagattgactagaagtgaaactgcaacactaacttccccrtgctgtggtgtgacctgagttggtgacacaggccacagaccccagagcttggcttttgaaacacaactcagggcttttgtgaaggttcccccgctgagatctttcctcctggttactgtgaagcctgttggtttgctgctgtcgtttttgaggagggcccatgggggtaggagcagttgaacctgggaacaaacctcacttgagctgtgcctagacaatgtgaattcctgtgttgctaacagaagtggcctgtaagctcctgtgctccggagggaagcatttcctggtaggctttgatttttctgtgtgttaaagaaattcaatctactcatgatgtgttatgcataaaacatttytggaacatggatttgtgttcaccttaaatgtgaaaataaatcctattttctatggaagactggtacctggtttctggaagaggggtctgtgacttggagctgatctttactgagctcgccgtggcagatgccatgctcaggacgttcatgtggatggtttcatgtcatcgtgctggcaacttgtcctccctgccttagagatgaggctcagacaaacgaccttagcacccatagcctatgccatgagcactggctccaccctgaatcccagctcctccccttagtgaccccaagtctgtttccctcagctgcataaggaggcgatatagtttgaatatttgtccccagccaaatctcatgttgaactgtaatccccagtgctggaggtggggcctgstacgaggtgtttggatcatggggacgggtatttcatggcttggtgctgttttcttgatggtgaattattgcaagatacggtcatttaaaattgtgtggcacctccccctgcccccttcttgctcctgctttcaccatgtgacatgyctgatcccccttcaccttttgccatggtcataagcttcctgaggsctccctggaagctgagcagatgccagcaccatgcttcctgtacatcctgcaga

SEQ ID NO: 4596 - DNA, 2250 bp, Homo sapiens
cagggccgggaacctgggcaagccaataaaggctgcggcgcgcggctgcgcgggactcggccttctgggcgcgcgcgacgtcagtttgagttctgtgttctcyccgcccgtgtcccgcccgaccsgcgcccgcgatgctggcgctgcgctgcggctcccgctggctcggcctgctctccgtcccgcgctccgtgccgctgcgcctccccgcggcccgcgcctgcagcaagggctccggcgacccgtcctcttcctcctcctccgggaacccgctcgtgtacctggaygtggacgccaacgggaagccgctcggccgcgtggtgctggagctgaaggcagatgtcgtcccaaagacagctgagaacttcagagccctgtgcactggtgagaagggcttyggctacaaaggctccaccttccacagggtgatcccttccttcatgtgccaggcgggcgacttcaccaaccacaatggcacaggcgggaagtccatctacggaagccgctttcctgacgagaactttacactgaagcacgtggggccaggtgtcctgtccatggctaatgctggtcctaacaccaacggctcccagttcttcatctgcaccataaagacagactggttggatggcaagcatgttgtgttcggtcacgtcaaagagggcatggacgtcgtgaagaaaatagaatctttyggctctaagagtgggaggacatccaagaagattgtcatcacagactgtggccagttgagctaatctgtggccagggtgctggcatggtggcagctgcaaatgtccatgcacccaggtggccgcgttgggctgtcagccaaggtgcctgaaacgatacgtgtgcccactcyactgtcacagtgtgcctgaggaaggctgctagggatgttagacctcggccaggacccaccacattgcttcctaatacccacccttcctcacgacctcatttctgggcatytttgtggacatgatgtcacccaccccttgtcaagcattgcctgtgattgcccagcccagattcatctgtgccttggacatggtgatggtgatgggttgccatccaagtgaaagtcttttccttgaccaagggggacagtcagttttgcaaaaggactctaatacctgtttaatattgtcttcctaattgggataatttaattaacaagattgactagaagtgaaactgcaacactaacttccccrtgctgtggtgtgacctgagttggtgacacaggccacagaccccagagcttggcttttgaaacacaactcagggcttttgtgaaggttcccccgctgagatctttcctcctggttactgtgaagcctgttggtttgctgctgtcgtttttgaggagggcccatgggggtaggagcagttgaacctgggaacaaacctcacttgagctgtgcctagacaatgtgaattcctgtgttgctaacagaagtggcctgtaagctcctgtgctccggagggaagcatttcctggtaggctttgatttttctgtgtgttaaagaaattcaatctactcatgatgtgttatgcataaaacatttytggaacatggatttgtgttcaccttaaatgtgaaaataaatcctattttctatggaagactggtacctggtttctggaagaggggtctgtgacttggagctgatctttactgagctcgccgtggcagatgccatgctcaggacgttcatgtggatggtttcatgtcatcgtgctggcaacttgtcctccctgccttagagatgaggctcagacaaacgaccttagcacccatagcctatgccatgagcactggctccaccctgaatcccagctcctccccttagtgaccccaagtctgtttccctcagctgcataaggaggcgatatagtttgaatatttgtccccagccaaatctcatgttgaactgtaatccccagtgctggaggtggggcctgstacgaggtgtttggatcatggggacgggtatttcatggcttggtgctgttttcttgatggtgaattattgcaagatacggtcatttaaaattgtgtggcacctccccctgcccccttcttgctcctgctttcaccatgtgacatgyctgatcccccttcaccttttgccatggtcataagcttcctgaggsctccctggaagctgagcagatgccagcaccatgcttcctgtacatcctgcagaaccataagccaattaaacctttttaataataaa

SEQ ID NO: 4597 - DNA, 2111 bp, Homo sapiens
cagggccgggaacctgggcaagccaataaaggctgcggcgcgcggctgcgcgggactcggccttctgggcgcgcgcgacgtcagtttgagttctgtgttctcyccgcccgtgtcccgcccgaccsgcgcccgcgatgctggcgctgcgctgcggctcccgctggctcggcctgctctccgtcccgcgctccgtgccgctgcgcctccccgcggcccgcgcctgcagcaagggctccggcgacccgtcctcttcctcctcctccgggaacccgctcgtgtacctggaygtggacgccaacgggaagccgctcggccgcgtggtgctggagctgaaggcagatgtcgtcccaaagacagctgagaacttcagagccctgtgcactggtgagaagggcttyggctacaaaggctccaccttccacagggtgatcccttccttcatgtgccaggcgggcgacttcaccaaccacaatggcacaggcgggaagtccatctacggaagccgctttcctgacgagaactttacactgaagcacgtggggccaggttggatggcaagcatgttgtgttcggtcacgtcaaagagggcatggacgtcgtgaagaaaatagaatctttyggctctaagagtgggaggacatccaagaagattgtcatcacagactgtggccagttgagctaatctgtggccagggtgctggcatggtggcagctgcaaatgtccatgcacccaggtggccgcgttgggctgtcagccaaggtgcctgaaacgatacgtgtgcccactcyactgtcacagtgtgcctgaggaaggctgctagggatgttagacctcggccaggacccaccacattgcttcctaatacccacccttcctcacgacctcatttctgggcatytttgtggacatgatgtcacccaccccttgtcaagcattgcctgtgattgcccagcccagattcatctgtgccttggacatggtgatggtgatgggttgccatccaagtgaaagtcttttccttgaccaagggggacagtcagttttgcaaaaggactctaatacctttaattaacaagattgactagaagtgaaactgcaacactaacttccccrtgctgtggtgtgacctgagttggtgacacaggccacagaccccagagcttggcttttgaaacacaactcagggcttttgtgaaggttcccccgctgagatctttcctcctggttactgtgaagcctgttggtttgctgctgtcgtttttgaggagggcccatgggggtaggagcagttgaacctgggaacaaacctcacttgagctgtgcctagacaatgtgaattcctgtgttgctaacagaagtggcctgtaagctcctgtgctccggagggaagcatttcctggtaggctttgatttttctgtgtgttaaagaaattcaatctactcatgatgtgttatgcataaaacatttytggaacatggatttgtgttcaccttaaatgtgaaaataaatcctattttctatggaagactggtacctggtttctggaagaggggtctgtgacttggagctgatctttactgagctcgccgtggcagatgccatgctcaggacgttcatgtggatggtttcatgtcatcgtgctggcaacttgtcctccctgccttagagatgaggctcagacaaacgaccttagcacccatagcctatgccatgagcactggctccaccctgaatcccagctcctccccttagtgaccccaagtctgtttccctcagctgcataaggaggcgatatagtttgaatatttgtccccagccaaatctcatgttgaactgtaatccccagtgctggaggtggggcctgstacgaggtgtttggatcatggggacgggtatttcatggcttggtgctgttttcttgatggtgaattattgcaagatacggtcatttaaaattgtgtggcacctccccctgcccccttcttgctcctgctttcaccatgtgacatgyctgatcccccttcaccttttgccatggtcataagcttcctgaggsctccctggaagctgagcagatgccagcaccatgcttcctgtacatcctgcaga

SEQ ID NO: 4598 - DNA, 2043 bp, Homo sapiens
gcgcgcgacgtcagtttgagttctgtgttctcyccgcccgtgtcccgcccgaccsgcgcccgcgatgctggcgctgcgctgcggctcccgctggctcggcctgctctccgtcccgcgctccgtgccgctgcgcctccccgcggcccgcgcctgcagcaagggctccggcgacccgtcctcttcctcctcctccgggaacccgctcgtgtacctggaygtggacgccaacgggaagccgctcggccgcgtggtgctggaggtgagaccgctcgcagggccggcctgggcgcgggacacgggcccggggagagccctgggccccgggcggcgcggtgccgggcgcgctgggtgaccttgggcctccccatgccgagctctgggcctcagtttccccatttctgagaatgggcgtcagaatgatttcttccggcctccctcggagcactggagcgggggagacgggagggagggcacgtgtggaggagaaagctcaaggtcagatcgcagagagggagggctcagcacctctgggccggcccgggcacgagggaggggctccaggagccttctggggctgagcctagatccggagctccgaggtgggtgtcgggggtcttggggtgagcgtcgtggcccagcgggtgctcacgtggcggcccttgcacaacacggagcgcttcctggctccggccccgcccctgcggtcgggctcacactgggggtgctgggaaatggagcgagaggtggtttccagcagtagtgcgggcccagtaggcctcaggccccggccacctggtggaccccagaatgcccctcctgcgagtcgggacacactcagagacagtgtgcccggcgcctcaacccctgccactgtccttgggggccacactgagcacctcccctaactctgtttttgggtcttttctaaagcaaagtaagaaacagtcaccagggtagctttagagggaaagccctagtggagccttcaggtcggccacacattgacagcaggggtctgtttgtgttgactggcccgtatcccagggagcccttagtatttcttcttcattctcagtttcttctggaaaatagggacacccttcctgcttccatttggttccagggtgggtcttgcagcttcgagggtagaggctggctgggatggggcttcagccttccctccccayaccctcatgcctctccctgggcctcagtttcccaaccccgaatggaggagctggyctggcttctaccttagacacactctcttgtccctgaatttctgatgctttgggcccagctgtgggagcactgccagctgtgtccacagaagtaggccaagatagcattgtcatctcttctgacagattaggaaaccaaggccacctcctccagccttgggttcaggaaacggctcccagaaatgatagagctgcctcccatgggggttggcaataatgggaatggaatgtccacgtgcttcttccttagcctccttggccactgtgggggtgggtgggtgctgagagacacccaccttcacctgcctctccaatgaccatcctcttttgtccttcttctcccccaacagctgaaggcagatgtcgtcccaaagacagctggtaagacagggcctgggrccttctgagatgggtctagagggaagggggccaggcagggcaaggtgggtggcstgatgagaagagtcrgggctcrgagacccctgacagatgggagctccatgtgtggctcagccattgggtgctctggggcagccctgccatccctctctgggcctcaacgttggctctgccctcctctctcatagtagctgggagcctcagagccagtggaaggcacatgtaaatttcccggagacttcyccactcctggtgcccagtgaggcagggtgatgggcacacagcccttgagtccgtgccctgctggccagcacagccatgagcctgtactcttgtcacagtgctcaggtactgaggacagggaaggggagtgacttgtccagttacatagcgagttgggcag

SEQ ID NO: 4599 - DNA, 1935 bp, Homo sapiens
aggcgcggccgggctttccagcctgtggccgctcccggctcggagtgtgatctaagcaggtygcgtaccttcctcaggtgactccggccacagcccattgtccgcggccaccggcggagtttagccgcagacctcgaagcgccccggggtccttcccgaacggcagcggctgcggcgggtccatsgagaagggccctgtgcgggcaccggcggagaagccgcggggcgccaggtgcagcaatgggttccycgagcgggatccgccgcggcccgggcccagcaggccggcggagaagcccccgcggcccgaggccaagagcgcgyagcccgcggacggctggaagggckagcggccccgcagckaggaggataackagctgaacctccctaaccwggcagccgyctamtcgtccatccygagctcgctggscgagaacccccagysgyaagkgctgctcaagamgccctgragggcggcctcggccatgcagttcttcaccaagggctaccaggagaccatctcagatgtcctaaacgatgctatatttgatgaagatcatgatgagatggtgattgtgaaggwcawagacatgttttccatgtgtgagcatcacttggttccatttgttggaaaggtccatattggttatcttcctaacaagcaagtccttggcctcagcaaacttgcgaggattgtagaaatctatagtagaagactacaagttcaggagcrccktamaaaacaaattgctgtagcaatcacggaagccttgcggcctgctggagtcrgggtagtggttgaagcaacgaagtcaaataaatataataaagggttgagccctctactttcttcttgccacctttttgtggcaatattaaagtgaactgctaatagtgtctgcagaaccatagcttccacgcacctgaacgagcacagaatgaactgacggtggaagacattatgagctgtgtccaacgttttaaccaaagcgtatcgtaccaacgatctgtgaaaatgcactggaagcttctggtcccggtttcctttgtggtctatgtgggtcttgtcctcattgtaactccgtatagatggtataggtattttaatcctggaagctgttgccttattaatgattatcttaaaatttcctccattggggcagcgtgggccaaattaaaacaaacaaaaccgcaactcctccacagaaacacaaacacagttattccatgaagtttagtatttggttgacatagtgctcttcaaattcatcccattaccctaaaagtaataactttgatgcttgctttaactttagtcccatctctgccactttgatgctatttgggttatgatggggcaagatggcagaggtattgggtttttttgtttttttccattcctctctacttctgtttcctagctttttctttctggagtttaagtacagtgatggttggcttgagtacctttttaaatctagcccagtataaacattagcctgcttaatatttagacatttataggtagaattctgagcactcaactcatgtttggcattttaaagtaaaaacaagtgtgacttcgaggaccaaagaaattgtcagctatacatttatctttatgaactcatttatattcctttttaatgactcgttgttctaacatttcctagaagtgttcttataaaggtctaatgtatccacaggctgttgtcttattagtaaatgcaaagtaatgactttgtctgttttactctagtctttagtacttcaaaattaccttttcatatccatgatcttgagtccatttgggggatttttaagaatttgatgtatttcaatacactgttcaaaattaaattgtttaattttatgtatgagtatgtatgttcctgaagttggtcctatttaaattattaaactattgtaactttg

SEQ ID NO: 4600 - DNA, 2335 bp, Homo sapiens
aggcgcggccgggctttccagcctgtggccgctcccggctcggagtgtgatctaagcaggtygcgtaccttcctcaggtgactccggccacagcccattgtccgcggccaccggcggagtttagccgcagacctcgaagcgccccggggtccttcccgaacggcagcggctgcggcgggtccatsgagaagggccctgtgcgggcaccggcggagaagccgcggggcgccaggtgcagcaatgggttccycgagcgggatccgccgcggcccgggcccagcaggccggcggagaagcccccgcggcccgaggccaagagcgcgyagcccgcggacggctggaagggckagcggccccgcagckaggaggataackagctgaacctccctaaccwggcagccgyctamtcgtccatccygagctcgctggscgagaacccccagysgyaagkgctgctcaagamgccctgragggcggcctcggccatgcagttcttcaccaagggctaccaggagaccatctcagatgtcctaaacgatgctatatttgatgaagatcatgatgagatggtgattgtgaaggwcawagacatgttttccatgtgtgagcatcacttggttccatttgttggaaaggtccatattggttatcttcctaacaagcaagtccttggcctcagcaaacttgcgaggattgtagaaatctatagtagaagactacaagttcaggagcrccktamaaaacaaattgctgtagcaatcacggaagccttgcggcctgctggagtcrgggtagtggttgaagcaacacacrtrtgtrtggtaatgygaggtgtacagaaaatgaacagcwraactgtgaccagcacaatgttgggtgtgtyccgggaggatccaaagactygggaagagttcctgactctcattagsagctgagcttcattcagtgtgtgtgcgttggttgccgatcgtactgccagtagcattgtctgtctgtccggtcttgtttgtacattccattttcaattgttacagatgtgaactttattccttgtcactaattatatttaaaattatttctaggaagtcaaataaatataataaagggttgagccctctactttcttcttgccacctttttgtggcaatattaaagtgaactgctaatagtgtaagyaygtgcacaaaaccactgccagataaccagaggggcctgggaagggagaagaattagtgtatttttttcaaatagtacagtaatttgcctcataagcataggagcattgggaatgagagggaactgtgcccagtatactgttttttttcttcctccaataaaagtggtgtagtgccgaaagtgctaaaatatttagtgcggtattgctctgtgaattcaagttcaacagacttcactttggtcatgtttattaaaccaccagtgacatttaaaaatatatttttagcagtcgtaatgttagtcaccaagggaaggtggtggaatgtctatgtttttgattttactgtgagttaaaaaggcacatttctaccttctattgtttttaaattcaagaatagggaattagttcctggtgttgtttacgagtgtattctcgtgtcaacatacagggatttagacatttaactctctgtgccttgataagaatatcatttagagtgtagatacttttgcctttttaaaaaagccattattttatgagacttagtactcacactgcaaataactagtcagctcagttttaactttataggtttattgagtttcctttgtgtgatccatgtagatgcctcaaaatgtttcttcttcttcttttttttaatcttataagatatttttctaagtatttccagaaacatttgagagtgcccatcattttcaggtctgcagaaccatagcttccacgcacctgaacgagcacagaatgaactgacggtggaagacattatgagctgtgtccaacgttttaaccaaagcgtatcgtaccaacgatctgtgaaaatgcactggaagcttctggtcccggtttcctttgtggtctatgtgggtcttgtcctcattgtaactccgtatagatggtataggtattttaatcctggaagctgttgccttattaatgattatcttaaaatttcctccattggggcagcgtgggccaaattaaaacaaacaaaaccgcaactcctccacagaaacacaaacacagttattccatgaagtttagtatttggttgacatagtgctcttcaaattcatcccattaccctaaaagctatttgggttatgatggggcaagatggcagaggtattgggttttttt

SEQ ID NO: 4601 - DNA, 2936 bp, Homo sapiens
aggcgcggccgggctttccagcctgtggccgctcccggctcggagtgtgatctaagcaggtygcgtaccttcctcaggtgactccggccacagcccattgtccgcggccaccggcggagtttagccgcagacctcgaagcgccccggggtccttcccgaacggcagcggctgcggcgggtccatsgagaagggccctgtgcgggcaccggcggagaagccgcggggcgccaggtgcagcaatgggttccycgagcgggatccgccgcggcccgggcccagcaggccggcggagaagcccccgcggcccgaggccaagagcgcgyagcccgcggacggctggaagggckagcggccccgcagckaggaggataackagctgaacctccctaaccwggcagccgyctamtcgtccatccygagctcgctggscgagaacccccagysgyaagkgctgctcaagamgccctgragggcggcctcggccatgcagttcttcaccaagggctaccaggagaccatctcagatgtcctaaacgatgctatatttgatgaagatcatgatgagatggtgattgtgaaggwcawagacatgttttccatgtgtgagcatcacttggttccatttgttggaaaggtccatattggttatcttcctaacaagcaagtccttggcctcagcaaacttgcgaggattgtagaaatctatagtagaagactacaagttcaggagcrccktamaaaacaaattgctgtagcaatcacggaagccttgcggcctgctggagtcrgggtagtggttgaagcaacacacrtrtgtrtggtaatgygaggtgtacagaaaatgaacagcwraactgtgaccagcacaatgttgggtgtgtyccgggaggatccaaagactygggaagagttcctgactctcattagsagctgagcttcattcagtgtgtgtgcgttggttgccgatcgtactgccagtagcattgtctgtctgtccggtcttgtttgtacattccattttcaattgttacagatgtgaactttattccttgtcactaattatatttaaaattatttctaggaagtcaaataaatataataaagggttgagccctctactttcttcttgccacctttttgtggcaatattaaagtgaactgctaatagtgtaagyaygtgcacaaaaccactgccagataaccagaggggcctgggaagggagaagaattagtgtatttttttcaaatagtacagtaatttgcctcataagcataggagcattgggaatgagagggaactgtgcccagtatactgttttttttcttcctccaataaaagtggtgtagtgccgaaagtgctaaaatatttagtgcggtattgctctgtgaattcaagttcaacagacttcactttggtcatgtttattaaaccaccagtgacatttaaaaatatatttttagcagtcgtaatgttagtcaccaagggaaggtggtggaatgtctatgtttttgattttactgtgagttaaaaaggcacatttctaccttctattgtttttaaattcaagaatagggaattagttcctggtgttgtttacgagtgtattctcgtgtcaacatacagggatttagacatttaactctctgtgccttgataagaatatcatttagagtgtagatacttttgcctttttaaaaaagccattattttatgagacttagtactcacactgcaaataactagtcagctcagttttaactttataggtttattgagtttcctttgtgtgatccatgtagatgcctcaaaatgtttcttcttcttcttttttttaatcttataagatatttttctaagtatttccagaaacatttgagagtgcccatcattttcaggtctgcagaaccatagcttccacgcacctgaacgagcacagaatgaactgacggtggaagacattatgagctgtgtccaacgttttaaccaaagcgtatcgtaccaacgatctgtgaaaatgcactggaagcttctggtcccggtttcctttgtggtctatgtgggtcttgtcctcattgtaactccgtatagatggtataggtattttaatcctggaagctgttgccttattaatgattatcttaaaatttcctccattggggcagcgtgggccaaattaaaacaaacaaaaccgcaactcctccacagaaacacaaacacagttattccatgaagtttagtatttggttgacatagtgctcttcaaattcatcccattaccctaaaagtaataactttgatgcttgctttaactttagtcccatctctgccactttgatgctatttgggttatgatggggcaagatggcagaggtattgggtttttttgtttttttccattcctctctacttctgtttcctagctttttctttctggagtttaagtacagtgatggttggcttgagtacctttttaaatctagcccagtataaacattagcctgcttaatatttagacatttataggtagaattctgagcactcaactcatgtttggcattttaaagtaaaaacaagtgtgacttcgaggaccaaagaaattgtcagctatacatttatctttatgaactcatttatattcctttttaatgactcgttgttctaacatttcctagaagtgttcttataaaggtctaatgtatccacaggctgttgtcttattagtaaatgcaaagtaatgactttgtctgttttactctagtctttagtacttcaaaattaccttttcatatccatgatcttgagtccatttgggggatttttaagaatttgatgtatttcaatacactgttcaaaattaaattgtttaattttatgtatgagtatgtatgttcctgaagttggtcctatttaaattattaaactattgtaactttg

SEQ ID NO: 4602 - DNA, 877 bp, Homo sapiens
atgttctctcatgcgggcatcactgggctgttggcctggaccttgcagccacaatggattcaagttcgaaatacagcaacttcgaaagatgttaccaagcgactaaagtccatcaaaaacatccagaaaattaccaagtctatgcaaatgatgaaaagcgaggttgctacactaacagcagctgggaaagaagttatgcttgttggaattggtgacaaaatcaggggcgtactttacaggatgcattctgaccagtttctggtggcattaaaagaagtgagaagaaatccccctgcttttggaaatgtgtcagtcattgcccttgaattactaaattctggatatgaatttgatgaaggctccatcrtctttaatcagttcaagtctgtcatctcgtataagactgaagaaaagcccatctttttccttaataccattgcaagtgccragagcatgagtatctactataatattgatgctgaggtgctgcaaaattaccaggaatacagtctggccaacagcatctactactctctgaaggagtccaccactagtgagcagagtgccaggatgacagccatggacaacaccagcaagaatgcctctgagatgattgacaaattgacattgacattcaactgtacccgccaagctgtcatcacaaaagagttgactgaaattatctttggtgctgtagctctggattaatgaaaatcaagttccatcctcagacaaggggtaaagaaggaaaattcagccagctgattttgtttttagcttactgttgtctttgtcagaagaaagtgttcctccattgttttaattactgaagacagcaagataagtgtaaattattttacaataaacaacttaaaat

SEQ ID NO: 4603 - DNA, 1065 bp, Homo sapiens
atgttctctcatgcgggcatcactgggctgttggcctggaccttgcagccacaatggattcaagttcgaaatacagcaacttcgaaagatgttaccaagcgactaaagtccatcaaaaacatccagaaaattaccaagtctatgcaaatggtagcagcagcaaaatacgcccaagctgagagagagctgaaaccagcttgaatatatggattgggatctttggctctggagaaaaagctggtatcaaggtgcctgaagacaacaagaaacacctccttattggtgtgtcctcagatcgaggactgtgtggcgctattcattcctccattgctaaacagatgaaaagcgaggttgctacactaacagcagctgggaaagaagttatgcttgttggaattggtgacaaaatcaggggcgtactttacaggatgcattctgaccagtttctggtggcattaaaagaagtgagaagaaatccccctgcttttggaaatgtgtcagtcattgcccttgaattactaaattctggatatgaatttgatgaaggctccatcrtctttaatcagttcaagtctgtcatctcgtataagactgaagaaaagcccatctttttccttaataccattgcaagtgccragagcatgagtatctactataatattgatgctgaggtgctgcaaaattaccaggaatacagtctggccaacagcatctactactctctgaaggagtccaccactagtgagcagagtgccaggatgacagccatggacaacaccagcaagaatgcctctgagatgattgacaaattgacattgacattcaactgtacccgccaagctgtcatcacaaaagagttgactgaaattatctttggtgctgtagctctggattaatgaaaatcaagttccatcctcagacaaggggtaaagaaggaaaattcagccagctgattttgtttttagcttactgttgtctttgtcagaagaaagtgttcctccattgttttaattactgaagacagcaagataagtgtaaattattttacaataaacaacttaaaat

SEQ ID NO: 4604 - DNA, 4498 bp, Homo sapiens
cagtgcgcaggcgcagccggcgcgtttctccgggctacagccggcgccgccgcccgctagtccgccgcccggcgccatggcgggctgcgcggcgcgggctccgccgggctctgaggcgcgtctcagcctcgccaccttcctgctgggcgcctcggtgctcgcgctgccgctgctcacgcgcgccggcctgcagggccgcaccgggctggcgctctacgtggccgggctcaacgcgctgctgctgctgctctatcggccgcctcgctaccagatagccatccgagcttgtttcctggggtttgtgttcggctgcggcacgctgctaagttttagccagtcttcttggagtcactttggctggtacatgtgctccctgtcattgttccactattctgaatacttggtgacagcagtcaataatcccaaaagtctgtccttggattcctttctcctgaatcacagcctggagtatacagtagctgctctttcttcttggttagagttcacacttgaaaatatcttttggccagaactgaagcagattacctggctcagtgtcacagggctgctgatggtggtcttcggagaatgtctgaggaaggcggccatgtttacagctggctccaatttcaaccacgtrgtacagaatgaaaaatcagatacacatactctggtgaccagtggagtgtacgcttggtttcggcatccttcttacgtcgggtggttttactggagtattggaactcaggtgatgctgtgtaaccccatctgcggcgtcagctatgccctgacagtgtggcgattcttccgcgatcgaacagaagaagaagaaatctcactaattcacttttttggagaggagtacctggagtataagaagagggtgcccacgggcctgcctttcataaagggggtcaaggtggacctgtgacgggcagtggccccggtgaccttggggcctccgaccctgtgcagcctgggacaaaactgtttccggttggccgctgccacatggattttcttaatcgttttatgtcattagtcactcttctggaatgtcactcaagaccaagcggtcagaaggcctgaggacccaaggccccactggagcagtctgtccttatgccgaatcaaggcggaacatgggtgaaagacgagtaaggggcaaatcacagcaatattccacagcgccctccagagttacctggggaggaccgaggccacacgccactgcccccgaggccagagtgtaagtaaaggataaccaggactcgctgggagagatggactctktcctcagcaacactccacagcagaaaggggtagcaggtaccccttcttatcagcggtaaaaatgcatttacaacctttcatttaaccgaaaaacacaraccgctttaacctctttatttctgtcccccactgcatgaacatctatacaattttaaaaatacttcctcataggatgctttggcccttcatctatttaatcatagctacatacctattttttataagtagcagtacacattcaaaggggtattcctagctcaatgcttggtgttctagttcaacttttatcctgcagcaagtaagcctagataactctacacratttggctgagtggctttgtgtgaccgtggccccaggccaaggggatcatggccctggctggctttcccgggggtctcagctcctgttgtcagtgataggcggctcaaaggagcatcagtttcttttgatccaagaagtgcttactgaatgcctgccctgtgcgtggccttaaacattgagaagtgctgctctccgtttatttgggatttgattctcattttaccatagcttatattctcaatttcaatgccagtctcagaactcttgttttctgtgttctgttctcaaaattacattgtccctcatgtcatttcaaactgttttccaaagggatttgagcatatacaactacaaatccaagcagattgactctcaaaaataatcttaaatactgcaaatagtcccaactaagattcagtcagtatgtttgttttgcaagtttgggagagtaagttggctttgagtcacacatcgaagctttaagaggtgagacgctggcttcattctggactagacaggaacttggcctcagcgtgagatcctgccatgcagtgttgcggtggcactgaagaagtgtgaatgtgaaggcggcgtcggcgcggggccagagcaccactctgctgccccaccacgcggcctgtgaggagccactaaacctttccgtgcctagacctccccatctgtggaatggggtcaataccacctacctcacaggggtgttgtgaggactgagaagaacaatgtcaaatgtttttaatactcagatgtgggagcgacatcaatgaaatctgtactgtatgaaagctacacaaaaatgggcagacatttggttaattgtgccagatacctaaaatgtaygttcagaaaagcattttatcaactcagaaatatgacttatttctagatttcatggcttaatgaattttttcattgttatatataccaaagaggcttacgggttcattgattggtttgaaaaccagacagacggccgggcgcgcctcggcctcccaaagtgctgggattacaggcgtgagccaccacgcccagccaagatgaactccttaaggacaggatttggtaagtgattgacttctttttagttccatgatcttgagattatttttagctttataaatttagcagtggcagggcccgtggagaatcaggttaatgaggtaaaggctttctgggtatttgctgccaaggccacatcaccaattttctcgatttaaaaaactgtcaagagatttatttttccattgcaggttttaaagtggagattctgaagtggaaaataggtactgtcagaacaaagctacctggaaacagcatagagtgaagcctttcgtgagggcttgcaggccgctgctgagtggcagtttacagaagaggtygcggggtgagcctcttagcaggacagaaaacaaggcagcagcgcacctgccaccccttcacgagctgctccttgagcctaaaaagtaggctttattcatcccttctgttcatttaccaacctgggggattgatacgaccggggaaaatgttcctaaaccaggaagctgcrttagccgatcaggcttkgtaagatctcgccaacagctagctgcttaggagtacccccacgatacgcacagcacaccactgtcccttcactgcactttcttcctgccttaggtagttgggcttgcccaccctagtttgcttttgtagtggtttggcaaggttagaaggcctcggcctctctgtcatgctgggaagtgcctactctctgggccactgctgcagaggcygtggcacttgtcatgggtttggaagacccagccatctgcagcagaggcagcctatcccattgcaaggagaggaactgaacrgagtaattattctactcttctttttacataaatgtttatttaaatattctaaattggattttcwttcacagatactgattattctttccagttcttaaataaaactgcacttgatttcactcaaccacagtgtgattgtctgggatgtgaaactctgaggtcactcttgggtaagaagcgtcttaagcctttagcctcaaacgacgtgtgtttggcctcctcaatttctttctgaattcctacctctaaccagttgtaatgataattccttttgccctgcaggccaccacataggtttgtaaggccttggaacaggagcctcagtgcccctgaagtagcaggtgcagggacagtggacgtcaatgtgagtgatgtgttatgtgttgaatgtgctgccatgttagcacgtagacccatttgctgttaatcactgaatcaagctgaatatttgcttaaatgtgactatctgggcatcattttgccacaaaaacttgtaaaattttacgtcacgtgggttactttttaaaaagcatttattaagctcctctaaatgaaaaggatactgtggagaaatggaaaactgctgggaaaaaactactagaaaaaaggttgctgccacccagtgccttgctatcaacggaagtcggactcaggagggctgcaggagtttgggaaagcagcgaagttgtaactgagaccatctgccacataagctggccaggtgctaacccctggctttaggagctctgcccttgctggaaagggagagaagctggagcaaacgttcctcatccttccatgagtcactgctcagattactgtgtggaacttcccagtagcaccaggttaacagtgggactgttattccggaggaactggattcctttgcaatagggcaggtgccactcagtggtggagtcttgttacctaaaaccggcacaccctgacataccacactctgcccagcacagggcctggcacaccgacgctcggtgcgtaggtgtggaac

SEQ ID NO: 4605 - DNA, 4482 bp, Homo sapiens
cagtgcgcaggcgcagccggcgcgtttctccgggctacagccggcgccgccgcccgctagtccgccgcccggcgccatggcgggctgcgcggcgcgggctccgccgggctctgaggcgcgtctcagcctcgccaccttcctgctgggcgcctcggtgctcgcgctgccgctgctcacgcgcgccggcctgcagggccgcaccgggctggcgctctacgtggccgggctcaacgcgctgctgctgctgctctatcggccgcctcgctaccagatagccatccgagcttgtttcctggggtttgtgttcggctgcggcacgctgctaagttttagccagtcttcttggagtcactttggctggtacatgtgctccctgtcattgttccactattctgaatacttggtgacagcagtcaataatcccaaaagtctgtccttggattcctttctcctgaatcacagcctggagtatacagtagctgctctttcttcttggttagagttcacacttgaaaatatcttttggccagaactgaagcagattacctggctcagtgtcacagggctgctgatggtggtcttcggagaatgtctgaggaaggcggccatgtttacagctggctccaatttcaaccacgtrgtacagaatgaaaaatcagatacacatactctggtgaccagtggagtgtacgcttggtttcggcatccttcttacgtcgggtggttttactggagtattggaactcaggtgatgctgtgtaaccccatctgcggcgtcagctatgccctgacagtgtggcgattcttccgcgatcgaacagaagaagaagaaatctcactaattcacttttttggagaggagtacctggagtataagaagagggtgcccacgggcctgcctttcataaagggggtcaaggtggacctgtgacgggcagtggccccggtgaccttggggcctccgaccctgtgcagcctgggacaaaactgtttccggttggccgctgccacatggattttcttaatcgttttatgtcattagtcactcttctggaatgtcactcaagaccaagcggtcagaaggcctgaggacccaaggccccactggagcagtctgtccttatgccgaatcaaggcggaacatgggtgaaagacgagtaaggggcaaatcacagcaatattccacagcgccctccagagttacctggggaggaccgaggccacacgccactgcccccgaggccagagtgtaagtaaaggataaccaggactcgctgggagagatggactctktcctcagcaacactccacagcagaaaggggtagcaggtaccccttcttatcagcggtaaaaatgcatttacaacctttcatttaaccgaaaaacacaraccgctttaacctctttatttctgtcccccactgcatgaacatctatacaattttaaaaatacttcctcataggatgctttggcccttcatctatttaatcatagctacatacctattttttataagtagcagtacacattcaaaggggtattcctagctcaatgcttggtgttctagttcaacttttatcctgcagcaagtaagcctagataactctacacratttggctgagtggctttgtgtgaccgtggccccaggccaaggggatcatggccctggctggctttcccgggggtctcagctcctgttgtcagtgataggcggctcaaaggagcatcagtttcttttgatccaagaagtgcttactgaatgcctgccctgtgcgtggccttaaacattgagaagtgctgctctccgtttatttgggatttgattctcattttaccatagcttatattctcaatttcaatgccagtctcagaactcttgttttctgtgttctgttctcaaaattacattgtccctcatgtcatttcaaactgttttccaaagggatttgagcatatacaactacaaatccaagcagattgactctcaaaaataatcttaaatactgcaaatagtcccaactaagattcagtcagtatgtttgttttgcaagtttgggagagtaagttggctttgagtcacacatcgaagctttaagaggtgagacgctggcttcattctggactagacaggaacttggcctcagcgtgagatcctgccatgcagtgttgcggtggcactgaagaagtgtgaatgtgaaggcggcgtcggcgcggggccagagcaccactctgctgccccaccacgcggcctgtgaggagccactaaacctttccgtgcctagacctccccatctgtggaatggggtcaataccacctacctcacaggggtgttgtgaggactgagaagaacaatgtcaaatgtttttaatactcagatgtgggagcgacatcaatgaaatctgtactgtatgaaagctacacaaaaatgggcagacatttggttaattgtgccagatacctaaaatgtaygttcagaaaagcattttatcaactcagaaatatgacttatttctagatttcatggcttaatgaattttttcattgttatatataccaaagaggcttacgggttcattgattggtttgaaaaccagacagacggccgggcgcgtgctgggattacaggcgtgagccaccacgcccagccaagatgaactccttaaggacaggatttggtaagtgattgacttctttttagttccatgatcttgagattatttttagctttataaatttagcagtggcagggcccgtggagaatcaggttaatgaggtaaaggctttctgggtatttgctgccaaggccacatcaccaattttctcgatttaaaaaactgtcaagagatttatttttccattgcaggttttaaagtggagattctgaagtggaaaataggtactgtcagaacaaagctacctggaaacagcatagagtgaagcctttcgtgagggcttgcaggccgctgctgagtggcagtttacagaagaggtygcggggtgagcctcttagcaggacagaaaacaaggcagcagcgcacctgccaccccttcacgagctgctccttgagcctaaaaagtaggctttattcatcccttctgttcatttaccaacctgggggattgatacgaccggggaaaatgttcctaaaccaggaagctgcrttagccgatcaggcttkgtaagatctcgccaacagctagctgcttaggagtacccccacgatacgcacagcacaccactgtcccttcactgcactttcttcctgccttaggtagttgggcttgcccaccctagtttgcttttgtagtggtttggcaaggttagaaggcctcggcctctctgtcatgctgggaagtgcctactctctgggccactgctgcagaggcygtggcacttgtcatgggtttggaagacccagccatctgcagcagaggcagcctatcccattgcaaggagaggaactgaacrgagtaattattctactcttctttttacataaatgtttatttaaatattctaaattggattttcwttcacagatactgattattctttccagttcttaaataaaactgcacttgatttcactcaaccacagtgtgattgtctgggatgtgaaactctgaggtcactcttgggtaagaagcgtcttaagcctttagcctcaaacgacgtgtgtttggcctcctcaatttctttctgaattcctacctctaaccagttgtaatgataattccttttgccctgcaggccaccacataggtttgtaaggccttggaacaggagcctcagtgcccctgaagtagcaggtgcagggacagtggacgtcaatgtgagtgatgtgttatgtgttgaatgtgctgccatgttagcacgtagacccatttgctgttaatcactgaatcaagctgaatatttgcttaaatgtgactatctgggcatcattttgccacaaaaacttgtaaaattttacgtcacgtgggttactttttaaaaagcatttattaagctcctctaaatgaaaaggatactgtggagaaatggaaaactgctgggaaaaaactactagaaaaaaggttgctgccacccagtgccttgctatcaacggaagtcggactcaggagggctgcaggagtttgggaaagcagcgaagttgtaactgagaccatctgccacataagctggccaggtgctaacccctggctttaggagctctgcccttgctggaaagggagagaagctggagcaaacgttcctcatccttccatgagtcactgctcagattactgtgtggaacttcccagtagcaccaggttaacagtgggactgttattccggaggaactggattcctttgcaatagggcaggtgccactcagtggtggagtcttgttacctaaaaccggcacaccctgacataccacactctgcccagcacagggcctggcacaccgacgctcggtgcgtaggtgtggaac

SEQ ID NO: 4606 - DNA, 1655 bp, Homo sapiens
atgctcctgcttcggagaagcttgtcactaaacgtcctcagaaaggaagtcgacagggcctgttttggggagaaggccaaacagatcatgcggccagatgatgccaacgtggccggcaatgtccacggggggaccatcctgaagatgatcgaggaggcaggcgccatcatcagcacccggcattgcaacagccagaacggggagcgctgtgtggccgccctggctcgtgtcgagcgcaccgacttcctgtctcccatgtgcatcggtgaggtggcgcatgtcagcgcggagatcacctacacctccaagcactctgtggaggtgcaggtcaacgtgatgtccgaaaacatcctcacaggtgccaaaaagctgaccaataaggccaccctgtggtatgtgcccctgtcgctgaagaatgtggacaaggtcctcgaggtgcctcctgttgtgtattcccggcaggagcaggaggaggagggccggaagcggtatgaagcccagaagctggagcgcatggagaccaagtggaggaacggggacatcgtccagccagtcctcaacccagagccgaacactgtcagctacagccagtccagcttgatccacctggtggggccttcagactgcaccctgcacggctttgtgcacggaggtgtgaccatgaagctcatggatgaggtcgccgggatcgtggctgcacgccactgcaagaccaacatcgtcacagcttccgtggaygccattaattttcatgacaagatcagaaaaggctgcgtcatcaccatctcgggacgcatgaccttcacgagcaataagtccatggagatcgaggtgttggtggacgccgaccctgttgtggacagctctcagaagcgctaccgggccgccagtgccttcttcacctacgtgtcgctgagccaggaaggcaggtcgctgcctgtgccccagctggtgcccgagayygaggacgagaagaagcgctttgaggaaggcaaagggcggtacctgcagatgaaggcgaagcgacagggccacgcggagcctcagccctagactccctcctcctgccactggtgcctcgagtagccatggcaacgggcccagtgtccagtcacttagaagttccccccttggccaaaaacccaattcacattgagagctggtgttgtctgaagttttcgtatcacagtgttaacctgtactctctcctgcaaacctacacaccaaagctttatttatatcattccagtatcaatgctacacagtgttgtcccgagcgccgggaggcgttgggcagaaaccctcgggaatgcttccgagcacgctgtagggtatgggaagaacccagcmccactaataaagctgctgcttggctggacccacgtgtcctgggtggtcatttgtcttgggggggctgctttcccagggggtgtgggacattggggctcccgtggacagtctcagccctcccagcaccagcacctgcatgtaccctagaacctcaggcacagccacaccgattggtgtccggctggtgacttgctggctatgaatgcccatttcccgtgggtccctggtttggtgtcctggccccagacaccctggctccctggacctcataggcagcccagatgctgggaggatgtgggctcagg

SEQ ID NO: 4607 - DNA, 1910 bp, Homo sapiens
gggctggtgggggaggggcggtcctaggaggagcaggagcctggtgctttctatcagggagggatcacaccggctcactgctgagccggccaggcagacacaggcttgggctctgctgggcatcatacttgtcactgggtaaacagtttgcccacttaccgcaggatgaagctgcttgccagggctctccggctctgtgagtttgggaggcaggcatcttccaggaggctggtggctggccagggatgtgtggggccccggcgagggtgctgcgctcccgtccaggtggttgggcccagggctgatctcccaccctgtggagcctgcattactggaaggatcatgcggccagatgatgccaacgtggccggcaatgtccacggggggaccatcctgaagatgatcgaggaggcaggcgccatcatcagcacccggcattgcaacagccagaacggggagcgctgtgtggccgccctggctcgtgtcgagcgcaccgacttcctgtctcccatgtgcatcggtgaggtggcgcatgtcagcgcggagatcacctacacctccaagcactctgtggaggtgcaggtcaacgtgatgtccgaaaacatcctcacaggtgccaaaaagctgaccaataaggccaccctgtggtatgtgcccctgtcgctgaagaatgtggacaaggtcctcgaggtgcctcctgttgtgtattcccggcaggagcaggaggaggagggccggaagcggtatgaagcccagaagctggagcgcatggagaccaagtggaggaacggggacatcgtccagccagtcctcaacccagagccgaacactgtcagctacagccagtccagcttgatccacctggtggggccttcagactgcaccctgcacggctttgtgcacggaggtgtgaccatgaagctcatggatgaggtcgccgggatcgtggctgcacgccactgcaagaccaacatcgtcacagcttccgtggaygccattaattttcatgacaagatcagaaaaggctgcgtcatcaccatctcgggacgcatgaccttcacgagcaataagtccatggagatcgaggtgttggtggacgccgaccctgttgtggacagctctcagaagcgctaccgggccgccagtgccttcttcacctacgtgtcgctgagccaggaaggcaggtcgctgcctgtgccccagctggtgcccgagayygaggacgagaagaagcgctttgaggaaggcaaagggcggtacctgcagatgaaggcgaagcgacagggccacgcggagcctcagccctagactccctcctcctgccactggtgcctcgagtagccatggcaacgggcccagtgtccagtcacttagaagttccccccttggccaaaaacccaattcacattgagagctggtgttgtctgaagttttcgtatcacagtgttaacctgtactctctcctgcaaacctacacaccaaagctttatttatatcattccagtatcaatgctacacagtgttgtcccgagcgccgggaggcgttgggcagaaaccctcgggaatgcttccgagcacgctgtagggtatgggaagaacccagcmccactaataaagctgctgcttggctggacccacgtgtcctgggtggtcatttgtcttgggggggctgctttcccagggggtgtgggacattggggctcccgtggacagtctcagccctcccagcaccagcacctgcatgtaccctagaacctcaggcacagccacaccgattggtgtccggctggtgacttgctggctatgaatgcccatttcccgtgggtccctggtttggtgtcctggccccagacaccctggctccctggacctcataggcagcccagatgctgggaggatgtgggctcagg

SEQ ID NO: 4608 - DNA, 2549 bp, Homo sapiens
ttttttggtgaccccgactggcctagactccattcaagggcacatcttgtgcagtaaaacacgcatgtttcagggctcctcactgcaacacgtgcacctccaggctggcgctcagcgctcccagwaaaagctgcaggcggcggtgtagatagtcgccggcctttcctcctccccacctcgtgacgctttgtgctgcggaagcaaaggcccgttccattccccgtgtcttcccagcagccgccaccaatgctcctttctaggaaacagccttccattctctcttagggccgatcttagcgagagccgcgatgcgggcgactggtgccggggtgggttgggggcgggggtgggaatcaggccccactgccaggagcccgggccgcgccttccgctctgacctcatccggccgcccaggcactgggcgcggcagcgaatcggcggcgcgggcggccgggaacgcccagcacaaatatttaccgccgcgcggagagtgagggcccaagtccgccctgctccgccacttaggccgccccagacgcttccctcggggctgccaccgggtcgggcgcggctgccgcggctagcgggccttccccgcaccggcgcggcccaaccgccaccgaaccttctggaagcggcggctgcctgggcccccacgccgccagaatcgtacgcccgcgcgagctctctgcagccttggcggcctgggaggcggggctcggggtggggccggcgcgggggcggggtcggcgcggggaggccgcgttcgattgcccccggcgcgcaggccccgcctcaccagccccatcgctccacctctgccctccccctttatggcgcggcccgggctcattcattccgcgccgggcctgccagacacctgcgcccttctgcagccgcccgccgcatccgccgccgcagcccccagcatgtcgggcccagacgtcgagacgccgtccgccatccagatctgccggatcatgcggccagatgatgccaacgtggccggcaatgtccacggggggaccatcctgaagatgatcgaggaggcaggcgccatcatcagcacccggcattgcaacagccagaacggggagcgctgtgtggccgccctggctcgtgtcgagcgcaccgacttcctgtctcccatgtgcatcggtgaggtggcgcatgtcagcgcggagatcacctacacctccaagcactctgtggaggtgcaggtcaacgtgatgtccgaaaacatcctcacaggtgccaaaaagctgaccaataaggccaccctgtggtatgtgcccctgtcgctgaagaatgtggacaaggtcctcgaggtgcctcctgttgtgtattcccggcaggagcaggaggaggagggccggaagcggtatgaagcccagaagctggagcgcatggagaccaagtggaggaacggggacatcgtccagccagtcctcaacccagagccgaacactgtcagctacagccagtccagcttgatccacctggtggggccttcagactgcaccctgcacggctttgtgcacggaggtgtgaccatgaagctcatggatgaggtcgccgggatcgtggctgcacgccactgcaagaccaacatcgtcacagcttccgtggaygccattaattttcatgacaagatcagaaaaggctgcgtcatcaccatctcgggacgcatgaccttcacgagcaataagtccatggagatcgaggtgttggtggacgccgaccctgttgtggacagctctcagaagcgctaccgggccgccagtgccttcttcacctacgtgtcgctgagccaggaaggcaggtcgctgcctgtgccccagctggtgcccgagayygaggacgagaagaagcgctttgaggaaggcaaagggcggtacctgcagatgaaggcgaagcgacagggccacgcggagcctcagccctagactccctcctcctgccactggtgcctcgagtagccatggcaacgggcccagtgtccagtcacttagaagttccccccttggccaaaaacccaattcacattgagagctggtgttgtctgaagttttcgtatcacagtgttaacctgtactctctcctgcaaacctacacaccaaagctttatttatatcattccagtatcaatgctacacagtgttgtcccgagcgccgggaggcgttgggcagaaaccctcgggaatgcttccgagcacgctgtagggtatgggaagaacccagcmccactaataaagctgctgcttggctggacccacgtgtcctgggtggtcatttgtcttgggggggctgctttcccagggggtgtgggacattggggctcccgtggacagtctcagccctcccagcaccagcacctgcatgtaccctagaacctcaggcacagccacaccgattggtgtccggctggtgacttgctggctatgaatgcccatttcccgtgggtccctggtttggtgtcctggccccagacaccctggctccctggacctcataggcagcccagatgctgggaggatgtgggctcagg

SEQ ID NO: 4609 - DNA, 1743 bp, Homo sapiens
gggcagctcaggaagctgggggtggggggtgctccccaccaagcccggtgtggcagggagctgggacagtcctgggtcaggcaaggactctgtgatgcttccctgctccctcgcctttctctgcatctgatcctgggatgtcctagccaccatggctttccagctgagcaggatcatgcggccagatgatgccaacgtggccggcaatgtccacggggggaccatcctgaagatgatcgaggaggcaggcgccatcatcagcacccggcattgcaacagccagaacggggagcgctgtgtggccgccctggctcgtgtcgagcgcaccgacttcctgtctcccatgtgcatcggtgaggtggcgcatgtcagcgcggagatcacctacacctccaagcactctgtggaggtgcaggtcaacgtgatgtccgaaaacatcctcacaggtgccaaaaagctgaccaataaggccaccctgtggtatgtgcccctgtcgctgaagaatgtggacaaggtcctcgaggtgcctcctgttgtgtattcccggcaggagcaggaggaggagggccggaagcggtatgaagcccagaagctggagcgcatggagaccaagtggaggaacggggacatcgtccagccagtcctcaacccagagccgaacactgtcagctacagccagtccagcttgatccacctggtggggccttcagactgcaccctgcacggctttgtgcacggaggtgtgaccatgaagctcatggatgaggtcgccgggatcgtggctgcacgccactgcaagaccaacatcgtcacagcttccgtggaygccattaattttcatgacaagatcagaaaaggctgcgtcatcaccatctcgggacgcatgaccttcacgagcaataagtccatggagatcgaggtgttggtggacgccgaccctgttgtggacagctctcagaagcgctaccgggccgccagtgccttcttcacctacgtgtcgctgagccaggaaggcaggtcgctgcctgtgccccagctggtgcccgagayygaggacgagaagaagcgctttgaggaaggcaaagggcggtacctgcagatgaaggcgaagcgacagggccacgcggagcctcagccctagactccctcctcctgccactggtgcctcgagtagccatggcaacgggcccagtgtccagtcacttagaagttccccccttggccaaaaacccaattcacattgagagctggtgttgtctgaagttttcgtatcacagtgttaacctgtactctctcctgcaaacctacacaccaaagctttatttatatcattccagtatcaatgctacacagtgttgtcccgagcgccgggaggcgttgggcagaaaccctcgggaatgcttccgagcacgctgtagggtatgggaagaacccagcmccactaataaagctgctgcttggctggacccacgtgtcctgggtggtcatttgtcttgggggggctgctttcccagggggtgtgggacattggggctcccgtggacagtctcagccctcccagcaccagcacctgcatgtaccctagaacctcaggcacagccacaccgattggtgtccggctggtgacttgctggctatgaatgcccatttcccgtgggtccctggtttggtgtcctggccccagacaccctggctccctggacctcataggcagcccagatgctgggaggatgtgggctcagg

SEQ ID NO: 4610 - DNA, 6674 bp, Homo sapiens
ccgaggccgcctcgcccgccgcgcgcgccggtccggcagcgcacgggttaaggctggcaccgcgcccggcgggagggggggcgcccacctcccctcctccccgcgccgggcatgcggggcccagtgggcaccgaggaggagctgccgcggctgttcgccgaggagatggagaatgaggacgagatgtcagaagaagaagatggtggtcttgaagccttcgatgactttttccctgtggagcccgtgagccttcctaagaagaagaaacccaagaagctcaaggaaaacaagtgtaaagggaagcggaagaagaaagaggggagcaatgatgagctatcagagaatgaagaggatctggaagagaagtcggagagtgaaggcagtgactactccccgaataaaaagaagaagaagaaactcaaggacaagaaggagaaaaaagccaagcgaaaaaagaaggatgaggatgaggatgataatgatgatggatgcttaaaggagcccaagtcctcggggcagctcatggccgagtggggcctggacgacgtggactacctgttctcggaggaggattaccacacgctgaccaactacaaggccttcagccagttcctcaggccactcattgccaagaagaacccgaagatccccatgtccaaaatgatgaccgtcctgggtgccaagtggcgggagttcagcgccaacaaccccttcaagggcagctccgcggcagcagcggcggcggcggtggctgcggctgtagagacggtcaccatctcccctccgctagccgtcagccccccgcaggtgccccagcctgtgcctatccgcaaggccaagaccaaggagggcaaagggcctggagtgaggaagaagatcaaaggctccaaagatgggaagaaaaagggcaaagggaaaaagacggccgggctcaagttccgcttcggggggatcagcaacaagaggaagaaaggctcctcgagtgaagaagatgagagggaggagtcggacttygacagcgccagcatccacagtgcctccgtgcgctccgaatgctctgcagccctgggcaagaagagcaagaggaggcgcaagaagaagaggattgatgatggtgacggctatgagacagaccaccaggattactgtgaggtgtgccagcagggtggggagatcatcctgtgcgacacctgcccgagggcctaccatctcgtrtgcctggacccagagctggagaaggctcccgagggcaagtggagctgcccccactgtgagaaggaggggatccagtgggagccgaaggacgacgacgatgaagaggaggagggcggctgcgaggaggaggaggacgaccacatggagttctgccgcgtgtgcaaggacgggggcgagctgctctgctgcgacgcctgcccctcctcctaccacctgcattgcctcaacccgccgctgcccgagatcccaaacggtgaatggctctgcccgcgctgtacttgccccccactgaagggcaaagtccagcggattctacactggaggtggacggagccccctgcccccttcatggtggggctgccggggcctgacgtggagcccagcctccctccacctaagcccctggagggcatccctgagagagagttctttgtcaagtgggcagggctgtcctactggcaytgctcctgggtgaaggagctacagctggagctgtaccacacggtgatgtatcgcaactaccaaagaaagaacgacatggatgagccgcccccctttgactacggctctggggatgaagacggcaagagcgagaagaggaagaacaaggaccccctctatgccaagatggaggagcgcttctaccgctatggcatcaagccagagtggatgatgattcaccgaatcctgaaccatagctttgacaagaagggggatgtgcactacctgatcaagtggaaagacctgccctacgaccagtgcacctgggagatcgatgacatcgacatcccctactacgacaacctcaagcaggcctactggggccacagggagctgatgctgggagaagacaccaggctgcccaagaggctgctcaagaagggcaagaagctgagggacgacaagcaggagaagccgccggacacgcccattgtggaccccacggtcaagttcgacaagcagccatggtacatcgactccacaggcggcacactgcacccgtaccagctggagggcctcaactggctgcgcttctcttgggcccagggcactgacaccatcctggccgatgagatgggtctgggcaagacggtgcagaccatcgtgttcctttactccctctacaaggagggccactccaaagggccctacctggttagcgcgcccctctccaccatcatcaactgggaacgcgagtttgagatgtgggcgcccgacttctacgtggtcacctacacgggggacaaggagagccgctcggtgattcgggagaaygagttttcctttgaggacaacgccattcggagtgggaagaaggtattccgtatgaagaaagaagtgcagatcaaattccacgtgctgctcacctcctatgagctcatcaccatygaccaggccatcctgggctccatcgagtgggcctgcctggtggtagatgaggcccaccgcctcaagaacaaccagtccaagttttttagggtcttaaacagctacaagattgattacaagctgctgctgacagggaccccccttcagaacaacctggaggagctgttccatctcctcaacttcctgactccagagaggttcaacaacctggagggcttcctggaggagtttgctgacatctccaaggaagaccagatcaagaagctgcatgacctgctggggccgcacatgctcaggcggctcaaggctgacgtgttcaagaacatgccggccaagaccgagctcattgtccgggtggagctgagccagatgcagaagaagtactacaagttcatcctcacacggaactttgaggcactgaactccaaggggggcgggaaccaagtatcgctgctcaacatcatgatggacctgaaaaagtgctgcaaccacccctacctcttccctgtggctgccgtggaggcccctgtcttgcccaatggctcctacgatggaagctccctggtcaagtcttcagggaagctcatgctgctacagaagatgctgaagaaactgcgggatgaggggcaccgtgtgctcatcttctcccagatgaccaagatgctggacctcctggaggacttcctggagtacgaaggctacaagtatgagcggattgatggtggcatcaccgggggcctccggcaggaggcaatcgacagattcaatgcccccggggcccagcagttctgcttcctcctctcaacccgggcaggtggtctgggcatcaacctggccacggcrgacactgtcatcatctacgactcggactggaacccgcacaatgacatccaggccttcagccgcgcccaccgcatcggccagaacaagaaggtgatgatctaccgcttcgtgactcgggcctcggtggaggagcgcatcacgcaggtggccaagcgcaagatgatgctcacccacctggtggtgcggcccggcctcggctccaagtcggggtccatgaccaagcaggagctggacgacatcctcaagttcggcacggaggaactcttcaaggacgacgtggagggcatgatgtctcagggccagaggccggtcacacccatccctgatgtccagtcctccaaaggggggaacttggccgccagtgcaaagaagaagcacggtagcaccccgccaggtgacaacaaggacgtggaggacagcagtgtgatccactatgacgatgcggccatctccaagctgctggaccggaaccaggacgctacagatgacacggagctacagaacatgaacgagtacctgagctccttcaaggtggcgcagtacgtggtgcgcgaggaggacggcgtggaggaggtggagcgggaaatcatcaagcaggaggagaacgtggaccccgactactgggagaagctgctgcggcaccactatgagcagcagcaggaggacctggcccgcaacctgggcaagggcaagcgcatccgcaagcaggtcaactacaacgatgcctcccaggaggaccaggagtggcaggatgagctctctgataaccagtcagaatattccattggctctgaggatgaggatgaggactttgaagagaggccggaagggcagagtggacgacgacaatcccggaggcagctgaagagtgacagggacaagcccctgcccccgcttctcgcccgagttggtggcaacatcgaggtgctgggcttcaatgcccgacagcggaaggcctttctgaacgccatcatgcgctggggcatgcccccgcaggacgccttcaactcccactggctggtgcgggaccttcgagggaagagcgagaaggagtttagagcctatgtgtccctcttcatgcggcacctgtgtgagccgggggcggatggtgcagagaccttcgcagacggcgtgccccgggagggcctctccaggcagcacgtgctgacccgcatcggggtcatgtcactagttaggaagaaggttcaggagtttgagcatgtcaacgggaagtacagcaccccagacttgatccctgaggggcccgaggggaagaagycgggcgaggtgatctcctcggaccccaacacaccagtgcccgccagccctgcccacctcctgccagccccgctgggcctgccagacaaaatggaagcccagctgggctacatggatgagaaagaccccggggcacagaagccaaggcagcccctggaagtccaggcccttccagccgccttggatagagtggagagtgaggacaagcacgagagcccagccagcaaggagagagcccgagaggagcggccagaggagacggagaaggccccgccctccccggagcagctgccgagagaggaggtgcttcctgagaaggagaagatcctggacaagctggagctgagcttgatccacagcagaggggacagttccgaactcaggccagatgacaccaaggctgaggagaaggagcccattgaaacacagcaaaatggtgacaaagaggaagatgacgaggggaagaaggaggacaagaaggggaaattcaagttcatgttcaacatcgcggacgggggcttcacggagttgcacacgctgtggcagaacgaggagcgggctgctgtatcctctgggaaaatctacgacatctggcaccggcgccatgactactggctgctggcgggcatcgtgacgcacggctacgcccgctggcaggacatccagaatgacccacggtacatgatcctcaacgagcccttcaagtctgaggtccacaagggcaactacctggagatgaagaacaagttcctggcccgcaggtttaagctgctggagcaggcgttggtcattgaggagcagctccggagggccgcgtacctgaacatgacgcaggaccccaaccaccccgccatggccctcaacgcccgcctggctgaagtggagtgcctcgccgagagccaccagcacctgtccaaggagtcccttgctgggaacaagcctgccaatgccgtcctgcacaaggtcctgaaccagctggaggagctgctgagcgacatgaaggccgacgtgacccggctgccatccatgctgtcccgcatccccccggtggccgcccggctgcagatgtcggagcgcagcatcctgagccgcctgaccaaccgcgccggggaccccaccatccagcagggcgctttcggctcctcccagatgtacagcaacaactttgggcccaacttccggggccctggaccgggagggattgtcaactacaaccagatgcccctggggccctatgtgaccgatatctagccgtcctcgagacttccctgtgttgcagygctcatttccagctgagccacgcctgccgggccacctgcccgacccacatgggagagaaaagctgccacctttttaggagccagcrccaccttgggacaaaaagggaaacctagtaatgccatcacatggaggacgaggcccagctcagctgggccagagcccagaagtgccacctcatcataattcaagtgttcttccacacagcgttgcccccacaaccacgcyggacgtgccccctcgccaccttttccagacgacttcttagaagagatttcatttatttgtacatcttttgcactttcctattgaagacttgaacacgtttgtcttgataaaagttggatgacgtatggaagattcgaacctgcagcactgatgtctctttaccgatgggttccagacccaaggtagtcctggcactgccctgtggactcagcccagctggggaggacatggcgcccggtgccctaggagccctcagtgtcccctacctgacctgtctgcacctgtgtgacagccccttctgatttggccccctgcccgcttggagcctcccagcaccagacagggcaggtttggggagccgctgtccagccctatggtgagaccctggctgacatttcccctccttcctgccaaggctggaggccgccaggtgtttgctctct

SEQ ID NO: 4611 - DNA, 5291 bp, Homo sapiens
cgtggctcctccttgcgggcggaggcaggcggtgccgcggcgccgggacccgactcatccggtgcttgcgtgtggtggtgagcgcagcgccgaggatgaggaggtgcaacagcggctccgggccgccgccgtcgctgctgctgctgctgctgtggctgctcgcggttcccggcgctaacgcggccccgcggtcggcgctctattcgccttccgacccgctgacgctgctgcaggcggacacggtgcgcggcgcggtgctgggctcccgcagcgcctgggccgtggagttcttcgcctcctggtgcggccactgcatcgccttcgccccgacgtggaaggcgctggccgaagacgtcaaagcctggaggccggccctgtatctcgccgccctggactgtgctgaggagaccaacagtgcagtctgcagagacttcarcatccctggcttcccgactgtgaggttcttcaaggcctttaccaagaacggctcgggagcagtatttccagtggctggtgctgacgtgcagacrctgcgggagaggctcattgacgccctggagtcccatcatgacacgtggcccccagcctgtcccccactggagcctgccaagctggaggagattgatggattctttgcgagaaataacgaagagtacctggctctgatctttgaaaagggaggctcctacctggstagagaggtggctctggacctgtcccagcacaaaggcgtggcggtgcgcagggtgctgaacacagaggccaatgtggtgagaaagtttggtgtcaccgacttcccctcttgctacctgctgttccggaatggctctgtctcccgagtcccygtgctcatggaatccakgtccttctataccgcttacctgcagagactctctgggctcaccagggaggctgcccagaccacagttgcaccaaccactgctaacaagatagctcccactgtttggaaattgkcagatcgctccaagatctacatggctgacctggaatctgcactgcactacatcctgcggatagaagtgggcaggttcccggtcctggaagggcagcgcctggtggccctgaaaaagtttgtggcagtgctggccaagtatttccctggccggcccttagtccagaacttcctgcactccgtgaatgaatggctcaagaggcagaagagaaataaaattccctacagtttctttaaaactgccctggacgacaggaaagagggtgccgttcttgccaagaaggtgaactggattggctgccaggggagtgagccrcatttccggggctttccctgctccctgtgggtyctyttccacttcttgactgtgcaggcagctcggcaaaatgtagaccactcacaggaagcagccaaggccaaggaggtcctcccagccatccgaggctacgtgcrctacttcttcggctgccgagactgcgctagccacttcgagcagatggctgctgcctccatgcaccgggtggggagtcccaacgccgctgtcctctggctctggtctagccacaacagggtcaatgctcgccttgcaggtgmccccagcgaggacccccagttccccaaggtgcagtggccaccccgtgaactttgttctgcctgccacaatgaacgcctggatgtgcccgtgtgggacgtggaarccaccctcaacttcctcaaggcccacttctccccaagcaacatcatcctggacttccctgcagctgggtcagctgcccggagggatgtgcagaatgtggcagcmgccccagagctggcgatgggagccctggagctggaaagccggaattcaactctggaccctgggaagcctgagatgatgaagtcccccacamacaccaccccacatgtgccggctgagggacctgagcttatttgaagtcctgcctcattctcactggagcctcagtctctcctgcttggtcttggccctcaactggggcaagtgaagccagaggagggtcccccagctgggtgggctggaatggaactcctcactagctgctggggctccgcccaccctgctcccttccrgacaatgaagaagcctttgcaccctgggaggaaggaccaccccgggccctctatgcctggccagcctccagctcctcagacctcctgggtggggtttggcttcagggtggggtttggaagcttctggaagtcgtgctggtctcccaggtgaggcaagccatggttgctgggctgtagggtgagtggcttgcttggtgggacctgacgagttggtggcatgggaaggatgtgggtctctagtgccttgccctggcttagctgcaggagaagatggctgcttycacttccccccattgagctctgctccctytgagcctggtcttttgtccttttttattttggtctccaagatgaatgctcatctttggagggtgccaggtaraagctagggaggggagtgtcttctctctccaggtttymccttccagtgtgcaraagttaraagggtctggcgggggyagtgccttacacatgcttgattcccmcgctaccccctgccttgggaggtgtgtggaataaattatttttgttaaggcaagcattggtgtgttctttaacttgctacttggagacctagtgtccagtctggacagaatgcacagagaccagcctcacctggaatgcagccagactcgatgtccctcagcacacacagctcctggccacagactgcccatagaactgtctgcacccaaaccccatggccttttcatgcacggagacaggcctctggatgtgcagccttgccaccccctgccccaatcctccctgagagctcctgcstcagtgccctgggctggtgagggagragcctgtctgcacctgcctaattccagctcctccaggaagcaagggcttgtttgtcagagctgcagggttggccactcggtggggaggagtcagccaggattagagagcctgcccctaatccggcctgctgggttttacaaggatcagagctgctgataatgaacctcattaagggggagcaggagcctcaatccgatttggttttctctttgacatcttcactctgctcagatggcctgggtgctatgtggagcaggtgggatgccaaggccactcctgctatggggcagctggggctggggagggatggcagtctccctgcatgtttccctcgacctctttagctgcagcgccttgctgggctcctgggttggactccctctctgtgcccctgctccaggcacccattggctccatcctcctggttgtgctctgcaccccctgctcccttgggctggccctggctgggggcctgagagacagacaggaacccacaatcaggaggcaaccctggcctgcaagaggaagacagaggctcccagggccggtgccctgtgtgcccactgcaccaaggccgctgaataagcctgcccttcaccccctaagggctccttgcccaatgccaagtgctggggatttctgtcagcaagccctgtggctccagtgacggtatttctaaagccaaacttagttacctagaattagcgccatgttggaaacactgtcgcagcagcccgggctgcacagtgtgtagcccagcctccaggtccacggagtggtgtggacctcccacctcmcagctgcctctggcagccaagcctcttttcgcccggccccagcccctctggttgataaacgggtgggcctcctcagcagcgtggctgcctttcaccttgatttccccagggctctcggcaacatcgataaaccagcctcgcccaccagctgggccctcccccacccagtctgccaggctgggagctggagcttgctgagtcttgaatgcccttctagatggcttctctagaggctctcctggcaagagagggtcccaaggggagccctgcaaagcaaaggctccttgtctggggcgggatagagaatctcgcctctgtctggtgtgttacctactgggggcacaggaacaatttcctcaaggagacagtggcatggagctttgaaagacgagtaggtgttagcaaggaaataaggaggaacgggggttacgggcagaggagaaagcacatgccaagtcagcaaagaaaagtagaattcgaaaactttttaaaaatattactaaggattttcacaatgctgcactgggctagaaactgaagctaaaacagatacgtggtccctgctgctatggggcttccgttctagaggcaaggacaggttgtgatgagggttctgaaggatagagaccaagcagggagggtgttgaggaggcttctgcgagacctgaaggatgggaagccaggaagtgggaggggtgggggtccaggctggaggggcccaatgtaggtgtagagggactacagccctgaggggctgctccatgcggcattcttggaggtccaagaggggcagcgccaccttgggccaggctcctctccagcagccttggtatggggtgggggtgggaagacccctgatgcagcctgtcctctgggtgtgggggtggaggagagggctccaggggacccagccagccttgaccctggaggaaagtcaggtgggctcagagagagccctcaaatctgggccctgggtcagggtggggtcaagtccagccttgaagagaatggactctggaatctgacgtctgggtttgaatccagcttccaacactcactggctgtgtgactttgggcaagataacttatccycttgtccccatgtgtcattggagataaactacccacctaccagattgttgtaccatgctgggcaaacactaagtgcttaataatggtagcccactgctcatgtcgtgtcgtctcctgtcttgatacctgaaaactcaaggggccctgttgtgcttggaggggggtgccgttcccacaggatattctgtgaagggtgtccctggagctgggyctccaggtggcaagccccaagccaccccggcaggtgccactggccagagttgaactgaggtgttgagtggaaagtgcctccccacccccatctgccacagtagtatggatttccttcatgagatggggctcctaaaatgcctgaaatgtgtatgctgttggagaattgatgtgtatgatttattgaactttgcactcatttaaatctcatttaatcctccaacaacgcaagatgaagaagctgaggcttaaagagattaagaaacatcctatcccctttactcccaccaaaataaatacatttgccctattctccc

SEQ ID NO: 4612 - DNA, 6024 bp, Homo sapiens
cgtggctcctccttgcgggcggaggcaggcggtgccgcggcgccgggacccgactcatccggtgcttgcgtgtggtggtgagcgcagcgccgaggatgaggaggtgcaacagcggctccgggccgccgccgtcgctgctgctgctgctgctgtggctgctcgcggttcccggcgctaacgcggccccgcggtcggcgctctattcgccttccgacccgctgacgctgctgcaggcggacacggtgcgcggcgcggtgctgggctcccgcagcgcctgggccgtggagttcttcgcctcctggtgcggccactgcatcgccttcgccccgacgtggaaggcgctggccgaagacgtcaaagcctggaggccggccctgtatctcgccgccctggactgtgctgaggagaccaacagtgcagtctgcagagacttcarcatccctggcttcccgactgtgaggttcttcaaggcctttaccaagaacggctcgggagcagtatttccagtggctggtgctgacgtgcagacrctgcgggagaggctcattgacgccctggagtcccatcatgacacgtggcccccagcctgtcccccactggagcctgccaagctggaggagattgatggattctttgcgagaaataacgaagagtacctggctctgatctttgaaaagggaggctcctacctggstagagaggtggctctggacctgtcccagcacaaaggcgtggcggtgcgcagggtgctgaacacagaggccaatgtggtgagaaagtttggtgtcaccgacttcccctcttgctacctgctgttccggaatggctctgtctcccgagtcccygtgctcatggaatccakgtccttctataccgcttacctgcagagactctctgggctcaccagggaggctgcccagaccacagttgcaccaaccactgctaacaagatagctcccactgtttggaaattgkcagatcgctccaagatctacatggctgacctggaatctgcactgcactacatcctgcggatagaagtgggcaggttcccggtcctggaagggcagcgcctggtggccctgaaaaagtttgtggcagtgctggccaagtatttccctggccggcccttagtccagaacttcctgcactccgtgaatgaatggctcaagaggcagaagagaaataaaattccctacagtttctttaaaactgccctggacgacaggaaagagggtgccgttcttgccaagaaggtgaactggattggctgccaggggagtgagccrcatttccggggctttccctgctccctgtgggtyctyttccacttcttgactgtgcaggcagctcggcaaaatgtagaccactcacaggaagcagccaaggccaaggaggtcctcccagccatccgaggctacgtgcrctacttcttcggctgccgagactgcgctagccacttcgagcagatggctgctgcctccatgcaccgggtggggagtcccaacgccgctgtcctctggctctggtctagccacaacagggtcaatgctcgccttgcaggtgmccccagcgaggacccccagttccccaaggtgcagtggccaccccgtgaactttgttctgcctgccacaatgaacgcctggatgtgcccgtgtgggacgtggaarccaccctcaacttcctcaaggcccacttctccccaagcaacatcatcctggacttccctgcagctgggtcagctgcccggagggatgtgcagaatgtggcagcmgccccagagctggcgatgggagccctggagctggaaagccggaattcaactctggaccctgggaagcctgagatgatgaagtcccccacamacaccaccccacatgtgccggctgagggacctgaggcaagtcgacccccgaagctgcaccctggcctcagagctgcaccaggccaggagcctcctgagcacatggcagagcttcagaggaatgagcaggagcagccgcttgggcagtggcacttgagcaagcgagacacaggggctgcattgctggctgagtccagggctgagaagaaccgcctctggggccctttggaggtcaggcgcgtgggccgmagctccaagcagctggtcgacatccctgagggccagctggaggcccgagctggacggggccgaggccagtggctgcaggtgctgggagggggcttctcttacctggacatcagcctctgtgtggggctctattccctgtccttcatgggcctgctggccatgtacacctacttccaggccaagataagggccctgaagggccatgctggccaccctgcagcctgaaccacctggggaggaggcgggagagggagctgccatctctaggcacctcaagccccctgaccccattccctcccctcccaccccttgctccttgtctggcctagaagtgtgggaaattcaggaaaacgagttgctccagtgaagcttcttggggttgctaggacagagagctcctttgacacaaaagacaggagcagggtccaggttcccctgctgtgcagggagggcagccccgggcagtgggcatagggcagctcagtccctggcctcttagcaccacattcctgtttttcagcttatttgaagtcctgcctcattctcactggagcctcagtctctcctgcttggtcttggccctcaactggggcaagtgaagccagaggagggtcccccagctgggtgggctggaatggaactcctcactagctgctggggctccgcccaccctgctcccttccrgacaatgaagaagcctttgcaccctgggaggaaggaccaccccgggccctctatgcctggccagcctccagctcctcagacctcctgggtggggtttggcttcagggtggggtttggaagcttctggaagtcgtgctggtctcccaggtgaggcaagccatggttgctgggctgtagggtgagtggcttgcttggtgggacctgacgagttggtggcatgggaaggatgtgggtctctagtgccttgccctggcttagctgcaggagaagatggctgcttycacttccccccattgagctctgctccctytgagcctggtcttttgtccttttttattttggtctccaagatgaatgctcatctttggagggtgccaggtaraagctagggaggggagtgtcttctctctccaggtttymccttccagtgtgcaraagttaraagggtctggcgggggyagtgccttacacatgcttgattcccmcgctaccccctgccttgggaggtgtgtggaataaattatttttgttaaggcaagcattggtgtgttctttaacttgctacttggagacctagtgtccagtctggacagaatgcacagagaccagcctcacctggaatgcagccagactcgatgtccctcagcacacacagctcctggccacagactgcccatagaactgtctgcacccaaaccccatggccttttcatgcacggagacaggcctctggatgtgcagccttgccaccccctgccccaatcctccctgagagctcctgcstcagtgccctgggctggtgagggagragcctgtctgcacctgcctaattccagctcctccaggaagcaagggcttgtttgtcagagctgcagggttggccactcggtggggaggagtcagccaggattagagagcctgcccctaatccggcctgctgggttttacaaggatcagagctgctgataatgaacctcattaagggggagcaggagcctcaatccgatttggttttctctttgacatcttcactctgctcagatggcctgggtgctatgtggagcaggtgggatgccaaggccactcctgctatggggcagctggggctggggagggatggcagtctccctgcatgtttccctcgacctctttagctgcagcgccttgctgggctcctgggttggactccctctctgtgcccctgctccaggcacccattggctccatcctcctggttgtgctctgcaccccctgctcccttgggctggccctggctgggggcctgagagacagacaggaacccacaatcaggaggcaaccctggcctgcaagaggaagacagaggctcccagggccggtgccctgtgtgcccactgcaccaaggccgctgaataagcctgcccttcaccccctaagggctccttgcccaatgccaagtgctggggatttctgtcagcaagccctgtggctccagtgacggtatttctaaagccaaacttagttacctagaattagcgccatgttggaaacactgtcgcagcagcccgggctgcacagtgtgtagcccagcctccaggtccacggagtggtgtggacctcccacctcmcagctgcctctggcagccaagcctcttttcgcccggccccagcccctctggttgataaacgggtgggcctcctcagcagcgtggctgcctttcaccttgatttccccagggctctcggcaacatcgataaaccagcctcgcccaccagctgggccctcccccacccagtctgccaggctgggagctggagcttgctgagtcttgaatgcccttctagatggcttctctagaggctctcctggcaagagagggtcccaaggggagccctgcaaagcaaaggctccttgtctggggcgggatagagaatctcgcctctgtctggtgtgttacctactgggggcacaggaacaatttcctcaaggagacagtggcatggagctttgaaagacgagtaggtgttagcaaggaaataaggaggaacgggggttacgggcagaggagaaagcacatgccaagtcagcaaagaaaagtagaattcgaaaactttttaaaaatattactaaggattttcacaatgctgcactgggctagaaactgaagctaaaacagatacgtggtccctgctgctatggggcttccgttctagaggcaaggacaggttgtgatgagggttctgaaggatagagaccaagcagggagggtgttgaggaggcttctgcgagacctgaaggatgggaagccaggaagtgggaggggtgggggtccaggctggaggggcccaatgtaggtgtagagggactacagccctgaggggctgctccatgcggcattcttggaggtccaagaggggcagcgccaccttgggccaggctcctctccagcagccttggtatggggtgggggtgggaagacccctgatgcagcctgtcctctgggtgtgggggtggaggagagggctccaggggacccagccagccttgaccctggaggaaagtcaggtgggctcagagagagccctcaaatctgggccctgggtcagggtggggtcaagtccagccttgaagagaatggactctggaatctgacgtctgggtttgaatccagcttccaacactcactggctgtgtgactttgggcaagataacttatccycttgtccccatgtgtcattggagataaactacccacctaccagattgttgtaccatgctgggcaaacactaagtgcttaataatggtagcccactgctcatgtcgtgtcgtctcctgtcttgatacctgaaaactcaaggggccctgttgtgcttggaggggggtgccgttcccacaggatattctgtgaagggtgtccctggagctgggyctccaggtggcaagccccaagccaccccggcaggtgccactggccagagttgaactgaggtgttgagtggaaagtgcctccccacccccatctgccacagtagtatggatttccttcatgagatggggctcctaaaatgcctgaaatgtgtatgctgttggagaattgatgtgtatgatttattgaactttgcactcatttaaatctcatttaatcctccaacaacgcaagatgaagaagctgaggcttaaagagattaagaaacatcctatcccctttactcccaccaaaataaatacatttgccctattctccc

SEQ ID NO: 4613 - DNA, 756 bp, Homo sapiens
ccygccgccacgccgcctacaaacaggtgctgatccggcacggcgaggttgcgtggaacctggagaaccgcttcggtggctggtacgatgccaacctgaacccagcaggcgacgaggaggcaaagcgctgggagcaggcgctgccagatgctggctacgagtttgatatctgcttaagagaacaatccggaccctctggacagtgccagatgccattgatcagatgtggctgccagtagtgaggacttagcgcctcgaagagcggcactatgggggtctaactggtctcaataaagcagaaactgctgcagagcatggtgaggcctggtgaagatctggaggagctcctatgatgtcccaccacctccaatggagccgggtgatcctttctacagcaacgtaagtaaggatcgcaggtatgcagacctcacagaagatcaactaccctcctgtaatagtctgaaggacactcttgcccgagctctgcccttctggaatgaagaaatagttccccagatcaaggaagggaaatgggtactgattgcagcccatggcaacagcctctgaggcattgtcaggcatctggagggtctctctgaagaggctgtcatgcagctgaacctgccgactggtattcccattgtctatgaattggacaagagctcgaagcccatcaagcccatacagttcctgggggatgaagagaccgtgygtgaagccatggaagctgtggctgcccagggcaaggccaagaag

SEQ ID NO: 4614 - DNA, 1539 bp, Homo sapiens
agcgctgcggttggcagcggcgggatggagaagctgggggtggagccggaggaggaaggcggcggcgacgacgaggaagacgccgaggcctgggccatggaactggcrgacgtgggggcggcagccagctcgcagggagttcatgatcaagtgttgcccacaccaaatgcttcatccagagtcatagtacatgtggatctggattgcttttatgcacaagtagaaatgatctcaaatccagagctaaaagacaaacctttaggggttcaacagaaatatttggtggttacctgcaactatgaagctaggaaacttggagttaagaaacttatgaatgtcagagatgcaaaagaaaagtgtccacagttggtattagttaatggagaagacctgacccgctacagagaaatgtcttataaggttacagaattactggaagaatttagtccagttgttgagagacttggatttgatgaaaattttgtggatctaacagaaatggttgagaagagactacagcagctgcaaagtgatgaactttctgcggtgactgtgtcgggtcatgtatacaataatcagtctataaacctgcttgacgtcttgcacatcagactacttgttggatctcagattgcagcagagatgcgggaagccatgtataatcagytggggctcactggctgtgctggagtggcttctaataaactgttggcaaaattagtttctggtgtctttaaaccaaatcaacaaacagtcttattacctgaaagttgtcaacatcttattcatagtttgaatcacatraaggaaatacctggtattggctataaaactgccaaatgtcttgaagcactgggtatcaatagtgtgcgtgatctccaaaccttttcacccaaaattttagaaaaagaattaggaatttcagttgctcagcgtatccaaaagctcagttttggagaggataactcccctgtsatactctcaggaccacctcagtcctttagtgaagaagattcatttaaaaaatgttcatctgaagttgaagctaaaaataagattgaagaactacttgctagtcttttaaacagagtatgccaagatggaaggaagcctcatacagtgagattaataatccgtcggtattcctctgagaagcactatggtcgtgaragtcgtcagtgccctattccttcacatgtaattcagaaattagggacaggtctccagtccccagatttctgtgcatcctctctcatgcaaagaaggctggaagacaaacttgtgaagctagagggtgtttttactaaacactaaaggagttttactaaaggagtttcaaattcatgtgaccacgccacagtcaacacacagaacaggtttatcacaaggatccctcctgccaccctttcaaagcgaaagccactttctttctkctcctcccccacctccctaaccccagaaaccactaattctgttcatctttatcattttgtcatttcaaaaatgttaartaaatggaagaatccactatttaacctt

SEQ ID NO: 4615 - DNA, 2510 bp, Homo sapiens
agcgctgcggttggcagcggcgggatggagaagctgggggtggagccggaggaggaaggcggcggcgacgacgaggaagacgccgaggcctgggccatggaactggcrgacgtgggggcggcagccagctcgcagggagttcatgatcaagtgttgcccacaccaaatgcttcatccagagtcatagtacatgtggatctggattgcttttatgcacaagtagaaatgatctcaaatccagagctaaaagacaaacctttaggggttcaacagaaatatttggtggttacctgcaactatgaagctaggaaacttggagttaagaaacttatgaatgtcagagatgcaaaagaaaagtgtccacagttggtattagttaatggagaagacctgacccgctacagagaaatgtcttataaggttacagaattactggaagaatttagtccagttgttgagagacttggatttgatgaaaattttgtggatctaacagaaatggttgagaagagactacagcagctgcaaagtgatgaactttctgcggtgactgtgtcgggtcatgtatacaataatcagtctataaacctgcttgacgtcttgcacatcagactacttgttggatctcagattgcagcagagatgcgggaagccatgtataatcagytggggctcactggctgtgctggagtggcttctaataaactgttggcaaaattagtttctggtgtctttaaaccaaatcaacaaacagtcttattacctgaaagttgtcaacatcttattcatagtttgaatcacatraaggaaatacctggtattggctataaaactgccaaatgtcttgaagcactgggtatcaatagtgtgcgtgatctccaaaccttttcacccaaaattttagaaaaagaattaggaatttcagttgctcagcgtatccaaaagctcagttttggagaggataactcccctgtsatactctcaggaccacctcagtcctttagtgaagaagattcatttaaaaaatgttcatctgaagttgaagctaaaaataagattgaagaactacttgctagtcttttaaacagagtatgccaagatggaaggaagcctcatacagtgagattaataatccgtcggtattcctctgagaagcactatggtcgtgaragtcgtcagtgccctattccttcacatgtaattcagaaattagggacaggaaattatgatgtgatgaccccaatggttgatatacttatgaaactttttcgaaatatggtgaatgtgaagatgccatttcaccttacccttctaagtgtgtgcttctgcaaccttaaagcactaaatactgctaagaaagggcttattgattattatttaatgccatcattatcaactacttcacgctctggcaagcacagttttaaaatgaaagacactcatatggaagattttcccaaagacaaagaaacaaaccgggatttcctaccaagtggaagaattgaaagtacaagaactagggagtctccactagataccacaaatttttctaaagaaaaagacattaatgaattcccactctgttcacttcctgaaggtgttgaccaagaagtctycaagcagcttccagtagatattcaagaagaaatcctttctggaaaatctagggaaaaatttcaagggaaaggaagtgtgagttgtccattacatgcctctagaggagtattatctttcttttctaaaaaacaaatgcaagatattcccataaatcctagagatcatttatccagtagcaaacaggtatcctctgtatctccttgtgaaccgggaacatcaggctttaatagcagtagttcttcttacatgtctagccaaaaggattattcatattatttagataatagattaaaagatgaacgaataagtcaaggacctaaagaacctcaaggattccactttacaaattcaaaccctgctgtgtctgcttttcattcatttccaaacttgcagagtgagcaacttttctccagaaaccacactacagatagccataagcaaacagtagcaacagactctcatgaaggacttacagaaaatagagagccagattctgttgatgagaaaattactttcccttctgacattgatcctcaagttttctatgaactaccagaagcagtacaaaaggaactgctggcagagtggaagagarcaggatcagatttccacattggacataaataagcatattcagcaaaaaggtctgaaaagcaagggaataccattattttcggattagcggtttattaagctcttctatattaaacactaatagatattcaataacggagtaaactgttccagataaagcaagaatagttgcaagaagtaaattctggcacaaagcgtaaaaatataacagaagaaataatgtaaaatactatcttttatgtctaaagccattttatattacttttcaataaaaagaatatcatggtcaacatagaata

SEQ ID NO: 4616 - DNA, 3393 bp, Homo sapiens
cgcaggaaaacacaggcccctccggctttcgctctcgctctgggaactggaaggacccccgactcccgcgcagggtctggggttgtgcgcgtcgggttgcgtctccaggccgggggcgtcagggagccgggggcggggacgggcgcgggcgcagcggaccgggcggggccgagccgggaagctggtcggtgcgtcagcctcacgcggcgggaaggaaccggtccgaggccccgggctgccggcgcgggcgccgcggcacgtccacaggctgggtcgcgaggtggcgatcgctgagaggcaggagggccgaggcgggcctgggaggcggcccggaggtggggcgccgctggggccggcccgcacgggcttcatctgagggcgcacggcccgcgaccgagcgtgcggactggcctcccaagcgtggggcgacaagctgccggagctgcaatgggccgcggctggggattcttgtttggcctcctgggcgccgtgtggctgctcagctcgggccacggagaggagcagcccccggagacagcggcacagaggtgcttctgccaggttagtggttacttggatgattgtacctgtgatgttgaaaccattgatagatttaataactacaggcttttcccaagactacaaaaacttcttgaaagtgactactttaggtattacaaggtaaacctgaagaggccgtgtcctttctggaatgacatcagccagtgtggaagaagggactgtgctgtcaaaccatgtcaatctgatgaagttcctgatggaattaaatctgcgagctacaagtattctgaagaagccaataatctcattgaagaatgtgaacaagctgaacgacttggagcagtggatgaatctctgagtgaggaaacacagaaggctgttcttcagtggaccaagcatgatgattcttcagataacttctgtgaagctgatgacattcagtcccctgaagctgaatatgtagatttgcttcttaatcctgagcgctacactggttacaagggaccagatgcytggaaaatatggaatgtcatctacgaagaaaactgttttaagccacagacaattaaaagacctttaaatcctttggcttctggtcaagaraacactttttacagttggctagaaggtctctgtgtagaaaaaagagcattctacagacttatatctggcctacatgcaagcattaatgtgcatttgagtgcaagatatcttttacaagagacctggttagaaaagaaatggggacacaacattacagaatttcaacagcgatttgatggaattttgactgaaggagaaggtccaagaaggcttaagaacttgtattttctctacttaatagaactaagggctttatccaaagtgttaccattcttcgagcgcccagattttcaactctttactggaaataaaattcaggatgaggaaaacaaaatgttacttctggaaatacttcatgaaatcaagtcatttcctttgcattttgatgagaattcattttttgctggggataaaaaagaagcacacaaactaaaggaggactttcgactgcattttagaaatatttcaagaattatggattgtgttggttgttttaaatgtcgtctgtggggaaagcttcakactcagggtttgggcactgctctgaagatcttattttctgagaaattgatagcaaatatgccagaaagtggacctagytatgaattccatctaaccagacaagaaatagtatcattattcaacgcatttggaagaatttctacaagtgtgaaagaattagaaaacttcaggaacttgttacagaatattcattaaagaaaacaagctgatatgtgcctgtttctggacaatggaggcgaaagagtggaatttcattcaaaggcataatagcaatgacagtcttaagccaaacattttatataaagttgcttttgtaaaggagaattatattgttttaagtaaacacatttttaaaaattgtgttaagtctatgtataatactactgtgagtaaaagtaatactttaataatgtggtacaaattttaaagtttaatattgaataaaaggaggattatcaaattcatatatgataaaagtgaatgttctaagtctctcaaactagcgttttatgtaataatatgtaatataaataaaactatggtaaatgtgacaagcatttaataggaaaatgctaaggaggcctcataaatgacccataattaccaacgtagaatttttcagtacatttagggttgctggatttagcaaataaaaataaagattgcccagttagatttgaatttcagataaacaattagttttttaatattttacatggaatatttggaaaatacttatactaaaaaattatttgtttgaaattcamatttaactgggagtcttgtattttatctggcaatcctaaaatacattggtatgaaacaaatcacttttagaagtatattgctattttgattgggttgtttttgtgtgtagaaacgtacaataacaactcaaaggcacaggagatttctaaacattgtgaaaagttgaatagattatatatttattctcataatactttcactaatactaaataaaatttggggaacactttttatttttatataatttccaatttacagaaaagtttcaaaaatagtacaaagagctctcttacccagattcactaattgttcatacgtgctttatctttcatgctttctctgtacacacacacacacacacaaatttttcctcaatcatttgaaagtcagttataggcatcatgccccttaaaccctaaatacttcagtgtgtaatactgaataattactaaaaatgattttctcagaaaaaaaaactcccacaattctggaactataatactgtaagccttagaataaataatactttcaagttccaatctaaagttctttttgagttttgttgcccgttttatgcttgatgtgtatagtaatagggtaggctatttattttattaaaattttttttagagacaaggttttgctgtgttgcccaagctggaacttgaacgactgggctgaagtgatcttcccacctcagcctcccaagtagctgggaatacaggtgtctgccaccatacccagtttcatttttgttttttatacccgaagttcatttcctttgtctccctaaaactgaactgtaattttgggaggttttcattagtggaagctcttcatttataaagctatttgaaggggtttaggaatttatatcacatggtaattgtagagaaaaagaagctatatacctcaaaatctagtaaagtggggtttatttatatagtggttaagaaatgtcagtttacactgctgtat

SEQ ID NO: 4617 - DNA, 5508 bp, Homo sapiens
cgcaggaaaacacaggcccctccggctttcgctctcgctctgggaactggaaggacccccgactcccgcgcagggtctggggttgtgcgcgtcgggttgcgtctccaggccgggggcgtcagggagccgggggcggggacgggcgcgggcgcagcggaccgggcggggccgagccgggaagctggtcggtgcgtcagcctcacgcggcgggaaggaaccggtccgaggccccgggctgccggcgcgggcgccgcggcacgtccacaggctgggtcgcgaggtggcgatcgctgagaggcaggagggccgaggcgggcctgggaggcggcccggaggtggggcgccgctggggccggcccgcacgggcttcatctgagggcgcacggcccgcgaccgagcgtgcggactggcctcccaagcgtggggcgacaagctgccggagctgcaatgggccgcggctggggattcttgtttggcctcctgggcgccgtgtggctgctcagctcgggccacggagaggagcagcccccggagacagcggcacagaggtgcttctgccaggttagtggttacttggatgattgtacctgtgatgttgaaaccattgatagatttaataactacaggcttttcccaagactacaaaaacttcttgaaagtgactactttaggtattacaaggtaaacctgaagaggccgtgtcctttctggaatgacatcagccagtgtggaagaagggactgtgctgtcaaaccatgtcaatctgatgaagttcctgatggaattaaatctgcgagctacaagtattctgaagaagccaataatctcattgaagaatgtgaacaagctgaacgacttggagcagtggatgaatctctgagtgaggaaacacagaaggctgttcttcagtggaccaagcatgatgattcttcagataacttctgtgaagctgatgacattcagtcccctgaagctgaatatgtagatttgcttcttaatcctgagcgctacactggttacaagggaccagatgcytggaaaatatggaatgtcatctacgaagaaaactgttttaagccacagacaattaaaagacctttaaatcctttggcttctggtcaaggtaaattacttrtaraacactttttacagttggctagaaggtctctgtgtagaaaaaagagcattctacagacttatatctggcctacatgcaagcaktaatgtgcatttgagtgcaagatatcttttacaagagacctggttagaaaagaaatggggacacaacattacagaatttcaacagcgatttgatggaattttgactgaaggagaaggtccaagaaggcttaagaacttgtattttctctacttaatagaactaagggctttatccaaagtgttaccattcttcgagcgcccagattttcaactctttactggaaataaaattcaggatgaggaaaacaaaatgttacttctggaaatacttcatgaaatcaagtcatttcctttgcattttgatgagaattcattttttgctggggataaaaaagaagcacacaaactaaaggaggactttcgactgcattttagaaatatttcaagaattatggattgtgttggttgttttaaatgtcgtctgtggggaaagcttcagactcagggtttgggcactgctctgaagatcttattttctgagaaattgatagcaaatatgccagaaagtggacctagytatgaattccatctaaccagacaagaaatagtatcattattcaacgcatttggaagaatttctacaagtgtgaaagaattagaaaacttcaggaacttgttacagaatattcattaaagaaaacaagctgatatgtgcctgtttctggacaatggaggcgaaagagtggaatttcattcaaaggcataatagcaatgacagtcttaagccaaacattttatataaagttgcttttgtaaaggagaattatattgttttaagtaaacacatttttaaaaattgtgttaagtctatgtataatactactgtgagtaaaagtaatactttaataatgtggtacaaattttaaagtttaatattgaataaaaggaggattatcaaattcatatatgataaaagtgaatgttctaagtctctcaaactagcgttttatgtaataatatgtaatataaataaaactatggtaaatgtgacaagcatttaataggaaaatgctaaggaggcctcataaatgacccataattaccaacgtagaatttttcagtacatttagggttgctggatttagcaaataaaaataaagattgcccagttagatttgaatttcagataaacaattagttttttaatattttacatggaatatttggaaaatacttatactaaaaaattatttgtttgaaattcamatttaactgggagtcttgtattttatctggcaatcctaaaatacattggtatgaaacaaatcacttttagaagtatattgctattttgattgggttgtttttgtgtgtagaaacgtacaataacaactcaaaggcacaggagatttctaaacattgtgaaaagttgaatagattatatatttattctcataatactttcactaatactaaataaaatttggggaacactttttatttttatataatttccaatttacagaaaagtttcaaaaatagtacaaagagctctcttacccagattcactaattgttcatacgtgctttatctttcatgctttctctgtacacacacacacacacacaaatttttcctcaatcatttgaaagtcagttataggcatcatgccccttaaaccctaaatacttcagtgtgtaatactgaataattactaaaaatgattttctcagaaaaaaaaactcccacaattctggaactataatactgtaagccttagaataaataatactttcaagttccaatctaaagttctttttgagttttgttgcccgttttatgcttgatgtgtatagtaatagggtaggctatttattttattaaaattttttttagagacaaggttttgctgtgttgcccaagctggaacttgaacgactgggctgaagtgatcttcccacctcagcctcccaagtagctgggaatacaggtgtctgccaccatacccagtttcatttttgttttttatacccgaagttcatttcctttgtctccctaaaactgaactgtaattttgggaggttttcattagtggaagctcttcatttataaagctatttgaaggggtttaggaatttatatcacatggtaattgtagagaaaaagaagctatatacctcaaaatcgtgccctctttamatatgtcttatcaggtataacatgttgaaatgtcacattagtagtaaagtggggtttatttatatagtggttaagaaatgtcagtttacactgctgtatacttcttcttctgtgtccctaaggcctggtacagtgccaagcacatacttggtatccaataaatatttgttggatgaatgtatgcatatgtattcagtatattttaaatgaataatcacagaagtaagtttaataatttgtcctatttttctctgtcacttcctttttctctaaggcaggaaaggaaagacattaaaccattaattaagtcaatcctcttggagactcaaaagactatgaagtgatcactctatataaaatataaatacagtgtgggttcaaatggccattttttgtgtgtccctctctctcatcttatgcttcccttcctttttttatttttattttttggagacggagtcttgctgtgtcgcccaggttggagtgcagtggcgtgatcttagctcactgcaagctctgccttccaggttcacgccattcttctgcctcagccccctgagtagctgggactacaggcgcccgccaccacgcccggctaatttttttttttttttttttgtatttttagtagaggcagtgtttcaccgtgttagccaggatggtctcgatctcctgacctcgtgatccacccacctcgacctcccaaagtgctgggattacaggcgtgagccaccacgcccggcctcttttttttttagctgccaatctttttgaaggaatattcttacctctactttgtcaccttctactggctccttaactaaaatctgccatttggctctctggttaacagtcccttcctgtaaagtctaaaatcttaattctaaatccacagtttaattcacaagctagtacttgactttttttctgtatttgacatttttgacaacccctactttaaagatttattcccttgacttcttacattttgctcactcctgaaccaccccccaccttttggcctcttcatttattccttaaatgttattcctcagacctccattttttttttctctcttaatcacaacaccacttctcacgcttgggtaattttaattcagcagttcctaaatccttatctttagccagactcctcaatccatctgcctgttgcacttttcttggttgtcccagagacacctgtgtgtgtcttaaaacattcattctctgcaaaacctactctaatgcctgtgtcccttactttggttaattttagaaccattatattctaagttttctaggctcattcctctcctccaccttcccctatcatttagtgtctaagttttactgattttatctccacctctctgatacatcactctttcatcttcattgctattattaataaatacctacagtactaacctgcctcctatacctagctggtctcctctctgttgctcaatgttaccacagcaggctttctagaagcactctgacagtgttactccctaatatccttcagtgacttcaggaactttcaggagaaagccaaactcctctgtttggtgtacaaggtcttctgatgtgtttcctccaccgaatgttctggtgaaacagacttacacttcttcagaagccacatttggccaggcctcccgccttggtaaatgctgtactctttgcatcaagtrtgctagtcatccttccccacttggaaaattcctatgcatcttgcaggcctgacataagcatttcctctgtgaaacctcctttgctccactcaaggagagtcatctaacttccactttcgtgtcaccactgtaattacaacctacctctattgtatgtcacttaaatcgtactgtattgttttwtttttcaaaagtctttactagaatgtgagctccttaagggcaggaaaaggaacctttttattttttgcatctccatagcatagtttttggcatatgaatgtttaataaatgtttgttgaataaattgattttaaagtgacatctttattatattagaggtcctacctatattccaaatactttcactcccttcactttacagcaagggtcagtagagtcccaaggatttgtagactttagggggtcaataaagctgaaattgtattc

SEQ ID NO: 4618 - DNA, 2101 bp, Homo sapiens
tgcttgtatctctgggtgatcacagacccctgctctccaaggtgggttgtgaactctggagcactaccaagattggctaagagctgaaggagagtcccaaaggagcttcaattcygcagaactatacagccttctttaccttaccttgaccaggtgcttagagtttggaaagtcagggataagaattgaaattcctccaggtaagaagacccccctcttaggaaatggactcctccaattttctcacatgatttttcaggcactttcgcttttccatatataggagtcgctcaggagcaagctgtggcaagctggagggagggacacatcccgtgttccatccactccctcccttctcagcagtcctcgcctgttctcacgtgctyacaggcagttaggcagaagtgatccccgtggctctgccaaagacaagcctgttgggttgaaagaagaagaagaagaagaagaagaaaaaaaaactcaggcaaagtcacagcctcaaaattgttcactgaaagaagcgtgagtggagaagtgtgagaagatgaatggaccggtggatggcttgtgtgaccactctctaagtgaaggagtcttcatgttcacatcggagtctgtgggagagggacacccggataagatctgtgaccagatcagtgatgcagtgctggatgcccatctcaagcaagaccccaatgccaaggtggmctgtgagacagtgtgcaagaccggcatggtgctgctgtgtggtgagatcacctcaatggccatggtggactaccagcgggtggtgagggacaccatcaagcacatcggctacgatgactcagccaagggctttgacttcaagacttgcaacgtgctggtggctttggagcagcaatccccagatattgcccagtgcgtccatctggacagaaatgaggaggatgtgggggcaggagatcagggtttgatgttcggctatgcyaccgacgagacagaggagtgcatgcccctcaccatcatccttgctcacaagctcaacgcccggatggcagacctcaggcgctccggcctcctcccctggctgcggcctgactctaagactcaggtgacagttcagtacatgcaggacaatggcgcagtcatccctgtgygcatccacaccatcgtcatctctgtgcagcacaacgaagacatcacgctggaggagatgcgcagggccctgaaggagcaagtcatcagggccgtggtgccggccaagtacctggacgaagacaccgtctaccacctgcagcccagtgggcggtttgtcatcggaggtccccagggggatgcgggtgtcactggyygtaagattattgtggacacctatggcggctggggggctcatggtggtggggccttctctgggaaggactacaccaaggtrgaccgctcagcygcatatgctgcccgctgggtggccaagtctctggtgaaagcagggctctgccggagagtgcttgtccaggtttcctatgccatkggtgtggccgagccgctgtccatttccatcttcacctayrgaacctctcagaagacagagcgagmgctgctggatgtggtgcataagaacttcgacctccrgcygggcgtcattgtcagggatttggacttgaagaagcccatctaccagaagacagcatgctayrgccatttcggaagaagcgagttcccatgggaggttcccaggaagcttgtattttagagccagggggagctgggcctggtctcaccctggaggcacctggtggccatgctcctcttccccagaygcctgkctgctgatcgccttccccacccaccwaccctcagggcaaagccaggtccctctcatttagcctgtcctgtcatcatcatggccagctggaggcaggggcttcctggtgctggaggttggatcttgatgctgartgcatttggagggagtgagtggccctttcggatccagggaggctggtcctatggcctcatgttaaataggcggggcttgccttctggtgtyggacaagcttctgagacgtcatgaggagattctgcctttgccaggtgaaaggaaattaaggcaacaaaagaa

SEQ ID NO: 4619 - DNA, 3693 bp, Homo sapiens
tgcttgtatctctgggtgatcacagacccctgctctccaaggtgggttgtgaactctggagcactaccaagattggctaagagctgaaggagagtcccaaaggagcttcaattcygcagaactatacagccttctttaccttaccttgaccaggtgcttagagtttggaaagtcagggataagaattgaaattcctccaggtaagaagacccccctcttaggaaatggactcctccaattttctcacatgatttttcaggcactttcgcttttccatatataggagtcgctcaggagcaagctgtggcaagctggagggagggacacatcccgtgttccatccactccctcccttctcagcagtcctcgcctgttctcacgtgctyacaggcagttaggcagaagtgatccccgtggctctgccaaagacaagcctgttgggttgaaagaagaagaagaagaagaagaagaaaaaaaaactcaggcaaagtcacagcctcaaaattgttcactgaaagaagcgtgagtggagaagtgtgagaagatgaatggaccggtggatggcttgtgtgaccactctctaagtgaaggagtcttcatgttcacatcggagtctgtgggagagggacacccggataagatctgtgaccagatcagtgatgcagtgctggatgcccatctcaagcaagaccccaatgccaaggtggmctgtgagacagtgtgcaagaccggcatggtgctgctgtgtggtgagatcacctcaatggccatggtggactaccagcgggtggtgagggacaccatcaagcacatcggctacgatgactcagccaagggctttgacttcaagacttgcaacgtgctggtggctttggagcagcaatccccagatattgcccagtgcgtccatctggacagaaatgaggaggatgtgggggcaggagatcagggtttgatgttcggctatgcyaccgacgagacagaggagtgcatgcccctcaccatcatccttgctcacaagctcaacgcccggatggcagacctcaggcgctccggcctcctcccctggctgcggcctgactctaagactcaggtgacagttcagtacatgcaggacaatggcgcagtcatccctgtgygcatccacaccatcgtcatctctgtgcagcacaacgaagacatcacgctggaggagatgcgcagggccctgaaggagcaagtcatcagggccgtggtgccggccaagtacctggacgaagacaccgtctaccacctgcagcccagtgggcggtttgtcatcggaggtccccagggggatgcgggtgtcactggyygtaagattattgtggacacctatggcggctggggggctcatggtggtggggccttctctgggaaggactacaccaaggtrgaccgctcagcygcatatgctgcccgctgggtggccaagtctctggtgaaagcagggctctgccggagagtgcttgtccaggtttcctatgccatkggtgtggccgagccgctgtccatttccatcttcacctayrgaacctctcagaagacagagcgagmgctgctggatgtggtgcataagaacttcgacctccrgcygggcgtcattgtcagggatttggacttgaagaagcccatctaccagaagacagcatgctayrgccatttcggaagaagcgagttcccatgggaggttcccaggaagcttgtattttagagccagggggagctgggcctggtctcaccctggaggcacctggtggccatgctcctcttccccagaygcctgkctgctgatcgccttccccacccaccwaccctcagggcaaagccaggtccctctcatttagcctgtcctgtcatcatcatggccagctggaggcaggggcttcctggtgctggaggttggatcttgatgtaaggatgggcatggtgttctcctgctgctccctcagactggggcaatgttaatttagtggaaaaggcacccccgtcaagagtgaattccctcactcgtctcccccaacagctggaccctgaccagctccccctccctccccttgcctgtgccaggtgaggtcagcacatctcaacaggcctcagggctccttgtgggcctgggctcctggacccccctttcacaggcagccagtgccctgagccagggtctccagaaagccccacccaggccaggcatgtggcaggggttagagcaggactgatgtctcctaagcacctgtaatgtgcgagggacccagytaataactgatctcgttttttcttcactgcaacatgatgaggtagtaccttttatatcccatttatagatgggggaaagcaaagcacagagagtctggataacttccacagggtcccacagccacgtgtttagacctagatgtataactaggagctttgactcaggagcctgtgacataccccctcccccaccgttgtctcatgccagtaacaggctcaaacaatgacaaagcagattcagaaatgaggccatggactctgtcctgaaggcctgaggttactggaaattaggggattaacccactagctcttgttgagccgtgggcaattgtctgaaaagtgaagacagaaccacagggctattttgtttgcttcatgtgtcccagaagatgactgagggtgagttggcttacctggcccatcagggtaggctggagttwgggactgaccagcagctttagaatcccagccccctgaccactcagagacatgcagagattgggtttttggacttctggggtaagtggtctaagtccagtccagtcctatstgggcttcctggagcagaagcagcaacttgtcctagcacagatggccagccccttagacagaggccctcaagtctttctctttccctggtcccttgtatcccctgcaggctgartgcatttggagggagtgagtggccctttcggatccagggaggctggtcctatggcctcatgttaaataggcggggcttgccttctggtgtyggacaagcttctgagacgtcatgaggagattctgcctttgccaggtgactgtctggggagcgggtctgctcccaaggggcctgagcagtccttggcctgctaaggtcttggaacttgcctgcctttccatccatggccagcagcacctsccctacctgccccacttgtccttagcctggacctctgacagcagcatctctaccttctccccagctcccaggaccacaggctcaggcaggggcctccatgggccccaggggaacactggggacttggcctctctctagggtacatggtgctgggagaggcagcccaggaagtctcatctggggagcaggcagccagcatctgggccttggcctggagcacaaagaccctggctttcattttctctcaggtgaaaggaaattaaggcaacaaaagaagcccggctcctggtcacctaggaagcctcagattccttcccatggagggagggagtggtttgcaggtggccaagttcctctaacttggctcacactcgacatgaaaattcagaattttatactttccctacyctctagagaaataagatcttttttgtcagtttgtttgtatgaaactaaagcctttatttgttaatagttcctgctaaaacaatgaataaaaactcaaggagcaacta

SEQ ID NO: 4620 - DNA, 4347 bp, Homo sapiens
gttgacaagagacattccagcccaccacttcccaagtaaagaattaaaatgcagcatgatggctaaggcaagggcctgcagaagaatgtaaaggagggaggaagagcaggggattcagagcaggaaggaggagacagttactgtctatcccgcagacgtggtgctctttgaaggratcctggccttctactcccaggaggtacgagacctgttccagatgaagctttttgtggatacagatgcggacacccggctctcacgcagagtattaagggacatcagcgagagaggcagggatcttgagcagattttatctcagtacattaygttcgtcaagcctgcctttgaggaattctgcttgccaacaaagaagtatgctgatgtgatcatccctagaggtgcagataatctggtggccatcaacctcatcgtgcagcacatccaggacatcctgaatggagggccctccaaacggcagaccaatggctgtctcaacggctacaccccttcacgcaagaggcaggcatcggagtccagcagcaggccgcattgacccgtctccatcggaccccagcccctatctccaagagacagaggaggggtcaggaggcactgctcatctgtacatactgtttcctatgacattactgtatttaagaaaacaccatggagatgaaatgcctttgattttttttttctttttgtactttggaacgacaaaatgaaacagaacttgaccctgrgcttaaataacaaaactgtgccaactactactggtgatgcctaattatgaatccaacgtgtaaccagttataaatacatatatatataaaaaaggatctatttttgtgtaaatgtacaaatactgtaaagctgtttgccataagtattttgcaggagggtctgtacttgagtgttttaggactggagctggaatttcaccaaggggaaattgcctgttgtgtcccagggtggggaggctcgggcatctgtgagagacagggagggtggctaaggtccagttgcttttgagtgccccgtggaacttgatgggaatggggttggaamaccttgattgcctcctctgtcacatgccactcttggagctggagcttagtgatatgtcaatgagagatactcttgtcttttttttttttcttttctttttttttttgagttgaaattaggtaaaatctcaactcaaaaatcaaactcagggaagaggcccactgaggagaacaartcttctgcattttcttcctgccctgctcccaccttctygcctctggctgcttggatagcttggtgactccttcctcaccctcctgcttctctgtctctccaagaagccagagctgcctctttccttccctggaagagattttatgggatcgcttcctgatagaagatgggaaggagagggcagaactttgcctgctgtcatatctgaagaatcactggttctttctgcatcccaggggcgtaactgatctgactccttgggctttttcctgtattgtggaatatagagtggaccattgcaggctgggtgtgggtgagggcttcggtaactgatgccggcagcagcgcctcatggagtggcaggggagctctgtctgtggaggggtagtagtttccgcttcctggaggtttgcagtgaggtgaggagagtaactttggtcagggattctcactagcagcgtcatggccaggatgctttacttatttgcaataccacctagtggatatggcaactgcagagcatamaaggggctcggaaaagcagtttttacaaagtatttaaaaggagagtatttaaatcataggtacctaagttggagcctgaggttgaaatatttggggtggagatttctagctttcctgagagctgctgcttggtggtagtgttttctctggaagtacagattcctgacattctgggtggaggggagcccaagtgagcctgaaggagttctgattatagagtccygagcctcagtttctgactgcagaagagccagagatgttcatttcattgttgaccaccctagtgcttggtggactgtgcccttagctatcccactgtggctgccattgccagaaacattttggagaaccttttcttcccattgctctcagagcctgttcgagccattcaggtaaattggtctccattattacctggtcacaccagattttcccccagactcagcaccatccagtctgattccccgtttctgggctcagtttgactctaaatctgttttgctattttaaaaagtcaaacctggtccccagcagagcttgccacccggagactttcaggagaccgtgcaggctctgaagggagctcccagtcacagcagccgcctacttggagcaagggaaggctcccaagatgcctcctttgaaagccggtgctcaccaagatcagttcaggatcaatcattatccttgtagtcatgccttgatcagttctgagatgaagcagggaatgcaggcctgggttagyatcctgaggacacagggcccctggccttgatggcactgggcygtgctcaggtgaagcccacccgtgtctgggagagccttggcttttcagtgggcagcatgctcaactttacttgaagctcccaggtgccaaaccatttagtgccttggctgtttatcccactgccttggaagatggactcctctcatctctgagcctttacctagctgcttcctcatctacctgtggtgttgggaccaagcctccaatatctctgaatagcccactcctagcttggaaacagctataagggctgccctgccccttgtcaaatgatcaccaattcttggtggcttggctggggacaatgaacagtgtctgctggggtctgtgacacactgtttctggaacaaggaagggatggaaggctctacccctccgtggcagcccagcatttggccaactctgtatctgaacttgagctttctatggaacaaacaatggtcttagttttttaagagcctctgggtctctgattccatggagagtcaggagtagaattagtggaccagaaaccatgacatttgccatctaggtactctgctgttcagggtggaggcacagatgagcagagtggggtgatgttggttgtatgtgcatagaagtcccctggctccagagccatccagtggtgcttggttctctcttcctgcccaggtattgtgtgtggaccaagtgtttaggaaacaagcatagaagcattatgtcacaggaaggcctggcctctcactccttcacactaatgagccttctactgacccaagtttctttttctcgggcagcctgggaccactatgagcagagagatgggagtctgtgtaagaaggatgcragtatcctttgatttggagtggacagagcaggtccttgcaaaggcagtgggttaaacaacgggatgtctgtgggacaggccagggaaggagggcagagacagggtctccagttcaccttgccgcagaactagcctaatcrtccctgcttctggtcttggccacttggcaatcatggggaagttgactccccgcctcacttgggcttggagctggatactygtggccacgcccaggataggttgccagagtttcattaggccgctgggtcgggctggaggcttgtgtacacctcggagcagtcgggcagcaggagggccggaagcctggttggtttgtatatgacctctcttgcccttgtgcactttccttgatttagcaaccttgacctgcactggccctcacagctgttggagggaagtagcctcttgcagggaaatattttcccctgccctggaatctcctatgtgcctgttaaagattccagggccaagaactcggcaggctgaggagcagctaggtaggtgggttatgcggttcaggactgcttctggaagggactgcctgtacttctgtaccaccgttgccctttacactttgctcagggcggggtgggggaagcattcaaacaaaacaaggaagggaactgtctggcaaagcataagtggatgcatccagagctcagtcccctttaatcttttgtctctgggcgttctgctgccttcctcataccggggactggcattccaggtcagcttggctgtggtcttagaggcaggragtgcctacccagtcctgcctcaggagcagggtgagtagctaaatacagacttaggcttttttttccccccttttaagatgcttgctcctctcccttttctttttaccaccctacctttattgttagtggttacaaagtgaccacatattatgtactttgctgtaaataaagmcagacaaaaaggm

SEQ ID NO: 4621 - DNA, 4883 bp, Homo sapiens
ctcgccgcctccgcctcggcgaatagcagcgcgctgcccgcccggattggagcagcagcatcacgctgacctctgcctgggatgtaaaccggaccagccgctgcgggcaaaggaaggctcttggctccttcgggaaacccagccccgtcaccgggctccgagcggctcgcaggcgagcgacagcggcctcagccccggcagcgcccagcggcggctgcggaaagcggagggagtccgacgcgggcgcgggcggggagcgtgcgtccgttcgcacaggcagcgggaggaggggcggcgcgaaccatggccggggacagcgagcagaccctgcagaaccaccagcagcccaacggcggcgagcccttccttataggcgtcagcgggggaacagctagcggcaagtcttccgtgtgtgctaagatcgtgcagctcctggggcagaatgaggtggactatcgccagaagcaggtggtcatcctgagccaggatagcttctaccgtgtccttacctcggagcagaaggccaaagccctgaagggccagttcaactttgaccacccggatgcctttgacaatgaactcattctcaaaacactcaaagaaatcactgaagggaaaacagtccagatccccgtgtatgactttgtctcccattcccggaaggaggagacagttactgtctatcccgcagacgtggtgctctttgaaggratcctggccttctactcccaggaggtacgagacctgttccagatgaagctttttgtggatacagatgcggacacccggctctcacgcagagtattaagggacatcagcgagagaggcagggatcttgagcagattttatctcagtacattaygttcgtcaagcctgcctttgaggaattctgcttgccaacaaagaagtatgctgatgtgatcatccctagaggtgcagataatctggtggccatcaacctcatcgtgcagcacatccaggacatcctgaatggagggccctccaaacggcagaccaatggctgtctcaacggctacaccccttcacgcaagaggcaggcatcggagtccagcagcaggccgcattgacccgtctccatcggaccccagcccctatctccaagagacagaggaggggtcaggaggcactgctcatctgtacatactgtttcctatgacattactgtatttaagaaaacaccatggagatgaaatgcctttgattttttttttctttttgtactttggaacgacaaaatgaaacagaacttgaccctgrgcttaaataacaaaactgtgccaactactactggtgatgcctaattatgaatccaacgtgtaaccagttataaatacatatatatataaaaaaggatctatttttgtgtaaatgtacaaatactgtaaagctgtttgccataagtattttgcaggagggtctgtacttgagtgttttaggactggagctggaatttcaccaaggggaaattgcctgttgtgtcccagggtggggaggctcgggcatctgtgagagacagggagggtggctaaggtccagttgcttttgagtgccccgtggaacttgatgggaatggggttggaamaccttgattgcctcctctgtcacatgccactcttggagctggagcttagtgatatgtcaatgagagatactcttgtcttttttttttttcttttctttttttttttgagttgaaattaggtaaaatctcaactcaaaaatcaaactcagggaagaggcccactgaggagaacaartcttctgcattttcttcctgccctgctcccaccttctygcctctggctgcttggatagcttggtgactccttcctcaccctcctgcttctctgtctctccaagaagccagagctgcctctttccttccctggaagagattttatgggatcgcttcctgatagaagatgggaaggagagggcagaactttgcctgctgtcatatctgaagaatcactggttctttctgcatcccaggggcgtaactgatctgactccttgggctttttcctgtattgtggaatatagagtggaccattgcaggctgggtgtgggtgagggcttcggtaactgatgccggcagcagcgcctcatggagtggcaggggagctctgtctgtggaggggtagtagtttccgcttcctggaggtttgcagtgaggtgaggagagtaactttggtcagggattctcactagcagcgtcatggccaggatgctttacttatttgcaataccacctagtggatatggcaactgcagagcatamaaggggctcggaaaagcagtttttacaaagtatttaaaaggagagtatttaaatcataggtacctaagttggagcctgaggttgaaatatttggggtggagatttctagctttcctgagagctgctgcttggtggtagtgttttctctggaagtacagattcctgacattctgggtggaggggagcccaagtgagcctgaaggagttctgattatagagtccygagcctcagtttctgactgcagaagagccagagatgttcatttcattgttgaccaccctagtgcttggtggactgtgcccttagctatcccactgtggctgccattgccagaaacattttggagaaccttttcttcccattgctctcagagcctgttcgagccattcaggtaaattggtctccattattacctggtcacaccagattttcccccagactcagcaccatccagtctgattccccgtttctgggctcagtttgactctaaatctgttttgctattttaaaaagtcaaacctggtccccagcagagcttgccacccggagactttcaggagaccgtgcaggctctgaagggagctcccagtcacagcagccgcctacttggagcaagggaaggctcccaagatgcctcctttgaaagccggtgctcaccaagatcagttcaggatcaatcattatccttgtagtcatgccttgatcagttctgagatgaagcagggaatgcaggcctgggttagyatcctgaggacacagggcccctggccttgatggcactgggcygtgctcaggtgaagcccacccgtgtctgggagagccttggcttttcagtgggcagcatgctcaactttacttgaagctcccaggtgccaaaccatttagtgccttggctgtttatcccactgccttggaagatggactcctctcatctctgagcctttacctagctgcttcctcatctacctgtggtgttgggaccaagcctccaatatctctgaatagcccactcctagcttggaaacagctataagggctgccctgccccttgtcaaatgatcaccaattcttggtggcttggctggggacaatgaacagtgtctgctggggtctgtgacacactgtttctggaacaaggaagggatggaaggctctacccctccgtggcagcccagcatttggccaactctgtatctgaacttgagctttctatggaacaaacaatggtcttagttttttaagagcctctgggtctctgattccatggagagtcaggagtagaattagtggaccagaaaccatgacatttgccatctaggtactctgctgttcagggtggaggcacagatgagcagagtggggtgatgttggttgtatgtgcatagaagtcccctggctccagagccatccagtggtgcttggttctctcttcctgcccaggtattgtgtgtggaccaagtgtttaggaaacaagcatagaagcattatgtcacaggaaggcctggcctctcactccttcacactaatgagccttctactgacccaagtttctttttctcgggcagcctgggaccactatgagcagagagatgggagtctgtgtaagaaggatgcragtatcctttgatttggagtggacagagcaggtccttgcaaaggcagtgggttaaacaacgggatgtctgtgggacaggccagggaaggagggcagagacagggtctccagttcaccttgccgcagaactagcctaatcrtccctgcttctggtcttggccacttggcaatcatggggaagttgactccccgcctcacttgggcttggagctggatactygtggccacgcccaggataggttgccagagtttcattaggccgctgggtcgggctggaggcttgtgtacacctcggagcagtcgggcagcaggagggccggaagcctggttggtttgtatatgacctctcttgcccttgtgcactttccttgatttagcaaccttgacctgcactggccctcacagctgttggagggaagtagcctcttgcagggaaatattttcccctgccctggaatctcctatgtgcctgttaaagattccagggccaagaactcggcaggctgaggagcagctaggtaggtgggttatgcggttcaggactgcttctggaagggactgcctgtacttctgtaccaccgttgccctttacactttgctcagggcggggtgggggaagcattcaaacaaaacaaggaagggaactgtctggcaaagcataagtggatgcatccagagctcagtcccctttaatcttttgtctctgggcgttctgctgccttcctcataccggggactggcattccaggtcagcttggctgtggtcttagaggcaggragtgcctacccagtcctgcctcaggagcagggtgagtagctaaatacagacttaggcttttttttccccccttttaagatgcttgctcctctcccttttctttttaccaccctacctttattgttagtggttacaaagtgaccacatattatgtactttgctgtaaataaagmcagacaaaaaggm

SEQ ID NO: 4622 - DNA, 4024 bp, Homo sapiens
ctcgccgcctccgcctcggcgaatagcagcgcgctgcccgcccggattggagcagcagcatcacgctgacctctgcctgggatgtaaaccggaccagccgctgcgggcaaaggaaggctcttggctccttcgggaaacccagccccgtcaccgggctccgagcggctcgcaggcgagcgacagcggcctcagccccggcagcgcccagcggcggctgcggaaagcggagggagtccgacgcgggcgcgggcggggagcgtgcgtccgttcgcacaggcagcgggaggaggggcggcgcgaaccatggccggggacagcgagcagaccctgcagaaccaccagcagcccaacggcggcgagcccttccttataggcgtcagcgggggaacagctagcggcaagtcttccgtgtgtgctaagatcgtgcagctcctggggcagaatgaggtggactatcgccagaagcaggtggtcatcctgagccaggatagcttctaccgtgtccttacctcggagcagaaggccaaagccctgaagggccagttcaactttgaccacccggatgcctttgacaatgaactcattctcaaaacactcaaagaaatcactgaagggaaaacagtccagatccccgtgtatgactttgtctcccattcccggaaggaggagacagttactgtctatcccgcagacgtggtgctctttgaaggratcctggccttctactcccaggaggtacgagacctgttccagatgaagctttttgtggatacagatgcggacacccggctctcacgcagagtattaagggacatcagcgagagaggcagggatcttgagcagattttatctcagtacattaygttcgtcaagcctgcctttgaggaattctgcttgccaacaaagaagtatgctgatgtgatcatccctagaggtgcagataatctggtggccatcaacctcatcgtgcagcacatccaggacatcctgaatggagggccctccaaacggcagaccaatggctgtctcaacggctacaccccttcacgcaagaggcaggcatcggagtccagcagcaggccgcattgacccgtctccatcggaccccagcccctatctccaagagacagaggaggggtcaggaggcactgctcatctgtacatactgtttcctatgacattactgtatttaagaaaacaccatggagatgaaatgcctttgattttttttttctttttgtactttggaacgacaaaatgaaacagaacttgaccctgrgcttaaataacaaaactgtgccaactactactggtgatgcctaattatgaatccaacgtgtaaccagttataaatacatatatatataaaaaaggatctatttttgtgtaaatgtacaaatactgtaaagctgtttgccataagtattttgcaggagggtctgtacttgagtgttttaggactggagctggaatttcaccaaggggaaattgcctgttgtgtcccagggtggggaggctcgggcatctgtgagagacagggagggtggctaaggtccagttgcttttgagtgccccgtggaacttgatgggaatggggttggaamaccttgattgcctcctctgtcacatgccactcttggagctggagcttagtgatatgtcaatgagagatactcttgtcttttttttttttcttttctttttttttttgagttgaaattaggtaaaatctcaactcaaaaatcaaactcagggaagaggcccactgaggagaacaartcttctgcattttcttcctgccctgctcccaccttctygcctctggctgcttggatagcttggtgactccttcctcaccctcctgcttctctgtctctccaagaagccagagctgcctctttccttccctggaagagattttatgggatcgcttcctgatagaagatgggaaggagagggcagaactttgcctgctgtcatatctgaagaatcactggttctttctgcatcccaggggcgtaactgatctgactccttgggctttttcctgtattgtggaatatagagtggaccattgcaggctgggtgtgggtgagggcttcggtaactgatgccggcagcagcgcctcatggagtggcaggggagctctgtctgtggaggggtagtagtttccgcttcctggaggtttgcagtgaggtgaggagagtaactttggtcagggattctcactagcagcgtcatggccaggatgctttacttatttgcaataccacctagtggatatggcaactgcagagcatamaaggggctcggaaaagcagtttttacaaagtatttaaaaggagagtatttaaatcataggtacctaagttggagcctgaggttgaaatatttggggtggagatttctagctttcctgagagctgctgcttggtggtagtgttttctctggaagtacagattcctgacattctgggtggaggggagcccaagtgagcctgaaggagttctgattatagagtccygagcctcagtttctgactgcagaagagccagagatgttcatttcattgttgaccaccctagtgcttggtggactgtgcccttagctatcccactcatttggccaactctgtatctgaacttgagctttctatggaacaaacaatggtcttagttttttaagagcctctgggtctctgattccatggagagtcaggagtagaattagtggaccagaaaccatgacatttgccatctaggtactctgctgttcagggtggaggcacagatgagcagagtggggtgatgttggttgtatgtgcatagaagtcccctggctccagagccatccagtggtgcttggttctctcttcctgcccaggtattgtgtgtggaccaagtgtttaggaaacaagcatagaagcattatgtcacaggaaggcctggcctctcactccttcacactaatgagccttctactgacccaagtttctttttctcgggcagcctgggaccactatgagcagagagatgggagtctgtgtaagaaggatgcragtatcctttgatttggagtggacagagcaggtccttgcaaaggcagtgggttaaacaacgggatgtctgtgggacaggccagggaaggagggcagagacagggtctccagttcaccttgccgcagaactagcctaatcrtccctgcttctggtcttggccacttggcaatcatggggaagttgactccccgcctcacttgggcttggagctggatactygtggccacgcccaggataggttgccagagtttcattaggccgctgggtcgggctggaggcttgtgtacacctcggagcagtcgggcagcaggagggccggaagcctggttggtttgtatatgacctctcttgcccttgtgcactttccttgatttagcaaccttgacctgcactggccctcacagctgttggagggaagtagcctcttgcagggaaatattttcccctgccctggaatctcctatgtgcctgttaaagattccagggccaagaactcggcaggctgaggagcagctaggtaggtgggttatgcggttcaggactgcttctggaagggactgcctgtacttctgtaccaccgttgccctttacactttgctcagggcggggtgggggaagcattcaaacaaaacaaggaagggaactgtctggcaaagcataagtggatgcatccagagctcagtcccctttaatcttttgtctctgggcgttctgctgccttcctcataccggggactggcattccaggtcagcttggctgtggtcttagaggcaggragtgcctacccagtcctgcctcaggagcagggtgagtagctaaatacagacttaggcttttttttccccccttttaagatgcttgctcctctcccttttctttttaccaccctacctttattgttagtggttacaaagtgaccacatattatgtactttgctgtaaataaagmcagacaaaaaggm

SEQ ID NO: 4623 - DNA, 1314 bp, Homo sapiens
agtgtagccgggtcagctggacagggtcatcctgagggtgcgactccgccgcgatggtgacccggttcctgggcccacgctaccgggagctggtcaagaactgggtcccgacggcctacacatggggcgctgtgggcgccgtggggctggtgtgggccaccgattggcggctgatcctggactgggtaccttacatcaatggcaagtttaagaaggataattaattacacaaacccttcacagactgctctggtgcctggtggygctagctcctcccacctcagcacctgctgcatytggagcagcccaagcctcaggatggacaagaggaaacccmcagctcagcttcaggcttyttatgtttctgaaaacagcttggatattttaatgcacgttgcattaaacctcactgaaacctgmtccgtgcccggatgttgatcatgctggtggcttggttactgtgactgtagctggagtggcacaggtgacccaggcgtcctttcagctccagaatgttgcaagtctaggagagtgttccaatggctgacagaaactgcctatttgaaatggctcataagtagtatctgcagtgtgttcatccgttgctgccttaacaagtcacccacacgtagtggcttaaagcaacgaacattcactctctcacagtctgtgtcagtcggggatttgggagtgatgtatctgggtggttgtggcccagagtctctcatgaggttgcagttaagacatcagccaaggccacttcgtctgaggaaggctcaactggggctggagccacttccaagccagtgccctcacgtggctgtcggtgacagccacagttccttcccatgggggcccctacacgaagctgcttgagcatcctcacggcatggcctctgccttccccagagcaggtgaaccaagggagaggaaggagcaagccacagtgcttctatgagccaccctgagaagtctcacgtgatcacttccgccacagcctgtttatcaaaagcaagccccccaggcccagcccacgtgcagagggaggagaatgaggttctgtgttttgaagggaagaatatcagaattggtagacatttcaaactgtcacattagggatacaaaaatgaacaggctgggagtggtggctcagcctacaatcccracactttgggaggctgaggaaggggcatcacttgaaccaggagttcagtactaacctgggcaacaaagaggcccctgtctctgataaaaaraaaaaaaatgaaaaaataaaaatgaacaggtataaaaagagaatatggtacaaagtca

SEQ ID NO: 4624 - DNA, 1366 bp, Homo sapiens
agtgtagccgggtcagctggacagggtcatcctgagggtgcgactccgccgcgatggtgacccggttcctgggcccacgctaccgggagctggtcaagaactgggtcccgacggcctacacatggggcgctgtgggcgccgtggggctggtgtgggccaccgattggcggctgatcctggactgggtaccttacatcaatggcaagtttaagaaggataattaattacacaaacccttcacagactgctctggtgatgcgcccgcctcggcctcccaaagtgctgggattagaggcgtgagccactgcacccagcctggaagggacacttctactcaccctgcctcgtctgctctccctccaggtgcctggtggygctagctcctcccacctcagcacctgctgcatytggagcagcccaagcctcaggatggacaagaggaaacccmcagctcagcttcaggcttyttatgtttctgaaaacagcttggatattttaatgcacgttgcattaaacctcactgaaacctgmtccgtgcccggatgttgatcatgctggtggcttggttactgtgactgtagctggagtggcacaggtgacccaggcgtcctttcagctccagaatgttgcaagtctaggagagtgttccaatggctgacagaaactgcctatttgaaatggctcataagtagtatctgcagtgtgttcatccgttgctgccttaacaagtcacccacacgtagtggcttaaagcaacgaacattcactctctcacagtctgtgtcagtcggggatttgggagtgatgtatctgggtggttgtggcccagagtctctcatgaggttgcagttaagacatcagccaaggccacttcgtctgaggaaggctcaactggggctggagccacttccaagccagtgccctcacgtggctgtcggtgacagccacagttccttcccatgggggcccctacacgaagctgcttgagcatcctcacggcatggcctctgccttccccagagcaggtgaaccaagggagaggaaggagcaagccacagtgcttctatgagccaccctgagaagtctcacgtgatcacttccgccacagcctgtttatcaaaagcaagccccccaggcccagcccacgtgcagagggaggagaatgaggttctgtgttttgaagggaagaatatcagaattggtagacatttcaaactgtcacattagggatacaaaaatgaacaggctgggagtggtggctcagcctacaatcccracactttgggaggctgaggaaggggcatcacttgaaccaggagttcagtactaacctgggcaacaaagaggcccctgtctctgataaaaa

SEQ ID NO: 4625 - DNA, 2015 bp, Homo sapiens
cagcgagtcggctgctatgggccccacctggcacggggcctcgggcagcggcagcacctggcgctgcctccgcgcttcctgctcccggctcccactgcatctccggttctgtgctttgttgaacgcgtgagcttcgggcagcgctggggccgcttcagcgtgacctccaaggccactggcctggagttccactggctgctggtcccccatctgtggggcgccccggcggctgaggcgtggaccaggcagtgcacgtcgaggagtagcacccacagctgcgcggctgcgaaatgatccagagacacatccctgtctgcgggaggagccgtccataccagcggggatgtgtagtccaggctggcagttcaggatcacccggctggagtcattttaagatcatctgcggcttagccccagcaccatctgaggcagtactgtctgctagaaataactgtgagcacacaggggttagcaggacatgagggagtgtagctctgatgcggtgacctgggccggagccctcggactagcctcagctttggtggcagcacgccctgccttgtggagccacggcctcccgggacggactccccggctctcccccagccgcccgcagccgccggatgatcctctgctcccgtctctgtctcccacagtcggcctcgctgaggatggagcccgccccgggcctcgtggagcagcccaagtgcttggaggccgggagcccggagcctgagccggcgccgtggcaggccctccctgtcctgtccgagaagcagtcaggggacgtggagctggtgctggcctacgccgcgcccgtcctggacaagcgccagacctcacgcctcctgaaggaggtgtcggccctgcacccgctccccgcccagcctcacctcaagcgggtgcggcccagccgcgatgccggcagcccccacgccctggagatgctgctttgcctggctgggccggcctcgggcccgcgctcgctggctgagctcctgccacggccggctgtggacccccgcggcctggggcaacccttcctggtgcccgtgcccgcccggccgcctctgaccaggggccagttcgaggaggcccgggcccactggcccacgtccttccacgaggacaagcaggtgaccagcgccctggctgggcggctcttctccacgcaggagcgcgccgccatgcagagccacatggagcgggcggtgtgggcggcccggcgggcagcagcgcggggcttgcgggccgtgggggccgtggtagtggacccggcctcggaccgcgtgctggccaccggccacgactgcagctgcgcggacaaccccctcctgcacgccgtcatggtgtgcgtggacctcgtggcgcgcggccagggccgcggcacctaygacttcagacccttccccgcctgctccttcgccccggccgctgccccccaggccgtccgcgcaggcgccgtgcgtaaactggacgcagacgaggacggcctcccctacctgtgcacyggctacgacctgtacgtgacccgcgagccctgcgccatgtgcgccatggccctggtgcacgcacgcatcctgcgcgtcttctacggtgcgccctcgcccgacggcgccctgggcacccgcttccgcatccacgcacggcccgacctcaaccaccgcttccaggtgttccgcggggtgctggaggagcagtgccgctggctggaccccgacacgtaggcgccgccctcctgcctccggacccttcccgctcccggccgtggggcgcccctcctggacttccgggcctcgatttcttccgcacaagcctgaccgtggatttcagggacacataccgcctccagcggggagcacgggtgctgccttccgtgcggatcgagctttcctggactcggtcattggggccaccccgtgccagcggtgcccttctgcggccgcccttgctgcgtttgtgtcccctctgtctcgcgggccgggaaactgctctgatgggaaaataaacagccc

SEQ ID NO: 4626 - DNA, 1711 bp, Homo sapiens
tagtccttgccccaccttggcctggcgaagatcccgcccctggaactacgctcccgtcgtgctccgcggctccaggcgragacgaggcggggtgaggtgggttgggccgggccggttgctaagacttkgcgaagcgctgcgctcgcgcccggatccctcaggggttagcaggacatgagggagtgtagctctgatgcggtgacctgggccggagccctcggactagcctcagctttggtggcagcacgccctgccttgtggagccacggcctcccgggacggactccccggctctcccccagccgcccgcagccgccggatgatcctctgctcccgtctctgtctcccacagtcggcctcgctgaggatggagcccgccccgggcctcgtggagcagcccaagtgcttggaggccgggagcccggagcctgagccggcgccgtggcaggccctccctgtcctgtccgagaagcagtcaggggacgtggagctggtgctggcctacgccgcgcccgtcctggacaagcgccagacctcacgcctcctgaaggaggtgtcggccctgcacccgctccccgcccagcctcacctcaagcgggtgcggcccagccgcgatgccggcagcccccacgccctggagatgctgctttgcctggctgggccggcctcgggcccgcgctcgctggctgagctcctgccacggccggctgtggacccccgcggcctggggcaacccttcctggtgcccgtgcccgcccggccgcctctgaccaggggccagttcgaggaggcccgggcccactggcccacgtccttccacgaggacaagcaggtgaccagcgccctggctgggcggctcttctccacgcaggagcgcgccgccatgcagagccacatggagcgggcggtgtgggcggcccggcgggcagcagcgcggggcttgcgggccgtgggggccgtggtagtggacccggcctcggaccgcgtgctggccaccggccacgactgcagctgcgcggacaaccccctcctgcacgccgtcatggtgtgcgtggacctcgtggcgcgcggccagggccgcggcacctaygacttcagacccttccccgcctgctccttcgccccggccgctgccccccaggccgtccgcgcaggcgccgtgcgtaaactggacgcagacgaggacggcctcccctacctgtgcacyggctacgacctgtacgtgacccgcgagccctgcgccatgtgcgccatggccctggtgcacgcacgcatcctgcgcgtcttctacggtgcgccctcgcccgacggcgccctgggcacccgcttccgcatccacgcacggcccgacctcaaccaccgcttccaggtgttccgcggggtgctggaggagcagtgccgctggctggaccccgacacgtaggcgccgccctcctgcctccggacccttcccgctcccggccgtggggcgcccctcctggacttccgggcctcgatttcttccgcacaagcctgaccgtggatttcagggacacataccgcctccagcggggagcacgggtgctgccttccgtgcggatcgagctttcctggactcggtcattggggccaccccgtgccagcggtgcccttctgcggccgcccttgctgcgtttgtgtcccctctgtctcgcgggccgggaaactgctctgatgggaaaataaacagccc

SEQ ID NO: 4627 - DNA, 1632 bp, Homo sapiens
aagaaaatgatctgtcttctggtaggtgaattatatcttcgtttttaaaaaccaatggctgtttaaactctgtgcacaccaggggttagcaggacatgagggagtgtagctctgatgcggtgacctgggccggagccctcggactagcctcagctttggtggcagcacgccctgccttgtggagccacggcctcccgggacggactccccggctctcccccagccgcccgcagccgccggatgatcctctgctcccgtctctgtctcccacagtcggcctcgctgaggatggagcccgccccgggcctcgtggagcagcccaagtgcttggaggccgggagcccggagcctgagccggcgccgtggcaggccctccctgtcctgtccgagaagcagtcaggggacgtggagctggtgctggcctacgccgcgcccgtcctggacaagcgccagacctcacgcctcctgaaggaggtgtcggccctgcacccgctccccgcccagcctcacctcaagcgggtgcggcccagccgcgatgccggcagcccccacgccctggagatgctgctttgcctggctgggccggcctcgggcccgcgctcgctggctgagctcctgccacggccggctgtggacccccgcggcctggggcaacccttcctggtgcccgtgcccgcccggccgcctctgaccaggggccagttcgaggaggcccgggcccactggcccacgtccttccacgaggacaagcaggtgaccagcgccctggctgggcggctcttctccacgcaggagcgcgccgccatgcagagccacatggagcgggcggtgtgggcggcccggcgggcagcagcgcggggcttgcgggccgtgggggccgtggtagtggacccggcctcggaccgcgtgctggccaccggccacgactgcagctgcgcggacaaccccctcctgcacgccgtcatggtgtgcgtggacctcgtggcgcgcggccagggccgcggcacctaygacttcagacccttccccgcctgctccttcgccccggccgctgccccccaggccgtccgcgcaggcgccgtgcgtaaactggacgcagacgaggacggcctcccctacctgtgcacyggctacgacctgtacgtgacccgcgagccctgcgccatgtgcgccatggccctggtgcacgcacgcatcctgcgcgtcttctacggtgcgccctcgcccgacggcgccctgggcacccgcttccgcatccacgcacggcccgacctcaaccaccgcttccaggtgttccgcggggtgctggaggagcagtgccgctggctggaccccgacacgtaggcgccgccctcctgcctccggacccttcccgctcccggccgtggggcgcccctcctggacttccgggcctcgatttcttccgcacaagcctgaccgtggatttcagggacacataccgcctccagcggggagcacgggtgctgccttccgtgcggatcgagctttcctggactcggtcattggggccaccccgtgccagcggtgcccttctgcggccgcccttgctgcgtttgtgtcccctctgtctcgcgggccgggaaactgctctgatgggaaaataaacagccc

SEQ ID NO: 4628 - DNA, 2524 bp, Homo sapiens
ggtgggttgggccgggccggttgctaagacttkgcgaagcgctgcgctcgcgcccggatccctcaggcggctgcaggcttcagcctgcgctggttggtgaaacagagatgtcagaaaaggagaacaacttcccgccactgcccaagttcatccctgtgaagccctgcttctaccagaacttctccgacgagatcccagtggagcaccaggtcctggtgaagaggatctaccggctgtggatgttttactgcrccaccctcggcgtcaacctcattgcctgcctggcctggtggatcggcggaggctcggggaccaacttcggcctggccttcgtgtggctgctcctgttcacgccttgcggctacgtgtgctggttccggcctgtctacaaggccttccgagccgacagctcctttaatttcatggcgtttttcttcatcttcggagcccagtttgtcctgaccgtcatccaggcrattggcttctccggctggggcgcgtgcggctggctgtcggcaattggattcttccagtacagcccgggcgctgccgtggtcatgctgcttccagccatcatgttctcygtgtcggctgccatgatggccatcgcgatcatgaaggtgcacaggatctaccgaggggctggcggaagcttccagaaggcacagacggagtggaacacgggcacttggcggaacccaccgtcgagggaggcccagtacaacaacttctcaggcaacagcctgcccgagtaccccactgtgcccagctacccgggcagtggccagtggccttagagggagcctgccctgcccccaccgcccaccacctcctccccttcattcctgctgctacccctggtcccgagggctgggagtacctggggccccatccccccagctgggatggtggaagccggtggtggccacggaccgcccccctcctgccagggccacagaacccgtgttcatctcatccgagagcggagttcctcacaagcactccccagcagcccttggcctctgccgtccacaggacgccctcttgctcccggaaacgtgtggtcacccgccgtccactgcacggctggtacggccttgtcttcaggtctcgaggcctgactccgggggacaggtggcagcaggtcggccgccctcccgtcctccmagagctgctggcgctgaggtcagagcgggtctgatggggagctccgtctcaccggccacccgccgtcaccatggcagatgcccttggccggaactaataagaggcgtcggggccagcttccggtcccctgcagtgatagagggcttggtgcctagctgagtcctcgctgtccccgccatcccctgatctgtgcggctccagcctcgccccctccccacgtgcaccatacctggggagttcctggtccagggtatcctggggccaccctccctgcctccaaaacagggatccctggcaggctgtctttccacgcccctgagttcagagtcggggacccaggccaggtcgggagcacagccgctccccaaacccagcaaaccggcagagagccggtttcccagcagccggagccctgcaggagaggcctttgtgttttgttttgttttgttttttctcttttgagacagagtttcactctgtcgcccaggctggagtgcagtggtgtgatctcggctcactgcaacctctgcctcccgtgttcaagcagttctcctgcctcagcctcccaaatagctgggattacagttgcctgccaccacgcccagctaatttttatatttttagtacagatggggtttcaccatgttggccaggctggtctcgaactcctgacctcaagtgatccacccgccttggcctcccaaagtgctgggataataggtgtcagccaccgcgcccagcctggagtggccttttatgagaggggacccgtcaaatctgtgccttatggaggggtccggcagcggccacaattgtcttgtcccctcaccccccaactccccctggaacacctctcccaggcaagacattttcacagcaccattcacaacggttgggccaaaaagaaacttttccttcatcatttcctgcactcgctgaccacaactttggacaccccaggctgccacccctccccacccgttcacccccaggatgctgttgctgtaggacgcctgctgccctggagccctccccaggatgtgagccagtcccctcgctggtacggaatgccgctgggtgcccggaggcggccatggtgtctcgatggacggcagccaggatggagcacccatgggtctcacggccatgcttcagggtcttcaggtcctgcccccggccagtctgccaagaggcacccccttccccagcctctcgcctgcactgatgcagacaaaatctcacctggcaggcccaacccccccccacccctccmccgccgtgtgtggcycctcgccgcatcgttggggttttgttaygtgaaaatatcctggaaataaatacatgtttctgcacttag

SEQ ID NO: 4629 - DNA, 2472 bp, Homo sapiens
ggttgggccgggccggttgctaagacttkgcgaagcgctgcgctcgcgcccggatccctcagaaaaggagaacaacttcccgccactgcccaagttcatccctgtgaagccctgcttctaccagaacttctccgacgagatcccagtggagcaccaggtcctggtgaagaggatctaccggctgtggatgttttactgcrccaccctcggcgtcaacctcattgcctgcctggcctggtggatcggcggaggctcggggaccaacttcggcctggccttcgtgtggctgctcctgttcacgccttgcggctacgtgtgctggttccggcctgtctacaaggccttccgagccgacagctcctttaatttcatggcgtttttcttcatcttcggagcccagtttgtcctgaccgtcatccaggcrattggcttctccggctggggcgcgtgcggctggctgtcggcaattggattcttccagtacagcccgggcgctgccgtggtcatgctgcttccagccatcatgttctcygtgtcggctgccatgatggccatcgcgatcatgaaggtgcacaggatctaccgaggggctggcggaagcttccagaaggcacagacggagtggaacacgggcacttggcggaacccaccgtcgagggaggcccagtacaacaacttctcaggcaacagcctgcccgagtaccccactgtgcccagctacccgggcagtggccagtggccttagagggagcctgccctgcccccaccgcccaccacctcctccccttcattcctgctgctacccctggtcccgagggctgggagtacctggggccccatccccccagctgggatggtggaagccggtggtggccacggaccgcccccctcctgccagggccacagaacccgtgttcatctcatccgagagcggagttcctcacaagcactccccagcagcccttggcctctgccgtccacaggacgccctcttgctcccggaaacgtgtggtcacccgccgtccactgcacggctggtacggccttgtcttcaggtctcgaggcctgactccgggggacaggtggcagcaggtcggccgccctcccgtcctccmagagctgctggcgctgaggtcagagcgggtctgatggggagctccgtctcaccggccacccgccgtcaccatggcagatgcccttggccggaactaataagaggcgtcggggccagcttccggtcccctgcagtgatagagggcttggtgcctagctgagtcctcgctgtccccgccatcccctgatctgtgcggctccagcctcgccccctccccacgtgcaccatacctggggagttcctggtccagggtatcctggggccaccctccctgcctccaaaacagggatccctggcaggctgtctttccacgcccctgagttcagagtcggggacccaggccaggtcgggagcacagccgctccccaaacccagcaaaccggcagagagccggtttcccagcagccggagccctgcaggagaggcctttgtgttttgttttgttttgttttttctcttttgagacagagtttcactctgtcgcccaggctggagtgcagtggtgtgatctcggctcactgcaacctctgcctcccgtgttcaagcagttctcctgcctcagcctcccaaatagctgggattacagttgcctgccaccacgcccagctaatttttatatttttagtacagatggggtttcaccatgttggccaggctggtctcgaactcctgacctcaagtgatccacccgccttggcctcccaaagtgctgggataataggtgtcagccaccgcgcccagcctggagtggccttttatgagaggggacccgtcaaatctgtgccttatggaggggtccggcagcggccacaattgtcttgtcccctcaccccccaactccccctggaacacctctcccaggcaagacattttcacagcaccattcacaacggttgggccaaaaagaaacttttccttcatcatttcctgcactcgctgaccacaactttggacaccccaggctgccacccctccccacccgttcacccccaggatgctgttgctgtaggacgcctgctgccctggagccctccccaggatgtgagccagtcccctcgctggtacggaatgccgctgggtgcccggaggcggccatggtgtctcgatggacggcagccaggatggagcacccatgggtctcacggccatgcttcagggtcttcaggtcctgcccccggccagtctgccaagaggcacccccttccccagcctctcgcctgcactgatgcagacaaaatctcacctggcaggcccaacccccccccacccctccmccgccgtgtgtggcycctcgccgcatcgttggggttttgttaygtgaaaatatcctggaaataaatacatgtttctgcacttag

SEQ ID NO: 4630 - DNA, 5593 bp, Homo sapiens
agtgaagagggcaccctataccatggcagtgcccggcgacgctgcacgagtcaggracaagcccgtccacagtggggtgagtcaagcccccacggcgggccgggactgccaccatcgtgcggaccccgcatcgccgcgggactcgggctgccgtggctgctggggagacctggtgctgcagccgctccggagctctcggaaactttcctcygcgctgtgcgcgggctccctgtcctttctgctggcgctgctggtgaggctggtccgcggggaggtcggctgtgacctggagcagtgtaaggaggcggcggcggcggaggaggaggaagcagccccgggagcagaagggggcgtcttcccggggcctcggggaggtgctcccgggggcggtgcgcggctcagcccctggctgcagccctcggcgctgctcttcagtctcctgtgtgccttcttctggatgggcttgtacctcctgcgcgccggggtgcgcctgcctctggctgtcgcgctgctggccgcctgctgcgggggggaagcgctcgtccagattgggctgggcgtcggggaggatcacttactctcactccccgccgcgggggtggtgctcagctgcttggccgccgcgacatggctggtgctgaggctgaggctgggcgtcctcatgatcgccttgactagcgckgtcaggaccgtgtccctcatttccttagagaggttcaaggtcgcctggagaccttacctggcgtacctggccggcgtgctggggatcctcttggccaggtacgtggaacaaatcttgccgcagtccgcggaggcggctccaagggagcatttggggtcccagctgattgctgggaccaaggaagatatcccggtgtttaagaggaggaggcggtccagctccgtcgtgtccgccgagatgtccggctgcagcagcaagtcccatcggaggacctccctgccctgtataccgagggaacagctcatggggcattcagaatgggaccacaaacgagggccaagaggatcacagtcttcaggaaccagtattactgtggacatcgccgtcatgggcgaggcccacggcctcattaccgacctcctggcagacccttctcttccaccaaacgtgtgcacatccttgagagccgtgagcaacttgctcagcacacagctcaccttccaggccattcacaascccagagtgaatcccgtyacttcgctcagtgaaaactatacctgttctgactctgaagagagctctgaaaaagacaagcttgctattccaaagcgcctgagaaggagtttgcctcctggcttgttgagacgagtttcttccacttggaccaccaccacctcggccacaggtctacccaccttggagcctgcaccagtacggagagaccgcagcaccagcatcaaactgcaggaagcaccttcatccagtcctgattcttggaataatccagtgatgatgaccctcaccaaaagcagatcctttacttcatcctatgctatttctgcagctaaccatgtaaaggctaaaaagcaaagtcgaccaggtgccctcgctaaaatttcacctctttcatcgccctgctcctcacckctccaagggactcctgccagcagcctggtcagcaaaatttctgcagtgcagtttccagaatctgctgacacaactgccaaacaaagcctaggttctcacagggccttaacttacactcagagtgccccagacctatcccctcaaatcctgactccacctgttatatgtagcagctgtggcagaccatattcccaagggaatcctgctgatgagcccctggagagaagtggggtagccactcggacaccaagtagaacagatgacactgctcaagttacctctgattatgaaaccaataacaacagtgacagcagtgacattgtacagaatgaagatgaaacagagtgcctgagagagcctctgaggaaagcatcggcttgcagcacctatgctcctgagaccatgatgtttctggacaaaccaattcttgctcccgaacctcttgtcatggataacctggactcaattatggagcagctaaatacttggaattttccaatttttgatttagtggaaaatataggaagaaaatgtggccgtattcttagtcaggtatcttacagactttttgaagacatgggcctctttgaagcttttaaaattccaattagggaatttatgaattattttcatgctttggagattggatatagggatattccttatcataacagaatccatgccactgatgttttacatgctgtttggtatcttactacacagcctattccaggcctctcaactgtgattaatgatcatggttcaaccagtgattcagattctgacagtggatttacacatggacatatgggatatgtattctcaaaaacgtataatgtgacagatgataaatacggatgtctgtctgggaatatccctgccttggagttgatggcgctgtatgtggctgcagccatgcacgattatgatcatccaggaaggactaatgctttcctggttgcaactagtgctcctcaggcggtgctatataacgatcgttcagttttggagaatcatcacgcagctgctgcatggaatcttttcatgtcccggccagagtataacttcttaattaaccttgaccatgtggaatttaagcatttccgtttccttgtcattgaagcaattttggccactgacctgaagaaacactttgacttcgtagccaaatttaatggcaaggtaaatgatgatgttggaatagattggaccaatgaaaatgatcgtctactggtttgtcaaatgtgtataaagttggctgatatcaatggtccagctaaatgtaaagaactccatcttcagtggacagatggtattgtcaatgaattttatgaacagggtgatgaagaggccagccttggattacccataagccccttcatggatcgttctgctcctcagctggccaaccttcaggaatccttcatctctcacattgtggggcctctgtgcaactcctatgattcagcaggactaatgcctggaaaatgggtggaagacagcgatgagtcaggagatactgatgacccagaagaagaggaggaagaagcaccagcaccaaatgaagaggaaacctgtgaaaataatgaatctccaaaaaagaagactttcaaaaggagaaaaatctactgccaaataactcagcacctcttacagaaccacaagatgtggaagaaagtcattgaagaggagcaacggttggcaggcatagaaaatcaatccctggaccagacccctcagtcgcactcttcagaacagatccaggctatcaaggaagaagaagaagagaaagggaaaccaagaggcgaggagataccaacccaaaagccagaccagtgacaatggatagaatgggctgtgtttccaaacagattgacttgtcaaagactctcttcaagccagcayaacatttagacacaacactgtagaaatttgagatgggcaaatggctattgcattttgggattcttcgcattttgtgtgtatatttttacagtgaggtacattgttaaaaactttttgctcaaagaagctttcacattgcaacaccagcttctaaggattttttaaggagggaatatatatgtgtgtgtgtatataagctcccacatagatacatgtaaaacatattcacacccatgcacgcacacacatacacactgaaggccacgattgctggctccacaatttagtaacatttatattaagatatatatatagtggtcactgtgatataataaatcataaaggaaaccaaatcacaaaggagatggtgtggcttagcaaggaaacagtgcaggaaatgtaggttaccaactaagcagcttttgctcttagtactgagggatgaaagttccagagcattatttgaattctgatacatcctgccaacactgtgtgtgtgtgtgtgtgtgtgtgtgtgtgtgtgtgtgtgtgtgaaagagagacagaagggaatggtttgagaggktgcttgtgtgcatgtgtgtgcatatgtaaagagatttttgtggtttaagtaactcagaatagctgtagcaaatgactgaatacatgtgaacaaacagaaggaagttcactctggagtgtctttgggaggcagccattccaaatgccctcctccatttagcttcaataaagggccttttgctgrtggagggcactcaagggctgggtgagagggccacgtgtttggtattacattactgctatgcaccacttgaaggagctctatcaccagcctcaaacccgaaagactgaggcattttccagtctacttgcctaatgaatgtatargaactgtctatgagtatggatgtcactcaactaagatcaaatcaccatttaaggggatggcattctttatacctaaacacctaagagctgaagtcaggtcttttaatcaggttagaattctaaatgatgccagagaaggcttgggaaattgtacttcagcgtgatagcctgtgtcttcttaatttgctgcaaaatatgtggtagagaaagaaaaggaaacagaaaaatcactctgggttatatagcaagagatgaaggagaatatttcaacacagggtttttgtgttgacataggaaaagcctgattcttggcaactgttgtagtttgtctttcaggggtgaaggtcccactgacaacccctgttgtggtgttccacacgctgtttgttggggtagcttccatcggcagtctggcccattgtcagtcatgcttcttctggccggggagattatagagagattgtttgaagatysggttattattgaaagtctttttttttgtttgttttgttttggtttgtttgtttatctacacttgtttatgctgtgagccaaacctctatttaaaaagttgatactcactttcaatattttatttcatattattatatatgtcatgatagttatcttgatgtaaatatgaagatttttttgtttctgtagatagtaaactctttttttaaaaaaggaaaagggaaacatttttataaagttatattttaatcaccatttttatacattgtagttctctccaagcccagtaagagaatgatgattcatttgcatggaggtcgatggacaaccaatcatctaccttttctaatttaaatgataatctgatatagttttattgccagttaaatgaggatgctgcaaagcatgttttttcactagtaacttttgctaactgaatgaattctgggtccatatctcccagatgaaaaactgttaaccaataccatattttatagttggtgtccatttctttccaacactgtttgttatgattcttccttsagtacttatatacagacctgctcattatctaaacaatcttaccttctaagtaaaccttgattgtgatttccagtttttattttctctgacgtagtagaaaggaatgtttacattaaaaatacttttgtttctcataaatggatattgtactcccccctttcaaagcattat

SEQ ID NO: 4631 - DNA, 2227 bp, Homo sapiens
gttctttgcactgaccaatgctgagagcagaccctcggagcagccgggttggaagtgtctctccayagtcaccagacagatccaggataggatgggcagcccagtgcaccgagtgtcattgggggatacctggagcaggcaaatgcaccccgacatagagagcgagaggtatatgcagtcctttgacgtggaacggctcaccaacatccttgatggaggtgcccagaacactgcactccgcaggaaagttgagagcatcatccacagttaccyggagtttagctgtaaggacaattatttcatgacccagaatgagcgttataaggctgccatgcggagggcattccacatccggttgatagctcggcgcctgggttggttagaagatggtcgtgaattaggctacgcttacagagccctttctrgagacgtggccttaaatatacacagagtcttcgtgagagccctcaggagcctgggctcagaggagcagattgccaaatgggacccactctgcaaaaacatccagatcatcgcaacgtatgcacagacagagttgggacatgggacatatcttcagggcctggagactgaagccacctatgacgcagccacccaggagtttgtgatacacagccccacgctgactgccaccaaatggtggcctggagacttgggacggtcagccacccaygccctggtccaggcccagctgatctgctcaggagccaggcggggcatgcacgcttttattgtgccaatccggagtcttcaggaccacaccccactgccaggaatcatcaytggggacatcggacccaagatggactttgatcaaacagacaatggcttcctgcagctgaaccatgtgcgggtccccagggagaacatgctgagtcgctttgcacaggtcttgccagatggcacctacgtcaaactcggtacagcacagagcaactaccttcccatggtggtggtgcgggtggagctgctgtcaggggagatcctccctatactgcagaaggcctgtgtcatcgccatgcgctactcggtcatccgccgccaatcccggctccggcccagtgacccagaggcaaaggtcctggactaccagacacaacagcagaaactctttcctcagctggccatcagttatgccttccatttcctggcagtcagcctcttggagttcttccagcactcctacactgccattctgaaccaagacttcagcttcctgcctgagctccacgcrctgagcacgggcatgaaggccatgatgtcagaattctgcacccagggagctgagatgtgccgcagggcctgtggcggacatggctactcraagctgagtggcctgccatcactggtcaccaaattgtcggcctcctgyacctacgagggtgagaacacagtgctctacctgcaggtggccaggttcctggtgaagagctacctgcagactcagatgtcccctggctccacgccacagagatctctctctccatctgtcgcatatctcaccgcacctgacctggccaggtgtccagcccagagggcagccgacttcctctgcccggagctctacaccacggcctgggcacatgtggcagtaaggctcataaaggactcagtgcagcatttacagaccctgacgcaatccggagctgaccagcacgaggcttggaaccagaccactgtcatacacctccaggctgctaaggtgcactgctactatgtcactgtgaagggttttacagaagctctggagaaactagaaaatgaaccagcgattcagcaggtgctcaagcgcctctgtgacctccatgccatacatggaatcttgactaactcgggtgactttctccatgacgccttcctgtctggtgcccaagtggacatggcaagaacagcctacctggacctgctccgcctgatccggaaggatgccatcctgttaactgatgcttttgacttcaccgatcagtgtttaaattcagcacttggctgttatgatggaaacgtctacgaacgcctgttccagtgggctcagaagtcaccaaccaatactcaggagaaccctgcctatgaggaatatataagaccacttttacaaagttggagatccaagctatgaaataaccaacagtattcaagaagcaaccagcaccatcatgtgataatggtactatggcatatatgcaacattaaaattttaaattagata

SEQ ID NO: 4632 - DNA, 914 bp, Homo sapiens
ggtatgtctagtctggatcccttttgttgtaattggttgtgttgctaccactccctccaccycacagcacagaatagcaagggctgcctgaaccctctgtgaacactcagctcggccatttcacttcatmcctcagcttcctcagctacaaaatgggtgtggcagaagtggcctttcagtgtggtgtggagggtgaaatgcagtaaggcacattaagtcctcagcccagggtcctttcctctggcaagctcacagcgccctcgcctggcctgggcttcagaatctgggcacatgtggcagtaaggctcataaaggactcagtgcagcatttacagaccctgacgcaatccggagctgaccagcacgaggcttggaaccagaccactgtcatacacctccaggctgctaaggtgcactgctactatgtcactgtgaagggttttacagaagctctggagaaactagaaaatgaaccagcgattcagcaggtgctcaagcgcctctgtgacctccatgccatacatggaatcttgactaactcgggtgactttctccatgacgccttcctgtctggtgcccaagtggacatggcaagaacagcctacctggacctgctccgcctgatccggaaggatgccatcctgttaactgatgcttttgacttcaccgatcagtgtttaaattcagcacttggctgttatgatggaaacgtctacgaacgcctgttccagtgggctcagaagtcaccaaccaatactcaggagaaccctgcctatgaggaatatataagaccacttttacaaagttggagatccaagctatgaaataaccaacagtattcaagaagcaaccagcaccatcatgtgataatggtactatggcatatatgcaacattaaaattttaaattagata

SEQ ID NO: 4633 - DNA, 2470 bp, Homo sapiens
aagagagggaggaaggagaggagctccataagcccaacaagggcttgagagcagacaagggcttgagagcagacaagggcttgagagctggccaagcagtttctctcagcttctgtgttccagcccctctgtgggaggagagaagggcaggaccacaagcctgccagaggctgcggcctacagccggggagaggccagcccggcctacagtgcggacacaggacagaggggagccaggttctttgcactgaccaatgctgagagcagaccctcggagcagccgggttggaagtgtctctccayagtcaccagacagatccaggataggatgggcagcccagtgcaccgagtgtcattgggggatacctggagcaggcaaatgcaccccgacatagagagcgagaggtatatgcagtcctttgacgtggaacggctcaccaacatccttgatggaggtgcccagaacactgcactccgcaggaaagttgagagcatcatccacagttaccyggagtttagctgtaaggacaattatttcatgacccagaatgagcgttataaggctgccatgcggagggcattccacatccggttgatagctcggcgcctgggttggttagaagatggtcgtgaattaggctacgcttacagagccctttctrgagacgtggccttaaatatacacagagtcttcgtgagagccctcaggagcctgggctcagaggagcagattgccaaatgggacccactctgcaaaaacatccagatcatcgcaacgtatgcacagacagagttgggacatgggacatatcttcagggcctggagactgaagccacctatgacgcagccacccaggagtttgtgatacacagccccacgctgactgccaccaaatggtggcctggagacttgggacggtcagccacccaygccctggtccaggcccagctgatctgctcaggagccaggcggggcatgcacgcttttattgtgccaatccggagtcttcaggaccacaccccactgccaggaatcatcaytggggacatcggacccaagatggactttgatcaaacagacaatggcttcctgcagctgaaccatgtgcgggtccccagggagaacatgctgagtcgctttgcacaggtcttgccagatggcacctacgtcaaactcggtacagcacagagcaactaccttcccatggtggtggtgcgggtggagctgctgtcaggggagatcctccctatactgcagaaggcctgtgtcatcgccatgcgctactcggtcatccgccgccaatcccggctccggcccaggcaaggggtgcccaaggcaaaggtcctggactaccagacacaacagcagaaactctttcctcagctggccatcagttatgccttccatttcctggcagtcagcctcttggagttcttccagcactcctacactgccattctgaaccaagacttcagcttcctgcctgagctccacgcrctgagcacgggcatgaaggccatgatgtcagaattctgcacccagggagctgagatgtgccgcagggcctgtggcggacatggctactcraagctgagtggcctgccatcactggtcaccaaattgtcggcctcctgyacctacgagggtgagaacacagtgctctacctgcaggtggccaggttcctggtgaagagctacctgcagactcagatgtcccctggctccacgccacagagatctctctctccatctgtcgcatatctcaccgcacctgacctggccaggtgtccagcccagagggcagccgacttcctctgcccggagctctacaccacggcctgggcacatgtggcagtaaggctcataaaggactcagtgcagcatttacagaccctgacgcaatccggagctgaccagcacgaggcttggaaccagaccactgtcatacacctccaggctgctaaggtgcactgctactatgtcactgtgaagggttttacagaagctctggagaaactagaaaatgaaccagcgattcagcaggtgctcaagcgcctctgtgacctccatgccatacatggaatcttgactaactcgggtgactttctccatgacgccttcctgtctggtgcccaagtggacatggcaagaacagcctacctggacctgctccgcctgatccggaaggatgccatcctgttaactgatgcttttgacttcaccgatcagtgtttaaattcagcacttggctgttatgatggaaacgtctacgaacgcctgttccagtgggctcagaagtcaccaaccaatactcaggagaaccctgcctatgaggaatatataagaccacttttacaaagttggagatccaagctatgaaataaccaacagtattcaagaagcaaccagcaccatcatgtgataatggtactatggcatatatgcaacattaaaattttaaattagata

SEQ ID NO: 4634 - DNA, 2464 bp, Homo sapiens
aagagagggaggaaggagaggagctccataagcccaacaagggcttgagagcagacaagggcttgagagcagacaagggcttgagagctggccaagcagtttctctcagcttctgtgttccagcccctctgtgggaggagagaagggcaggaccacaagcctgccagaggctgcggcctacagccggggagaggccagcccggcctacagtgcggacacaggacagaggggagccaggttctttgcactgaccaatgctgagagcagaccctcggagcagccgggttggaagtgtctctccayagtcaccagacagatccaggataggatgggcagcccagtgcaccgagtgtcattgggggatacctggagcaggcaaatgcaccccgacatagagagcgagaggtatatgcagtcctttgacgtggaacggctcaccaacatccttgatggaggtgcccagaacactgcactccgcaggaaagttgagagcatcatccacagttaccyggagtttagctgtaaggacaattatttcatgacccagaatgagcgttataaggctgccatgcggagggcattccacatccggttgatagctcggcgcctgggttggttagaagatggtcgtgaattaggctacgcttacagagccctttctrgagacgtggccttaaatatacacagagtcttcgtgagagccctcaggagcctgggctcagaggagcagattgccaaatgggacccactctgcaaaaacatccagatcatcgcaacgtatgcacagacagagttgggacatgggacatatcttcagggcctggagactgaagccacctatgacgcagccacccaggagtttgtgatacacagccccacgctgactgccaccaaatggtggcctggagacttgggacggtcagccacccaygccctggtccaggcccagctgatctgctcaggagccaggcggggcatgcacgcttttattgtgccaatccggagtcttcaggaccacaccccactgccaggaatcatcaytggggacatcggacccaagatggactttgatcaaacagacaatggcttcctgcagctgaaccatgtgcgggtccccagggagaacatgctgagtcgctttgcacaggtcttgccagatggcacctacgtcaaactcggtacagcacagagcaactaccttcccatggtggtggtgcgggtggagctgctgtcaggggagatcctccctatactgcagaaggcctgtgtcatcgccatgcgctactcggtcatccgccgccaatcccggctccggcccagtgacccagaggcaaaggtcctggactaccagacacaacagcagaaactctttcctcagctggccatcagttatgccttccatttcctggcagtcagcctcttggagttcttccagcactcctacactgccattctgaaccaagacttcagcttcctgcctgagctccacgcrctgagcacgggcatgaaggccatgatgtcagaattctgcacccagggagctgagatgtgccgcagggcctgtggcggacatggctactcraagctgagtggcctgccatcactggtcaccaaattgtcggcctcctgyacctacgagggtgagaacacagtgctctacctgcaggtggccaggttcctggtgaagagctacctgcagactcagatgtcccctggctccacgccacagagatctctctctccatctgtcgcatatctcaccgcacctgacctggccaggtgtccagcccagagggcagccgacttcctctgcccggagctctacaccacggcctgggcacatgtggcagtaaggctcataaaggactcagtgcagcatttacagaccctgacgcaatccggagctgaccagcacgaggcttggaaccagaccactgtcatacacctccaggctgctaaggtgcactgctactatgtcactgtgaagggttttacagaagctctggagaaactagaaaatgaaccagcgattcagcaggtgctcaagcgcctctgtgacctccatgccatacatggaatcttgactaactcgggtgactttctccatgacgccttcctgtctggtgcccaagtggacatggcaagaacagcctacctggacctgctccgcctgatccggaaggatgccatcctgttaactgatgcttttgacttcaccgatcagtgtttaaattcagcacttggctgttatgatggaaacgtctacgaacgcctgttccagtgggctcagaagtcaccaaccaatactcaggagaaccctgcctatgaggaatatataagaccacttttacaaagttggagatccaagctatgaaataaccaacagtattcaagaagcaaccagcaccatcatgtgataatggtactatggcatatatgcaacattaaaattttaaattagata

SEQ ID NO: 4635 - DNA, 1750 bp, Homo sapiens
aattaaactcagtccagttaagggttttatttactactaacaaacgtattcaccgtgtgctaagtgctgcagggaatcccagcccgttttcctccatctaaaaggaaaattaggaggtcccaatactttacttgtagattttccagtttctaccattccctgtaaggcactgagacgcaagatttcaaggcccactcggggtaccctggcatggacatcgagtcgttctagcgctgagcttcaaaactattcctttccttccctttcttcttcataccagactctaatctgttctccctagcttcgaattattcactgtatggtcgaacatcttactccacaaataacctctgaagtgttgcagttgtcttacccaaatacctgaactcagcttgtcccgagtactgcgatcccgcgtactgctaatgggaatatagttaacccaactagtatgaggtccccagtacacagcagctccaagatcaaggcgaccgagtaacactgcttgcctagactcaggccaagttcggagagtgatcctggggttattttagaacgtgtcccttgcttcccagaaaaattcagtcgttaactcaagtccagatgcccaatgaccattcggataaggtgagctaaagcttcaatgccttgaggggcttggcagggctcgggctcatcccggagaagcagccccgctttccagactagcagttcccrgggatgggtgtgtgctaatcgcaggccaacaagcccagcgcggtacagaggtcccattgtgaccggaggcgagaaaccccgcctcggcaccctgacgcagcgcaggacccgccccgcgcgtgacgccagcgtcaggccagccccggcatgctctgcggccgcccgcggtccagctccgacaacaggaattttctccgagagcgggccgggctcagttcagctgctgtccagacccggatcggcaacagtgccgcctccagacgttctcctgccgctcgcccgcccgtcccagcgcccccagccctcccgcgagggcgccccgggacggaaggatccaccagtctgtcggcgcccgccgttctcgtggtcgccgtcgccgtcgtcgtggtggtagtctccgccgtcgcctgggccatggccaattacatccacgtccctcccggctccccggaggtgcccaagctgaacgtcaccgttcaggatcaggaggagcatcgctgccgggagggggccctgagcctcctgcaacacctgcggcctcactgggacccccaggaggtgaccctgcagctcttcacagatggaatcacaaataaacttattggctgttacgtgggaaacaccatggaggatgtagtcctggtgagaatttatggcaataagactgagttattagtcgatcgagatgaggaagtaaagagttttcgagtgttgcaggctcatgggtgtgcaccacaactctactgtaccttcaataatggactatgctatgaatttatacaaggagaagcactggatccaaagcatgtctgcaacccagccattttcagtttatcatcgttgactctttgcaaaggaaaaactacaagatgttttggattaaccggctgcagagggtcaaggcttctgcttagttttttctagttagtgtttgagttgaagtgttatacatttcttactgccgattgcttattacttaattgttcatgttttcagagttcttgcctattaaaattttattaatttggttaac

SEQ ID NO: 4636 - DNA, 3169 bp, Homo sapiens
aattaaactcagtccagttaagggttttatttactactaacaaacgtattcaccgtgtgctaagtgctgcagggaatcccagcccgttttcctccatctaaaaggaaaattaggaggtcccaatactttacttgtagattttccagtttctaccattccctgtaaggcactgagacgcaagatttcaaggcccactcggggtaccctggcatggacatcgagtcgttctagcgctgagcttcaaaactattcctttccttccctttcttcttcataccagactctaatctgttctccctagcttcgaattattcactgtatggtcgaacatcttactccacaaataacctctgaagtgttgcagttgtcttacccaaatacctgaactcagcttgtcccgagtactgcgatcccgcgtactgctaatgggaatatagttaacccaactagtatgaggtccccagtacacagcagctccaagatcaaggcgaccgagtaacactgcttgcctagactcaggccaagttcggagagtgatcctggggttattttagaacgtgtcccttgcttcccagaaaaattcagtcgttaactcaagtccagatgcccaatgaccattcggataaggtgagctaaagcttcaatgccttgaggggcttggcagggctcgggctcatcccggagaagcagccccgctttccagactagcagttcccrgggatgggtgtgtgctaatcgcaggccaacaagcccagcgcggtacagaggtcccattgtgaccggaggcgagaaaccccgcctcggcaccctgacgcagcgcaggacccgccccgcgcgtgacgccagcgtcaggccagccccggcatgctctgcggccgcccgcggtccagctccgacaacaggaattttctccgagagcgggccgggctcagttcagctgctgtccagacccggatcggcaacagtgccgcctccagacgttctcctgccgctcgcccgcccgtcccagcgcccccagccctcccgcgagggcgccccgggacggaaggatccaccagtctgtcggcgcccgccgttctcgtggtcgccgtcgccgtcgtcgtggtggtagtctccgccgtcgcctgggccatggccaattacatccacgtccctcccggctccccggaggtgcccaagctgaacgtcaccgttcaggatcaggaggagcatcgctgccgggagggggccctgagcctcctgcaacacctgcggcctcactgggacccccaggaggtgaccctgcagctcttcacagatggaatcacaaataaacttattggctgttacgtgggaaacaccatggaggatgtagtcctggtgagaatttatggcaataagactgagttattagtcgatcgagatgaggaagtaaagagttttcgagtgttgcaggctcatgggtgtgcaccacaactctactgtaccttcaataatggactatgctatgaatttatacaaggagaagcactggatccaaagcatgtctgcaacccagccattttcaggctaatagctcgtcagcttgctaaaatccatgctattcatgcacacaatggctggatccccaaatctaatctttggctaaagatgggaaagtatttctctctcattcccacaggatttgcagatgaagacattaataaaaggttcctaagtgatatcccaagctctcagattctccaggargagatgacttggatgaaggagattctttccaacctgggctcacctgttgtgctttgccataatgacctattgtgtaagaatataatctacaatgagaaacaaggtgatgtacagttcattgattatgaatattctggatacaactacctggcatatgatattggaaatcatttcaatgaatttgcaggtgtgagtgatgtagactatagtctgtatccagatagagaactacagagtcagtggctgcgtgcttaccttgaagcctacaaagaatttaagggctttgggactgaagttactgaaaaggaggtagaaatactcttcattcaagtcaatcagtttgcattggcttctcatttcttttggggattgtgggctttgattcaagccaaatactccactattgagtttgatttccttgggtatgcaattgttcgttttaaccagtactttaaaatgaagcctgaggttactgcattaaaagtgcctgagtaaagaagagatttaattattctccagtagctgagcaatgcttgtgaatcttttcttaagaaatcccaaaaagccaatattagttaaaattctgttgtttaatttggttatcttgctttataaattatgcctctaaacaatcaaatctatttttgaaatagactgaatgatgtcaagaaatatacctactgctatccgtatgtggtggattagaaatgtgttaaatctgcaaaaggtataaagatgtcagtttaatttctttgataatttaacctatgttgtatgtgaattatttattataaacttagcacgattctgtgactgtttttctctgtttcacgttcgttgagtgtaagcaatgaaaatgtcccaaataagttttttaagttttactttaataagattaatttcagtaaacattctagttgttcagtgtaacctttttatcttgatgcattgtaagtaaaatgaatcatttactcttgaaatgccagtcattgactgatgtagataatttaggattttcatataaaaatagctgtttaggaaggtgaaatacattcactgtctctgttggtggtacatcttgttgaattcaatattagaaagtatttctttttggggtaatataacttagaattaaatccctgtttctctatgtagtctggcagtataaatataaatatttaccatataatcttggaataagtattagttaatgttaccaaaatctgtattaaataatgttttcaaatgctaaatatggtcgttactattttcagttttaaaaattttatagtatcaaattgtttctaaccaaaaatttccttttacttctagagatgctttatgtttttgattattaaatagtcactagtattgctaatttttgaaacaaatacacaaaatttatcatatgtagaaataagaaaatattgtttaggttaat

SEQ ID NO: 4637 - DNA, 6373 bp, Homo sapiens
  misc_feature (1)...(6373): n = A,T,C or G
gaagaagccacgaagaagtgctgcctgccggccgtgcgcggtcacgcagcgccaactccctcctggggccttctggggccttctggggcatgggagctggggccgcctgagacaaacatccgtgacgctgggctgaccccacagaacggtgcgggcctcgctcttggagtcagccctgctgccagccagtgccgggtgctggggactcagggaggcccgccgggaccactgcgggacagtgagccgagcagaagctggaacgcaggagaggaaggagagggggcggtcagggctctcaggagccgggtcctgggcaaggcgcagccgttttcaaattttcaggaaagcggtcggctcacactcgagcagtaaaaagatgcctctggggaggaggcccgtgcagctctccgggcaatggtggtggctcggcctagagaggcggtagtggaacgcagaccctggtgggggaatgacatcaagggaggagacgggcgggaccccagatttctgcctgtgggcgatggaagtgaggttcactggccagcggagccggacacagaacgcgcaaaacgccgtgtaggcctggaggagcmgaagagcaggcggaccccctccgcgsgggaacagtttccgccgggagcacaaagcaacggaccggaagtggggggcggaagtgcagtgggctcagcgccgactgcgcgcctctgcccgcgaaaactctgagctggctgacagctggggacgggtggcggccctcgactggagtcggttgagttcctgagggaccccggttctggaaggttcgccgcggagacaagtgagcagtctgtgccatagggattctcgaagagaacagcgttgtgtcccagtgcacatgctcgcatcgcttaccaggagtgccygagaccctaagatgttcggagtggttttttcgcmcagacccgaatagcctgcccctcagccacgctctgtgcccttctgagaacaggctgatatgcccaagatagtcctgaatggtgtgaccgtagacttccctttccagccctacaaatgccaacaggagtacatgaccaaggtcctggaatgtctgcagcagaaggtgaatggcatcctggagagccctacgggtacagggaagacgctgtgcctgctgtgcaccacgctggcctggcgagaacacctccgagacggcatctctgccckcaagattgccgagagggcgcaaggagagcttttcccggatcgggccttgtcatcctggggcaacgctgctgctgctgctggagaccccatagcttgctacacggacatcccaaagattatttacgcctccaggacccactcgcaactcacacaggtcatcarygagcttcggaacacctcctaccggcctaaggtgtgtgtgctgggctcccgggagcagctgtgcatccatcctgaggtgaagaaacaagagagtaaccatctacagatccacttgtgccgtaagaaggtggcaagtcgctcctgtcatttctacaacaacgtagaagaaaaaagcctggagcaggagctggccagccccatcctggacattgaggacttggtcaagagcggaagcaagcacagggtgtgcccttactacctgtcccggaacctgaagcagcaagccgacatcatattcatgccgtacaattacttgttggatgccaagagccgcagagcacacaacattgacctgaaggggacagtcgtgatctttgacgaagctcacaacgtggagaagatgtgtgaagaatcggcatcctttgacctgactccccatgacctggcttcaggactggacgtcatagaccaggtgctggaggagcagaccaaggcagcgcagcagggtgagccccacccggagttcagcgcggactcccccagcccagggctgaacatggagctggaagacattgcaaagctgaagatgatcctgctgcgcctggarggggccatcgatgctgttgagctgcctggagacgacagyggtgtcaccaagccagggagctacatctttgagctgtttgctgaagcccagatcacgtttcagaccaagggctgcatcctggactcgctggaccagatcatccagcacctggcaggacgtgctggagtgttcaccaacacggccggactgcagaagctggcggacattatccagattgtgttcagtgtggacccctccgagggcagccctggttccccagcagggctgggggccttacagtcctataaggtgcacatccatcctgatgctggtcaccggaggacggctcagcggtctgatgcctggagcaccactgcagccagaaagcgagggaaggtgctgagctactggtgcttcagtcccggccacagcatgcacgagctggtccgccagggcgtccgctccctcatccttaccagcggcacgctggccccggtgtcctcctttgctctggagatgcagatccctttcccagtctgcctggagaacccacacatcatcgacaagcaccagatctgggtgggggtcgtccccagaggccccgatggagcccagttgagctccgcgtttgacagacggttttccgaggagtgcttatcctccctggggaaggctctgggcaacatcgcccgcgtggtgccctatgggctcctgatcttcttcccttcctatcctgtcatggagaagagcctggagttctggcgggcccgcgacttggccaggaagatggaggcgctgaagccgctgtttgtggagcccaggagcaaaggcagcttctccgagaccatcagtgcttactatgcaagggttgccgcccctgggtccaccggcgccaccttcctggcggtctgccggggcaaggccagcgaggggctggacttctcagacacgaatggccgtggtgtgattgtcacgggcctcccgtaccccccacgcatggacccccgggttgtcctcaagatgcagttcctggatgagatgaagggccagggtggggctgggggccagttcctctctgggcaggagtggtaccngcagcaggcgtccagggctgtgaaccaggccatcgggcgagtgatccggcaccgccaggaytacggagctgtcttcctctgtgaccacaggttcgcctttgccgacgcaagagcccaactgccctcctgggtgcgtccccacgtcagggtgtatgacaactttggccatgtcatccgagacgtggcccagttcttccgtgttgccgagcgaactatgccagcrccggccccccgggctacagcacccagtgtgcgtggagaagatgctgtcagcgaggccaagtcgcctggccccttcttctccaccaggaaagctaagagtctggacctgcatgtccccagcctgaagcagaggtcctcagggtcaccagctgccggggaccccgagagtagcctgtgtgtggagtatgagcaggagccagttcctgcccggcagaggcccagggggctgctggccgccctggagcacagcgaacagcgggcggggagcccyggcgaggagcaggcccacagctgctccaccctgtccctcctgtctgagaagaggccggcagaagaaccgcgaggagggaggaagaagatccggctggtcagccacccggaggagccygtggctggtgcacagacggacagggccaagctcttcatggtggccgtgaagcaggagttgagccaagccaactttgccaccttcacccaggccctgcaggactacaagggttccgatgacttyrccgccctggccgcctgtctcggccccctctttgctgasgaccccaagaagcacaacctgctccaaggcttctaccagtttgtgcggccccaccataagcagcagtttgaggaggtctgtatccagctgacaggacgaggctgtggctatcggcctgagcacagcattccccgaaggcagcgggcacagccggtcctggaccccactggaagaacggcgccggatcccaagctgaccgtgtccacggctgcagcccagcagctgracccccaagagcacctgaaccagggcaggccccacctgtcgcccaggccacccccaacaggagaccctggcagccamccacagtgggggtctggagtgcccagagcagggaagcagggccagcacgccgtgagcgcctacctggctgatgcccgcagggccctggggtccgcgggctgtagccaactcttggcagcgctgacagcctataagcaagacgacgacctcgacaaggtgctggctgtgttggccgccctgaccactgcaaagccagaggacttccccctgctgcacagcaaggttcagcatgtttgtgcgtccacaccacaagcagcgcttctcacagacgtgcacagacctgaccggccggccctacccrggcatggagccaccgggaccccaggaggagaggcttgccgtgcctcctgtgcttacccacagggctccccaaccaggcccctcacggtccgagaagaccgggaagacccagagcaagatctcgtccttccttagacagaggccagcagggactgtgggggcgggcggtgaggatgcaggtcccagccagtcctcaggacctccccacgggcctgcagcatctgagtggggcctctaggatgtgcccagcctgccacaccgcctccaggaagcagagcgtcatgcaggtcttctggccrgagccccacaaggaccatgagggcgctggaggggccaggcctgtcgctgctgtgcctggtgttggcgctgcctgccctgctgccggtgccggctgtacgcggagtggcagaaacacccacctacccctggcgggacgcagagacaggggagcggctggtgtgygcccagtgccccccaggcacctttgtgcagcggccgtgccgccgagacagccccacgacgtgtggcccgtgtccaccgcgccactacacgcagttctggaactacctrgagcgctgccgctactgcaacgtcctctgcggggagcgtgaggaggaggcacgggcttgccacgccacccacaaccgygcctgccgctgccgcaccggcttcttcgcgcacgctggtttctgcttggagcacgcatcgtgtccacctggtgccggcgtgattgccccgggcacccccagccagaacacgcagtgccagccgtgccccccaggcaccttctcagccagcagytccagctcagagcagtgccagccccaccgcaactgcacggccctgggcctggccctcaatgtgccaggctcttcctcccatgacacsctgtgcaccagctgcactggcttccccctcagcaccagggtaccaggagctgaggagtgtgagcgtgccgtcatcgactttgtggctttccaggacatctccatcaagaggctgcagcggctgctgcaggccctcgaggccccggagggctggggtccgacaccaagggcgggccgcgcggccttgcagctgaagctgcgtcggcggctcacggagctcctgggggcgcaggacggggcgctgctggtgcggctgctgcaggcgctgcgcgtggccaggatgcccgggctggagcggagcgtccgtgagcgcttcctccctgtgcactgatcctggccccctcttatttattctacatccttggcaccccacttgcactgaaagaggcttttttttaaatagaagaaatgaggtttcttaaagcttatttttataaagctttttcataaaactggttgtagttgcacagctactgggagggcagccggggacacctgagccgcccgctgtgcccagatccctcaggctgcctgccatcagaactgctgcccggggcttcccctacctcagacagaccctccctgggaggatcagtggggagtgccacctctgcccccagtggctgtggcacgtggcaggggcccctgaagctcagcgagggtcagggcctgggagggtatcattgctggaagaacaggatggggctcaggccagccctagtcgccggggcccacactaaccccccacttatgaattcctcccactcccaactcacaggggatttcccgagaggggacctgccaaagacctcctccaggcctcccatgcttyccgggaagtgaagcttctcccyctctggggcaggctctgaagcctcccgatgcacccagagcaaccrgggggctgcaccagccactcgcctccccagcacggccaggttcccggggctggaggtcccccccaggtcctgggaaccaacctgcagaacacacacagggtcccctggagaggacgcggggacttccagggcccgactcctgtgagtcacagccccgcagctgctgc

SEQ ID NO: 4638 - DNA, 4687 bp, Homo sapiens
  misc_feature (1)...(4687): n = A,T,C or G
ggcggaagtgcagtgggctcagcgccgactgcgcgcctctgcccgcgaaaactctgagctggctgacagctggggacgggtggcggccctcgactggagtcggttgagttcctgagggaccccggttctggaaggttcgccgcggagacaagtctgtgccatagggattctcgaagagaacagcgttgtgtcccagtgcacatgctcgcatcgcttaccaggagtgccygagaccctaagatgttcggagtggttttttcgcmcagacccgaatagcctgcccctcagccacgctctgtgcccttctgagaacaggctgatatgcccaagatagtcctgaatggtgtgaccgtagacttccctttccagccctacaaatgccaacaggagtacatgaccaaggtcctggaatgtctgcagcagaaggtgaatggcatcctggagagccctacgggtacagggaagacgctgtgcctgctgtgcaccacgctggcctggcgagaacacctccgagacggcatctctgccckcaagattgccgagagggcgcaaggagagcttttcccggatcgggccttgtcatcctggggcaacgctgctgctgctgctggagaccccatagcttgctacacggacatcccaaagattatttacgcctccaggacccactcgcaactcacacaggtcatcarygagcttcggaacacctcctaccggcctaaggtgtgtgtgctgggctcccgggagcagctgtgcatccatcctgaggtgaagaaacaagagagtaaccatctacagatccacttgtgccgtaagaaggtggcaagtcgctcctgtcatttctacaacaacgtagaagaaaaaagcctggagcaggagctggccagccccatcctggacattgaggacttggtcaagagcggaagcaagcacagggtgtgcccttactacctgtcccggaacctgaagcagcaagccgacatcatattcatgccgtacaattacttgttggatgccaagagccgcagagcacacaacattgacctgaaggggacagtcgtgatctttgacgaagctcacaacgtggagaagatgtgtgaagaatcggcatcctttgacctgactccccatgacctggcttcaggactggacgtcatagaccaggtgctggaggagcagaccaaggcagcgcagcaggggctgaacatggagctggaagacattgcaaagctgaagatgatcctgctgcgcctggarggggccatcgatgctgttgagctgcctggagacgacagyggtgtcaccaagccagggagctacatctttgagctgtttgctgaagcccagatcacgtttcagaccaagggctgcatcctggactcgctggaccagatcatccagcacctggcaggacggtggggcttcacggctgcagctgcgggagctgctgcccctgccttgtgctccaagaggcaggtggtcaggcccccagtcccgtcctcacactctgtgccctctgccgccccccgccccacagggaaggtgctgagctactggtgcttcagtcccggccacagcatgcacgagctggtccgccagggcgtccgctccctcatccttaccagcggcacgctggccccggtgtcctcctttgctctggagatgcagatccctttcccagtctgcctggagaacccacacatcatcgacaagcaccagatctgggtgggggtcgtccccagaggccccgatggagcccagttgagctccgcgtttgacagacggttttccgaggagtgcttatcctccctggggaaggctctgggcaacatcgcccgcgtggtgccctatgggctcctgatcttcttcccttcctatcctgtcatggagaagagcctggagttctggcgggcccgcgacttggccaggaagatggaggcgctgaagccgctgtttgtggagcccaggagcaaaggcagcttctccgagaccatcagtgcttactatgcaagggttgccgcccctgggtccaccggcgccaccttcctggcggtctgccggggcaaggccagcgaggggctggacttctcagacacgaatggccgtggtgtgattgtcacgggcctcccgtaccccccacgcatggacccccgggttgtcctcaagatgcagttcctggatgagatgaagggccagggtggggctgggggccaggagtggtaccngcagcaggcgtccagggctgtgaaccaggccatcgggcgagtgatccggcaccgccaggaytacggagctgtcttcctctgtgaccacaggtgcgtgcagtccggtggcaggcgcggcgccaggggacacgcccacaccccactgggcccctggactctccttccccacatgaggccccgtctcctccagagcctctccggctactcggggtcagcrtggggcccctgcagcagatgagggtcttcacttcggtgaactgaacccttgaagcggctgtgggcagggcagcagggctatggccaccccccaggttcgcctttgccgacgcaagagcccaactgccctcctgggtgcgtccccacgtcagggtgtatgacaactttggccatgtcatccgagacgtggcccagttcttccgtgttgccgagcgaactatgccagcrccggccccccgggctacagcacccagtgtgcgtggagaagatgctgtcagcgaggccaagtcgcctggccccttcttctccaccaggaaagctaagagtctggacctgcatgtccccagcctgaagcagaggtcctcagggtcaccagctgccggggaccccgagagtagcctgtgtgtggagtatgagcaggagccagttcctgcccggcagaggcccagggggctgctggccgccctggagcacagcgaacagcgggcggggagcccyggcgaggagcaggcccacagctgctccaccctgtccctcctgtctgagaagaggccggcagaagaaccgcgaggagggaggaagaagatccggctggtcagccacccggaggagccygtggctggtgcacagacggacagggccaagctcttcatggtggccgtgaagcaggagttgagccaagccaactttgccaccttcacccaggccctgcaggactacaagggttccgatgacttyrccgccctggccgcctgtctcggccccctctttgctgasgaccccaagaagcacaacctgctccaaggcttctaccagtttgtgcggccccaccataagcagcagtttgaggaggtctgtatccagctgacaggacgaggctgtggctatcggcctgagcacagcattccccgaaggcagcgggcacagccggtcctggaccccactggaagaacggcgccggatcccaagctgaccgtgtccacggctgcagcccagcagctgracccccaagagcacctgaaccagggcaggccccacctgtcgcccaggccacccccaacaggagaccctggcagccamccacagtgggggtctggagtgcccagagcagggaagcagggccagcacgccgtgagcgcctacctggctgatgcccgcagggccctggggtccgcgggctgtagccaactcttggcagcgctgacagcctataagcaagacgacgacctcgacaaggtgctggctgtgttggccgccctgaccactgcaaagccagaggacttccccctgctgcacaggttcagcatgtttgtgcgtccacaccacaagcagcgcttctcacagacgtgcacagacctgaccggccggccctacccrggcatggagccaccgggaccccaggaggagaggcttgccgtgcctcctgtgcttacccacagggctccccaaccaggcccctcacggtccgagaagaccgggaagacccagagcaagatctcgtccttccttagacagaggccagcagggactgtgggggcgggcggtgaggatgcaggtcccagccagtcctcaggacctccccacgggcctgcagcatctgagtggggtgagcctcatgggagagacatcgctgggcagcaggccacgggagctccgggcgggcccctctcagcaggctgtgtgtgccagggctgtggggcagaggacgtggtgcccttccagtgccctgcctgtgacttccagcgctgccaagcctgctggcaacggcaccttcaggcctctaggatgtgcccagcctgccacaccgcctccaggaagcagagcgtcatgcaggtcttctggccrgagccccagtgagtgcccacggaggcccccagcacacccaacgtggcttgatcacctgcctgtccagctctggtgggccaagaacccacccaacagaataggccagcccatgccagccggcttggcccgctgcaggcctcaggcaggcggggcccatggttggtccctgcggtgggaccggatctgggcctgcctctgagaagccctgagctaccttggggtctggggtgggtttctgggaaagtgcttccccagaacttccctggctcctggcctgtgagtggtgccacaggggcaccccagctgagcccctcaccgggaaggaggagacccccgtgggcacgtgtccacttttaatcaggggacagggctctctaataaarctgctggcagtgcccagg

SEQ ID NO: 4639 - DNA, 6059 bp, Homo sapiens
  misc_feature (1)...(6059): n = A,T,C or G
ggcggaagtgcagtgggctcagcgccgactgcgcgcctctgcccgcgaaaactctgagctggctgacagctggggacgggtggcggccctcgactggagtcggttgagttcctgagggaccccggttctggaaggttcgccgcggagacaagtctgtgccatagggattctcgaagagaacagcgttgtgtcccagtgcacatgctcgcatcgcttaccaggagtgccygagaccctaagatgttcggagtggttttttcgcmcagacccgaatagcctgcccctcagccacgctctgtgcccttctgagaacaggctgatatgcccaagatagtcctgaatggtgtgaccgtagacttccctttccagccctacaaatgccaacaggagtacatgaccaaggtcctggaatgtctgcagcagaaggtgaatggcatcctggagagccctacgggtacagggaagacgctgtgcctgctgtgcaccacgctggcctggcgagaacacctccgagacggcatctctgccckcaagattgccgagagggcgcaaggagagcttttcccggatcgggccttgtcatcctggggcaacgctgctgctgctgctggagaccccatagcttgctacacggacatcccaaagattatttacgcctccaggacccactcgcaactcacacaggtcatcarygagcttcggaacacctcctaccgctccctcctacgcccgggccacgtttcagttatgctcacttcctctgaccgccgaggctcctgcgtgtctccatacagctcacgctgcagggccacgctgtgggtgttggagacagctcctcctcgacccacggtgctctctcccaccaggcctaaggtgtgtgtgctgggctcccgggagcagctgtgcatccatcctgaggtgaagaaacaagagagtaaccatctacagatccacttgtgccgtaagaaggtggcaagtcgctcctgtcatttctacaacaacgtagaagaaaaaagcctggagcaggagctggccagccccatcctggacattgaggacttggtcaagagcggaagcaagcacagggtgtgcccttactacctgtcccggaacctgaagcagcaagccgacatcatattcatgccgtacaattacttgttggatgccaagagccgcagagcacacaacattgacctgaaggggacagtcgtgatctttgacgaagctcacaacgtggagaagatgtgtgaagaatcggcatcctttgacctgactccccatgacctggcttcaggactggacgtcatagaccaggtgctggaggagcagaccaaggcagcgcagcagggtgagccccacccggagttcagcgcggactcccccagcccagggctgaacatggagctggaagacattgcaaagctgaagatgatcctgctgcgcctggarggggccatcgatgctgttgagctgcctggagacgacagyggtgtcaccaagccagggagctacatctttgagctgtttgctgaagcccagatcacgtttcagaccaagggctgcatcctggactcgctggaccagatcatccagcacctggcaggacgtgctggagtgttcaccaacacggccggactgcagaagctggcggacattatccagattgtgttcagtgtggacccctccgagggcagccctggttccccagcagggctgggggccttacagtcctataaggtgcacatccatcctgatgctggtcaccggaggacggctcagcggtctgatgcctggagcaccactgcagccagaaagcgagggaaggtgctgagctactggtgcttcagtcccggccacagcatgcacgagctggtccgccagggcgtccgctccctcatccttaccagcggcacgctggccccggtgtcctcctttgctctggagatgcagatccctttcccagtctgcctggagaacccacacatcatcgacaagcaccagatctgggtgggggtcgtccccagaggccccgatggagcccagttgagctccgcgtttgacagacggttttccgaggagtgcttatcctccctggggaaggctctgggcaacatcgcccgcgtggtgccctatgggctcctgatcttcttcccttcctatcctgtcatggagaagagcctggagttctggcgggcccgcgacttggccaggaagatggaggcgctgaagccgctgtttgtggagcccaggagcaaaggcagcttctccgagaccatcagtgcttactatgcaagggttgccgcccctgggtccaccggcgccaccttcctggcggtctgccggggcaaggccagcgaggggctggacttctcagacacgaatggccgtggtgtgattgtcacgggcctcccgtaccccccacgcatggacccccgggttgtcctcaagatgcagttcctggatgagatgaagggccagggtggggctgggggccaggagtggtaccngcagcaggcgtccagggctgtgaaccaggccatcgggcgagtgatccggcaccgccaggaytacggagctgtcttcctctgtgaccacaggtgcgtgcagtccggtggcaggcgcggcgccaggggacacgcccacaccccactgggcccctggactctccttccccacatgaggccccgtctcctccagagcctctccggctactcggggtcagcrtggggcccctgcagcagatgagggtcttcacttcggtgaactgaacccttgaagcggctgtgggcagggcagcagggctatggccaccccccaggttcgcctttgccgacgcaagagcccaactgccctcctgggtgcgtccccacgtcagggtgtatgacaactttggccatgtcatccgagacgtggcccagttcttccgtgttgccgagcgaactatgccagcrccggccccccgggctacagcacccagtgtgcgtggagaagatgctgtcagcgaggccaagtcgcctggccccttcttctccaccaggaaagctaagagtctggacctgcatgtccccagcctgaagcagaggtcctcagggtcaccagctgccggggaccccgagagtagcctgtgtgtggagtatgagcaggagccagttcctgcccggcagaggcccagggggctgctggccgccctggagcacagcgaacagcgggcggggagcccyggcgaggagcaggcccacagctgctccaccctgtccctcctgtctgagaagaggccggcagaagaaccgcgaggagggaggaagaagatccggctggtcagccacccggaggagccygtggctggtgcacagacggacagggccaagctcttcatggtggccgtgaagcaggagttgagccaagccaactttgccaccttcacccaggccctgcaggactacaagggttccgatgacttyrccgccctggccgcctgtctcggccccctctttgctgasgaccccaagaagcacaacctgctccaaggcttctaccagtttgtgcggccccaccataagcagcagtttgaggaggtctgtatccagctgacaggacgaggctgtggctatcggcctgagcacagcattccccgaaggcagcgggcacagccggtcctggaccccactggaagaacggcgccggatcccaagctgaccgtgtccacggctgcagcccagcagctgracccccaagagcacctgaaccagggcaggccccacctgtcgcccaggccacccccaacaggagaccctggcagccamccacagtgggggtctggagtgcccagagcagggaagcagggccagcacgccgtgagcgcctacctggctgatgcccgcagggccctggggtccgcgggctgtagccaactcttggcagcgctgacagcctataagcaagacgacgacctcgacaaggtgctggctgtgttggccgccctgaccactgcaaagccagaggacttccccctgctgcacagcaaggttcagcatgtttgtgcgtccacaccacaagcagcgcttctcacagacgtgcacagacctgaccggccggccctacccrggcatggagccaccgggaccccaggaggagaggcttgccgtgcctcctgtgcttacccacagggctccccaaccaggcccctcacggtccgagaagaccgggaagacccagagcaagatctcgtccttccttagacagaggccagcagggactgtgggggcgggcggtgaggatgcaggtcccagccagtcctcaggacctccccacgggcctgcagcatctgagtggggcctctaggatgtgcccagcctgccacaccgcctccaggaagcagagcgtcatgcaggtcttctggccrgagccccacaaggaccatgagggcgctggaggggccaggcctgtcgctgctgtgcctggtgttggcgctgcctgccctgctgccggtgccggctgtacgcggagtggcagaaacacccacctacccctggcgggacgcagagacaggggagcggctggtgtgygcccagtgccccccaggcacctttgtgcagcggccgtgccgccgagacagccccacgacgtgtggcccgtgtccaccgcgccactacacgcagttctggaactacctrgagcgctgccgctactgcaacgtcctctgcggggagcgtgaggaggaggcacgggcttgccacgccacccacaaccgygcctgccgctgccgcaccggcttcttcgcgcacgctggtttctgcttggagcacgcatcgtgtccacctggtgccggcgtgattgccccgggcacccccagccagaacacgcagtgccagccgtgccccccaggcaccttctcagccagcagytccagctcagagcagtgccagccccaccgcaactgcacggccctgggcctggccctcaatgtgccaggctcttcctcccatgacacsctgtgcaccagctgcactggcttccccctcagcaccagggtaccagcaggagctgaggagtgtgagcgtgccgtcatcgactttgtggctttccaggacatctccatcaagaggctgcagcggctgctgcaggccctcgaggccccggagggctggggtccgacaccaagggcgggccgcgcggccttgcagctgaagctgcgtcggcggctcacggagctcctgggggcgcaggacggggcgctgctggtgcggctgctgcaggcgctgcgcgtggccaggatgcccgggctggagcggagcgtccgtgagcgcttcctccctgtgcactgatcctggccccctcttatttattctacatccttggcaccccacttgcactgaaagaggcttttttttaaatagaagaaatgaggtttcttaaagcttatttttataaagctttttcataaaactggttgtagttgcacagctactgggagggcagccggggacacctgagccgcccgctgtgcccagatccctcaggctgcctgccatcagaactgctgcccggggcttcccctacctcagacagaccctccctgggaggatcagtggggagtgccacctctgcccccagtggctgtggcacgtggcaggggcccctgaagctcagcgagggtcagggcctgggagggtatcattgctggaagaacaggatggggctcaggccagccctagtcgccggggcccacactaaccccccacttatgaattcctcccactcccaactcacaggggatttcccgagaggggacctgccaaagacctcctccaggcctcccatgcttyccgggaagtgaagcttctcccyctctggggcaggctctgaagcctcccgatgcacccagagcaaccrgggggctgcaccagccactcgcctccccagcacggccaggttcccggggctggaggtcccccccaggtcctgggaaccaacctgcagaacacacacagggtcccctggagaggacgcggggacttccagggcccgactcctgtgagtcacagccccgcagctgctgc

SEQ ID NO: 4640 - DNA, 3390 bp, Homo sapiens
  misc_feature (1)...(3390): n = A,T,C or G
ggcggaagtgcagtgggctcagcgccgactgcgcgcctctgcccgcgaaaactctgagctggctgacagctggggacgggtggcggccctcgactggagtcggttgagttcctgagggaccccggttctggaaggttcgccgcggagacaagtctgtgccatagggattctcgaagagaacagcgttgtgtcccagtgcacatgctcgcatcgcttaccaggagtgccygagaccctaagatgttcggagtggttttttcgcmcagacccgaatagcctgcccctcagccacgctctgtgcccttctgagaacaggctgatatgcccaagatagtcctgaatggtgtgaccgtagacttccctttccagccctacaaatgccaacaggagtacatgaccaaggtcctggaatgtctgcagcagaaggtgaatggcatcctggagagccctacgggtacagggaagacgctgtgcctgctgtgcaccacgctggcctggcgagaacacctccgagacggcatctctgccckcaagattgccgagagggcgcaaggagagcttttcccggatcgggccttgtcatcctggggcaacgctgctgctgctgctggagaccccatagcttgctacacggacatcccaaagattatttacgcctccaggacccactcgcaactcacacaggtcatcarygagcttcggaacacctcctaccggcctaaggtgtgtgtgctgggctcccgggagcagctgtgcatccatcctgaggtgaagaaacaagagagtaaccatctacagatccacttgtgccgtaagaaggtggcaagtcgctcctgtcatttctacaacaacgtagaagaaaaaagcctggagcaggagctggccagccccatcctggacattgaggacttggtcaagagcggaagcaagcacagggtgtgcccttactacctgtcccggaacctgaagcagcaagccgacatcatattcatgccgtacaattacttgttggatgccaagagccgcagagcacacaacattgacctgaaggggacagtcgtgatctttgacgaagctcacaacgtggagaagatgtgtgaagaatcggcatcctttgacctgactccccatgacctggcttcaggactggacgtcatagaccaggtgctggaggagcagaccaaggcagcgcagcagggtgagccccacccggagttcagcgcggactcccccagcccagggctgaacatggagctggaagacattgcaaagctgaagatgatcctgctgcgcctggarggggccatcgatgctgttgagctgcctggagacgacagyggtgtcaccaagccagggagctacatctttgagctgtttgctgaagcccagatcacgtttcagaccaagggctgcatcctggactcgctggaccagatcatccagcacctggcaggacgtgctggagtgttcaccaacacggccggactgcagaagctggcggacattatccagattgtgttcagtgtggacccctccgagggcagccctggttccccagcagggctgggggccttacagtcctataaggtgcacatccatcctgatgctggtcaccggaggacggctcagcggtctgatgcctggagcaccactgcagccagaaagcgagggaaggtgctgagctactggtgcttcagtcccggccacagcatgcacgagctggtccgccagggcgtccgctccctcatccttaccagcggcacgctggccccggtgtcctcctttgctctggagatgcagatccctttcccagtctgcctggagaacccacacatcatcgacaagcaccagatctgggtgggggtcgtccccagaggccccgatggagcccagttgagctccgcgtttgacagacggttttccgaggagtgcttatcctccctggggaaggctctgggcaacatcgcccgcgtggtgccctatgggctcctgatcttcttcccttcctatcctgtcatggagaagagcctggagttctggcgggcccgcgacttggccaggaagatggaggcgctgaagccgctgtttgtggagcccaggagcaaaggcagcttctccgagaccatcagtgcttactatgcaagggttgccgcccctgggtccaccggcgccaccttcctggcggtctgccggggcaaggccagcgaggggctggacttctcagacacgaatggccgtggtgtgattgtcacgggcctcccgtaccccccacgcatggacccccgggttgtcctcaagatgcagttcctggatgagatgaagggccagggtggggctgggggccagttcctctctgggcaggagtggtaccngcagcaggcgtccagggctgtgaaccaggccatcgggcgagtgatccggcaccgccaggaytacggagctgtcttcctctgtgaccacaggttcgcctttgccgacgcaagagcccaactgccctcctgggtgcgtccccacgtcagggtgtatgacaactttggccatgtcatccgagacgtggcccagttcttccgtgttgccgagcgaactatgccagcrccggccccccgggctacagcacccagtgtgcgtggagaagatgctgtcagcgaggccaagtcgcctggccccttcttctccaccaggaaagctaagagtctggacctgcatgtccccagcctgaagcagaggtcctcagggtcaccagctgccggggaccccgagagtagcctgtgtgtggagtatgagcaggagccagttcctgcccggcagaggcccagggggctgctggccgccctggagcacagcgaacagcgggcggggagcccyggcgaggagcaggcccacagctgctccaccctgtccctcctgtctgagaagaggccggcagaagaaccgcgaggagggaggaagaagatccggctggtcagccacccggaggagccygtggctggtgcacagacggacagggccaagctcttcatggtggccgtgaagcaggagttgagccaagccaactttgccaccttcacccaggccctgcaggactacaagggttccgatgacttyrccgccctggccgcctgtctcggccccctctttgctgasgaccccaagaagcacaacctgctccaaggcttctaccagtttgtgcggccccaccataagcagcagtttgaggaggtctgtatccagctgacaggacgaggctgtggctatcggcctgagcacagcattccccgaaggcagcgggcacagccggtcctggaccccactgggaactttccagatgctcycgaccagctttgtggctctacatctcttcatcaggaagaacggcgccggatcccaagc

SEQ ID NO: 4641 - DNA, 2266 bp, Homo sapiens
gagaccctggcagccamccacagtgggggtctggagtgcccagagcagggaagcagggccagcacgccgtgagcgcctacctggctgatgcccgcagggccctggggtccgcgggctgtagccaactcttggcagcgctgacagcctataagcaagacgacgacctcgacaaggtgctggctgtgttggccgccctgaccactgcaaagccagaggacttccccctgctgcacaggttcagcatgtttgtgcgtccacaccacaagcagcgcttctcacagacgtgcacagacctgaccggccggccctacccrggcatggagccaccgggaccccaggaggagaggcttgccgtgcctcctgtgcttacccacagggctccccaaccaggcccctcacggtccgagaagaccgggaagacccagagcaagatctcgtccttccttagacagaggccagcagggactgtgggggcgggcggtgaggatgcaggtcccagccagtcctcaggacctccccacgggcctgcagcatctgagtggggcctctaggatgtgcccagcctgccacaccgcctccaggaagcagagcgtcatgcaggtcttctggccrgagccccacaaggaccatgagggcgctggaggggccaggcctgtcgctgctgtgcctggtgttggcgctgcctgccctgctgccggtgccggctgtacgcggagtggcagaaacacccacctacccctggcgggacgcagagacaggggagcggctggtgtgygcccagtgccccccaggcacctttgtgcagcggccgtgccgccgagacagccccacgacgtgtggcccgtgtccaccgcgccactacacgcagttctggaactacctrgagcgctgccgctactgcaacgtcctctgcggggagcgtgaggaggaggcacgggcttgccacgccacccacaaccgygcctgccgctgccgcaccggcttcttcgcgcacgctggtttctgcttggagcacgcatcgtgtccacctggtgccggcgtgattgccccgggcacccccagccagaacacgcagtgccagccgtgccccccaggcaccttctcagccagcagytccagctcagagcagtgccagccccaccgcaactgcacggccctgggcctggccctcaatgtgccaggctcttcctcccatgacacsctgtgcaccagctgcactggcttccccctcagcaccagggtaccaggagctgaggagtgtgagcgtgccgtcatcgactttgtggctttccaggacatctccatcaagaggctgcagcggctgctgcaggccctcgaggccccggagggctggggtccgacaccaagggcgggccgcgcggccttgcagctgaagctgcgtcggcggctcacggagctcctgggggcgcaggacggggcgctgctggtgcggctgctgcaggcgctgcgcgtggccaggatgcccgggctggagcggagcgtccgtgagcgcttcctccctgtgcactgatcctggccccctcttatttattctacatccttggcaccccacttgcactgaaagaggcttttttttaaatagaagaaatgaggtttcttaaagcttatttttataaagctttttcataaaactggttgtagttgcacagctactgggagggcagccggggacacctgagccgcccgctgtgcccagatccctcaggctgcctgccatcagaactgctgcccggggcttcccctacctcagacagaccctccctgggaggatcagtggggagtgccacctctgcccccagtggctgtggcacgtggcaggggcccctgaagctcagcgagggtcagggcctgggagggtatcattgctggaagaacaggatggggctcaggccagccctagtcgccggggcccacactaaccccccacttatgaattcctcccactcccaactcacaggggatttcccgagaggggacctgccaaagacctcctccaggcctcccatgcttyccgggaagtgaagcttctcccyctctggggcaggctctgaagcctcccgatgcacccagagcaaccrgggggctgcaccagccactcgcctccccagcacggccaggttcccggggctggaggtcccccccaggtcctgggaaccaacctgcagaacacacacagggtcccctggagaggacgcggggacttccagggcccgactcctgtgagtcacagccccgcagctgctgc

SEQ ID NO: 4642 - DNA, 5113 bp, Homo sapiens
  misc_feature (1)...(5113): n = A,T,C or G
gaagaagccacgaagaagtgctgcctgccggccgtgcgcggtcacgcagcgccaactccctcctggggccttctggggccttctggggcatgggagctggggccgcctgagacaaacatccgtgacgctgggctgaccccacagaacggtgcgggcctcgctcttggagtcagccctgctgccagccagtgccgggtgctggggactcagggaggcccgccgggaccactgcgggacagtgagccgagcagaagctggaacgcaggagaggaaggagagggggcggtcagggctctcaggagccgggtcctgggcaaggcgcagccgttttcaaattttcaggaaagcggtcggctcacactcgagcagtaaaaagatgcctctggggaggaggcccgtgcagctctccgggcaatggtggtggctcggcctagagaggcggtagtggaacgcagaccctggtgggggaatgacatcaagggaggagacgggcgggaccccagatttctgcctgtgggcgatggaagtgaggttcactggccagcggagccggacacagaacgcgcaaaacgccgtgtaggcctggaggagcmgaagagcaggcggaccccctccgcgsgggaacagtttccgccgggagcacaaagcaacggaccggaagtggggggcggaagtgcagtgggctcagcgccgactgcgcgcctctgcccgcgaaaactctgagctggctgacagctggggacgggtggcggccctcgactggagtcggttgagttcctgagggaccccggttctggaaggttcgccgcggagacaagtgagcagtctgtgccatagggattctcgaagagaacagcgttgtgtcccagtgcacatgctcgcatcgcttaccaggagtgccygagaccctaagatgttcggagtggttttttcgcmcagacccgaatagcctgcccctcagccacgctctgtgcccttctgagaacaggctgatatgcccaagatagtcctgaatggtgtgaccgtagacttccctttccagccctacaaatgccaacaggagtacatgaccaaggtcctggaatgtctgcagcagaaggtgaatggcatcctggagagccctacgggtacagggaagacgctgtgcctgctgtgcaccacgctggcctggcgagaacacctccgagacggcatctctgccckcaagattgccgagagggcgcaaggagagcttttcccggatcgggccttgtcatcctggggcaacgctgctgctgctgctggagaccccatagcttgctacacggacatcccaaagattatttacgcctccaggacccactcgcaactcacacaggtcatcarygagcttcggaacacctcctaccggcctaaggtgtgtgtgctgggctcccgggagcagctgtgcatccatcctgaggtgaagaaacaagagagtaaccatctacagatccacttgtgccgtaagaaggtggcaagtcgctcctgtcatttctacaacaacgtagaagaaaaaagcctggagcaggagctggccagccccatcctggacattgaggacttggtcaagagcggaagcaagcacagggtgtgcccttactacctgtcccggaacctgaagcagcaagccgacatcatattcatgccgtacaattacttgttggatgccaagagccgcagagcacacaacattgacctgaaggggacagtcgtgatctttgacgaagctcacaacgtggagaagatgtgtgaagaatcggcatcctttgacctgactccccatgacctggcttcaggactggacgtcatagaccaggtgctggaggagcagaccaaggcagcgcagcagggtgagccccacccggagttcagcgcggactcccccagcccagggctgaacatggagctggaagacattgcaaagctgaagatgatcctgctgcgcctggarggggccatcgatgctgttgagctgcctggagacgacagyggtgtcaccaagccagggagctacatctttgagctgtttgctgaagcccagatcacgtttcagaccaagggctgcatcctggactcgctggaccagatcatccagcacctggcaggacgtgctggagtgttcaccaacacggccggactgcagaagctggcggacattatccagattgtgttcagtgtggacccctccgagggcagccctggttccccagcagggctgggggccttacagtcctataaggtgcacatccatcctgatgctggtcaccggaggacggctcagcggtctgatgcctggagcaccactgcagccagaaagcgagggaaggtgctgagctactggtgcttcagtcccggccacagcatgcacgagctggtccgccagggcgtccgctccctcatccttaccagcggcacgctggccccggtgtcctcctttgctctggagatgcagatccctttcccagtctgcctggagaacccacacatcatcgacaagcaccagatctgggtgggggtcgtccccagaggccccgatggagcccagttgagctccgcgtttgacagacggttttccgaggagtgcttatcctccctggggaaggctctgggcaacatcgcccgcgtggtgccctatgggctcctgatcttcttcccttcctatcctgtcatggagaagagcctggagttctggcgggcccgcgacttggccaggaagatggaggcgctgaagccgctgtttgtggagcccaggagcaaaggcagcttctccgagaccatcagtgcttactatgcaagggttgccgcccctgggtccaccggcgccaccttcctggcggtctgccggggcaaggccagcgaggggctggacttctcagacacgaatggccgtggtgtgattgtcacgggcctcccgtaccccccacgcatggacccccgggttgtcctcaagatgcagttcctggatgagatgaagggccagggtggggctgggggccagttcctctctgggcaggagtggtaccngcagcaggcgtccagggctgtgaaccaggccatcgggcgagtgatccggcaccgccaggaytacggagctgtcttcctctgtgaccacaggttcgcctttgccgacgcaagagcccaactgccctcctgggtgcgtccccacgtcagggtgtatgacaactttggccatgtcatccgagacgtggcccagttcttccgtgttgccgagcgaactatgccagcrccggccccccgggctacagcacccagtgtgcgtggagaagatgctgtcagcgaggccaagtcgcctggccccttcttctccaccaggaaagctaagagtctggacctgcatgtccccagcctgaagcagaggtcctcagggtcaccagctgccggggaccccgagagtagcctgtgtgtggagtatgagcaggagccagttcctgcccggcagaggcccagggggctgctggccgccctggagcacagcgaacagcgggcggggagcccyggcgaggagcaggcccacagctgctccaccctgtccctcctgtctgagaagaggccggcagaagaaccgcgaggagggaggaagaagatccggctggtcagccacccggaggagccygtggctggtgcacagacggacagggccaagctcttcatggtggccgtgaagcaggagttgagccaagccaactttgccaccttcacccaggccctgcaggactacaagggttccgatgacttyrccgccctggccgcctgtctcggccccctctttgctgasgaccccaagaagcacaacctgctccaaggcttctaccagtttgtgcggccccaccataagcagcagtttgaggaggtctgtatccagctgacaggacgaggctgtggctatcggcctgagcacagcattccccgaaggcagcgggcacagccggtcctggaccccactggaagaacggcgccggatcccaagctgaccgtgtccacggctgcagcccagcagctgracccccaagagcacctgaaccagggcaggccccacctgtcgcccaggccacccccaacaggagaccctggcagccamccacagtgggggtctggagtgcccagagcagggaagcagggccagcacgccgtgagcgcctacctggctgatgcccgcagggccctggggtccgcgggctgtagccaactcttggcagcgctgacagcctataagcaagacgacgacctcgacaaggtgctggctgtgttggccgccctgaccactgcaaagccagaggacttccccctgctgcacaggttcagcatgtttgtgcgtccacaccacaagcagcgcttctcacagacgtgcacagacctgaccggccggccctacccrggcatggagccaccgggaccccaggaggagaggcttgccgtgcctcctgtgcttacccacagggctccccaaccaggcccctcacggtccgagaagaccgggaagacccagagcaagatctcgtccttccttagacagaggccagcagggactgtgggggcgggcggtgaggatgcaggtcccagccagtcctcaggacctccccacgggcctgcagcatctgagtggggcctctaggatgtgcccagcctgccacaccgcctccaggaagcagagcgtcatgcaggtcttctggccrgagccccagtgagtgcccacggaggcccccagcacacccaacgtggcttgatcacctgcctgtccagctctggtgggccaagaacccacccaacagaataggccagcccatgccagccggcttggcccgctgcaggcctcaggcaggcggggcccatggttggtccctgcggtgggaccggatctgggcctgcctctgagaagccctgagctaccttggggtctggggtgggtttctgggaaagtgcttccccagaacttccctggctcctggcctgtgagtggtgccacaggggcaccccagctgagcccctcaccgggaaggaggagacccccgtgggcacgtgtccacttttaatcaggggacagggctctctaataaarctgctggcagtgccc

SEQ ID NO: 4643 - DNA, 5564 bp, Homo sapiens
  misc_feature (1)...(5564): n = A,T,C or G
ggcggaagtgcagtgggctcagcgccgactgcgcgcctctgcccgcgaaaactctgagctggctgacagctggggacgggtggcggccctcgactggagtcggttgagttcctgagggaccccggttctggaaggttcgccgcggagacaagtctgtgccatagggattctcgaagagaacagcgttgtgtcccagtgcacatgctcgcatcgcttaccaggagtgccygagaccctaagatgttcggagtggttttttcgcmcagacccgaatagcctgcccctcagccacgctctgtgcccttctgagaacaggctgatatgcccaagatagtcctgaatggtgtgaccgtagacttccctttccagccctacaaatgccaacaggagtacatgaccaaggtcctggaatgtctgcagcagaaggtgaatggcatcctggagagccctacgggtacagggaagacgctgtgcctgctgtgcaccacgctggcctggcgagaacacctccgagacggcatctctgccckcaagattgccgagagggcgcaaggagagcttttcccggatcgggccttgtcatcctggggcaacgctgctgctgctgctggagaccccatagcttgctacacggacatcccaaagattatttacgcctccaggacccactcgcaactcacacaggtcatcarygagcttcggaacacctcctaccggcctaaggtgtgtgtgctgggctcccgggagcagctgtgcatccatcctgaggtgaagaaacaagagagtaaccatctacagatccacttgtgccgtaagaaggtggcaagtcgctcctgtcatttctacaacaacgtagaagaaaaaagcctggagcaggagctggccagccccatcctggacattgaggacttggtcaagagcggaagcaagcacagggtgtgcccttactacctgtcccggaacctgaagcagcaagccgacatcatattcatgccgtacaattacttgttggatgccaagagccgcagagcacacaacattgacctgaaggggacagtcgtgatctttgacgaagctcacaacgtggagaagatgtgtgaagaatcggcatcctttgacctgactccccatgacctggcttcaggactggacgtcatagaccaggtgctggaggagcagaccaaggcagcgcagcaggggctgaacatggagctggaagacattgcaaagctgaagatgatcctgctgcgcctggarggggccatcgatgctgttgagctgcctggagacgacagyggtgtcaccaagccagggagctacatctttgagctgtttgctgaagcccagatcacgtttcagaccaagggctgcatcctggactcgctggaccagatcatccagcacctggcaggacggtggggcttcacggctgcagctgcgggagctgctgcccctgccttgtgctccaagaggcaggtggtcaggcccccagtcccgtcctcacactctgtgccctctgccgccccccgccccacagggaaggtgctgagctactggtgcttcagtcccggccacagcatgcacgagctggtccgccagggcgtccgctccctcatccttaccagcggcacgctggccccggtgtcctcctttgctctggagatgcagatccctttcccagtctgcctggagaacccacacatcatcgacaagcaccagatctgggtgggggtcgtccccagaggccccgatggagcccagttgagctccgcgtttgacagacggttttccgaggagtgcttatcctccctggggaaggctctgggcaacatcgcccgcgtggtgccctatgggctcctgatcttcttcccttcctatcctgtcatggagaagagcctggagttctggcgggcccgcgacttggccaggaagatggaggcgctgaagccgctgtttgtggagcccaggagcaaaggcagcttctccgagaccatcagtgcttactatgcaagggttgccgcccctgggtccaccggcgccaccttcctggcggtctgccggggcaaggccagcgaggggctggacttctcagacacgaatggccgtggtgtgattgtcacgggcctcccgtaccccccacgcatggacccccgggttgtcctcaagatgcagttcctggatgagatgaagggccagggtggggctgggggccagttcctctctgggcaggagtggtaccngcagcaggcgtccagggctgtgaaccaggccatcgggcgagtgatccggcaccgccaggaytacggagctgtcttcctctgtgaccacaggttcgcctttgccgacgcaagagcccaactgccctcctgggtgcgtccccacgtcagggtgtatgacaactttggccatgtcatccgagacgtggcccagttcttccgtgttgccgagcgaactatgccagcrccggccccccgggctacagcacccagtgtgcgtggagaagatgctgtcagcgaggccaagtcgcctggccccttcttctccaccaggaaagctaagagtctggacctgcatgtccccagcctgaagcagaggtcctcagggtcaccagctgccggggaccccgagagtagcctgtgtgtggagtatgagcaggagccagttcctgcccggcagaggcccagggggctgctggccgccctggagcacagcgaacagcgggcggggagcccyggcgaggagcaggcccacagctgctccaccctgtccctcctgtctgagaagaggccggcagaagaaccgcgaggagggaggaagaagatccggctggtcagccacccggaggagccygtggctggtgcacagacggacagggccaagctcttcatggtggccgtgaagcaggagttgagccaagccaactttgccaccttcacccaggccctgcaggactacaagggttccgatgacttyrccgccctggccgcctgtctcggccccctctttgctgasgaccccaagaagcacaacctgctccaaggcttctaccagtttgtgcggccccaccataagcagcagtttgaggaggtctgtatccagctgacaggacgaggctgtggctatcggcctgagcacagcattccccgaaggcagcgggcacagccggtcctggaccccactggaagaacggcgccggatcccaagctgaccgtgtccacggctgcagcccagcagctgracccccaagagcacctgaaccagggcaggccccacctgtcgcccaggccacccccaacaggagaccctggcagccamccacagtgggggtctggagtgcccagagcagggaagcagggccagcacgccgtgagcgcctacctggctgatgcccgcagggccctggggtccgcgggctgtagccaactcttggcagcgctgacagcctataagcaagacgacgacctcgacaaggtgctggctgtgttggccgccctgaccactgcaaagccagaggacttccccctgctgcacaggttcagcatgtttgtgcgtccacaccacaagcagcgcttctcacagacgtgcacagacctgaccggccggccctacccrggcatggagccaccgggaccccaggaggagaggcttgccgtgcctcctgtgcttacccacagggctccccaaccaggcccctcacggtccgagaagaccgggaagacccagagcaagatctcgtccttccttagacagaggccagcagggactgtgggggcgggcggtgaggatgcaggtcccagccagtcctcaggacctccccacgggcctgcagcatctgagtggggcctctaggatgtgcccagcctgccacaccgcctccaggaagcagagcgtcatgcaggtcttctggccrgagccccacaaggaccatgagggcgctggaggggccaggcctgtcgctgctgtgcctggtgttggcgctgcctgccctgctgccggtgccggctgtacgcggagtggcagaaacacccacctacccctggcgggacgcagagacaggggagcggctggtgtgygcccagtgccccccaggcacctttgtgcagcggccgtgccgccgagacagccccacgacgtgtggcccgtgtccaccgcgccactacacgcagttctggaactacctrgagcgctgccgctactgcaacgtcctctgcggggagcgtgaggaggaggcacgggcttgccacgccacccacaaccgygcctgccgctgccgcaccggcttcttcgcgcacgctggtttctgcttggagcacgcatcgtgtccacctggtgccggcgtgattgccccgggcacccccagccagaacacgcagtgccagccgtgccccccaggcaccttctcagccagcagytccagctcagagcagtgccagccccaccgcaactgcacggccctgggcctggccctcaatgtgccaggctcttcctcccatgacacsctgtgcaccagctgcactggcttccccctcagcaccagggtaccaggagctgaggagtgtgagcgtgccgtcatcgactttgtggctttccaggacatctccatcaagaggctgcagcggctgctgcaggccctcgaggccccggagggctggggtccgacaccaagggcgggccgcgcggccttgcagctgaagctgcgtcggcggctcacggagctcctgggggcgcaggacggggcgctgctggtgcggctgctgcaggcgctgcgcgtggccaggatgcccgggctggagcggagcgtccgtgagcgcttcctccctgtgcactgatcctggccccctcttatttattctacatccttggcaccccacttgcactgaaagaggcttttttttaaatagaagaaatgaggtttcttaaagcttatttttataaagctttttcataaaactggttgtagttgcacagctactgggagggcagccggggacacctgagccgcccgctgtgcccagatccctcaggctgcctgccatcagaactgctgcccggggcttcccctacctcagacagaccctccctgggaggatcagtggggagtgccacctctgcccccagtggctgtggcacgtggcaggggcccctgaagctcagcgagggtcagggcctgggagggtatcattgctggaagaacaggatggggctcaggccagccctagtcgccggggcccacactaaccccccacttatgaattcctcccactcccaactcacaggggatttcccgagaggggacctgccaaagacctcctccaggcctcccatgcttyccgggaagtgaagcttctcccyctctggggcaggctctgaagcctcccgatgcacccagagcaaccrgggggctgcaccagccactcgcctccccagcacggccaggttcccggggctggaggtcccccccaggtcctgggaaccaacctgcagaacacacacagggtcccctggagaggacgcggggacttccagggcccgactcctgtgagtcacagccccgcagctgctgc

SEQ ID NO: 4644 - DNA, 2106 bp, Homo sapiens
ggcagaggcccctcccagcctgccatgtgacactgtacttcctccacggtgggctcagccctgccctcatcctcacagccgcagccaagctgcagttggtaggggatccaccgacacaccaggctgcctgggctggtctctgggttgggagctgccccaggtgctgaggagggcagctccctggctggtgaggcccctcccagaaccacccttggactgagctctggggagggatggtaccaggtgggtgaggggggctgcctggggagggaggggttcctatggggcgtggcgaggctggcccagccctctccccgcccatatatgtagggcagcagcaggatgggcttctggacttgggcggcccctccgcaggcggaccgggggcaaaggaggtggcatgtcggtcaggcacagcagggtcctgtgtccgcgctgagccgcgctctccctgctccagcaaggaccatgagggcgctggaggggccaggcctgtcgctgctgtgcctggtgttggcgctgcctgccctgctgccggtgccggctgtacgcggagtggcagaaacacccacctacccctggcgggacgcagagacaggggagcggctggtgtgygcccagtgccccccaggcacctttgtgcagcggccgtgccgccgagacagccccacgacgtgtggcccgtgtccaccgcgccactacacgcagttctggaactacctrgagcgctgccgctactgcaacgtcctctgcggggagcgtgaggaggaggcacgggcttgccacgccacccacaaccgygcctgccgctgccgcaccggcttcttcgcgcacgctggtttctgcttggagcacgcatcgtgtccacctggtgccggcgtgattgccccgggcacccccagccagaacacgcagtgccagccgtgccccccaggcaccttctcagccagcagytccagctcagagcagtgccagccccaccgcaactgcacggccctgggcctggccctcaatgtgccaggctcttcctcccatgacacsctgtgcaccagctgcactggcttccccctcagcaccagggtaccaggagctgaggagtgtgagcgtgccgtcatcgactttgtggctttccaggacatctccatcaagaggctgcagcggctgctgcaggccctcgaggccccggagggctggggtccgacaccaagggcgggccgcgcggccttgcagctgaagctgcgtcggcggctcacggagctcctgggggcgcaggacggggcgctgctggtgcggctgctgcaggcgctgcgcgtggccaggatgcccgggctggagcggagcgtccgtgagcgcttcctccctgtgcactgatcctggccccctcttatttattctacatccttggcaccccacttgcactgaaagaggcttttttttaaatagaagaaatgaggtttcttaaagcttatttttataaagctttttcataaaactggttgtagttgcacagctactgggagggcagccggggacacctgagccgcccgctgtgcccagatccctcaggctgcctgccatcagaactgctgcccggggcttcccctacctcagacagaccctccctgggaggatcagtggggagtgccacctctgcccccagtggctgtggcacgtggcaggggcccctgaagctcagcgagggtcagggcctgggagggtatcattgctggaagaacaggatggggctcaggccagccctagtcgccggggcccacactaaccccccacttatgaattcctcccactcccaactcacaggggatttcccgagaggggacctgccaaagacctcctccaggcctcccatgcttyccgggaagtgaagcttctcccyctctggggcaggctctgaagcctcccgatgcacccagagcaaccrgggggctgcaccagccactcgcctccccagcacggccaggttcccggggctggaggtcccccccaggtcctgggaaccaacctgcagaacacacacagggtcccctggagaggacgcggggacttccagggcccgactcctgtgagtcacagccccgcagctgctgc

SEQ ID NO: 4645 - DNA, 5866 bp, Homo sapiens
  misc_feature (1)...(5866): n = A,T,C or G
ggcggaagtgcagtgggctcagcgccgactgcgcgcctctgcccgcgaaaactctgagctggctgacagctggggacgggtggcggccctcgactggagtcggttgagttcctgagggaccccggttctggaaggttcgccgcggagacaagtctgtgccatagggattctcgaagagaacagcgttgtgtcccagtgcacatgctcgcatcgcttaccaggagtgccygagaccctaagatgttcggagtggttttttcgcmcagacccgaatagcctgcccctcagccacgctctgtgcccttctgagaacaggctgatatgcccaagatagtcctgaatggtgtgaccgtagacttccctttccagccctacaaatgccaacaggagtacatgaccaaggtcctggaatgtctgcagcagaaggtgaatggcatcctggagagccctacgggtacagggaagacgctgtgcctgctgtgcaccacgctggcctggcgagaacacctccgagacggcatctctgccckcaagattgccgagagggcgcaaggagagcttttcccggatcgggccttgtcatcctggggcaacgctgctgctgctgctggagaccccatagcttgctacacggacatcccaaagattatttacgcctccaggacccactcgcaactcacacaggtcatcarygagcttcggaacacctcctaccggcctaaggtgtgtgtgctgggctcccgggagcagctgtgcatccatcctgaggtgaagaaacaagagagtaaccatctacagatccacttgtgccgtaagaaggtggcaagtcgctcctgtcatttctacaacaacgtagaagaaaaaagcctggagcaggagctggccagccccatcctggacattgaggacttggtcaagagcggaagcaagcacagggtgtgcccttactacctgtcccggaacctgaagcagcaagccgacatcatattcatgccgtacaattacttgttggatgccaagagccgcagagcacacaacattgacctgaaggggacagtcgtgatctttgacgaagctcacaacgtggagaagatgtgtgaagaatcggcatcctttgacctgactccccatgacctggcttcaggactggacgtcatagaccaggtgctggaggagcagaccaaggcagcgcagcagggtgagccccacccggagttcagcgcggactcccccagcccagggctgaacatggagctggaagacattgcaaagctgaagatgatcctgctgcgcctggarggggccatcgatgctgttgagctgcctggagacgacagyggtgtcaccaagccagggagctacatctttgagctgtttgctgaagcccagatcacgtttcagaccaagggctgcatcctggactcgctggaccagatcatccagcacctggcaggacgtgctggagtgttcaccaacacggccggactgcagaagctggcggacattatccagattgtgttcagtgtggacccctccgagggcagccctggttccccagcagggctgggggccttacagtcctataaggtgcacatccatcctgatgctggtcaccggaggacggctcagcggtctgatgcctggagcaccactgcagccagaaagcgagggaaggtgctgagctactggtgcttcagtcccggccacagcatgcacgagctggtccgccagggcgtccgctccctcatccttaccagcggcacgctggccccggtgtcctcctttgctctggagatgcagatccctttcccagtctgcctggagaacccacacatcatcgacaagcaccagatctgggtgggggtcgtccccagaggccccgatggagcccagttgagctccgcgtttgacagacggttttccgaggagtgcttatcctccctggggaaggctctgggcaacatcgcccgcgtggtgccctatgggctcctgatcttcttcccttcctatcctgtcatggagaagagcctggagttctggcgggcccgcgacttggccaggaagatggaggcgctgaagccgctgtttgtggagcccaggagcaaaggcagcttctccgagaccatcagtgcttactatgcaagggttgccgcccctgggtccaccggcgccaccttcctggcggtctgccggggcaaggccagcgaggggctggacttctcagacacgaatggccgtggtgtgattgtcacgggcctcccgtaccccccacgcatggacccccgggttgtcctcaagatgcagttcctggatgagatgaagggccagggtggggctgggggccagttcctctctgggcaggagtggtaccngcagcaggcgtccagggctgtgaaccaggccatcgggcgagtgatccggcaccgccaggaytacggagctgtcttcctctgtgaccacaggttcgcctttgccgacgcaagagcccaactgccctcctgggtgcgtccccacgtcagggtgtatgacaactttggccatgtcatccgagacgtggcccagttcttccgtgttgccgagcgaactatgccagcrccggccccccgggctacagcacccagtgtgcgtggagaagatgctgtcagcgaggccaagtcgcctggccccttcttctccaccaggaaagctaagagtctggacctgcatgtccccagcctgaagcagaggtcctcagggtcaccagctgccggggaccccgagagtagcctgtgtgtggagtatgagcaggagccagttcctgcccggcagaggcccagggggctgctggccgccctggagcacagcgaacagcgggcggggagcccyggcgaggagcaggcccacagctgctccaccctgtccctcctgtctgagaagaggccggcagaagaaccgcgaggagggaggaagaagatccggctggtcagccacccggaggagccygtggctggtgcacagacggacagggccaagctcttcatggtggccgtgaagcaggagttgagccaagccaactttgccaccttcacccaggccctgcaggactacaagggttccgatgacttyrccgccctggccgcctgtctcggccccctctttgctgasgaccccaagaagcacaacctgctccaaggcttctaccagtttgtgcggccccaccataagcagcagtttgaggaggtctgtatccagctgacaggacgaggctgtggctatcggcctgagcacagcattccccgaaggcagcgggcacagccggtcctggaccccactggaagaacggcgccggatcccaagctgaccgtgtccacggctgcagcccagcagctgracccccaagagcacctgaaccagggcaggccccacctgtcgcccaggccacccccaacaggagaccctggcagccamccacagtgggggtctggagtgcccagagcagggaagcagggccagcacgccgtgagcgcctacctggctgatgcccgcagggccctggggtccgcgggctgtagccaactcttggcagcgctgacagcctataagcaagacgacgacctcgacaaggtgctggctgtgttggccgccctgaccactgcaaagccagaggacttccccctgctgcacaggttcagcatgtttgtgcgtccacaccacaagcagcgcttctcacagacgtgcacagacctgaccggccggccctacccrggcatggagccaccgggaccccaggaggagaggcttgccgtgcctcctgtgcttacccacagggctccccaaccaggcccctcacggtccgagaagaccgggaagacccagagcaagatctcgtccttccttagacagaggccagcagggactgtgggggcgggcggtgaggatgcaggtcccagccagtcctcaggacctccccacgggcctgcagcatctgagtggggtgagcctcatgggagagacatcgctgggcagcaggccacgggagctccgggcgggcccctctcagcaggctgtgtgtgccagggctgtggggcagaggacgtggtgcccttccagtgccctgcctgtgacttccagcgctgccaagcctgctggcaacggcaccttcaggcctctaggatgtgcccagcctgccacaccgcctccaggaagcagagcgtcatgcaggtcttctggccrgagccccacaaggaccatgagggcgctggaggggccaggcctgtcgctgctgtgcctggtgttggcgctgcctgccctgctgccggtgccggctgtacgcggagtggcagaaacacccacctacccctggcgggacgcagagacaggggagcggctggtgtgygcccagtgccccccaggcacctttgtgcagcggccgtgccgccgagacagccccacgacgtgtggcccgtgtccaccgcgccactacacgcagttctggaactacctrgagcgctgccgctactgcaacgtcctctgcggggagcgtgaggaggaggcacgggcttgccacgccacccacaaccgygcctgccgctgccgcaccggcttcttcgcgcacgctggtttctgcttggagcacgcatcgtgtccacctggtgccggcgtgattgccccgggcacccccagccagaacacgcagtgccagccgtgccccccaggcaccttctcagccagcagytccagctcagagcagtgccagccccaccgcaactgcacggccctgggcctggccctcaatgtgccaggctcttcctcccatgacacsctgtgcaccagctgcactggcttccccctcagcaccagggtaccaggagctgaggagtgtgagcgtgccgtcatcgactttgtggctttccaggacatctccatcaagaggctgcagcggctgctgcaggccctcgaggccccggagggctggggtccgacaccaagggcgggccgcgcggccttgcagctgaagctgcgtcggcggctcacggagctcctgggggcgcaggacggggcgctgctggtgcggctgctgcaggcgctgcgcgtggccaggatgcccgggctggagcggagcgtccgtgagcgcttcctccctgtgcactgatcctggccccctcttatttattctacatccttggcaccccacttgcactgaaagaggcttttttttaaatagaagaaatgaggtttcttaaagcttatttttataaagctttttcataaaactggttgtagttgcacagctactgggagggcagccggggacacctgagccgcccgctgtgcccagatccctcaggctgcctgccatcagaactgctgcccggggcttcccctacctcagacagaccctccctgggaggatcagtggggagtgccacctctgcccccagtggctgtggcacgtggcaggggcccctgaagctcagcgagggtcagggcctgggagggtatcattgctggaagaacaggatggggctcaggccagccctagtcgccggggcccacactaaccccccacttatgaattcctcccactcccaactcacaggggatttcccgagaggggacctgccaaagacctcctccaggcctcccatgcttyccgggaagtgaagcttctcccyctctggggcaggctctgaagcctcccgatgcacccagagcaaccrgggggctgcaccagccactcgcctccccagcacggccaggttcccggggctggaggtcccccccaggtcctgggaaccaacctgcagaacacacacagggtcccctggagaggacgcggggacttccagggcccgactcctgtgagtcacagccccgcagctgctgc

SEQ ID NO: 4646 - DNA, 5553 bp, Homo sapiens
  misc_feature (1)...(5553): n = A,T,C or G
ggcggaagtgcagtgggctcagcgccgactgcgcgcctctgcccgcgaaaactctgagctggctgacagctggggacgggtggcggccctcgactggagtcggttgagttcctgagggaccccggttctggaaggttcgccgcggagacaagtctgtgccatagggattctcgaagagaacagcgttgtgtcccagtgcacatgctcgcatcgcttaccaggagtgccygagaccctaagatgttcggagtggttttttcgcmcagacccgaatagcctgcccctcagccacgctctgtgcccttctgagaacaggctgatatgcccaagatagtcctgaatggtgtgaccgtagacttccctttccagccctacaaatgccaacaggagtacatgaccaaggtcctggaatgtctgcagcagaaggtgaatggcatcctggagagccctacgggtacagggaagacgctgtgcctgctgtgcaccacgctggcctggcgagaacacctccgagacggcatctctgccckcaagattgccgagagggcgcaaggagagcttttcccggatcgggccttgtcatcctggggcaacgctgctgctgctgctggagaccccatagcttgctacacggacatcccaaagattatttacgcctccaggacccactcgcaactcacacaggtcatcarygagcttcggaacacctcctaccggcctaaggtgtgtgtgctgggctcccgggagcagctgtgcatccatcctgaggtgaagaaacaagagagtaaccatctacagatccacttgtgccgtaagaaggtggcaagtcgctcctgtcatttctacaacaacgtagaagaaaaaagcctggagcaggagctggccagccccatcctggacattgaggacttggtcaagagcggaagcaagcacagggtgtgcccttactacctgtcccggaacctgaagcagcaagccgacatcatattcatgccgtacaattacttgttggatgccaagagccgcagagcacacaacattgacctgaaggggacagtcgtgatctttgacgaagctcacaacgtggagaagatgtgtgaagaatcggcatcctttgacctgactccccatgacctggcttcaggactggacgtcatagaccaggtgctggaggagcagaccaaggcagcgcagcagggtgagccccacccggagttcagcgcggactcccccagcccagggctgaacatggagctggaagacattgcaaagctgaagatgatcctgctgcgcctggarggggccatcgatgctgttgagctgcctggagacgacagyggtgtcaccaagccagggagctacatctttgagctgtttgctgaagcccagatcacgtttcagaccaagggctgcatcctggactcgctggaccagatcatccagcacctggcaggacgtgctggagtgttcaccaacacggccggactgcagaagctggcggacattatccagattgtgttcagtgtggacccctccgagggcagccctggttccccagcagggctgggggccttacagtcctataaggtgcacatccatcctgatgctggtcaccggaggacggctcagcggtctgatgcctggagcaccactgcagccagaaagcgagggaaggtgctgagctactggtgcttcagtcccggccacagcatgcacgagctggtccgccagggcgtccgctccctcatccttaccagcggcacgctggccccggtgtcctcctttgctctggagatgcagatccctttcccagtctgcctggagaacccacacatcatcgacaagcaccagatctgggtgggggtcgtccccagaggccccgatggagcccagttgagctccgcgtttgacagacggttttccgaggagtgcttatcctccctggggaaggctctgggcaacatcgcccgcgtggtgccctatgggctcctgatcttcttcccttcctatcctgtcatggagaagagcctggagttctggcgggcccgcgacttggccaggaagatggaggcgctgaagccgctgtttgtggagcccaggagcaaaggcagcttctccgagaccatcagtgcttactatgcaagggttgccgcccctgggtccaccggcgccaccttcctggcggtctgccggggcaagttcctctctgggcaggagtggtaccngcagcaggcgtccagggctgtgaaccaggccatcgggcgagtgatccggcaccgccaggaytacggagctgtcttcctctgtgaccacaggttcgcctttgccgacgcaagagcccaactgccctcctgggtgcgtccccacgtcagggtgtatgacaactttggccatgtcatccgagacgtggcccagttcttccgtgttgccgagcgaactatgccagcrccggccccccgggctacagcacccagtgtgcgtggagaagatgctgtcagcgaggccaagtcgcctggccccttcttctccaccaggaaagctaagagtctggacctgcatgtccccagcctgaagcagaggtcctcagggtcaccagctgccggggaccccgagagtagcctgtgtgtggagtatgagcaggagccagttcctgcccggcagaggcccagggggctgctggccgccctggagcacagcgaacagcgggcggggagcccyggcgaggagcaggcccacagctgctccaccctgtccctcctgtctgagaagaggccggcagaagaaccgcgaggagggaggaagaagatccggctggtcagccacccggaggagccygtggctggtgcacagacggacagggccaagctcttcatggtggccgtgaagcaggagttgagccaagccaactttgccaccttcacccaggccctgcaggactacaagggttccgatgacttyrccgccctggccgcctgtctcggccccctctttgctgasgaccccaagaagcacaacctgctccaaggcttctaccagtttgtgcggccccaccataagcagcagtttgaggaggtctgtatccagctgacaggacgaggctgtggctatcggcctgagcacagcattccccgaaggcagcgggcacagccggtcctggaccccactggaagaacggcgccggatcccaagctgaccgtgtccacggctgcagcccagcagctgracccccaagagcacctgaaccagggcaggccccacctgtcgcccaggccacccccaacaggagaccctggcagccamccacagtgggggtctggagtgcccagagcagggaagcagggccagcacgccgtgagcgcctacctggctgatgcccgcagggccctggggtccgcgggctgtagccaactcttggcagcgctgacagcctataagcaagacgacgacctcgacaaggtgctggctgtgttggccgccctgaccactgcaaagccagaggacttccccctgctgcacagcaaggttcagcatgtttgtgcgtccacaccacaagcagcgcttctcacagacgtgcacagacctgaccggccggccctacccrggcatggagccaccgggaccccaggaggagaggcttgccgtgcctcctgtgcttacccacagggctccccaaccaggcccctcacggtccgagaagaccgggaagacccagagcaagatctcgtccttccttagacagaggccagcagggactgtgggggcgggcggtgaggatgcaggtcccagccagtcctcaggacctccccacgggcctgcagcatctgagtggggcctctaggatgtgcccagcctgccacaccgcctccaggaagcagagcgtcatgcaggtcttctggccrgagccccacaaggaccatgagggcgctggaggggccaggcctgtcgctgctgtgcctggtgttggcgctgcctgccctgctgccggtgccggctgtacgcggagtggcagaaacacccacctacccctggcgggacgcagagacaggggagcggctggtgtgygcccagtgccccccaggcacctttgtgcagcggccgtgccgccgagacagccccacgacgtgtggcccgtgtccaccgcgccactacacgcagttctggaactacctrgagcgctgccgctactgcaacgtcctctgcggggagcgtgaggaggaggcacgggcttgccacgccacccacaaccgygcctgccgctgccgcaccggcttcttcgcgcacgctggtttctgcttggagcacgcatcgtgtccacctggtgccggcgtgattgccccgggcacccccagccagaacacgcagtgccagccgtgccccccaggcaccttctcagccagcagytccagctcagagcagtgccagccccaccgcaactgcacggccctgggcctggccctcaatgtgccaggctcttcctcccatgacacsctgtgcaccagctgcactggcttccccctcagcaccagggtaccaggagctgaggagtgtgagcgtgccgtcatcgactttgtggctttccaggacatctccatcaagaggctgcagcggctgctgcaggccctcgaggccccggagggctggggtccgacaccaagggcgggccgcgcggccttgcagctgaagctgcgtcggcggctcacggagctcctgggggcgcaggacggggcgctgctggtgcggctgctgcaggcgctgcgcgtggccaggatgcccgggctggagcggagcgtccgtgagcgcttcctccctgtgcactgatcctggccccctcttatttattctacatccttggcaccccacttgcactgaaagaggcttttttttaaatagaagaaatgaggtttcttaaagcttatttttataaagctttttcataaaactggttgtagttgcacagctactgggagggcagccggggacacctgagccgcccgctgtgcccagatccctcaggctgcctgccatcagaactgctgcccggggcttcccctacctcagacagaccctccctgggaggatcagtggggagtgccacctctgcccccagtggctgtggcacgtggcaggggcccctgaagctcagcgagggtcagggcctgggagggtatcattgctggaagaacaggatggggctcaggccagccctagtcgccggggcccacactaaccccccacttatgaattcctcccactcccaactcacaggggatttcccgagaggggacctgccaaagacctcctccaggcctcccatgcttyccgggaagtgaagcttctcccyctctggggcaggctctgaagcctcccgatgcacccagagcaaccrgggggctgcaccagccactcgcctccccagcacggccaggttcccggggctggaggtcccccccaggtcctgggaaccaacctgcagaacacacacagggtcccctggagaggacgcggggacttccagggcccgactcctgtgagtcacagccccgcagctgctgc

SEQ ID NO: 4647 - DNA, 2473 bp, Homo sapiens
gagtggtaccggcagcaggcgtccagggctgtgaaccaggccatcgggcgagtgatccggcaccgccaggactacggagctgtcttcctctgtgaccacaggtgcgtgcagtccggtggcaggcgcggcgccaggggacacgcccacaccccactgggcccctggactctccttccccacatgaggccccgtctcctccagagcctctccggctactcggggtcagcgtggggcccctgcagcagatgagggtcttcacttcggtgaactgaacccttgaagcggctgtgggcagggcagcagggctatggccaccccccaggttcgcctttgccgacgcaagagcccaactgccctcctgggtgcgtccccacgtcagggtgtatgacaactttggccatgtcatccgagacgtggcccagttcttccgtgttgccgagcgaactatgccagcgccggccccccgggctacagcacccagtgtgcgtggagaagatgctgtcagcgaggccaagtcgyctggccccttcttctccaccaggaaagctaagagtctgsacctgcatgtccccagcctgaagcagaggtcctcagggtcaccagctgccggggaccccgagagtagcctgtgtgtggagtatgagcaggagccagttcctgcccggcagaggcccagggggctgctggccgccctggagcacagcgaacagcgggcggggagccctggcgaggagcaggcccacagctgctccaccctgtccctcctgtctgagaagaggccggcagaagaaccgcgaggagggaggaagaagatccggctggtcagccacccggaggagcccgtggctggtgcacagacggacagggccaagctcttcatggtggccgtgaagcaggagttgagccaagccaactttgccaccttcacccaggccctgcaggactacaagggttccgatgactttgccgccctggccgcctgtctcggccccctctttgctgaggaccccaagaagcacaacctgctccaaggcttctaccagtttgtgcggccccaccataagcagcagtttgaggaggtctgtatccagctgacaggacgaggctgtggctatcggcctgagcacagcattccccgaaggcagcgggcacagccgrtcctggaccccactggaagaacggcgccggatcccaagctgaccgtgtccacggctgcagcccagcagctggacccccaagagcacctgaaccagggcaggccccacctgtcgcccaggccacccccaacaggagaccctggcagccaaccacagtgggggtctggagtgcccagagcagggaagcagggccagcacgccgtgagcgcctacctggctgatgcccgcagggccctggggtccgcgggctgtagccaactcttggcagcgctgacagcctataagcaagacgacgacctcgacaaggtgctggctgtgttggccgccctgaccactgcaaagccagaggacttccccctgctgcacaggttcagcatgtttgtgcgtccacaccacaagcagcgcttctcacagacgtgcacagacctgaccggccggccctacccgggcatggagccaccgggaccccaggaggagaggcttgccgtgcctcctgtgcttacccacagggctccccaaccaggcccctcacggtccgagaagaccgggaagacccagagcaagatctcgtccttccttagacagaggccagcagggactgtgggggcgggcggtgaggatgcaggtcccagccagtcctcaggacctccccacgggcctgcagcatctgagtggggtgagcctcatgggagagacatcgctgggcagcaggccacgggagctccgggcgggcccctctcagcaggctgtgtgtgccagggctgtggggcagaggacgtggtgcccttccagtgccctgcctgtgacttccagcgctgccaagcctgctggcaacggcaccttcaggcctcraggatgtgcccagcctgccacaccgcctccaggaagcagagcgtcatgcaggtcttctggccagagccccagtgagtgcccacggaggcccccagcacacccaacgtggcttgatcacctgcctgtccagctctggtgggccaagaacccacccaacagaataggccagcccatgccagccggcttggcccgctgcaggcctcaggcaggcggggcccatggttggtccctgcggtgggaccggatctgggcctgcctctgagaagccctgagctaccttggggtctggggtgggtttctgggaaagtgcttccccagaacttccctggctcctggcctgtgagtggtgccacaggggcaccccagctgagcccctcaccgggaaggaggagacccccgtgggcacgtgtccacttttaatcaggggacagggctctctaataaagctgctggcagtgcccagg

SEQ ID NO: 4648 - DNA, 5715 bp, Homo sapiens
  misc_feature (1)...(5715): n = A,T,C or G
gtctgtgccatagggattctcgaagagaacagcgttgtgtcccagtgcacatgctcgcatcgcttaccaggagtgccygagaccctaagatgttcggagtggttttttcgcmcagacccgaatagcctgcccctcagccacgctctgtgcccttctgagaacaggctgatatgcccaagatagtcctgaatggtgtgaccgtagacttccctttccagccctacaaatgccaacaggagtacatgaccaaggtcctggaatgtctgcagcagaaggtgaatggcatcctggagagccctacgggtacagggaagacgctgtgcctgctgtgcaccacgctggcctggcgagaacacctccgagacggcatctctgccckcaagattgccgagagggcgcaaggagagcttttcccggatcgggccttgtcatcctggggcaacgctgctgctgctgctggagaccccatagcttgctacacggacatcccaaagattatttacgcctccaggacccactcgcaactcacacaggtcatcarygagcttcggaacacctcctaccggcctaaggtgtgtgtgctgggctcccgggagcagctgtgcatccatcctgaggtgaagaaacaagagagtaaccatctacagatccacttgtgccgtaagaaggtggcaagtcgctcctgtcatttctacaacaacgtagaagaaaaaagcctggagcaggagctggccagccccatcctggacattgaggacttggtcaagagcggaagcaagcacagggtgtgcccttactacctgtcccggaacctgaagcagcaagccgacatcatattcatgccgtacaattacttgttggatgccaagagccgcagagcacacaacattgacctgaaggggacagtcgtgatctttgacgaagctcacaacgtggagaagatgtgtgaagaatcggcatcctttgacctgactccccatgacctggcttcaggactggacgtcatagaccaggtgctggaggagcagaccaaggcagcgcagcagggtgagccccacccggagttcagcgcggactcccccagcccagggctgaacatggagctggaagacattgcaaagctgaagatgatcctgctgcgcctggarggggccatcgatgctgttgagctgcctggagacgacagyggtgtcaccaagccagggagctacatctttgagctgtttgctgaagcccagatcacgtttcagaccaagggctgcatcctggactcgctggaccagatcatccagcacctggcaggacgtgctggagtgttcaccaacacggccggactgcagaagctggcggacattatccagattgtgttcagtgtggacccctccgagggcagccctggttccccagcagggctgggggccttacagtcctataaggtgcacatccatcctgatgctggtcaccggaggacggctcagcggtctgatgcctggagcaccactgcagccagaaagcgagggaaggtgctgagctactggtgcttcagtcccggccacagcatgcacgagctggtccgccagggcgtccgctccctcatccttaccagcggcacgctggccccggtgtcctcctttgctctggagatgcagatccctttcccagtctgcctggagaacccacacatcatcgacaagcaccagatctgggtgggggtcgtccccagaggccccgatggagcccagttgagctccgcgtttgacagacggttttccgaggagtgcttatcctccctggggaaggctctgggcaacatcgcccgcgtggtgccctatgggctcctgatcttcttcccttcctatcctgtcatggagaagagcctggagttctggcgggcccgcgacttggccaggaagatggaggcgctgaagccgctgtttgtggagcccaggagcaaaggcagcttctccgagaccatcagtgcttactatgcaagggttgccgcccctgggtccaccggcgccaccttcctggcggtctgccggggcaaggccagcgaggggctggacttctcagacacgaatggccgtggtgtgattgtcacgggcctcccgtaccccccacgcatggacccccgggttgtcctcaagatgcagttcctggatgagatgaagggccagggtggggctgggggccagttcctctctgggcaggagtggtaccngcagcaggcgtccagggctgtgaaccaggccatcgggcgagtgatccggcaccgccaggaytacggagctgtcttcctctgtgaccacaggttcgcctttgccgacgcaagagcccaactgccctcctgggtgcgtccccacgtcagggtgtatgacaactttggccatgtcatccgagacgtggcccagttcttccgtgttgccgagcgaactatgccagcrccggccccccgggctacagcacccagtgtgcgtggagaagatgctgtcagcgaggccaagtcgcctggccccttcttctccaccaggaaagctaagagtctggacctgcatgtccccagcctgaagcagaggtcctcagggtcaccagctgccggggaccccgagagtagcctgtgtgtggagtatgagcaggagccagttcctgcccggcagaggcccagggggctgctggccgccctggagcacagcgaacagcgggcggggagcccyggcgaggagcaggcccacagctgctccaccctgtccctcctgtctgagaagaggccggcagaagaaccgcgaggagggaggaagaagatccggctggtcagccacccggaggagccygtggctggtgcacagacggacagggccaagctcttcatggtggccgtgaagcaggagttgagccaagccaactttgccaccttcacccaggccctgcaggactacaagggttccgatgacttyrccgccctggccgcctgtctcggccccctctttgctgasgaccccaagaagcacaacctgctccaaggcttctaccagtttgtgcggccccaccataagcagcagtttgaggaggtctgtatccagctgacaggacgaggctgtggctatcggcctgagcacagcattccccgaaggcagcgggcacagccggtcctggaccccactggaagaacggcgccggatcccaagctgaccgtgtccacggctgcagcccagcagctgracccccaagagcacctgaaccagggcaggccccacctgtcgcccaggccacccccaacaggagaccctggcagccamccacagtgggggtctggagtgcccagagcagggaagcagggccagcacgccgtgagcgcctacctggctgatgcccgcagggccctggggtccgcgggctgtagccaactcttggcagcgctgacagcctataagcaagacgacgacctcgacaaggtgctggctgtgttggccgccctgaccactgcaaagccagaggacttccccctgctgcacaggttcagcatgtttgtgcgtccacaccacaagcagcgcttctcacagacgtgcacagacctgaccggccggccctacccrggcatggagccaccgggaccccaggaggagaggcttgccgtgcctcctgtgcttacccacagggctccccaaccaggcccctcacggtccgagaagaccgggaagacccagagcaagatctcgtccttccttagacagaggccagcagggactgtgggggcgggcggtgaggatgcaggtcccagccagtcctcaggacctccccacgggcctgcagcatctgagtggggtgagcctcatgggagagacatcgctgggcagcaggccacgggagctccgggcgggcccctctcagcaggctgtgtgtgccagggctgtggggcagaggacgtggtgcccttccagtgccctgcctgtgacttccagcgctgccaagcctgctggcaacggcaccttcaggcctctaggatgtgcccagcctgccacaccgcctccaggaagcagagcgtcatgcaggtcttctggccrgagccccacaaggaccatgagggcgctggaggggccaggcctgtcgctgctgtgcctggtgttggcgctgcctgccctgctgccggtgccggctgtacgcggagtggcagaaacacccacctacccctggcgggacgcagagacaggggagcggctggtgtgygcccagtgccccccaggcacctttgtgcagcggccgtgccgccgagacagccccacgacgtgtggcccgtgtccaccgcgccactacacgcagttctggaactacctrgagcgctgccgctactgcaacgtcctctgcggggagcgtgaggaggaggcacgggcttgccacgccacccacaaccgygcctgccgctgccgcaccggcttcttcgcgcacgctggtttctgcttggagcacgcatcgtgtccacctggtgccggcgtgattgccccgggcacccccagccagaacacgcagtgccagccgtgccccccaggcaccttctcagccagcagytccagctcagagcagtgccagccccaccgcaactgcacggccctgggcctggccctcaatgtgccaggctcttcctcccatgacacsctgtgcaccagctgcactggcttccccctcagcaccagggtaccaggagctgaggagtgtgagcgtgccgtcatcgactttgtggctttccaggacatctccatcaagaggctgcagcggctgctgcaggccctcgaggccccggagggctggggtccgacaccaagggcgggccgcgcggccttgcagctgaagctgcgtcggcggctcacggagctcctgggggcgcaggacggggcgctgctggtgcggctgctgcaggcgctgcgcgtggccaggatgcccgggctggagcggagcgtccgtgagcgcttcctccctgtgcactgatcctggccccctcttatttattctacatccttggcaccccacttgcactgaaagaggcttttttttaaatagaagaaatgaggtttcttaaagcttatttttataaagctttttcataaaactggttgtagttgcacagctactgggagggcagccggggacacctgagccgcccgctgtgcccagatccctcaggctgcctgccatcagaactgctgcccggggcttcccctacctcagacagaccctccctgggaggatcagtggggagtgccacctctgcccccagtggctgtggcacgtggcaggggcccctgaagctcagcgagggtcagggcctgggagggtatcattgctggaagaacaggatggggctcaggccagccctagtcgccggggcccacactaaccccccacttatgaattcctcccactcccaactcacaggggatttcccgagaggggacctgccaaagacctcctccaggcctcccatgcttyccgggaagtgaagcttctcccyctctggggcaggctctgaagcctcccgatgcacccagagcaaccrgggggctgcaccagccactcgcctccccagcacggccaggttcccggggctggaggtcccccccaggtcctgggaaccaacctgcagaacacacacagggtcccctggagaggacgcggggacttccagggcccgactcctgtgagtcacagccccgcagctgctgc

SEQ ID NO: 4649 - DNA, 2178 bp, Homo sapiens
atgcgcgccgcccggccaggcccgcaaagaggcctccgagcgccatggctgcgcccccggcccgcgcggacgctgatccttcgcccacgtcgccacctacggcccgagacacaccaggccggcaggctgagaaaagcgagaccgcgtgcgaggaccgcagcaatgcagagtccctggacaggctcctgccacctgtgggcactgggcgctctycccggaagcggaccaccagccagtgcaagtcagagcctcccctgctgcgtacaagcaagcgtaccatctacaccgccgggcggccgccctggtacaatgaacacggcacgcaatccaaagaggccttcgccatcggcttgggrggcggcagtgcctctgggaagaccactgtggccagaatgatcatcgaggccctggatgtgccctgggtggtcttgctgtccatggactccttctacaaggtgctgactgagcagcagcaggaacaggccgcacacaacaacttcaacttcgaccacccagatgcctttgacttcgacctcatcatttccaccctcaagaagctgaagcaggggaagagtgtcaaggtgcccatttatgacttcaccacrcacagccggaagaaggactggaaaacactgtatggtgcaaacgtcatcatctttgagggcatcatggcctttgctgacaagacactgttggagctcctggacatgaagatctttgtggacacagactccgacatccgcctggtacggcggctgcgccgggacatcagtgagcgcggccgggacatcgagggtgtcatcaagcagtacaacaagtttgtcaagccctccttcgaccagtacatccagcccaccatgcgcctggcagacatcgtggtccccagagggagcggcaacacggtggccatcgacctgattgtgcagcacgtgcacagccagctggaggagcgtgaactcagcgtcagggctgcgctggcctcggcacaccagtgccacccgctgccccggacgctgagcgtcctgaagagcacgccgcaggtacggggcatgcacaccatcatcagggacaaggagaccagtcgcgacgagttcatcttctactccaagagactgatgcggctgctcatcgagcacgcgctctccttcctgccctttcaggactgcgtcgtacagaccccgcaggggcaggactatgcgggcaagtgctatgcggggaagcagatcaccggtgtgtccattctgcgcgccggtgaaaccatggagcccgcgctgcgcgctgtgtgcaaagacgtgcgcatcggcaccatcctcatccagaccaaccagcttaccggggagcccgagctccactacctgaggctgcccaaggacatcagcgatgaccacgtgatcctcatggactgcaccgtgtccacgggcgcggcggccatgatggcagtgcgcgtgctcctggaccacgacgtgcctgaggacaagatctttttgctgtcgctgctcatggcagagatgggcgtgcactcagtggcctatgcatttccgcgagtgagaatcatcaccacggcggtggacaagcgggtcaatgaccttttccgcatcatcccaggcattgggaactttggcgaccgctactttgggacagacgcggtccccgatggcagtgacgaggaggaagtggcctacacgggttagctgcccagtgagccatcccgtccccaccaccctcctcctgcctcctgacccaggactgctgaatacaaagatgttaatttttaaaatgttactagtataatttattctatgcattttataaaataaataaagctttagaaaaatgaaggtgtgattggttacagcacaggagaggtgtcctggctgaggcatgcatttgtggagactcccatggggagggagggagggagctgagggccctgccttctcccctgcaggaccaagcattcccagtcttgcacttgtgccagatgaaggaaggggtagaactgggccctgcagctcctagctctgctagatggggcccctagaacccatagcttggtggccacctggcctggacctagggaggggacagggccccctggtgctctgggtctcacaagaggcaggctgttttgcccccacccacaaatttgtaccatcagggtcctccccacagttgggg

SEQ ID NO: 4650 - DNA, 3067 bp, Homo sapiens
gtcctgctgcggggggttcactctgtagccccaggcaggccggggtactgtagctttttccaggggatccaggaggggtgcaggcacacggcgcacagtggtcctccgcaggcctgcggtcctaggctggccgaatgtgccagcccacacacaggagggggcagttcacaccgagggctggcccgaggattgtcagggccacaccaggcaaagccagcgctattaatatcaggcatacacaagcccccagctgggtgatcctcttatgcctgtggccttggcctctgaggacggcagtgagtgctgttccctcagtacggtggrgrctycaagggcctcctagctgctgtgcctctgctgacatttggcaggcagcttctgccagccaagggtctcaccccagccmcccggctctgcacccactgtgctgcccacaggagtggtcctgcccatggaagggccagttcaggtggccggagctcctgagctgccctaggggactgctgtgggtctgaggtggtgatgtcccccacggctgcctgcgcctgagcccccacgcatccacccctggggccactctgctgttcaggagcacccacccgtgtcctcgaccatgagcagccccccagcttaccctggcatcaggatctcagggtgccgggcccttggagcagaaggcagcagcaatgcagagtccctggacaggctcctgccacctgtgggcactgggcgctctycccggaagcggaccaccagccagtgcaagtcagagcctcccctgctgcgtacaagcaagcgtaccatctacaccgccgggcggccgccctggtacaatgaacacggcacgcaatccaaagaggccttcgccatcggtgagagcagcgkgggggtgggacctgctgccggacgcctgcctccggctcccctccagtgcctgtggagcaggagaaggaagccgggcaaccgcaggcagcggcagcgggatgggcacctctgggacctatctgtgccggcagcctgcctgttcctcacagagggtctccactcccgccggcaggcttgggrggcggcagtgcctctgggaagaccactgtggccagaatgatcatcgaggccctggatgtgccctgggtggtcttgctgtccatggactccttctacaaggtgggcccccgcccagctcccccgaggacccctttgtcctctccctgaccctggaccccctgcaaaagtaggtccctggtctcagccccagcgtggctgctcctgggaggcctagagcccctgtccgctggcattgggtgagggccctactgtgcccacagctgctccacagcctcccccaccaggtgctgactgagcagcagcaggaacaggccgcacacaacaacttcaacttcgaccacccagatgcctttgacttcgacctcatcatttccaccctcaagaagctgaagcaggggaagagtgtcaaggtgcccatttatgacttcaccacrcacagccggaagaaggactggaaaacactgtatggtgcaaacgtcatcatctttgagggcatcatggcctttgctgacaagacactgttggagctcctggacatgaagatctttgtggacacagactccgacatccgcctggtacggcggctgcgccgggacatcagtgagcgcggccgggacatcgagggtgtcatcaagcagtacaacaagtttgtcaagccctccttcgaccagtacatccagcccaccatgcgcctggcagacatcgtggtccccagagggagcggcaacacggtggccatcgacctgattgtgcagcacgtgcacagccagctggaggagcgtgaactcagcgtcagggctgcgctggcctcggcacaccagtgccacccgctgccccggacgctgagcgtcctgaagagcacgccgcagggacaaggagaccagtcgcgacgagttcatcttctactccaagagactgatgcggctgctcatcgagcacgcgctctccttcctgccctttcaggactgcgtcgtacagaccccgcaggggcaggactatgcgggcaagtgctatgcggggaagcagatcaccggtgtgtccattctgcgcgccggtgaaaccatggagcccgcgctgcgcgctgtgtgcaaagacgtgcgcatcggcaccatcctcatccagaccaaccagcttaccggggagcccgagcctgacccctgctgcccgcagctccactacctgaggctgcccaaggacatcagcgatgaccacgtgatcctcatggactgcaccgtgtccacgggcgcggcggccatgatggcagtgcgcgtgctcctggaccacgacgtgcctgaggacaagatctttttgctgtcgctgctcatggcagagatgggcgtgcactcagtggcctatgcatttccgcgagtgagaatcatcaccacggcggtggacaagcgggtcaatgaccttttccgcatcatcccaggcattgggaactttggcgaccgctactttgggacagacgcggtccccgatggcagtgacgaggaggaagtggcctacacgggttagctgcccagtgagccatcccgtccccaccaccctcctcctgcctcctgacccaggactgctgaatacaaagatgttaatttttaaaatgttactagtataatttattctatgcattttataaaataaataaagctttagaaaaatgaaggtgtgattggttacagcacaggagaggtgtcctggctgaggcatgcatttgtggagactcccatggggagggagggagggagctgagggccctgccttctcccctgcaggaccaagcattcccagtcttgcacttgtgccagatgaaggaaggggtagaactgggccctgcagctcctagctctgctagatggggcccctagaacccatagcttggtggccacctggcctggacctagggaggggacagggccccctggtgctctgggtctcacaagaggcaggctgttttgcccccacccacaaatttgtaccatcagggtcctccccacagttgggg

SEQ ID NO: 4651 - DNA, 2177 bp, Homo sapiens
atgcgcgccgcccggccaggcccgcaaagaggcctccgagcgccatggctgcgcccccggcccgcgcggacgctgatccttcgcccacgtcgccacctacggcccgagacacaccaggccggcaggctgagaaaagcgagaccgcgtgcgaggaccgcagcaatgcagagtccctggacaggctcctgccacctgtgggcactgggcgctctycccggaagcggaccaccagccagtgcaagtcagagcctcccctgctgcgtacaagcaagcgtaccatctacaccgccgggcggccgccctggtacaatgaacacggcacgcaatccaaagaggccttcgccatcggcttgggrggcggcagtgcctctgggaagaccactgtggccagaatgatcatcgaggccctggatgtgccctgggtggtcttgctgtccatggactccttctacaaggtgctgactgagcagcagcaggaacaggccgcacacaacaacttcaacttcgaccacccagatgcctttgacttcgacctcatcatttccaccctcaagaagctgaagcaggggaagagtgtcaaggtgcccatttatgacttcaccacrcacagccggaagaaggactggaaaacactgtatggtgcaaacgtcatcatctttgagggcatcatggcctttgctgacaagacactgttggagctcctggacatgaagatctttgtggacacagactccgacatccgcctggtacggcggctgcgccgggacatcagtgagcgcggccgggacatcgagggtgtcatcaagcagtacaacaagtttgtcaagccctccttcgaccagtacatccagcccaccatgcgcctggcagacatcgtggtccccagagggagcggcaacacggtggccatcgacctgattgtgcagcacgtgcacagccagctggaggaggtgagcgggtccccagggctgcgctggcctcggcacaccagtgccacccgctgccccggacgctgagcgtcctgaagagcacgccgcaggtacggggcatgcacaccatcatcagggacaaggagaccagtcgcgacgagttcatcttctactccaagagactgatgcggctgctcatcgagcacgcgctctccttcctgccctttcaggactgcgtcgtacagaccccgcaggggcaggactatgcgggcaagtgctatgcggggaagcagatcaccggtgtgtccattctgcgcgccggtgaaaccatggagcccgcgctgcgcgctgtgtgcaaagacgtgcgcatcggcaccatcctcatccagaccaaccagcttaccggggagcccgagctccactacctgaggctgcccaaggacatcagcgatgaccacgtgatcctcatggactgcaccgtgtccacgggcgcggcggccatgatggcagtgcgcgtgctcctggaccacgacgtgcctgaggacaagatctttttgctgtcgctgctcatggcagagatgggcgtgcactcagtggcctatgcatttccgcgagtgagaatcatcaccacggcggtggacaagcgggtcaatgaccttttccgcatcatcccaggcattgggaactttggcgaccgctactttgggacagacgcggtccccgatggcagtgacgaggaggaagtggcctacacgggttagctgcccagtgagccatcccgtccccaccaccctcctcctgcctcctgacccaggactgctgaatacaaagatgttaatttttaaaatgttactagtataatttattctatgcattttataaaataaataaagctttagaaaaatgaaggtgtgattggttacagcacaggagaggtgtcctggctgaggcatgcatttgtggagactcccatggggagggagggagggagctgagggccctgccttctcccctgcaggaccaagcattcccagtcttgcacttgtgccagatgaaggaaggggtagaactgggccctgcagctcctagctctgctagatggggcccctagaacccatagcttggtggccacctggcctggacctagggaggggacagggccccctggtgctctgggtctcacaagaggcaggctgttttgcccccacccacaaatttgtaccatcagggtcctccccacagttgggg

SEQ ID NO: 4652 - DNA, 4740 bp, Homo sapiens
ttctagctgatcagtgctacctgtgctctggaaacccgctctgcgttcctgctggaggtggcctcccctccgccccagacaagaagaggccctcagccctcccccggtctcagagagccctgagaggaggcccagtccagagctcttcctccgttcccagtccacttctctagggccagtagcagacaccagccagtatgccgaggaaccagggcttctccgagcccgaatactcggccgagtactcagccgagtactccgtcagcctgccctccgaccctgaccgcggggtgggccggacccatgaaatctcggtccggaactcgggctcctgcctgtgcctgcctcgcttcatgcggctgactttcgtgccggagtccttggagaacctctaccagacctacttcaaaaggcagcgccacgagaccctgctggtgctggtggtctttgcagccctctttgactgctacgtggtggtcatgtgtgctgtggtcttctccagcgacaagctggctyccctcgccgtggctggaattggactggtgttggacatcatcctcttcgtgctctgcaaaaaggggctgctcccggaccgggtcacccgcagagtgctgccctaygtgctgtggctgctcataaccgcccagatcttctcctacctgggcctgaacttcgcgcgtgcccacgcggctagtgacacggtgggctggcaggtcttctttgtcttctcctycttcatcacgctgcccctcagcctcagccccatcgtgatcatctccgtggtctcctgtgtggtgcacacgttggtcctgggggtcaccgtggcccmgcagcagcaggaggagctcaaggggatgcagctgctgcgggagatcctggccaacgtcttcctctacctgtgcgccatcgctgtgggcatcatgtcctactacatggctgaccgcaagcaccgcaaggccttcctggaggcccgccagtcgctggaggtgaagatgaacctggaagagcagagccagcagcaggagaacctcatgctttccatcctgcccaagcacgtggctgacgagatgctgaaagacatgaagaaagacgagagccagaaggaccagcagcagttcaacaccatgtacatgtaccgtcacgagaacgtcagcatcctytttgccgacatcgtgggctttacccagctgtcttytgcctgcagtgcccaggagcttgtgaagctgctcaacgagctctttgcccgctttgacaagctggcagctaaataccaccagctgcggattaagatcctgggcgactgctactactgcatctgcggcttgccygactaccgggaggaccacgccgtctgctccatcctsatggggctggccatggtggaggccatctcgtatgtgcgggagaagaccaagactggggtggacatgcgtgtgggggtgcacacgggcaccgtgctggggggcgtcctgggccagaagcgctggcagtacgacgtgtggtcgactgatgtcactgtagccaacaagatggaggccggcggcatccctgggcgcgtgcacatctcccagagcaccatggactgcctgaaaggggagtttgatgtggagccaggcgatgggggcagccgctgtgattacctagaagagaagggtattgaaacctacctcatcattgcctccaagccagaggtgaagaaaacagccacccagaatggcctcaatggctcggccctgcccaatggagcaccagcttcctcaaagtccagctcccctgccctcattgagaccaaggagcccaacgggagtgcccacagcagtgggtccacgtcggagaagcccgaggagcaggatgcccaggccgacaacccctcattccccaacccacgccggaggctgcgcctgcaggacctggctgaccgagtggtggatgcctctgaagatgagcacgagctcaaccagctgctcaacgaggccctgcttgagcgagagtccgcccaagtagtaaagaagagaaacaccttcctcttgtccatgcggttcatggaccccgagatggaaacccgctactcggtggagaaggagaagcagagtggggctgccttcagctgctcctgcgtcgtcctgctctgcacggccctggtcgagatactcatcgacccctggctaatgacaaactatgtgaccttcatggtgggggagattctgctcctcatcctgaccatctgctccctggctgccatctttccccgggcctttcctaagaagcttgtggccttctcaacttggattgaccggacccgctgggccaggaacacctgggccatgctcgccatcttcatcctggtgatggcaaatgtcgtggacatgctcagctgtctccagtactacacgggacccagcaatgcaacggcagggatggaracggagggcagctgcctggagaaccccaagtattacaactatgtggccgtgctgtccctmatcgccaccatcatgctggtgcaggtcagccacatggtgaagctcacgctcatgctgctcgtcgcaggcgccgtggccaccatcaacctctatgcctggcgtcccgtctttgatgaatacgaccacaagcgttttcgggagcacgacttacctatggtggccttagagcagatgcaaggattcaaccctgggctcaatggcactgacaggctgcccctggtgccttccaagtactctatgacggtgatggtgttcctcatgatgctcagcttctactacttctcccgccacgtagaaaaactggcacggacacttttcttgtggaagattgaggtccacgaccagaaggaacgtgtctatgagatgcgacgctggaacgaggccttggtcaccaacatgttgcctgagcacgtggcacgccatttcctggggtccaagaagagagatgaggagctgtatagccagacgtatgatgagattggagtcatgtttgcctccctgcccaactttgctgacttctacacagaggagagcatcaacaatggtggtattgagtgtctgcgtttcctcaatgaaatcatctcrgattttgactctctcctggacaatcccaagttccgggtgatcaccaagatcaaaaccattggcagcacgtatatggcggcttcaggagtcacccccgatgtcaacaccaatggctttgccagctccaacaaggaagacaagtccgagagagagcgctggcagcacctggctgacctggccgacttcgcgctggccatgaaggatacgctcaccaacatcaacaaccagtccttcaataacttcatgctgcgcataggcatgaacaaaggcggggttctggctggggtcatcggagcccggaaaccacactacgacatctggggcaatacagtcaatgtagccagcaggatggagtccacgggggtcatgggcaacattcaggtggtagaagaaacccaagtcatcctccgagagtacggcttccgctttgtgaggcgaggccccatctttgtgaaggggaagggggagctgctgaccttcttcttgaaggggcgggataagctagccaccttccccaatggcccctctgtcacactgccccaccaggtggtggacaactcctgaatggcctcgagcctgcaacagtccaaaccggaagggagaatttattttttgaaactgaaggaagtcccgaccttcctggattgaagtgcacactcatggactttaggtttagaaacctcctcagccttcatttgttcgtggatgtgtgagctctgagggtggccctgctattcctstgygtgcctgtagtgtccccagcataggggtcttaggcatagggctgaacagtccttccagagccctcgttccaatccctgccgtccttgcccctgaggggccctgaccactgtgagcaggagggtggcagagctgggacaaagctgcctttgccgctgggctttccgggactgtggagggagcacaggcggggaagctccacttcagacagsgcttggtggggcaggacatggctcccattttgaagggaggtctccatgtggtccgagtgaggtgagacggccctcgtcctggtgttcctgatcatcttgaaaggttcttctggaactcctgtccccttagtcatgagaacagaaagtgcaatatttcctttcacctggcaggggaggggggatttatttctgaaagaaaaatatataaacagatcttctacatttatatttttaatcttctgttaaatacactttccgatattgccttgccttttgagctcttgctacagtcgcctttgctactgctttaagagaatttacaggtattgataaagaacaagactgttttattaaaagctttattcaacttgaaagtgattgtggaaattctgttaatatcacttatctgaggagtgctggtactttgctgactcatgccactggtccccaccacaggcctggaaggcaagagcttgaaggtctcatcatagctcactgtaccccggaacgcctgctgcctggccctgtctcttttattcttaaactttcttctaaagggtactccaagctggctttaatcccctgcactgttcctggagctctcccacacggaggttacttcgtggccattgcagggttaagtctgaacgtggccttgggccagtcatgactcctatctgtgcctgggcaagggagggctacaggagaacctggtcagc

SEQ ID NO: 4653 - DNA, 4902 bp, Homo sapiens
gatcccgggcctgacggcgggagatcgcgctccggccgggccccgaggcgctgccggggcggcgcggctctgcggggagcagccctcgggcgcgccgagctctcccgccccagcccgcgcggggaccgtcccggagcacgcggtggccgagttcccgcacagttctagctgatcagtgctacctgtgctctggaaacccgctctgcgttcctgctggaggtggcctcccctccgccccagacaagaagaggccctcagccctcccccggtctcagagagccctgagaggaggcccagtccagagctcttcctccgttcccagtccacttctctagggccagtagcagacaccagccagtatgccgaggaaccagggcttctccgagcccgaatactcggccgagtactcagccgagtactccgtcagcctgccctccgaccctgaccgcggggtgggccggacccatgaaatctcggtccggaactcgggctcctgcctgtgcctgcctcgcttcatgcggctgactttcgtgccggagtccttggagaacctctaccagacctacttcaaaaggcagcgccacgagaccctgctggtgctggtggtctttgcagccctctttgactgctacgtggtggtcatgtgtgctgtggtcttctccagcgacaagctggctyccctcgccgtggctggaattggactggtgttggacatcatcctcttcgtgctctgcaaaaaggggctgctcccggaccgggtcacccgcagagtgctgccctaygtgctgtggctgctcataaccgcccagatcttctcctacctgggcctgaacttcgcgcgtgcccacgcggctagtgacacggtgggctggcaggtcttctttgtcttctcctycttcatcacgctgcccctcagcctcagccccatcgtgatcatctccgtggtctcctgtgtggtgcacacgttggtcctgggggtcaccgtggcccmgcagcagcaggaggagctcaaggggatgcagctgctgcgggagatcctggccaacgtcttcctctacctgtgcgccatcgctgtgggcatcatgtcctactacatggctgaccgcaagcaccgcaaggccttcctggaggcccgccagtcgctggaggtgaagatgaacctggaagagcagagccagcagcaggagaacctcatgctttccatcctgcccaagcacgtggctgacgagatgctgaaagacatgaagaaagacgagagccagaaggaccagcagcagttcaacaccatgtacatgtaccgtcacgagaacgtcagcatcctytttgccgacatcgtgggctttacccagctgtcttytgcctgcagtgcccaggagcttgtgaagctgctcaacgagctctttgcccgctttgacaagctggcagctaaataccaccagctgcggattaagatcctgggcgactgctactactgcatctgcggcttgccygactaccgggaggaccacgccgtctgctccatcctsatggggctggccatggtggaggccatctcgtatgtgcgggagaagaccaagactggggtggacatgcgtgtgggggtgcacacgggcaccgtgctggggggcgtcctgggccagaagcgctggcagtacgacgtgtggtcgactgatgtcactgtagccaacaagatggaggccggcggcatccctgggcgcgtgcacatctcccagagcaccatggactgcctgaaaggggagtttgatgtggagccaggcgatgggggcagccgctgtgattacctagaagagaagggtattgaaacctacctcatcattgcctccaagccagaggtgaagaaaacagccacccagaatggcctcaatggctcggccctgcccaatggagcaccagcttcctcaaagtccagctcccctgccctcattgagaccaaggagcccaacgggagtgcccacagcagtgggtccacgtcggagaagcccgaggagcaggatgcccaggccgacaacccctcattccccaacccacgccggaggctgcgcctgcaggacctggctgaccgagtggtggatgcctctgaagatgagcacgagctcaaccagctgctcaacgaggccctgcttgagcgagagtccgcccaagtagtaaagaagagaaacaccttcctcttgtccatgcggttcatggaccccgagatggaaacccgctactcggtggagaaggagaagcagagtggggctgccttcagctgctcctgcgtcgtcctgctctgcacggccctggtcgagatactcatcgacccctggctaatgacaaactatgtgaccttcatggtgggggagattctgctcctcatcctgaccatctgctccctggctgccatctttccccgggcctttcctaagaagcttgtggccttctcaacttggattgaccggacccgctgggccaggaacacctgggccatgctcgccatcttcatcctggtgatggcaaatgtcgtggacatgctcagctgtctccagtactacacgggacccagcaatgcaacggcagggatggaracggagggcagctgcctggagaaccccaagtattacaactatgtggccgtgctgtccctmatcgccaccatcatgctggtgcaggtcagccacatggtgaagctcacgctcatgctgctcgtcgcaggcgccgtggccaccatcaacctctatgcctggcgtcccgtctttgatgaatacgaccacaagcgttttcgggagcacgacttacctatggtggccttagagcagatgcaaggattcaaccctgggctcaatggcactgacaggctgcccctggtgccttccaagtactctatgacggtgatggtgttcctcatgatgctcagcttctactacttctcccgccacgtagaaaaactggcacggacacttttcttgtggaagattgaggtccacgaccagaaggaacgtgtctatgagatgcgacgctggaacgaggccttggtcaccaacatgttgcctgagcacgtggcacgccatttcctggggtccaagaagagagatgaggagctgtatagccagacgtatgatgagattggagtcatgtttgcctccctgcccaactttgctgacttctacacagaggagagcatcaacaatggtggtattgagtgtctgcgtttcctcaatgaaatcatctcrgattttgactctctcctggacaatcccaagttccgggtgatcaccaagatcaaaaccattggcagcacgtatatggcggcttcaggagtcacccccgatgtcaacaccaatggctttgccagctccaacaaggaagacaagtccgagagagagcgctggcagcacctggctgacctggccgacttcgcgctggccatgaaggatacgctcaccaacatcaacaaccagtccttcaataacttcatgctgcgcataggcatgaacaaaggcggggttctggctggggtcatcggagcccggaaaccacactacgacatctggggcaatacagtcaatgtagccagcaggatggagtccacgggggtcatgggcaacattcaggtggtagaagaaacccaagtcatcctccgagagtacggcttccgctttgtgaggcgaggccccatctttgtgaaggggaagggggagctgctgaccttcttcttgaaggggcgggataagctagccaccttccccaatggcccctctgtcacactgccccaccaggtggtggacaactcctgaatggcctcgagcctgcaacagtccaaaccggaagggagaatttattttttgaaactgaaggaagtcccgaccttcctggattgaagtgcacactcatggactttaggtttagaaacctcctcagccttcatttgttcgtggatgtgtgagctctgagggtggccctgctattcctstgygtgcctgtagtgtccccagcataggggtcttaggcatagggctgaacagtccttccagagccctcgttccaatccctgccgtccttgcccctgaggggccctgaccactgtgagcaggagggtggcagagctgggacaaagctgcctttgccgctgggctttccgggactgtggagggagcacaggcggggaagctccacttcagacagsgcttggtggggcaggacatggctcccattttgaagggaggtctccatgtggtccgagtgaggtgagacggccctcgtcctggtgttcctgatcatcttgaaaggttcttctggaactcctgtccccttagtcatgagaacagaaagtgcaatatttcctttcacctggcaggggaggggggatttatttctgaaagaaaaatatataaacagatcttctacatttatatttttaatcttctgttaaatacactttccgatattgccttgccttttgagctcttgctacagtcgcctttgctactgctttaagagaatttacaggtattgataaagaacaagactgttttattaaaagctttattcaacttgaaagtgattgtggaaattctgttaatatcacttatctgaggagtgctggtactttgctgactcatgccactggtccccaccacaggcctggaaggcaagagcttgaaggtctcatcatagctcactgtaccccggaacgcctgctgcctggccctgtctcttttattcttaaactttcttctaaagggtactccaagctggctttaatcccctgcactgttcctggagctctcccacacggaggttacttcgtggccattgcagggttaagtctgaacgtggccttgggccagtcatgactcctatctgtgcctgggcaagggagggctacaggagaacctggtcagc

SEQ ID NO: 4654 - DNA, 5548 bp, Homo sapiens
gatcccgggcctgacggcgggagatcgcgctccggccgggccccgaggcgctgccggggcggcgcggctctgcggggagcagccctcgggcgcgccgagctctcccgccccagcccgcgcggggaccgtcccggagcacgcggtggccgagttcccgcacagttctagctgatcagtgctacctgtgctctggaaacccgctctgcgttcctgctggaggtggcctcccctccgccccagacaagaagaggccctcagccctcccccggtctcagagagccctgagaggaggcccagtccagagctcttcctccgttcccagtccacttctctagggccagtagcagacaccagccagtatgccgaggaaccagggcttctccgagcccgaatactcggccgagtactcagccgagtactccgtcagcctgccctccgaccctgaccgcggggtgggccggacccatgaaatctcggtccggaactcgggctcctgcctgtgcctgcctcgcttcatgcggctgactttcgtgccggagtccttggagaacctctaccagacctacttcaaaaggcagcgccacgagaccctgctggtgctggtggtctttgcagccctctttgactgctacgtggtggtcatgtgtgctgtggtcttctccagcgacaagctggctyccctcgccgtggctggaattggactggtgttggacatcatcctcttcgtgctctgcaaaaaggggctgctcccggaccgggtcacccgcagagtgctgccctaygtgctgtggctgctcataaccgcccagatcttctcctacctgggcctgaacttcgcgcgtgcccacgcggctagtgacacggtgggctggcaggtcttctttgtcttctcctycttcatcacgctgcccctcagcctcagccccatcgtgatcatctccgtggtctcctgtgtggtgcacacgttggtcctgggggtcaccgtggcccmgcagcagcaggaggagctcaaggggatgcagctgctgcgggagatcctggccaacgtcttcctctacctgtgcgccatcgctgtgggcatcatgtcctactacatggctgaccgcaagcaccgcaaggccttcctggaggcccgccagtcgctggaggtgaagatgaacctggaagagcagagccagcagcaggagaacctcatgctttccatcctgcccaagcacgtggctgacgagatgctgaaagacatgaagaaagacgagagccagaaggaccagcagcagttcaacaccatgtacatgtaccgtcacgagaacgtcagcatcctytttgccgacatcgtgggctttacccagctgtcttytgcctgcagtgcccaggagcttgtgaagctgctcaacgagctctttgcccgctttgacaagctggcagctaaataccaccagctgcggattaagatcctgggcgactgctactactgcatctgcggcttgccygactaccgggaggaccacgccgtctgctccatcctsatggggctggccatggtggaggccatctcgtatgtgcgggagaagaccaagactggggtggacatgcgtgtgggggtgcacacgggcaccgtgctggggggcgtcctgggccagaagcgctggcagtacgacgtgtggtcgactgatgtcactgtagccaacaagatggaggccggcggcatccctgggcgcgtgcacatctcccagagcaccatggactgcctgaaaggggagtttgatgtggagccaggcgatgggggcagccgctgtgattacctagaagagaagggtattgaaacctacctcatcattgcctccaagccagaggtgaagaaaacagccacccagaatggcctcaatggctcggccctgcccaatggagcaccagcttcctcaaagtccagctcccctgccctcattgagaccaaggagcccaacgggagtgcccacagcagtgggtccacgtcggagaagcccgaggagcaggatgcccaggccgacaacccctcattccccaacccacgccggaggctgcgcctgcaggacctggctgaccgagtggtggatgcctctgaagatgagcacgagctcaaccagctgctcaacgaggccctgcttgagcgagagtccgcccaagtagtaaagaagagaaacaccttcctcttgtccatgcggttcatggaccccgagatggaaacccgctactcggtggagaaggagaagcagagtggggctgccttcagctgctcctgcgtcgtcctgctctgcacggccctggtcgagatactcatcgacccctggctaatgacaaactatgtgaccttcatggtgggggagattctgctcctcatcctgaccatctgctccctggctgccatctttccccgggcctttcctaagaagcttgtggccttctcaacttggattgaccggacccgctgggccaggaacacctgggccatgctcgccatcttcatcctggtgatggcaaatgtcgtggacatgctcagctgtctccagtactacacgggacccagcaatgcaacggcagggatggaracggagggcagctgcctggagaaccccaagtattacaactatgtggccgtgctgtccctmatcgccaccatcatgctggtgcaggtcagccacatggtgaagctcacgctcatgctgctcgtcgcaggcgccgtggccaccatcaacctctatgcctggcgtcccgtctttgatgaatacgaccacaagcgttttcgggagcacgacttacctatggtggccttagagcagatgcaaggattcaaccctgggctcaatggcactgacaggctgcccctggtgccttccaagtactctatgacggtgatggtgttcctcatgatgctcagcttctactacttctcccgccacgtagaaaaactggcacggacacttttcttgtggaagattgaggtccacgaccagaaggaacgtgtctatgagatgcgacgctggaacgaggccttggtcaccaacatgttgcctgagcacgtggcacgccatttcctggggtccaagaagagagatgaggagctgtatagccagacgtatgatgagattggagtcatgtttgcctccctgcccaactttgctgacttctacacagaggagagcatcaacaatggtggtattgagtgtctgcgtttcctcaatgaaatcatctcrgattttgactctgtgagtgcccatcccaccctgcactctggccatgaagcyggcccattccacatcacatcctacaataggctgcagaggccagagaaactggcttcattttcccagataagccccttccgcaatacatggacttctgcagccacctggaactgctgggctggggaaggggaggtgaggtgggagcccgggaaatcacccacagggtcacaggatraggataaggactggccaagcaacatctcgagacctctctgtcctgggactgtctcctcaaattcagagccggtcagcattgactgggtgacctgtataccagggagaatgcttttacacacgcgcggagcccccctaggagactgccgattttatgtcagtgttgaggttgtggaaacaggcccagaaagttaggaagttctcccaggatcatgtggcagataagcggtagactaagtaacaactttgataggaaagtgtctcttgggtttagtggggtccttgtaaacaggtacatctgtcactgggttgggtcattcctctcccttgactgctgacaattctttcctgaatcctggcctcagctcctggacaatcccaagttccgggtgatcaccaagatcaaaaccattggcagcacgtatatggcggcttcaggagtcacccccgatgtcaacaccaatggctttgccagctccaacaaggaagacaagtccgagagagagcgctggcagcacctggctgacctggccgacttcgcgctggccatgaaggatacgctcaccaacatcaacaaccagtccttcaataacttcatgctgcgcataggcatgaacaaaggcggggttctggctggggtcatcggagcccggaaaccacactacgacatctggggcaatacagtcaatgtagccagcaggatggagtccacgggggtcatgggcaacattcagtggcgtctggcagaaaagctccacgaaaggggcaaagggacagaagagcaggcagtggcagtttccaggtggtagaagaaacccaagtcatcctccgagagtacggcttccgctttgtgaggcgaggccccatctttgtgaaggggaagggggagctgctgaccttcttcttgaaggggcgggataagctagccaccttccccaatggcccctctgtcacactgccccaccaggtggtggacaactcctgaatggcctcgagcctgcaacagtccaaaccggaagggagaatttattttttgaaactgaaggaagtcccgaccttcctggattgaagtgcacactcatggactttaggtttagaaacctcctcagccttcatttgttcgtggatgtgtgagctctgagggtggccctgctattcctstgygtgcctgtagtgtccccagcataggggtcttaggcatagggctgaacagtccttccagagccctcgttccaatccctgccgtccttgcccctgaggggccctgaccactgtgagcaggagggtggcagagctgggacaaagctgcctttgccgctgggctttccgggactgtggagggagcacaggcggggaagctccacttcagacagsgcttggtggggcaggacatggctcccattttgaagggaggtctccatgtggtccgagtgaggtgagacggccctcgtcctggtgttcctgatcatcttgaaaggttcttctggaactcctgtccccttagtcatgagaacagaaagtgcaatatttcctttcacctggcaggggaggggggatttatttctgaaagaaaaatatataaacagatcttctacatttatatttttaatcttctgttaaatacactttccgatattgccttgccttttgagctcttgctacagtcgcctttgctactgctttaagagaatttacaggtattgataaagaacaagactgttttattaaaagctttattcaacttgaaagtgattgtggaaattctgttaatatcacttatctgaggagtgctggtactttgctgactcatgccactggtccccaccacaggcctggaaggcaagagcttgaaggtctcatcatagctcactgtaccccggaacgcctgctgcctggccctgtctcttttattcttaaactttcttctaaagggtactccaagctggctttaatcccctgcactgttcctggagctctcccacacggaggttacttcgtggccattgcagggttaagtctgaacgtggccttgggccagtcatgactcctatctgtgcctgggcaagggagggctacaggagaacctggtcagc

SEQ ID NO: 4655 - DNA, 4970 bp, Homo sapiens
gatcccgggcctgacggcgggagatcgcgctccggccgggccccgaggcgctgccggggcggcgcggctctgcggggagcagccctcgggcgcgccgagctctcccgccccagcccgcgcggggaccgtcccggagcacgcggtggccgagttcccgcacagttctagctgatcagtgctacctgtgctctggaaacccgctctgcgttcctgctggaggtggcctcccctccgccccagacaagaagaggccctcagccctcccccggtctcagagagccctgagaggaggcccagtccagagctcttcctccgttcccagtccacttctctagggccagtagcagacaccagccagtatgccgaggaaccagggcttctccgagcccgaatactcggccgagtactcagccgagtactccgtcagcctgccctccgaccctgaccgcggggtgggccggacccatgaaatctcggtccggaactcgggctcctgcctgtgcctgcctcgcttcatgcggctgactttcgtgccggagtccttggagaacctctaccagacctacttcaaaaggcagcgccacgagaccctgctggtgctggtggtctttgcagccctctttgactgctacgtggtggtcatgtgtgctgtggtcttctccagcgacaagctggctyccctcgccgtggctggaattggactggtgttggacatcatcctcttcgtgctctgcaaaaaggggctgctcccggaccgggtcacccgcagagtgctgccctaygtgctgtggctgctcataaccgcccagatcttctcctacctgggcctgaacttcgcgcgtgcccacgcggctagtgacacggtgggctggcaggtcttctttgtcttctcctycttcatcacgctgcccctcagcctcagccccatcgtgatcatctccgtggtctcctgtgtggtgcacacgttggtcctgggggtcaccgtggcccmgcagcagcaggaggagctcaaggggatgcagctgctgcgggagatcctggccaacgtcttcctctacctgtgcgccatcgctgtgggcatcatgtcctactacatggctgaccgcaagcaccgcaaggccttcctggaggcccgccagtcgctggaggtgaagatgaacctggaagagcagagccagcagcaggagaacctcatgctttccatcctgcccaagcacgtggctgacgagatgctgaaagacatgaagaaagacgagagccagaaggaccagcagcagttcaacaccatgtacatgtaccgtcacgagaacgtcagcatcctytttgccgacatcgtgggctttacccagctgtcttytgcctgcagtgcccaggagcttgtgaagctgctcaacgagctctttgcccgctttgacaagctggcagctaaataccaccagctgcggattaagatcctgggcgactgctactactgcatctgcggcttgccygactaccgggaggaccacgccgtctgctccatcctsatggggctggccatggtggaggccatctcgtatgtgcgggagaagaccaagactggggtggacatgcgtgtgggggtgcacacgggcaccgtgctggggggcgtcctgggccagaagcgctggcagtacgacgtgtggtcgactgatgtcactgtagccaacaagatggaggccggcggcatccctgggcgcgtgcacatctcccagagcaccatggactgcctgaaaggggagtttgatgtggagccaggcgatgggggcagccgctgtgattacctagaagagaagggtattgaaacctacctcatcattgcctccaagccagaggtgaagaaaacagccacccagaatggcctcaatggctcggccctgcccaatggagcaccagcttcctcaaagtccagctcccctgccctcattgagaccaaggagcccaacgggagtgcccacagcagtgggtccacgtcggagaagcccgaggagcaggatgcccaggccgacaacccctcattccccaacccacgccggaggctgcgcctgcaggacctggctgaccgagtggtggatgcctctgaagatgagcacgagctcaaccagctgctcaacgaggccctgcttgagcgagagtccgcccaagtagtaaagaagagaaacaccttcctcttgtccatgcggttcatggaccccgagatggaaacccgctactcggtggagaaggagaagcagagtggggctgccttcagctgctcctgcgtcgtcctgctctgcacggccctggtcgagatactcatcgacccctggctaatgacaaactatgtgaccttcatggtgggggagattctgctcctcatcctgaccatctgctccctggctgccatctttccccgggcctttcctaagaagcttgtggccttctcaacttggattgaccggacccgctgggccaggaacacctgggccatgctcgccatcttcatcctggtgatggcaaatgtcgtggacatgctcagctgtctccagtactacacgggacccagcaatgcaacggcagggatggaracggagggcagctgcctggagaaccccaagtattacaactatgtggccgtgctgtccctmatcgccaccatcatgctggtgcaggtcagccacatggtgaagctcacgctcatgctgctcgtcgcaggcgccgtggccaccatcaacctctatgcctggcgtcccgtctttgatgaatacgaccacaagcgttttcgggagcacgacttacctatggtggccttagagcagatgcaaggattcaaccctgggctcaatggcactgacaggctgcccctggtgccttccaagtactctatgacggtgatggtgttcctcatgatgctcagcttctactacttctcccgccacgtagaaaaactggcacggacacttttcttgtggaagattgaggtccacgaccagaaggaacgtgtctatgagatgcgacgctggaacgaggccttggtcaccaacatgttgcctgagcacgtggcacgccatttcctggggtccaagaagagagatgaggagctgtatagccagacgtatgatgagattggagtcatgtttgcctccctgcccaactttgctgacttctacacagaggagagcatcaacaatggtggtattgagtgtctgcgtttcctcaatgaaatcatctcrgattttgactctctcctggacaatcccaagttccgggtgatcaccaagatcaaaaccattggcagcacgtatatggcggcttcaggagtcacccccgatgtcaacaccaatggctttgccagctccaacaaggaagacaagtccgagagagagcgctggcagcacctggctgacctggccgacttcgcgctggccatgaaggatacgctcaccaacatcaacaaccagtccttcaataacttcatgctgcgcataggcatgaacaaaggcggggttctggctggggtcatcggagcccggaaaccacactacgacatctggggcaatacagtcaatgtagccagcaggatggagtccacgggggtcatgggcaacattcagtggcgtctggcagaaaagctccacgaaaggggcaaagggacagaagagcaggcagtggcagtttccaggtggtagaagaaacccaagtcatcctccgagagtacggcttccgctttgtgaggcgaggccccatctttgtgaaggggaagggggagctgctgaccttcttcttgaaggggcgggataagctagccaccttccccaatggcccctctgtcacactgccccaccaggtggtggacaactcctgaatggcctcgagcctgcaacagtccaaaccggaagggagaatttattttttgaaactgaaggaagtcccgaccttcctggattgaagtgcacactcatggactttaggtttagaaacctcctcagccttcatttgttcgtggatgtgtgagctctgagggtggccctgctattcctstgygtgcctgtagtgtccccagcataggggtcttaggcatagggctgaacagtccttccagagccctcgttccaatccctgccgtccttgcccctgaggggccctgaccactgtgagcaggagggtggcagagctgggacaaagctgcctttgccgctgggctttccgggactgtggagggagcacaggcggggaagctccacttcagacagsgcttggtggggcaggacatggctcccattttgaagggaggtctccatgtggtccgagtgaggtgagacggccctcgtcctggtgttcctgatcatcttgaaaggttcttctggaactcctgtccccttagtcatgagaacagaaagtgcaatatttcctttcacctggcaggggaggggggatttatttctgaaagaaaaatatataaacagatcttctacatttatatttttaatcttctgttaaatacactttccgatattgccttgccttttgagctcttgctacagtcgcctttgctactgctttaagagaatttacaggtattgataaagaacaagactgttttattaaaagctttattcaacttgaaagtgattgtggaaattctgttaatatcacttatctgaggagtgctggtactttgctgactcatgccactggtccccaccacaggcctggaaggcaagagcttgaaggtctcatcatagctcactgtaccccggaacgcctgctgcctggccctgtctcttttattcttaaactttcttctaaagggtactccaagctggctttaatcccctgcactgttcctggagctctcccacacggaggttacttcgtggccattgcagggttaagtctgaacgtggccttgggccagtcatgactcctatctgtgcctgggcaagggagggctacaggagaacctggtcagc

SEQ ID NO: 4656 - DNA, 4114 bp, Homo sapiens
gtggagccatcgaagcccccacccacaggctgacagaggcaccgttcaccagagggctcaacaccgggatctatgtttaagttttaactctcgcctccaaagaccacgataattccttccccaaagcccagcagccccccagccccgcgcagccccagcctgcctcccggcgcccagatgcccgccatgccctccagcggccccggggacaccagcagctctgctgcggagcgggaggaggaccgaaaggacggagaggagcaggaggagccgcgtggcaaggaggagcgccaagagcccagcaccacggcacggaaggtggggcggcctgggaggaagcgcaagcaccccccggtggaaagcggtgacacgccaaaggaccctgcggtgatctccaagtccccatccatggcccaggactcaggcgcctcagagctattacccaatggggacttggagaagcggagtgagccccagccagaggaggggagccctgctggggggcagaagggcggggccccagcagagggagagggtgcagctgagaccctgcctgaagcctcaagagcagtggaaaatggctgctgcacccccaaggagggccgaggagcccctgcagaagcgggcaaagaacagaaggagaccaacatcgaatccatgaaaatggagggctcccggggccggctgcggggtggcttgggctgggagtccagcctccgtcagcggcccatgccgaggctcaccttccaggcgggggacccctactacatcagcaagcgcaagcgggacgagtggctggcacgctggaaaagggaggctgagaagaaagccaaggtcattgcaggaatgaatgctgtggaagaaaaccaggggcccggggagtctcagaaggtggaggaggccagccctcctgctgtgcagcagcccactgaccccgcatcccccactgtggctaccacgcctgagcccgtggggtccgatgctggggacaagaatgccaccaaagcargcgatgacgagccagagtacgaggacggccggggctttggcattggggagctggtgtgggggaaactgcggggcttctcctggtggccaggccgcattgtgtcttggtggatgacgggccggagccgagcagctgaaggcacccgctgggtcatgtggttcggagacggcaaattctcagtggtgtgtgttgagaagctgatgccgctgagctcgttttgcagtgcgttccaccaggccacgtacaacaagcagcccatgtaccgcaaagccatctacgaggtcctgcaggtggccagcagccgcgcggggaagctgttcccggtgtgccacgacagcgatgagagtgacactgccaaggccgtggaggtgcagaacaagcccatgattgaatgggccctggggggcttccagccttctggccctaagggcctrgagccaccagaagaagagaagaatccctacaaagaagtgtacacggacatgtgggtggaacctgaggcagctgcctacgcaccacctccaccagccaaaaagccccggaagagcacagcggagaagcccaaggtcaaggagattattgatgagcgcacaagagagcggctggtgtacgaggtgcggcagaagtgccggaacattgaggacatctgcatctcctgtgggagcctcaatgttaccctggaacaccccctcttcgttggaggaatgtgccaaaactgcaagaactgctttctggagtgtgcgtaccagtacgacgacgacggctaccagtcctactgcaccatctgctgtgggggccgtgaggtgctcatgtgcggaaacaacaactgctgcaggtgcttttgcgtggagtgtgtggacctcttggtggggccgggggctgcccaggcagccattaaggaagacccctggaactgctacatgtgcgggcacaagggtacctacgggctgctgcggcggcgagaggactggccctcccggctccagatgttcttcgctaataaccacgaccaggaatttgaccctccaaaggtttacccacctgtcccagctgagaagaggaagcccatccgggtgctgtctctctttgatggaatcgctacagggctcctggtgctgaaggacttgggcattcaggtggaccgctacattgcctcggaggtgtgtgaggactccatcacggtgggcatggtgcggcaccaggggaagatcatgtacgtcggggacgtccgcagcgtcacacagaagcatatccaggagtggggcccattcgatctggtgattgggggcagtccctgcaatgacctctccatcgtcaaccctgctcgcaagggcctctacgagggcactggccggctcttctttgagttctaccgcctcctgcatgatgcgcggcccaaggagggagatgatcsccccttcttctggctctttgagaatgtggtggccatgggcgttagtgacaagagggacatctcgcgatttctcgagtccaaccctgtgatgattgatgccaaagaagtgtcagctgcacacagggcccgctacttctggggtaaccttcccggtatgaacaggccgttggcatccactgtgaatgataagctggagctgcaggagtgtctggagcatggcaggatagccaagttcagcaaagtgaggaccattactacgaggtcaaactccataaagcagggcaaagaccagcattttcctgtcttcatgaatgagaaagaggacatcttatggtgcactgaaatggaaagggtatttggtttcccagtccactatactgacgtctccaacatgagccgcttggcgaggcagagactgctgggccggtcatggagcgtgccagtcatccgccacctcttcgctccgctgaaggagtattttgcgtgtgtgtaagggacatgggggcaaactgaggtagcgacacaaagttaaacaaacaaacaaaaaacacaaaacataataaaacaccaagaacatgaggatggagagaagtatcagcacccagaagagaaaaaggaatttaaaacaaaaaccacagaggcggaaataccggagggctttgccttgcgaaaagggttggacatcatctcctgatttttcaatgttattcttcagtcctatttaaaaacaaaaccaagctcccttcccttcctcccccttcccttttttttcggtcagaccttttattttctactcttttcagaggggttttctgtttgtttgggttttgtttcttgctgtgactgaaacaagaaggttattgcagcaaaaatcagtaacaaaaaatagtaacaataccttgcagaggaaaggtgggagagaggaaaaaaggaaattctatagaaatctatatattgggttgtttttttttttgttttttgttttttttttttgggtttttttttttactatatatcttttttttgttgtctctagcctgatcagataggagcacaagcaggggacggaaagagagagacactcaggcggcagcattccctcccagccactgagctgtcgtgccagcaccattcctggtcacgcaaaacagaacccagttagcagcagggagacgagaacaccacacaagacatttttctacagtatttcaggtgcctaccacacaggaaaccttgaagaaaatcagtttctagaagccgctgttacctcttgtttacagtttatatatatatgatagatatgagatatatatataaaaggtactgttaactactgtacaacccgacttcataatggtgctttcaaacagcgagatgagtaaaaacatcagcttccacgttgccttctgcgcaaagggtttcaccaaggatggagaaagggagacagcttgcagatggcgcgttctcayggtgggctcttccccttggtttgtaacgaagtgaaggaggagaacttgggagccaggttctccctgccaaaaagggggctagatgaggtggtcgggcccgtggacagctgagagtgggattcatccagactcatgcaataaccctttgattgttttctaaaaggagactccctcggcaagatggcagagggtacggagtcttcaggcccagtttctcacttt

SEQ ID NO: 4657 - DNA, 4275 bp, Homo sapiens
gcagtgggctctggcggaggtcgggagaactgcagggcgaaggccgccgggggctccgcgggctgcggggggaggcacttgacaccggcccggggagaggaggggccgctgtccctgcggccagtgctggatgcggggacccagcgcagaagcagcgccaggtggagccatcgaagcccccacccacaggctgacagaggcaccgttcaccagagggctcaacaccgggatctatgtttaagttttaactctcgcctccaaagaccacgataattccttccccaaagcccagcagccccccagccccgcgcagccccagcctgcctcccggcgcccagatgcccgccatgccctccagcggccccggggacaccagcagctctgctgcggagcgggaggaggaccgaaaggacggagaggagcaggaggagccgcgtggcaaggaggagcgccaagagcccagcaccacggcacggaaggtggggcggcctgggaggaagcgcaagcaccccccggtggaaagcggtgacacgccaaaggaccctgcggtgatctccaagtccccatccatggcccaggactcaggcgcctcagagctattacccaatggggacttggagaagcggagtgagccccagccagaggaggggagccctgctggggggcagaagggcggggccccagcagagggagagggtgcagctgagaccctgcctgaagcctcaagagcagtggaaaatggctgctgcacccccaaggagggccgaggagcccctgcagaagcgggcaaagaacagaaggagaccaacatcgaatccatgaaaatggagggctcccggggccggctgcggggtggcttgggctgggagtccagcctccgtcagcggcccatgccgaggctcaccttccaggcgggggacccctactacatcagcaagcgcaagcgggacgagtggctggcacgctggaaaagggaggctgagaagaaagccaaggtcattgcaggaatgaatgctgtggaagaaaaccaggggcccggggagtctcagaaggtggaggaggccagccctcctgctgtgcagcagcccactgaccccgcatcccccactgtggctaccacgcctgagcccgtggggtccgatgctggggacaagaatgccaccaaagcargcgatgacgagccagagtacgaggacggccggggctttggcattggggagctggtgtgggggaaactgcggggcttctcctggtggccaggccgcattgtgtcttggtggatgacgggccggagccgagcagctgaaggcacccgctgggtcatgtggttcggagacggcaaattctcagtggtgtgtgttgagaagctgatgccgctgagctcgttttgcagtgcgttccaccaggccacgtacaacaagcagcccatgtaccgcaaagccatctacgaggtcctgcaggtggccagcagccgcgcggggaagctgttcccggtgtgccacgacagcgatgagagtgacactgccaaggccgtggaggtgcagaacaagcccatgattgaatgggccctggggggcttccagccttctggccctaagggcctrgagccaccagaagaagagaagaatccctacaaagaagtgtacacggacatgtgggtggaacctgaggcagctgcctacgcaccacctccaccagccaaaaagccccggaagagcacagcggagaagcccaaggtcaaggagattattgatgagcgcacaagagagcggctggtgtacgaggtgcggcagaagtgccggaacattgaggacatctgcatctcctgtgggagcctcaatgttaccctggaacaccccctcttcgttggaggaatgtgccaaaactgcaagaactgctttctggagtgtgcgtaccagtacgacgacgacggctaccagtcctactgcaccatctgctgtgggggccgtgaggtgctcatgtgcggaaacaacaactgctgcaggtgcttttgcgtggagtgtgtggacctcttggtggggccgggggctgcccaggcagccattaaggaagacccctggaactgctacatgtgcgggcacaagggtacctacgggctgctgcggcggcgagaggactggccctcccggctccagatgttcttcgctaataaccacgaccaggaatttgaccctccaaaggtttacccacctgtcccagctgagaagaggaagcccatccgggtgctgtctctctttgatggaatcgctacagggctcctggtgctgaaggacttgggcattcaggtggaccgctacattgcctcggaggtgtgtgaggactccatcacggtgggcatggtgcggcaccaggggaagatcatgtacgtcggggacgtccgcagcgtcacacagaagcatatccaggagtggggcccattcgatctggtgattgggggcagtccctgcaatgacctctccatcgtcaaccctgctcgcaagggcctctacgagggcactggccggctcttctttgagttctaccgcctcctgcatgatgcgcggcccaaggagggagatgatcsccccttcttctggctctttgagaatgtggtggccatgggcgttagtgacaagagggacatctcgcgatttctcgagtccaaccctgtgatgattgatgccaaagaagtgtcagctgcacacagggcccgctacttctggggtaaccttcccggtatgaacaggccgttggcatccactgtgaatgataagctggagctgcaggagtgtctggagcatggcaggatagccaagttcagcaaagtgaggaccattactacgaggtcaaactccataaagcagggcaaagaccagcattttcctgtcttcatgaatgagaaagaggacatcttatggtgcactgaaatggaaagggtatttggtttcccagtccactatactgacgtctccaacatgagccgcttggcgaggcagagactgctgggccggtcatggagcgtgccagtcatccgccacctcttcgctccgctgaaggagtattttgcgtgtgtgtaagggacatgggggcaaactgaggtagcgacacaaagttaaacaaacaaacaaaaaacacaaaacataataaaacaccaagaacatgaggatggagagaagtatcagcacccagaagagaaaaaggaatttaaaacaaaaaccacagaggcggaaataccggagggctttgccttgcgaaaagggttggacatcatctcctgatttttcaatgttattcttcagtcctatttaaaaacaaaaccaagctcccttcccttcctcccccttcccttttttttcggtcagaccttttattttctactcttttcagaggggttttctgtttgtttgggttttgtttcttgctgtgactgaaacaagaaggttattgcagcaaaaatcagtaacaaaaaatagtaacaataccttgcagaggaaaggtgggagagaggaaaaaaggaaattctatagaaatctatatattgggttgtttttttttttgttttttgttttttttttttgggtttttttttttactatatatcttttttttgttgtctctagcctgatcagataggagcacaagcaggggacggaaagagagagacactcaggcggcagcattccctcccagccactgagctgtcgtgccagcaccattcctggtcacgcaaaacagaacccagttagcagcagggagacgagaacaccacacaagacatttttctacagtatttcaggtgcctaccacacaggaaaccttgaagaaaatcagtttctagaagccgctgttacctcttgtttacagtttatatatatatgatagatatgagatatatatataaaaggtactgttaactactgtacaacccgacttcataatggtgctttcaaacagcgagatgagtaaaaacatcagcttccacgttgccttctgcgcaaagggtttcaccaaggatggagaaagggagacagcttgcagatggcgcgttctcayggtgggctcttccccttggtttgtaacgaagtgaaggaggagaacttgggagccaggttctccctgccaaaaagggggctagatgaggtggtcgggcccgtggacagctgagagtgggattcatccagactcatgcaataaccctttgattgttttctaaaaggagactccctcggcaagatggcagagggtacggagtcttcaggcccagtttctcacttt

SEQ ID NO: 4658 - DNA, 4281 bp, Homo sapiens
gcagtgggctctggcggaggtcgggagaactgcagggcgaaggccgccgggggctccgcgggctgcggggggaggcacttgacaccggcccggggagaggaggggccgctgtccctgcggccagtgctggatgcggggacccagcgcagaagcagcgccaggtggagccatcgaagcccccacccacaggctgacagaggcaccgttcaccagagggctcaacaccgggatctatgtttaagttttaactctcgcctccaaagaccacgataattccttccccaaagcccagcagccccccagccccgcgcagccccagcctgcctcccggcgcccagatgcccgccatgccctccagcggccccggggacaccagcagctctgctgcggagcgggaggaggaccgaaaggacggagaggagcaggaggagccgcgtggcaaggaggagcgccaagagcccagcaccacggcacggaaggtggggcggcctgggaggaagcgcaagcaccccccggtggaaagcggtgacacgccaaaggaccctgcggtgatctccaagtccccatccatggcccaggactcaggcgcctcagagctattacccaatggggacttggagaagcggagtgagccccagccagaggaggggagccctgctggggggcagaagggcggggccccagcagagggagagggtgcagctgagaccctgcctgaagcctcaagagcagtggaaaatggctgctgcacccccaaggagggccgaggagcccctgcagaagcgggcaaagaacagaaggagaccaacatcgaatccatgaaaatggaggcaagtggctcccggggccggctgcggggtggcttgggctgggagtccagcctccgtcagcggcccatgccgaggctcaccttccaggcgggggacccctactacatcagcaagcgcaagcgggacgagtggctggcacgctggaaaagggaggctgagaagaaagccaaggtcattgcaggaatgaatgctgtggaagaaaaccaggggcccggggagtctcagaaggtggaggaggccagccctcctgctgtgcagcagcccactgaccccgcatcccccactgtggctaccacgcctgagcccgtggggtccgatgctggggacaagaatgccaccaaagcargcgatgacgagccagagtacgaggacggccggggctttggcattggggagctggtgtgggggaaactgcggggcttctcctggtggccaggccgcattgtgtcttggtggatgacgggccggagccgagcagctgaaggcacccgctgggtcatgtggttcggagacggcaaattctcagtggtgtgtgttgagaagctgatgccgctgagctcgttttgcagtgcgttccaccaggccacgtacaacaagcagcccatgtaccgcaaagccatctacgaggtcctgcaggtggccagcagccgcgcggggaagctgttcccggtgtgccacgacagcgatgagagtgacactgccaaggccgtggaggtgcagaacaagcccatgattgaatgggccctggggggcttccagccttctggccctaagggcctrgagccaccagaagaagagaagaatccctacaaagaagtgtacacggacatgtgggtggaacctgaggcagctgcctacgcaccacctccaccagccaaaaagccccggaagagcacagcggagaagcccaaggtcaaggagattattgatgagcgcacaagagagcggctggtgtacgaggtgcggcagaagtgccggaacattgaggacatctgcatctcctgtgggagcctcaatgttaccctggaacaccccctcttcgttggaggaatgtgccaaaactgcaagaactgctttctggagtgtgcgtaccagtacgacgacgacggctaccagtcctactgcaccatctgctgtgggggccgtgaggtgctcatgtgcggaaacaacaactgctgcaggtgcttttgcgtggagtgtgtggacctcttggtggggccgggggctgcccaggcagccattaaggaagacccctggaactgctacatgtgcgggcacaagggtacctacgggctgctgcggcggcgagaggactggccctcccggctccagatgttcttcgctaataaccacgaccaggaatttgaccctccaaaggtttacccacctgtcccagctgagaagaggaagcccatccgggtgctgtctctctttgatggaatcgctacagggctcctggtgctgaaggacttgggcattcaggtggaccgctacattgcctcggaggtgtgtgaggactccatcacggtgggcatggtgcggcaccaggggaagatcatgtacgtcggggacgtccgcagcgtcacacagaagcatatccaggagtggggcccattcgatctggtgattgggggcagtccctgcaatgacctctccatcgtcaaccctgctcgcaagggcctctacgagggcactggccggctcttctttgagttctaccgcctcctgcatgatgcgcggcccaaggagggagatgatcsccccttcttctggctctttgagaatgtggtggccatgggcgttagtgacaagagggacatctcgcgatttctcgagtccaaccctgtgatgattgatgccaaagaagtgtcagctgcacacagggcccgctacttctggggtaaccttcccggtatgaacaggccgttggcatccactgtgaatgataagctggagctgcaggagtgtctggagcatggcaggatagccaagttcagcaaagtgaggaccattactacgaggtcaaactccataaagcagggcaaagaccagcattttcctgtcttcatgaatgagaaagaggacatcttatggtgcactgaaatggaaagggtatttggtttcccagtccactatactgacgtctccaacatgagccgcttggcgaggcagagactgctgggccggtcatggagcgtgccagtcatccgccacctcttcgctccgctgaaggagtattttgcgtgtgtgtaagggacatgggggcaaactgaggtagcgacacaaagttaaacaaacaaacaaaaaacacaaaacataataaaacaccaagaacatgaggatggagagaagtatcagcacccagaagagaaaaaggaatttaaaacaaaaaccacagaggcggaaataccggagggctttgccttgcgaaaagggttggacatcatctcctgatttttcaatgttattcttcagtcctatttaaaaacaaaaccaagctcccttcccttcctcccccttcccttttttttcggtcagaccttttattttctactcttttcagaggggttttctgtttgtttgggttttgtttcttgctgtgactgaaacaagaaggttattgcagcaaaaatcagtaacaaaaaatagtaacaataccttgcagaggaaaggtgggagagaggaaaaaaggaaattctatagaaatctatatattgggttgtttttttttttgttttttgttttttttttttgggtttttttttttactatatatcttttttttgttgtctctagcctgatcagataggagcacaagcaggggacggaaagagagagacactcaggcggcagcattccctcccagccactgagctgtcgtgccagcaccattcctggtcacgcaaaacagaacccagttagcagcagggagacgagaacaccacacaagacatttttctacagtatttcaggtgcctaccacacaggaaaccttgaagaaaatcagtttctagaagccgctgttacctcttgtttacagtttatatatatatgatagatatgagatatatatataaaaggtactgttaactactgtacaacccgacttcataatggtgctttcaaacagcgagatgagtaaaaacatcagcttccacgttgccttctgcgcaaagggtttcaccaaggatggagaaagggagacagcttgcagatggcgcgttctcayggtgggctcttccccttggtttgtaacgaagtgaaggaggagaacttgggagccaggttctccctgccaaaaagggggctagatgaggtggtcgggcccgtggacagctgagagtgggattcatccagactcatgcaataaccctttgattgttttctaaaaggagactccctcggcaagatggcagagggtacggagtcttcaggcccagtttctcacttt

SEQ ID NO: 4659 - DNA, 2220 bp, Homo sapiens
cgcggcggggcgggaccaatcgctccccgagcygctcctgacccacctaccccagctctcgcgccgcgtgcagaggtgctcaagcctcctcgcggtccgcagtcagtgccgccgcgcccrgcctcccgcacgccccgcaggtagcgcccccgcccgcggcccagagtgcgctcgcgccggcaccagctcccggataaacggcgcgccgcgmggagatgacagccgaggagatgaaggcgaccgagagcggggcgcagtcggcgccgctgcccatggagggagtggacatcagccccaaacaggacgaaggcgtgctgaaggtcatcaagagagagggcacaggtwcagagatgcccatgattggggaccgagtctttgtccactacactggctggytattagatggcacaaagtttgactccagtctggatcgcaaggacaaattctcctttgacctgggaaaaggggaggtcatcaaggcttgggacattgccatagccaccatgaaggtgggggaggtgtgccacatcacctgcaaaccagaatatgcctacggttcagcaggcagtcctccaaagattccccccaatgccacgcttgtatttgaggtggagttgtttgagtttaagggagaagatctgacggaagaggaagatggcggaatcattcgcagaatacagactcrcggtgaaggctatgctaagcccaatgagggtgctatcgtggaggttgcactggaagggtactacaaggacaagctctttgaccagcgggagctccgctttgagattggcgagggggagaamctggatctgccttatggtctggagagggccattcagcgcatggagaaaggagaacattccatcgtgtacctcaagcccagctatgcttttggcagtgttgggaaggaaaagttccaaatcccaccaaatgctgagctgaaatatgaattacacctcaagagttttgaaaaggccaaggagtcttgggagatgaattcagaagagaagctggaacagagcaccatagtgaaagagcggggcactgtgtacttcaaggaaggtaaatacaagcaagctttactacagtataagaagatcgtgtcttggctggaatatgagtctagtttttccaatgaggaagcacagaaagcacaggcccttcgactggcctctcacctcaacctggccatgtgtcatctgaaactacaggccttctctgctgccattgaaagctgtaacaaggccctagaactggacagcaacaacgagaagggcctcttccgccggggagaggcccacctggccgtgaatgactttgaactggcacgggctgatttccagaaggtcctgcagctctaccccaacaacaaagccgccaagacccagctggctgtgtgccagcagcggatccgaaggcagcttgccygggagaagaagctctatgccaatatgtttgagaggctggctgaggaggagaacaaggccaaggcagaggcttcctcaggagaccatcccmctgacacagagatgaaggaggagcagaagagcaacmcggcagggagccagtctcasgtggagacagaagcatagcccctctccaccagccctactcctgcggctgcctgccccccagtytccccactccmccctgttagttttgtaaaaactgaagaattttgagtgaattagacctttatttttctatctggttggatggtggctttaggggaagggggaaaggtgtaggctgggggattgaggtggggaatcattttagctggtgtcagcccctcttcccttcctccattgcacatgaacatatgtccatccatatatattcatcagaatgttaatttattttgctccctctgttaggtccattttctaagggtagaagaggcaagtggtagggatgaggtctgataagaacccagggtggagagggagactcctgggcagccgttttcctcatcctttccctctcccagtccatttccaaatgtggcckccatgtgggtgctagggacatgggaaaaaccactgctatgccatttcttctctctgttcccttcctcacccccgacggtgtggctgatgatgtcttctggtgtcatggtgaccaccccmtgttccctgtyctggtatttccccggcttgcctcaagttccatgcttgagcaataaagtggaaacaataaaacctgggtgtcagacaa

SEQ ID NO: 4660 - DNA, 2295 bp, Homo sapiens
cgcggcggggcgggaccaatcgctccccgagcygctcctgacccacctaccccagctctcgcgccgcgtgcagaggtgctcaagcctcctcgcggtccgcagtcagtgccgccgcgcccrgcctcccgcacgccccgcaggtagcgcccccgcccgcggcccagagtgcgctcgcgccggcaccagctcccggataaacggcgcgccgcgmggagatgacagccgaggagatgaaggcgaccgagagcggggcgcagtcggcgccgctgcccatggagggagtggacatcagccccaaacaggacgaaggcgtgctgaaggtcatcaagagagagggcacaggtwcagagatgcccatgattggggaccgagtctttgtccactacactggctggytattagatggcacaaagtttgactccagtctggatcgcaaggacaaattctcctttgacctgggaaaaggggaggtcatcaaggcttgggacattgccatagccaccatgaaggtgggggaggtgtgccacatcacctgcaaaccagaatatgcctacggttcagcaggcagtcctccaaagattccccccaatgccacgcttgtatttgaggtggagttgtttgagtttaagggagaagatctgacggaagaggaagatggcggaatcattcgcagaatacagactcrcggtgaaggctatgctaagcccaatgagggtgctatcgtggaggttgcactggaagggtactacaaggacaagctctttgaccagcgggagctccgctttgagattggcgagggggagaamctggatctgccttatggtctggagagggccattcagcgcatggagaaaggagaacattccatcgtgtacctcaagcccagctatgcttttggcagtgttgggaaggaaaagttccaaatcccaccaaatgctgagctgaaatatgaattacacctcaagagttttgaaaaggccaaggagtcttgggagatgaattcagaagagaagctggaacagagcaccatagtgaaagagcggggcactgtgtacttcaaggaaggtaaatacaagcaagctttactacagtataagaagatcgtgtcttggctggaatatgagtctagtttttccaatgaggaagcacagaaagcacaggcccttcgactggcctctcacctcaacctggccatgtgtcatctgaaactacaggccttctctgctgccattgaaagctgtaacaaggccctagaactggacagcaacaacgagaagggcctcttccgccggggagaggcccacctggccgtgaatgactttgaactggcacgggctgatttccagaaggtcctgcagctctaccccaacaacaaagccgccaagacccagctggctgtgtgccagcagcggatccgaaggcagcttgccygggagaagaagctctatgccaatatgtttgagaggctggctgaggaggagaacaaggccaaggcagaggcttcctcaggagaccatcccmctgacacagagatgaaggaggagcagaagagcaacmcggcagggagccagtctcasgtggagacagaagcatagcccctctccaccagccctactcctgcggctgcctgccccccagtytccccactccmccctgttagttttgtaaaaactgaagaattttgagtgaattagacctttatttttctatctggttggatggtggctttaggggaagggggaaaggtgtaggctgggggattgaggtggggaatcattttagctggtgtcagcccctcttcccttcctccattgcacatgaacatatgtccatccatatatattcatcagaatgttaatttattttgctccctctgttaggtccattttctaagggtagaagaggcaagtggtagggatgaggtctgataagaacccagggtggagagggagactcctgggcagccgttttcctcatcctttccctctcccagtccatttccaaatgtggcckccatgtgggtgctagggacatgggaaaaaccactgctatgccatttcttctctctgttcccttcctcacccccgacggtgtggctgatgatgtcttctggtgtcatggtgaccaccccmtgttccctgtyctggtatttcccctgtcagtttcccctctcggccaggttgtgtcccaaaatcccctcagcctyttctctgcacgttgctgaargtccaggcttgcctcaagttccatgcttgagcaataaagtggaaacaataaaacctgggtgtcagacaa

SEQ ID NO: 4661 - DNA, 752 bp, Homo sapiens
gctggcaaagcacacaggctgagcgctgaggagagggaccagctgctgccaaacctgagggctgtggggtggaatkagctggaaggccgtgatgccatcttcaagcagtttcatttcaaagacttcaacagggcctttgggttcatgacaagagtggccctgcaggctgagaaactggaccaccatcctgaatggtttaacgtgtacaacaaggtccacatcacgctgagcayccatgagtgtgccggcctttcakaacrggacataaacctggccagcttcatcraayaagtagcagtgtccatgacatagaccctgcccttcctctttgaattcttccgggggaargggtgactgaactgggagtccagggagggagctgaggagcccttaccctcccaccactcccctcccaagacccagccgccgccgttgagggctgagtccttgctgtgggatgtgccagtgtccccaccaacaccaggaatttagaccttttccctgcaccactctcttcatcctgggggctctgttacactaatttgaataaactctcccctttctttgcaacttcccagcaacaataatgattttcttgccaggccgtctcttgctccctaattcatttcccaggaagctgtgatacrgggtgaaataaagtcttgtcttagaaaccaggaccctaaaccccacactatgtaatagaaacacatgtgtttttatgtctcaaataaaactattatatcacttgg

SEQ ID NO: 4662 - DNA, 829 bp, Homo sapiens
ccgccccgggacggcagcctgcgcgcccrgccgccgcctgccctctccgctggccacctgctgccgcccgcgccatggctggcaaagcacacaggctgagcgctgaggagagggaccagctgctgccaaacctgagggctgtggggtggaatkagctggaaggccgtgatgccatcttcaagcagtttcatttcaaagacttcaacagggcctttgggttcatgacaagagtggccctgcaggctgagaaactggaccaccatcctgaatggtttaacgtgtacaacaaggtccacatcacgctgagcayccatgagtgtgccggcctttcakaacrggacataaacctggccagcttcatcraayaagtagcagtgtccatgacatagaccctgcccttcctctttgaattcttccgggggaargggtgactgaactgggagtccagggagggagctgaggagcccttaccctcccaccactcccctcccaagacccagccgccgccgttgagggctgagtccttgctgtgggatgtgccagtgtccccaccaacaccaggaatttagaccttttccctgcaccactctcttcatcctgggggctctgttacactaatttgaataaactctcccctttctttgcaacttcccagcaacaataatgattttcttgccaggccgtctcttgctccctaattcatttcccaggaagctgtgatacrgggtgaaataaagtcttgtcttagaaaccaggaccctaaaccccacactatgtaatagaaacacatgtgtttttatgtctcaaataaaactattatatcacttgg

SEQ ID NO: 4663 - DNA, 484 bp, Homo sapiens
ccgccccgggacggcagcctgcgcgcccrgccgccgcctgccctctccgctggccacctgctgccgcccgcgccatggctggcaaagcacacaggctgagcgctgaggagagggaccagctgctgccaaacctgagggctgtggggtggaatkagctggaaggccgtgatgccatcttcaagcagtttcatttcaaagacttcaacagggcctttgggttcatgacaagagtggccctgcaggctgagaaactggaccaccatcctgaatggtttaacgtgtacaacaaggtctcaaggctacaagcctccggtgtgcaacaataccatctgctttsctggttctccagcttgccaactacagatcttgggacttgtcagcctccataatcacatgagccaattccttataagaaatctctttgtgtgtattggttctgtttctctggagaatcataatacacaggcctatcatatcagatatg

SEQ ID NO: 4664 - DNA, 1358 bp, Homo sapiens
ccaacttttgcaggctccacccaggmtgtgcgcctcgctccacccaggmtgtgcgcctckctccacccctaggcgaaggcactagaatttcccaaattaagaacgaagaggaagtttggaccttttcggccaccgctcgcttcaatatggctgcccccagggagagacgaggctaccatgaaggagccgagcgcagaccctgagtccgtcacccatggatcgcagcgcggagttcaggaaatggaaggcgcaatgtttgagcaaagcggacctcagccggaagggcagtgttgacgaggatgtggtagagcttgtgcagtttctgaacatgcgagatcagtttttcaccaccagctcctgcgctggccgcatcctactccttgaccggggtataaatggttttgaggttcaraaacaaaactgttgctggctactggttacacacaaactttgtgtaaaagatgatgtgattgtagctctgaagaaagcaaatggtgatgccactttgaaatttkaaccatttgttcttcatgtgcagtgtcracaattgcaggatgcacagattctgcattccrtggcaatagattctggtttcaggaactctggcataacggtgggaaagagaggaaaaactatgttggctgtccggagtacwcatggcttagaagttccattaagccataagggaaaactgatggtgacagaggaatatattgacttcctgttaaatgtggcaaatcaaaaaatggaggaaaacaagaaaagaattgagaggttttacaactgcctacagcatgctttggaaagggaaacgatgactaacttacatcccaagatcaaagagaaaaataactcatcatatattcataagaaaaaaagaaacccagaaaaaacacgtgcccagtgtattactaaagaaagtgatgaagaacttgaaaatgatgatgatgatgatctaggaatcaatgttaccatcttccctgaagattactaagctttggttctgatgtgtcttggccgtaatgtttctagtaggttttataaagctgctcttcataagagtattttagtttgttgagtgtatcagccattcataagccagtaatgacaagtgcagagcttcaaactataactttgttgcccagaggatgtgcagttgtcatctaagctctcagcagtacccggcttatcctacgacttcacctgaaatgctatagttatccctacttttttaccagtttctcccagaagcacctgcttaataaatcaaagatgtttgaatggtgtcttattctgaaataacctgacctaagacaggtatttagattattttggatacattttgaaaagggatagca

SEQ ID NO: 4665 - DNA, 2227 bp, Homo sapiens
actgcagtgtactctcaatgaggaagatatagatacgaaaagaactagagccgcatcacatggggacttctgcaaatacagagactcggattaaaggtggagaagatggagctaaaggaactgcttatttaatacatttgaacaacttttggggtacttagaaggtgctttgaaacctgcatttgattaagcaagaattcgcttgcaagttaagggttagatttttttattttttaaaaatatgctttctgccacatgtaaaccgtaagttgtcctgaaatgataagctttgataktctayggtgtttattttttacttatctttttgaatgaaaagtgaacaacaagaaatgctggtggtaattttttgggtcaatgatgagttggcatgtattctgaatctaaagttgattattactactttagctctagaattactctgagacctgaaaattacctgaatcgtgactaagacgaagcctgaatgatttaagttcttttttgttggatacaatttgttgttgttgttgttgttttggttttgtttttgagtcggtctccggtcgcccaggatggagtgcagtgacacaacctcagttcactgcagccttaatttccctggctcaagcgatcttctacctcagcctccctagttagttacaatttttaaatggaacgttttcctattacaagatgaaatcaagtgaaaattgagatgtatgttgaatctatgctgtggggcagaagaacgytgtagaggtaaacattgatgagattaccactttattttgaaagggcactccacagaaggatgttattatcaagtcagatgcaccggacacwttgttattggagaaacatgcagattatatcgcatcctatggctcaaagaaagatgattatgaatactgtatgtctgagtatttgagaatgagtggcatctattggggtctgacagtaatggatctcatgggacaacttcatcgcatgaatagagaagagattctggcatttattaagtcttgccaacatgaatgtggtggaataagtgctagtatcggacatgatcctcatcttttatacactcttagtgctgtccagattcttacgctgtatgacagtattaatgttattgacgtaaataaagttgtggaatatgttaaaggtctacagaaagaagatggttcttttgctggagatatttggggagaaattgacacaagattctctttttgtgcggtggcaactttggctttgttggggaagcttgatgctattaatgtggaaaaggcaatcgaatttgttttatcctgtatgaactttgacggtggatttggttgcagaccaggttctgaatcccatgctgggcagatctattgttgcacaggatttctggcwattacaagtcagttgcatcaagtaaattctgatttacttggctggtggctttgtgaacgacaattaccctcaggcgggctcaatggaaggccggagaagttaccagatgtatgctactcatggtgggtcctggcttccctaaagataattggaagacttcattggattgatagaragaaactgcgtaatttcattttagcatgtcaagatgaagaaacggggggatttgcagacaggccaggagatatggcaagtggatccttttcataccttatttggaattgctggattgtcacttttggkagaagaacagattaaacctgttaatcctgtcttttgcatgcctgaagaagtgcttcagagagtgaatgttcagcctgagctagtgagctagattcattgaattgaaagttgcatagtatagttttgccattttaacatttctgtatttgaagtgcttatcgaawctaaaagtgactactgttaatattttgtatattgtgttaaattaattttaataaattatataattatacatattgtaaaataaagaccggtattttattttctgctttttattctgaagtcctgttattctgactacagttctttgtgtatacttctgtgtctgttatgttcaataactgagctarcataaaataactctaggtttctacttgatttttcccccatgtatacctttcatctgttctrtagcaagttgatgtaaattggtttgtcaacaagaatgttaactgatgaaagtggatagaacccatacatgaattaaatgatgcacaaaataaatggctgttgaaatttggaaatg

SEQ ID NO: 4666 - DNA, 1504 bp, Homo sapiens
gcgcatctgcgcaggcgcccggctcctaagtctacccaggaactgaccctgctctctcctttccctgttagacatgggcactccacagaaggatgttattatcaagtcagatgcaccggacacwttgttattggagaaacatgcagattatatcgcatcctatggctcaaagaaagatgattatgaatactgtatgtctgagtatttgagaatgagtggcatctattggggtctgacagtaatggatctcatgggacaacttcatcgcatgaatagagaagagattctggcatttattaagtcttgccaacatgaatgtggtggaataagtgctagtatcggacatgatcctcatcttttatacactcttagtgctgtccagattcttacgctgtatgacagtattaatgttattgacgtaaataaagttgtggaatatgttaaaggtctacagaaagaagatggttcttttgctggagatatttggggagaaattgacacaagattctctttttgtgcggtggcaactttggctttgttggggaagcttgatgctattaatgtggaaaaggcaatcgaatttgttttatcctgtatgaactttgacggtggatttggttgcagaccaggttctgaatcccatgctgggcagatctattgttgcacaggatttctggcwattacaagtcagttgcatcaagtaaattctgatttacttggctggtggctttgtgaacgacaattaccctcaggcgggctcaatggaaggccggagaagttaccagatgtatgctactcatggtgggtcctggcttccctaaagataattggaagacttcattggattgatagaragaaactgcgtaatttcattttagcatgtcaagatgaagaaacggggggatttgcagacaggccaggagatatggtggatccttttcataccttatttggaattgctggattgtcacttttggkagaagaacagattaaacctgttaatcctgtcttttgcatgcctgaagaagtgcttcagagagtgaatgttcagcctgagctagtgagctagattcattgaattgaaagttgcatagtatagttttgccattttaacatttctgtatttgaagtgcttatcgaawctaaaagtgactactgttaatattttgtatattgtgttaaattaattttaataaattatataattatacatattgtaaaataaagaccggtattttattttctgctttttattctgaagtcctgttattctgactacagttctttgtgtatacttctgtgtctgttatgttcaataactgagctarcataaaataactctaggtttctacttgatttttcccccatgtatacctttcatctgttctrtagcaagttgatgtaaattggtttgtcaacaagaatgttaactgatgaaagtggatagaacccatacatgaattaaatgatgcacaaaataaatggctgttgaaatttggaaatg

SEQ ID NO: 4667 - DNA, 2029 bp, Homo sapiens
aggcgcatctgcgcaggcgcccggctcctaagtctacccaggaactgaccctgctctctcctttccctgttagacatggtaagtgtgagtttagcgctgctgtccggatgggttggtagcagacagggtrgagtagggttaagcacactggtcaccttaggattggtttcctggtgctggagaatggttaggacacaggccttggaaggttttttgagtgtgaaatattactcagcgttttctgcagacctcgcgggcaatgccgcttctaattttatccaggccttcttctgtagggaggrcctgttaagagttgagcarcccgatttctgaacccctctaaaaagctgtggctgattggtggcttttttttttcttggagagggggtgtcaaagatttctttaaaatcgttagtgatgtggtctcgctttaagatttttaatgggatcagargaaaattcggtacttaatcacttccggtaatcttcatgacctgttatagtgactgcagtgtactctcaatgaggaagatatagatacgaaaagaactagagccgcatcacatggggacttctgcaaatacagagactcggattaaagggcactccacagaaggatgttattatcaagtcagatgcaccggacacwttgttattggagaaacatgcagattatatcgcatcctatggctcaaagaaagatgattatgaatactgtatgtctgagtatttgagaatgagtggcatctattggggtctgacagtaatggatctcatgggacaacttcatcgcatgaatagagaagagattctggcatttattaagtcttgccaacatgaatgtggtggaataagtgctagtatcggacatgatcctcatcttttatacactcttagtgctgtccagattcttacgctgtatgacagtattaatgttattgacgtaaataaagttgtggaatatgttaaaggtctacagaaagaagatggttcttttgctggagatatttggggagaaattgacacaagattctctttttgtgcggtggcaactttggctttgttggggaagcttgatgctattaatgtggaaaaggcaatcgaatttgttttatcctgtatgaactttgacggtggatttggttgcagaccaggttctgaatcccatgctgggcagatctattgttgcacaggatttctggcwattacaagtcagttgcatcaagtaaattctgatttacttggctggtggctttgtgaacgacaattaccctcaggcgggctcaatggaaggccggagaagttaccagatgtatgctactcatggtgggtcctggcttccctaaagataattggaagacttcattggattgatagaragaaactgcgtaatttcattttagcatgtcaagatgaagaaacggggggatttgcagacaggccaggagatatggtggatccttttcataccttatttggaattgctggattgtcacttttggkagaagaacagattaaacctgttaatcctgtcttttgcatgcctgaagaagtgcttcagagagtgaatgttcagcctgagctagtgagctagattcattgaattgaaagttgcatagtatagttttgccattttaacatttctgtatttgaagtgcttatcgaawctaaaagtgactactgttaatattttgtatattgtgttaaattaattttaataaattatataattatacatattgtaaaataaagaccggtattttattttctgctttttattctgaagtcctgttattctgactacagttctttgtgtatacttctgtgtctgttatgttcaataactgagctarcataaaataactctaggtttctacttgatttttcccccatgtatacctttcatctgttctrtagcaagttgatgtaaattggtttgtcaacaagaatgttaactgatgaaagtggatagaacccatacatgaattaaatgatgcacaaaataaatggctgttgaaatttggaaatg

SEQ ID NO: 4668 - DNA, 2844 bp, Homo sapiens
gcacagcctagagcccgcctccgtgaaagactgccgggcgcatgcggtcggggktgttcactggctgtccggggctccgcgcgcgtcgccggcccagctctgtcgctgacgggaggatctgaagccggccgcaggtcaaagagtaaaatgaagtacattctggttactggtggtgttatatcaggaattggaaaaggaatcattgccagcagtgtgggcacaatactcaagtcatgtggtttacatgtaacttcaatcaaaattgacccctacattaacattgatgcaggaacattctctccttatgagcatggtgaggtttttgtgctggatgatggtggggaagtagaccttgacctgggtaactatgagcggttccttgacatccgcctcaccaaggacaataatctgaccactggaaagatataccagtatgtcattaacaaggaacggaaaggagattacttggggaaaactgtccaagttgtccctcatatcacagatgcaatccaggagtgggtgatgagacaggcgttaatacctgtagatgaagatggcctggaacctcaagtgtgtgttattgagcttggtggaaccgtgggggacatagaaagcatgccctttattgaggccttccgtcagttccarttcaaggtcaaaagagagaacttttgtaacatccacgtcagtctagttccccagccaagttcaacaggggaacagaagactaaacctacccagaatagtgttcgggaacttagaggacttgggctttccccagatctggttgtatgcaggtgctcaaatccacttgacacatcagtgaaggagaaaatatcaatgttctgccatgttgagcctgaacaagtgatctgtgtccacgatgtctcatccatctaccgagtccccttgttgttagaggagcaaggggttgtagattattttcttcgaagacttgaccttcctattgagaggcagccaagaaaaatgctgatgaaatggaaagagatggctgacagatatgatcgcttgctggagacctgctctattgcccttgtgggcaaatacacgaagttctcagactcctatgcctctgtcattaaggctctggagcattctgcactggccatcaaccacaaattggaaatcaagtacatagattctgcggacttggagcccatcacctcgcaagaagagcccgtgcgctaccacgaagcttggcagaagctctgtagtgctcatggagtgctggttccaggaggatttggtgttcgaggaacagaaggaaaaatccaagcaattgcctgggctcggaatcagaaaaagccttttttgggcgtgtgcttagggatgcagttggcagtggttgaattctcaagaaacgtgctgggatggcaagatgccaattctacagagtttgaccctacgaccagtcatcccgtggtcgtagacatgccagaacacaacccagggcagatgggcggaaccatgaggctgggcaagaggagaaccctgttccagaccaagaactcagtcatgaggaaactctatggagacgcagactacttggaagagaggcaccgccaccgatttgaggtgaatccagtctggaaaaagtgtttggaagaacaaggcttgaagtttgtyggccaagatgttgaaggagagagaatggaaattgtggagttagaagatcatcccttttttgttggggttcagtaccaccctgagttcctgtccaggcctatcaagccctccccaccatactttggcctcctcctggcctctgtggggcggctctcacattacctccagaaaggctgcaggctctcacccagggacacctatagtgacaggagtggaagcagctcccctgactctgaaatcaccgaactgaagtttccatcaataaatcatgactgatcttgtagcggatgattcttcaagagacccttcaaacttgggtagagtttacagctctgactttacactcggctttggagactttctttaaattatgtttttattaagattattttattatgcggaaaggtatttgggaaacttgtcacttgcatgtcccatcacgtgtactggctcctctgtggtgtctgcctgttgcgtgacactctccttgcagttcttgagttgcggcagaacatcgcgatgggaaccgatggtgggtggggctgcagagtgccccatcggtcaccttgtttctcaactacctcgcatcattgcagatgctagcgcgttgcctgtcgctttcccttggatacctagaccgttataaagtgtgccacatggacttaccgagcatggagagaggattttagctaggatttgaacacttggtgctgggaacctcagggtattgcttgccactaagccatgaaaccagagacaaaatctctatactgccctgagttggggggaattctcagtgccaactgtggctggtcctcattcaaagggacggtcagtttggtgtcaacatgaaacaccaagatgtctgtctctgaagcgtgattttaaaatccccatgcctgtggctgcgcttcctatttctagggctgggaaacactccttgcatcaaggggtcacttacagaacaaagaatcttttgggggaaacttcctctaaaaccctctcatatatagacagctttgactggagggtccatttttcttccaggatggtgttactgcagttgaaagggcaatatgaagttactttcttaatgtgacctagcaataggcatagctacgtggcactatattctggccagactcgatgtgtactctaacttaagaaataaatcagtaaggcagaacaagagacatg

SEQ ID NO: 4669 - DNA, 2059 bp, Homo sapiens
ctcagaytactgacttggaccagcaggggaatggctgtgacaataaataagattgggaaaacaagaagataagggcctcgctctgttacccaggctggagtgctgtggtgtgtttgtgactcaccgtagccttgaactcctgggctcaagcaatcctcccacctaagcctctggagtagctgggactacagctttaggttcacccctgtaagtgttgctggtgtcagaataggaacctccctgcgctttgaagggatgaatgtgacctctcccacattctccggtgctgtgatgtaccttaaacacagcaagggcacctggcctgggtggagcccactcctcagcacccacctcacttcttgcagtattctgcagaccccagccctgtgcctgtgctcctggacagctggagataaggagtgggccctggaagatgctcattcaggccctgctcaagattccagtcctgattgctggactcgctgaagagagactacgcaggaaagccccagccacccatcaaatcagagagaaggaatccaccttcttacgctatggcaggtaagaaagtactcattgtctatgcacaccaggaacccargtctttcaacggatccttgaagaatgtggctgtagatgaactgagcaggcagggctgcaccgtcacagtgtctgatttgtatgccatgaacyttgagccgagggccacagacaaagatatcactgrtactctttctaatcctgaggttttcaattatggagtggaaacccacgaagcctacaagcaaaggtctctggctagcgacatcactgatgagcagaaaaaggttcgggaggctgacctagtgatatttcagttcccgctgtactggttcagcgtgccrgccatcctgaagggctggatggatagggtgctgtgccagggctttgcctttgacatcccaggattctacgattcyggtttgctccagggtaaactagcgctcctttcygtaaccacgggaggcacggccgagatgtacacgaagacaggagtcaatggagattctcgatacttcctgtggccactccagcatggcacattacacttctgtggatttaaagtccttgcccctcagatcagctttgctcctgaaattgcatccgaagaagaaagaaaggggatggtggctgcgtggtcccagaggctgcagaccatctggaaggaagagcccatcccctgcacagcccactggcacttcgggcaataactctgtggcacgtgggcatcacgtaagcagcacactasgaggcccaggcgcaggcaaagagaagatggtgctgtcatgaaataaaattacaacatagctacctggggatacttttttctttctgttttttgtttgtttttaattttagctttaaggagcacatggccagtactgtttcaggggaatattgggtggcgctggggtttgggcttctattgatcccatcacccaaacagtgagcatagttcccaatagatagtttttcaacacttcctttcctcccttccttcccgcttttggattcccagcatctattgatcccgtcttttcacccctgtgtacccaatgtttagttcccacttataagttagaacatggggaatttggttttgtttctgtgttgattcacttaggataatgacctccagctgcatccacgttactgcaaaggacaggatttcatgtttttttatggctgcatagtattccatggcgtccgtgtaccacactttctttatccagtccrctgttgatgggcacstgggttgattccaygtctttgctactgtaaatagttctgtgatgaacatacaagtgcaggcatcttttcatagaatgattttttttttccttttggtagatacccagtaatgggattgctgggttgaagggtaattctatttttagcaaactagaaatatttaatgaagtacatgaatgagtgtcttcagaattgtacacagtgagatcaaatattttaataatgagcttgttatgttgaattctattctgaccatcaytcactgaga

SEQ ID NO: 4670 - DNA, 2078 bp, Homo sapiens
gcrgtcccgcggcgcggggcaggttccgggctgcttaggttggcaccggtccgtggtccccgggggcgcagtcgcagcgctcccgccctccaggcgtcagcgagtgcgcggtccagtgcggccggaacctggcgcaactcctagagcggtccttggggagacgcgggtcccagtcctgcggctcctactggggmgtgcgctggtcggaagctttaggttcacccctgtaagtgttgctggtgtcagaataggaacctccctgcgctttgaagggatgaatgtgacctctcccacattctccggtgctgtgatgtaccttaaacacagcaagggcacctggcctgggtggagcccactcctcagcacccacctcacttcttgcagtattctgcagaccccagccctgtgcctgtgctcctggacagctggagataaggagtgggccctggaagatgctcattcaggccctgctcaagattccagtcctgattgctggactcgctgaagagagactacgcaggaaagccccagccacccatcaaatcagagagaaggaatccaccttcttacgctatggcaggtaagaaagtactcattgtctatgcacaccaggaacccargtctttcaacggatccttgaagaatgtggctgtagatgaactgagcaggcagggctgcaccgtcacagtgtctgatttgtatgccatgaacyttgagccgagggccacagacaaagatatcactgrtactctttctaatcctgaggttttcaattatggagtggaaacccacgaagcctacaagcaaaggtctctggctagcgacatcactgatgagcagaaaaaggttcgggaggctgacctagtgatatttcagttcccgctgtactggttcagcgtgccrgccatcctgaagggctggatggatagggtgctgtgccagggctttgcctttgacatcccaggattctacgattcyggtttgctccagggtaaactagcgctcctttcygtaaccacgggaggcacggccgagatgtacacgaagacaggagtcaatggagattctcgatacttcctgtggccactccagcatggcacattacacttctgtggatttaaagtccttgcccctcagatcagctttgctcctgaaattgcatccgaagaagaaagaaaggggatggtggctgcgtggtcccagaggctgcagaccatctggaaggaagagcccatcccctgcacagcccactggcacttcgggcaataactctgtggcacgtgggcatcacgtaagcagcacactasgaggcccaggcgcaggcaaagagaagatggtgctgtcatgaaataaaattacaacatagctacctggggatacttttttctttctgttttttgtttgtttttaattttagctttaaggagcacatggccagtactgtttcaggggaatattgggtggcgctggggtttgggcttctattgatcccatcacccaaacagtgagcatagttcccaatagatagtttttcaacacttcctttcctcccttccttcccgcttttggattcccagcatctattgatcccgtcttttcacccctgtgtacccaatgtttagttcccacttataagttagaacatggggaatttggttttgtttctgtgttgattcacttaggataatgacctccagctgcatccacgttactgcaaaggacaggatttcatgtttttttatggctgcatagtattccatggcgtccgtgtaccacactttctttatccagtccrctgttgatgggcacstgggttgattccaygtctttgctactgtaaatagttctgtgatgaacatacaagtgcaggcatcttttcatagaatgattttttttttccttttggtagatacccagtaatgggattgctgggttgaagggtaattctatttttagcaaactagaaatatttaatgaagtacatgaatgagtgtcttcagaattgtacacagtgagatcaaatattttaataatgagcttgttatgttgaattctattctgaccatcaytcactgaga

SEQ ID NO: 4671 - DNA, 1811 bp, Homo sapiens
taaagaggcctgcrgtcccgcggcgcggggcaggttccgggctgcttaggttggcaccggtccgtggtccccgggggcgcagtcgcagcgctcccgccctccaggcgtcagcgagtgcgcggtccagtgcggccggaacctggcgcaactcctagagcggtccttggggagacgcgggtcccagtcctgcggctcctactggggmgtgcgctggtcggaagattgctggactcgctgaagagagactacgcaggaaagccccagccacccatcaaatcagagagaaggaatccaccttcttacgctatggcaggtaagaaagtactcattgtctatgcacaccaggaacccargtctttcaacggatccttgaagaatgtggctgtagatgaactgagcaggcagggctgcaccgtcacagtgtctgatttgtatgccatgaacyttgagccgagggccacagacaaagatatcactgrtactctttctaatcctgaggttttcaattatggagtggaaacccacgaagcctacaagcaaaggtctctggctagcgacatcactgatgagcagaaaaaggttcgggaggctgacctagtgatatttcagttcccgctgtactggttcagcgtgccrgccatcctgaagggctggatggatagggtgctgtgccagggctttgcctttgacatcccaggattctacgattcyggtttgctccagggtaaactagcgctcctttcygtaaccacgggaggcacggccgagatgtacacgaagacaggagtcaatggagattctcgatacttcctgtggccactccagcatggcacattacacttctgtggatttaaagtccttgcccctcagatcagctttgctcctgaaattgcatccgaagaagaaagaaaggggatggtggctgcgtggtcccagaggctgcagaccatctggaaggaagagcccatcccctgcacagcccactggcacttcgggcaataactctgtggcacgtgggcatcacgtaagcagcacactasgaggcccaggcgcaggcaaagagaagatggtgctgtcatgaaataaaattacaacatagctacctggggatacttttttctttctgttttttgtttgtttttaattttagctttaaggagcacatggccagtactgtttcaggggaatattgggtggcgctggggtttgggcttctattgatcccatcacccaaacagtgagcatagttcccaatagatagtttttcaacacttcctttcctcccttccttcccgcttttggattcccagcatctattgatcccgtcttttcacccctgtgtacccaatgtttagttcccacttataagttagaacatggggaatttggttttgtttctgtgttgattcacttaggataatgacctccagctgcatccacgttactgcaaaggacaggatttcatgtttttttatggctgcatagtattccatggcgtccgtgtaccacactttctttatccagtccrctgttgatgggcacstgggttgattccaygtctttgctactgtaaatagttctgtgatgaacatacaagtgcaggcatcttttcatagaatgattttttttttccttttggtagatacccagtaatgggattgctgggttgaagggtaattctatttttagcaaactagaaatatttaatgaagtacatgaatgagtgtcttcagaattgtacacagtgagatcaaatattttaataatgagcttgttatgttgaattctattctgaccatcaytcactgaga

SEQ ID NO: 4672 - DNA, 2631 bp, Homo sapiens
ctcagaytactgacttggaccagcaggggaatggctgtgacaataaataagattgggaaaacaagaagataagggcctcgctctgttacccaggctggagtgctgtggtgtgtttgtgactcaccgtagccttgaactcctgggctcaagcaatcctcccacctaagcctctggagtagctgggactacagctttaggttcacccctgtaagtgttgctggtgtcagaataggaacctccctgcgctttgaagggatgaatgtgacctctcccacattctccggtgctgtgatgtaccttaaacacagcaagggcacctggcctgggtggagcccactcctcagcacccacctcacttcttgcagtattctgcagaccccagccctgtgcctgtgctcctggacagctggagataaggagtgggccctggaagatgctcattcaggccctgctcaagattccagtcctgattgctggactcgctgaagagagactacgcaggaaagccccagccacccatcaaatcagagagaaggaatccaccttcttacgctatggcaggtaagaaagtactcattgtctatgcacaccaggaacccargtctttcaacggatccttgaagaatgtggctgtagatgaactgagcaggcagggctgcaccgtcacagtgtctgatttgtatgccatgaacyttgagccgagggccacagacaaagatatcactgrtactctttctaatcctgaggttttcaattatggagtggaaacccacgaagcctacaagcaaaggtctctggctagcgacatcactgatgagcagaaaaaggttcgggaggctgacctagtgatatttcagttcccgctgtactggttcagcgtgccrgccatcctgaagggctggatggatagggtgctgtgccagggctttgcctttgacatcccaggattctacgattcyggtttgctccagggtaaactagcgctcctttcygtaaccacgggaggcacggccgagatgtacacgaagacaggagtcaatggagattctcgatacttcctgtggccactccagcatggcacattacacttctgtggatttaaagtccttgcccctcagatcagctttgctcctgaaattgcatccgaagaagaaagaaaggggatggtggctgcgtggtcccagaggctgcagaccatctggaaggaagagcccatcccctgcacagcccactggcacttcgggcaataactctgtggcacgtgggcatcacgtaagcagcacactasgaggcccaggcgcaggcaaagagaagatggtgctgtcatgaaataaaattacaacatagctacctggggatacttttttctttctgttttttgtttgtttttaattttagctttaaggagcacatggccagtactgtttcaggggaatattgggtggcgctggggtttgggcttctattgatcccatcacccaaacagtgagcatagttcccaatagatagtttttcaacacttcctttcctcccttccttcccgcttttggattcccagcatctattgatcccgtcttttcacccctgtgtacccaatgtttagttcccacttataagttagaacatggggaatttggttttgtttctgtgttgattcacttaggataatgacctccagctgcatccacgttactgcaaaggacaggatttcatgtttttttatggctgcatagtattccatggcgtccgtgtaccacactttctttatccagtccrctgttgatgggcacstgggttgattccaygtctttgctactgtaaatagttctgtgatgaacatacaagtgcaggcatcttttcatagaatgattttttttttccttttggtagatacccagtaatgggattgctgggttgaagggtaattctatttttagcaaactagaaatatttaatgaagtacatgaatgagtgtcttcagaattgtacacagtgagatcaaatattttaataatgagcttgttatgttgaattctattctgaccatcaytcactgagatttcttttctttcttttttaaagagacagagtttcactatgttgcccrggctggtctcaaaccccttgcctcaartaatcttcccaccttgggcctcccaaagtgctgggattgcaggtgtgagccaccacacctggcccagattttctttaatatttgtctaatatctttccatctccctatattcaagcttcatgtaattttattttctggtaattctctgagcatagagctggatttgctagtttttttattttatgactcaacatgasagtttctatttttcatagaaaagttgaatctgggcctgttkcttaattttcttctttgtctttttaaatttacattaggactatgaagttttaattgaacagccattaacatatatggttatatgttgcatgatgtttcaatcagtgatggactgcatgtacgatggtggtcccctaagattataatgccatgttttgtttattaaaatttatttaagatttattttattatttttatagatgaggtctcactctgttgccccagctgggtgcagtggcatgatcatasctcactaggct

SEQ ID NO: 4673 - DNA, 2229 bp, Homo sapiens
taaagaggcctgcrgtcccgcggcgcggggcaggttccgggctgcttaggttggcaccggtccgtggtccccgggggcgcagtcgcagcgctcccgccctccaggcgtcagcgagtgcgcggtccagtgcggccggaacctggcgcaactcctagagcggtccttggggagacgcgggtcccagtcctgcggctcctactggggmgtgcgctggtcggaagattgctggactcgctgaagagagactacgcaggaaagccccagccacccatcaaatcagagagaaggaatccaccttcttacgctatggcaggtaagaaagtactcattgtctatgcacaccaggaacccargtctttcaacggatccttgaagaatgtggctgtagatgaactgagcaggcagggctgcaccgtcacagtgtctgatttgtatgccatgaacyttgagccgagggccacagacaaagatatcactgrtactctttctaatcctgaggttttcaattatggagtggaaacccacgaagcctacaagcaaaggtctctggctagcgacatcactgatgagcagaaaaaggttcgggaggctgacctagtgatatttcagatgctcagcaccgaactcagtctgacttccagatgctaacaacacaccccaggcaggcgaaggggcatgcttttccatactcttccttttgactggcttgatcacagactgctgctccaaagctggtgttrygcacagctcctygtcccctccctgcctgcccagggccagcatcaggggctgtcatcactgggggatgcagagctacctgtaacagcaacaaggaccattgtcaactccgttcccgtctgacacccacactgcacctttcagagctgaccataagggttaccctcacctgcccagctgccagggaagaggagggctgtgggcttcattccgaatcaccagataaactaaactaggaaacctgaggcgagccgcagcctcagtttctctttggtgttgccgcccacagttcccgctgtactggttcagcgtgccrgccatcctgaagggctggatggatagggtgctgtgccagggctttgcctttgacatcccaggattctacgattcyggtttgctccagggtaaactagcgctcctttcygtaaccacgggaggcacggccgagatgtacacgaagacaggagtcaatggagattctcgatacttcctgtggccactccagcatggcacattacacttctgtggatttaaagtccttgcccctcagatcagctttgctcctgaaattgcatccgaagaagaaagaaaggggatggtggctgcgtggtcccagaggctgcagaccatctggaaggaagagcccatcccctgcacagcccactggcacttcgggcaataactctgtggcacgtgggcatcacgtaagcagcacactasgaggcccaggcgcaggcaaagagaagatggtgctgtcatgaaataaaattacaacatagctacctggggatacttttttctttctgttttttgtttgtttttaattttagctttaaggagcacatggccagtactgtttcaggggaatattgggtggcgctggggtttgggcttctattgatcccatcacccaaacagtgagcatagttcccaatagatagtttttcaacacttcctttcctcccttccttcccgcttttggattcccagcatctattgatcccgtcttttcacccctgtgtacccaatgtttagttcccacttataagttagaacatggggaatttggttttgtttctgtgttgattcacttaggataatgacctccagctgcatccacgttactgcaaaggacaggatttcatgtttttttatggctgcatagtattccatggcgtccgtgtaccacactttctttatccagtccrctgttgatgggcacstgggttgattccaygtctttgctactgtaaatagttctgtgatgaacatacaagtgcaggcatcttttcatagaatgattttttttttccttttggtagatacccagtaatgggattgctgggttgaagggtaattctatttttagcaaactagaaatatttaatgaagtacatgaatgagtgtcttcagaattgtacacagtgagatcaaatattttaataatgagcttgttatgttgaattctattctgaccatcaytcactgaga

SEQ ID NO: 4674 - DNA, 1777 bp, Homo sapiens
gtaggggaggcggggctggagggagatggcgccgcgctcccggatgaacagagaaagcgacaggataagggcctcgctctgttacccaggctggagtgctgtggtgtgtttgtgactcaccgtagccttgaactcctgggctcaagcaatcctcccacctaagcctctggagtagctgggactacagattgctggactcgctgaagagagactacgcaggaaagccccagccacccatcaaatcagagagaaggaatccaccttcttacgctatggcaggtaagaaagtactcattgtctatgcacaccaggaacccargtctttcaacggatccttgaagaatgtggctgtagatgaactgagcaggcagggctgcaccgtcacagtgtctgatttgtatgccatgaacyttgagccgagggccacagacaaagatatcactgrtactctttctaatcctgaggttttcaattatggagtggaaacccacgaagcctacaagcaaaggtctctggctagcgacatcactgatgagcagaaaaaggttcgggaggctgacctagtgatatttcagttcccgctgtactggttcagcgtgccrgccatcctgaagggctggatggatagggtgctgtgccagggctttgcctttgacatcccaggattctacgattcyggtttgctccagggtaaactagcgctcctttcygtaaccacgggaggcacggccgagatgtacacgaagacaggagtcaatggagattctcgatacttcctgtggccactccagcatggcacattacacttctgtggatttaaagtccttgcccctcagatcagctttgctcctgaaattgcatccgaagaagaaagaaaggggatggtggctgcgtggtcccagaggctgcagaccatctggaaggaagagcccatcccctgcacagcccactggcacttcgggcaataactctgtggcacgtgggcatcacgtaagcagcacactasgaggcccaggcgcaggcaaagagaagatggtgctgtcatgaaataaaattacaacatagctacctggggatacttttttctttctgttttttgtttgtttttaattttagctttaaggagcacatggccagtactgtttcaggggaatattgggtggcgctggggtttgggcttctattgatcccatcacccaaacagtgagcatagttcccaatagatagtttttcaacacttcctttcctcccttccttcccgcttttggattcccagcatctattgatcccgtcttttcacccctgtgtacccaatgtttagttcccacttataagttagaacatggggaatttggttttgtttctgtgttgattcacttaggataatgacctccagctgcatccacgttactgcaaaggacaggatttcatgtttttttatggctgcatagtattccatggcgtccgtgtaccacactttctttatccagtccrctgttgatgggcacstgggttgattccaygtctttgctactgtaaatagttctgtgatgaacatacaagtgcaggcatcttttcatagaatgattttttttttccttttggtagatacccagtaatgggattgctgggttgaagggtaattctatttttagcaaactagaaatatttaatgaagtacatgaatgagtgtcttcagaattgtacacagtgagatcaaatattttaataatgagcttgttatgttgaattctattctgaccatcaytcactgaga

SEQ ID NO: 4675 - DNA, 2266 bp, Homo sapiens
ccsacgcagcgagggcgctatggctggcggcctcgcctcctggaaaggccatggtcgctgaggcgacgagcgagggcggggcagcgccgacggggacactcatcccgggagccagagccagcaccgagaggggacggtctacgcgggtgccggcsgttccaggactgcgaaaccacgagccgagtttcgaaatcagcctgagcctgagtaccgctaaggctttaatcacsggtcccgagagccctaagtcttctctttgcttgctgatctcgtaccttaatgtgcaaaagaatcacgttgggaactgaaaattcagaatcctgggcctcactcccagagratctgatctacatgtgtggagatgcccaggaatctgctttattctcttttgtcctcccacctgtccccccatttcagcacctcggtaacctctgccaaagtggctgtgaatggcgttcagctgcattaccagcagactggagagggagatcacgcagtcctgctacttcctgggatgttaggaagtggagagactgattttggacctcagctcaagaacctcaataagaagctcttcacggtggtcgcctgggatcctcgaggctatggacattcmaggcccccagatcgcgatttcccagcagacttttttgaaagggatgcaaaagatgctgttgatttgatgaaygygctgaagtttaagaaggtttctctgctggggtggagtgatgggggcataaccgcactcattgctgctgcaaaatatccatcttacatccacaagatggtgatctggggcgccaacgcctacgtcactgacgaagacagcatgatatatgagggcatccgagatgtttccaaatggagtgagagaacaagaaarcctctagaagccctctatgggtatgactactttgccagaacctgtgaaaagtgggtggatggcataagacagtttaaacatctcccagatggtaacatctgccggcacctgctgccccgggtccagtgccccgccttgattgtgcacggtgagaaggatcctctggtcccacggtttcatgccgacttcattcataagcacgtgaaaggctcayggctgcatttgatgccagaaggcaaacacaacctgcattygcgttttgcagatgaattcaacaagttagcagaagacttcctacaatgagaatgcacactcsagtcttggtggttccttcgtgtggggcttgatcgtgttgctgcctgttaacatgatgcctttgaaactctccgcctttgaaactttctacccctccyttcaatcttatcctaaccaaatgagaataatgacatattgaaaacagcctctagcttcaggctgggcacggtggctcacagctataatctcagcactttgggaggctgaggtgggagaattgcctgagcccaggagttcaagaccagcttgtgcaatatagggagactccggctctacaaaaaagagtttttcaaaattagccaggcgaagtggcacacatctgtggtcccagstgctcaggaagctgaggtgggaggatcrcttgagcccaattcaaagctgcagtgagctgtaattgcatcactgcactccaacctgggcaacagagtaagaccttgtcttaaaaaaaaataaaaacataaaaaaaaataaaaaaggaataaagcctctaacttcaatagctatgaaaattaaatccgattttctaagatgaagttgtgacaagttataccattgycttaayaggtgaattcctgccataatttattttcaaataaattttaggtggagaatgtgtagtgttaatgttggmgattttaagmcatcttgaatttgtactgtaccttttatctgagaggttcaagcttcacttgtgtttttatttgtgtttatctatcatattcaaagagaagtagggagagtccgtgcccgaggtcctcaattctaagatcagaggatgtccagaacagcagcagataggggcaggtttgctttaccccatatccctctcctggttcacttttgagagatgaatactttgggccagtaaaggtgaacaaaatatgtattttcatcactctgtactaaaaggacaggaatgtwattaattaaaacactaaagcagaaatcctacattgctattaaaattaaactttgattaccacaataaaaacagtagcaagttaaaccttgacactttatacttaagcatttagagaaagaataaaaattatttgaagtgagaacaca

SEQ ID NO: 4676 - DNA, 2554 bp, Homo sapiens
acgccsacgcagcgagggcgctatggctggcggcctcgcctcctggaaaggccatggtcgctgaggcgacgagcgagggcggggcagcgccgacggggacactcatcccgggagccagagccagcaccgagaggggacggtctacgcgggtgccggcsgttccaggactgcgaaaccacgagccgagtttcggtcgcccatgggaaagcacccggcagggcgtggcttcggggcggggcgggcagagggcggagcaggatggagaggcgaggtgggcggagcagagggcgtggcttcggggcagagtgggccgggtaccgcgcttggtcttagcgcatgcgcrctccyggcagctacgcgacctgtgaccatggtggctgtgctgggcggccgkggcgtgttgcgcctgcggctgcttctctcagcgctgaagcccgggatccacgtcccacgggccggacccgcggccgcgttcggaaatcagcctgagcctgagtaccgctaaggctttaatcacsggtcccgagagccctaagtcttctctttgcttgctgatctcgtaccttaatgtgcaaaagaatcacgttgggaactgaaaattcagaatcctgggcctcactcccagagratctgatctacatgtgtggagatgcccaggaatctgctttattctcttttgtcctcccacctgtccccccatttcagcacctcggtaacctctgccaaagtggctgtgaatggcgttcagctgcattaccagcagactggagagggagatcacgcagtcctgctacttcctgggatgttaggaagtggagagactgattttggacctcagctcaagaacctcaataagaagctcttcacggtggtcgcctgggatcctcgaggctatggacattcmaggcccccagatcgcgatttcccagcagacttttttgaaagggatgcaaaagatgctgttgatttgatgaaygygctgaagtttaagaaggtttctctgctggggtggagtgatgggggcataaccgcactcattgctgctgcaaaatatccatcttacatccacaagatggtgatctggggcgccaacgcctacgtcactgacgaagacagcatgatatatgagggcatccgagatgtttccaaatggagtgagagaacaagaaarcctctagaagccctctatgggtatgactactttgccagaacctgtgaaaagtgggtggatggcataagacagtttaaacatctcccagatggtaacatctgccggcacctgctgccccgggtccagtgccccgccttgattgtgcacggtgagaaggatcctctggtcccacggtttcatgccgacttcattcataagcacgtgaaaggctcayggctgcatttgatgccagaaggcaaacacaacctgcattygcgttttgcagatgaattcaacaagttagcagaagacttcctacaatgagaatgcacactcsagtcttggtggttccttcgtgtggggcttgatcgtgttgctgcctgttaacatgatgcctttgaaactctccgcctttgaaactttctacccctccyttcaatcttatcctaaccaaatgagaataatgacatattgaaaacagcctctagcttcaggctgggcacggtggctcacagctataatctcagcactttgggaggctgaggtgggagaattgcctgagcccaggagttcaagaccagcttgtgcaatatagggagactccggctctacaaaaaagagtttttcaaaattagccaggcgaagtggcacacatctgtggtcccagstgctcaggaagctgaggtgggaggatcrcttgagcccaattcaaagctgcagtgagctgtaattgcatcactgcactccaacctgggcaacagagtaagaccttgtcttaaaaaaaaataaaaacataaaaaaaaataaaaaaggaataaagcctctaacttcaatagctatgaaaattaaatccgattttctaagatgaagttgtgacaagttataccattgycttaayaggtgaattcctgccataatttattttcaaataaattttaggtggagaatgtgtagtgttaatgttggmgattttaagmcatcttgaatttgtactgtaccttttatctgagaggttcaagcttcacttgtgtttttatttgtgtttatctatcatattcaaagagaagtagggagagtccgtgcccgaggtcctcaattctaagatcagaggatgtccagaacagcagcagataggggcaggtttgctttaccccatatccctctcctggttcacttttgagagatgaatactttgggccagtaaaggtgaacaaaatatgtattttcatcactctgtactaaaaggacaggaatgtwattaattaaaacactaaagcagaaatcctacattgctattaaaattaaactttgattaccacaataaaaacagtagcaagttaaaccttgacactttatacttaagcatttagagaaagaataaaaattatttgaagtgagaacaca

SEQ ID NO: 4677 - DNA, 2325 bp, Homo sapiens
cgccsacgcagcgagggcgctatggctggcggcctcgcctcctggaaaggccatggtcgctgaggcgacgagcgagggcggggcagcgccgacggggacactcatcccgggagccagagccagcaccgagaggggacggtctacgcgggtgccggcsgttccaggactgcgaaaccacgagccgagtttcggtcgcccatgggaaagcacccggcagggcgtggcttcggggcggggcgggcagagggcggagcaggatggagaggcgaggtgggcggagcagagggcgtggcttcggggcagagtgggccgggtaccgcgcttggtcttagcgcatgcgcrctccyggcagctacgcgacctgtgaccatggtggctgtgctgggcggccgkggcgtgttgcgcctgcggctgcttctctcagcgctgaagcccgggatccacgtcccacgggccggacccgcggccgcgttcggcacctcggtaacctctgccaaagtggctgtgaatggcgttcagctgcattaccagcagactggagagggagatcacgcagtcctgctacttcctgggatgttaggaagtggagagactgattttggacctcagctcaagaacctcaataagaagctcttcacggtggtcgcctgggatcctcgaggctatggacattcmaggcccccagatcgcgatttcccagcagacttttttgaaagggatgcaaaagatgctgttgatttgatgaaygygctgaagtttaagaaggtttctctgctggggtggagtgatgggggcataaccgcactcattgctgctgcaaaatatccatcttacatccacaagatggtgatctggggcgccaacgcctacgtcactgacgaagacagcatgatatatgagggcatccgagatgtttccaaatggagtgagagaacaagaaarcctctagaagccctctatgggtatgactactttgccagaacctgtgaaaagtgggtggatggcataagacagtttaaacatctcccagatggtaacatctgccggcacctgctgccccgggtccagtgccccgccttgattgtgcacggtgagaaggatcctctggtcccacggtttcatgccgacttcattcataagcacgtgaaaggctcayggctgcatttgatgccagaaggcaaacacaacctgcattygcgttttgcagatgaattcaacaagttagcagaagacttcctacaatgagaatgcacactcsagtcttggtggttccttcgtgtggggcttgatcgtgttgctgcctgttaacatgatgcctttgaaactctccgcctttgaaactttctacccctccyttcaatcttatcctaaccaaatgagaataatgacatattgaaaacagcctctagcttcaggctgggcacggtggctcacagctataatctcagcactttgggaggctgaggtgggagaattgcctgagcccaggagttcaagaccagcttgtgcaatatagggagactccggctctacaaaaaagagtttttcaaaattagccaggcgaagtggcacacatctgtggtcccagstgctcaggaagctgaggtgggaggatcrcttgagcccaattcaaagctgcagtgagctgtaattgcatcactgcactccaacctgggcaacagagtaagaccttgtcttaaaaaaaaataaaaacataaaaaaaaataaaaaaggaataaagcctctaacttcaatagctatgaaaattaaatccgattttctaagatgaagttgtgacaagttataccattgycttaayaggtgaattcctgccataatttattttcaaataaattttaggtggagaatgtgtagtgttaatgttggmgattttaagmcatcttgaatttgtactgtaccttttatctgagaggttcaagcttcacttgtgtttttatttgtgtttatctatcatattcaaagagaagtagggagagtccgtgcccgaggtcctcaattctaagatcagaggatgtccagaacagcagcagataggggcaggtttgctttaccccatatccctctcctggttcacttttgagagatgaatactttgggccagtaaaggtgaacaaaatatgtattttcatcactctgtactaaaaggacaggaatgtwattaattaaaacactaaagcagaaatcctacattgctattaaaattaaactttgattaccacaataaaaacagtagcaagttaaaccttgacactttatacttaagcatttagagaaagaataaaaattatttgaagtgagaacaca

SEQ ID NO: 4678 - DNA, 1698 bp, Homo sapiens
atggcagcggggttcgggcgatgctgcaggtgttctttacaggtcctgagaagtatttctcgttttcattggagatcacagcatacaaaagccaatcgacaacgtgaaccaggattaggatttagttttgagttcaccgaacagcagaaagaatttcaagctactgctcgtaaatttgccagagaggaaatcatcccagtggctgcagaayatgataaaactggtgaatatccagtccccctaaytagaagagcctgggaacttggtttaatgaacacacacattccagagaactgtggaggtcttggacttggaacttttgatgcttgtttaattagtgaagaattggcttatggatrtacaggggttcagactgctattgaaggaaattctttggggcaaatgcctattattattgctggaaatgatcaacaaaagaagaagtatttggggagaatgactgaggagccattgatgtgtgcttattgtgtaacagaacctggagcaggctctgatgtagctggtataaagaccaaagcagaaaagaaaggagatgagtatattattaatggtcagaagatgtggataaccaacggaggaaaagctaattggtattttttattggcacgttctgatccagatcctaaagctcctgctaataaagcctttactggattcattgtggaagcagataccccaggaattcagattgggagaaaggaattaaacatgggccagcgaygttcagatactagaggaattgtcttcgaagatgtgaaagtgcctaaagaaaatgttttaattggtgacrgagctggtttcaaagttgcaatgggagcttttgataaaaccagacctgtagtagctgctggtgctgttggattagcacaaagagctttggatgaagctacyaagtatgccctggaaaggaaaactttcggaaagctacttgtagagcaccaagcaatatcatttatgctggctgaaatggcaatgraagttgaactagctagaatgagwtaccagagagcagcttgggaggttgattctggtcgtygaaatacctrttatgcttctattgcaaaggcatttgctggagatattgcaaatcagttagctactgatgctgtgcagayacttggaggcaatggatttaatacakaatatcctgtrgaaaaactaatgagggatgccaaaatctatcagatttatgaaggtacttcacaaattcaaagacttattgtagcccgtgaacacattgacaagtacaaaaattaaaaaaattactgtagaaatattgaataactagaacacaarccactgtttcagctccagaaaaaagaaagggctttaacgttttttccagtgaaaacaaatcctcttatattaaatctaagcaactgcttattatagtagtttatacttttgcttaactctgttatgtctcttaagcaggtttggtttttattaaaatgatgtgttttctttagtaccactttacttgaattacattaacctagaaaactacataggttattttgatctcttaagattaatgtagcagaaatttcttggaattttatttttgtaatgacagaaaagtgggcttagaaagtattcaagatgttacaaaatttacacttaatggtattattaaagttctttttattgcagtttggaaagcatttgtgaaacttt

SEQ ID NO: 4679 - DNA, 3560 bp, Homo sapiens
ctgcaggcacagacaaacaagggggtagcttgcttgggtgaatggtggcaggaactaccgactagacatgtttaagatgagggctccatcttcgcttctctgccagccacgtgtacagtaagaaggggttacaataggcatatgggtgattttgtgcttttcgttcatcttttctgtgtttaaaatgttcagaataagaaattggaacaaaggagacatgaatagacaattcctaatcatctttaagagtccgctttgtgttttacttaccaccwccactttgaaggctttcttgcctataccaggacaaactcagctctttatcccttttccgaattttcctggtactttcactttgaatayagcgcttaattaacattctgccttgtacctaggactaacacastataaattcccagaagacaaagtaggggaatacaataacaggatatagaattttaacagctaaattagatgaatttatgggtgacctttattgggcaaaagaaaatgttaagttagtataagatttagtataagctaccatctcaaaactcagggtctcactggaagagaaagtgactccaggtagaattcctcagggagacattcacttccatcattcgctgaaccaggagctttggacagcctcggattgcaccsgcatatccaaggacaccacatcagcggacaagtcataaacagccttgggaatacgcggaaaggtcaaatttacctaaacaattaaattctcttttaaattttaaggaaacacaagtatgctttcgctttaggtagggcatttgagagcaaaatgtactaatactttgaatccgccaagcagacacgatctgggtttgaccgttctctccgggtaaaggtgaaggctgaccacgggggccgctctccctccaggccccagccacgccctctaacccaggttcccgtcctgcaccgcgccgcaagtccccccaccgttcagcgcaaccgggccctcccagccccgccgccgtccccctcccccgcccyggctctctttccgcgctgcggtcagcctcggcgtcccacagagagggccagaggtggaaacgcagaaaaccaaaccaggactatcagagattgcccggagaggggatgcgacccctccccaggtcgcagcgacggcgcacgcaagggtcacggagcatgcgttggctacccggcgccggggaccgctgccaccccgcctagcgcagcgccccgtccttccgcagcccaaccgcctcttcccgccccgccccatcccgcccacgggctccagtgggcgggaccagaggagtcccgcgttcggggagtatgtcaaggccgtgacccgtgyattattgtccgagtggccggaacgggagccaacatggcagcggggttcgggcgatgctgcagggtcctgagaagtatttctcgttttcattggagatcacagcatacaaaagccaatcgacaacgtgaaccaggattaggatttagttttgagttcaccgaacagcagaaagaatttcaagctactgctcgtaaatttgccagagaggaaatcatcccagtggctgcagaayatgataaaactggtgaatatccagtccccctaaytagaagagcctgggaacttggtttaatgaacacacacattccagagaactgtggaggtcttggacttggaacttttgatgcttgtttaattagtgaagaattggcttatggatrtacaggggttcagactgctattgaaggaaattctttggggcaaatgcctattattattgctggaaatgatcaacaaaagaagaagtatttggggagaatgactgaggagccattgatgtgtgcttattgtgtaacagaacctggagcaggctctgatgtagctggtataaagaccaaagcagaaaagaaaggagatgagtatattattaatggtcagaagatgtggataaccaacggaggaaaagctaattggtattttttattggcacgttctgatccagatcctaaagctcctgctaataaagcctttactggattcattgtggaagcagataccccaggaattcagattgggagaaaggaattaaacatgggccagcgaygttcagatactagaggaattgtcttcgaagatgtgaaagtgcctaaagaaaatgttttaattggtgacrgagctggtttcaaagttgcaatgggagcttttgataaaaccagacctgtagtagctgctggtgctgttggattagcacaaagagctttggatgaagctacyaagtatgccctggaaaggaaaactttcggaaagctacttgtagagcaccaagcaatatcatttatgctggctgaaatggcaatgraagttgaactagctagaatgagwtaccagagagcagcttgggaggttgattctggtcgtygaaatacctrttatgcttctattgcaaaggcatttgctggagatattgcaaatcagttagctactgatgctgtgcagayacttggaggcaatggatttaatacakaatatcctgtrgaaaaactaatgagggatgccaaaatctatcagatttatgaaggtacttcacaaattcaaagacttattgtagcccgtgaacacattgacaagtacaaaaattaaaaaaattactgtagaaatattgaataactagaacacaarccactgtttcagctccagaaaaaagaaagggctttaacgttttttccagtgaaaacaaatcctcttatattaaatctaagcaactgcttattatagtagtttatacttttgcttaactctgttatgtctcttaagcaggtttggtttttattaaaatgatgtgttttctttagtaccactttacttgaattacattaacctagaaaactacataggttattttgatctcttaagattaatgtagcagaaatttcttggaattttatttttgtaatgacagaaaagtgggcttagaaagtattcaagatgttacaaaatttacatttagaaaatattgtagtatttgaatactgtcaacttgacagtaactttgtagacttaatggtattattaaagttctttttattgcagtttggaaagcatttgtgaaactttctgtttggcacagaaacagtcaaaattttgacattcatattctcctattttacagctacaagaactttcttgaaaatcttatttwattctgagcccatatttcacttaccttatttaaaataaatcaataaagcttgccttaaattatttttatatgactgttggtctctaggtagcctttggtctattgtacacaayctcatttcatatgtttgcattttggcaaagaacttaataaaattgttcagtgcttattatcatatctttctgtattttttccaggaaatttcattacttcgtgtaatagtgtatatttcttgtatttactatgatgaaaaaaggtcgttttaattttgaattgaataaagttacctgttcattttttattagatattttaaagacytcagaaaatataaatatgaaataatt

SEQ ID NO: 4680 - DNA, 3452 bp, Homo sapiens
agtcaggggtcacggcggcgtaggctgtggcgggaaacgctgtttgaagcgggatggatggcaagcggcggccaggcccagggccyggggtgcccccaaagcgggcccrtgggggcctctgggatgatgatgatgcacctyggccatcccaattcgaggaggacctggcactgatggaggagatggaggcagaacacaggctgcaggagcaggaggaggaggagctgcagtcagtcctggagggggttgcagacgggcaggtcccaccatcagccatagatcctcgstggcttcggcccacaccaccagcgctggacccccagacagagcccctcatcttccaacagttggagattgaccattatgtgggcccagcrcagcctgtgcctggggggcccccaccatcccrcggctccgtgcctgtgctccgcgccttcggggtcaccgatgaggggttctctgtctgctgccacatccacggcttcgctccctacttctacaccccagcgccccctggtttcgggcccgagcacatgggtgacctgcaacgggagctgaacttggccatcarccgggacagtcrcggggggagggagctgactgggccggccgtgctggctgtggaactgtgctcccgagagagcatgtttgggtaccacgggcacggcccctccccgttcctgcgcatcaccgtggcgctgccgcgcctcgtggccccggcccgccgtctcctggaacagggcatccgtgtggcaggcctgggcacgcccagcttcgcgccctacgaggccaacgtcgactttgagatccggttcatggtggacacggacatcgtyggctgcaactggctggagctcccagcygggaaatacgccctgaggctgaaggagaaggctacgcagtgccagctggaggcggacgtgctgtggtctgacgtggtcagtcacccaccggaagggccatggcagcgcattgcgcccttgcgcgtgctcagcttcgatatcgagtgcgccggccgcaaaggcatcttccctgagcctgagcgggaccctgtcatccagatctgctcgctgggcctgcgctggggggagccggagcccttcctacgcctggcgctcaccctgcggccctgtgcccccatcctgggtgccaaggtgcagagctacgagaaggaggaggacctgctgcaggcctggtccaccttcatccgtatcatggaccccgaygtgatcaccggttacaacatccagaacttcgaccttccgtacctcatctctcgggcccagaccctcaaggtacaaacattccctttcctgggccgtgtggcyggcctttgctccaacatccgggactcttcattccagtccaagcagacgggccggcgggacaccaaggttgtcagcatggtgggccgcgtgcagatggacatgctgcaggtgctgctgcgggagtacaagctccgctcctacacgctcaatgccgtgagcttccacttcctgggcgagcagaaggaggacgtgcagcacagcatcatcacygacctgcagaatgggaacgaccagacccgccgccgcctggctgtgtactgcctraaggatgcctacctgccactgcggctgctggagcggctcatggtgctggtgaacgccgtggagatggcgagggtcactggcgtgcccctcagctacctgctcagtcgtggccagcaggtcaaggtcgtatcccagctgttgcggcaggccatgcacgaggggctgctgatgcccgtggtgaagtcagagggcggcgaggactacacgggagccactgtcatcgagcccctcaaagggtactacgacgtccccatcgccaccctggacttctcctcgctgtacccgtccatcatgatggcccacaacctgtgttacaccacrctccttcggcccgggactgcacagaaactgggcctgactgaggatcagttcatcaggacccccaccggggacgagtttgtgaagacctcagtgcggaaggggctgctgccccagatcctggagaacctgctcagtgcccggaagagggccaaggccgagctggccaaggagacagaccccctccggcgccaggtcctggatggacggcagctggcgctgaaggtgagcgccaactccgtatacggcttcactggcgcccaggtgggcaagttgccgtgcctggagatctcacagagcgtcacggggttcggacgtcagatgatcgagaaaaccaagcagctggtggagtctaagtacacagtggagaatggctacagcaccagygccaaggtggtgtatggtgacactgactccgtcatgtgccgattcggcgtgtcctcggtggctgaggcgatggccctggggcgggaggccgcggactgggtgtcaggtcacttcccgtcgcccatccggctggagtttgagaaggtctacttcccatacctgcttatcagcaagaagcgctacgcgggcctgctcttctcctcccggcccgacgcccacgaccgcatggactgcaagggcctggaggccgtgcgcagggacaactgccccctcgtggccaacctggtcactgcctcactgcgccgcctgctcatcgaccgagaccctgagggcgcggtggctcacgcacaggacgtcatctcggacctgctgtgcaaccgcatcgatatctcccagctggtcatcaccaaggagctgacccgcgcggcctccgactatgccggcaagcaggcccacgtggagctggccgagaggatgaggaagcgggaccccgggagtgcgcccagcctgggcgaccgcgtcccctacgtgatcatcagtgccgccaagggtgtggccgcctacatgaagtcggaggacccgctgttcgtgctggagcacagcctgcccattgacacgcagtactacctggagcagcagctggccaagcccctcctgcgcatcttcgagcccatcctgggcgagggccgtgccgaggctgtgctactgcggggggaccacacgcgctgcaagacggtgctcacgggcaaggtgggcggcctcctggccttcgccaaacgccgcaactgctgcattggctgccgcacagtgctcagccaccagggagccgtgtgtgagttctgccagccccgggagtctgagctgtatcagaaggaggtatcccatctgaatgccctggaggagcgcttctcgcgcctctggacgcagtgccagcgctgccagggcagcctgcacgaggacgtcatctgcaccagccgggactgccccatcttctacatgcgcaagaaggtgcggaaggacctggaagaccaggagcagctcctgcggcgcttcggaccccctggacctgaggcctggtgaccttgcaagcatcccatggggcgggggcgggaccagggagaattaataaagttctggacttttgctayatggtgc

SEQ ID NO: 4681 - DNA, 594 bp, Homo sapiens
agcccaggcccatcccctgcatcccgccccccaccgccgccctgctcaccgtccagccctccagggcctcctggtactcggcggcctcggtggcctcccgcagcagctcgtgggggccaggtgggggtcactatggccctacctcctcccgccggtactccggactcaggaaggcctcgtagcggctcctcaggaagcggcccagctccagctgctggcggaccccctcctggggacagaacagcctcagcctaccmctccccacccctcccacccttgccctcaccgcctacccgcttctcacygtggtcagctggcccaggcctcgtggccacagggtggaggccacctccttgtgtgggtccatggggtaggaggccagcggggcccggtcgccatggcggaatacctggggacaggactggtcagcctgggcttcctcccccactggaccctcaccccagccttctctctctctcctccagtcctcagaggggtcctccgggacccagagctgaccctgtccctttctcctcacagccctccagtggccctgtgcccccacccaagataagaatcccaggccctccactg

SEQ ID NO: 4682 - DNA, 4022 bp, Homo sapiens
cgggatgcgccgcagcgaatggtcgcgccgggcgccgctctgagtgacctttcacccgcgcccagcggttccgggcggcagcacaaggcggtagccatggcggaggcggcggctgcagcgggtgggactggcttgggcgcgggcgcgagctacgggtctgcagcggaccgggaccgggacccggacccggaccgcgccgggcggaggctgcgggttctctctggccatctgctgggccggccycgggaggctctgagtaccaatgagtgcaaagcgcggagagccgcgtcggcggccacggcrgcgcccacggccactcccgccgcgcaggagtcgggcaccatcccaaagaagcggcaagaagttatgaaatggaatggatggggatataatgattctaaattcatcttcaataagaagggccaaattgaattgactgggaaaaggtaccctcttagtggcatgggtttaccaacatttaaagaatggatccaaaatacccttggagtaaatgtggagcataaaactacctctaaagcatccttaaatcctagtgatacacctccttctgttgtaaatgaagattttcttcatgaccttaaagaaactaatatttcatattcacaagaggcagatgatcgagtatttagagctcatggtcattgtcttcatgagatatttttgctcagggaaggaatgtttgagcgaattcctgatatagttttatggccaacatgccatgatgatgtagttaagattgtgaatctagcttgcaaatataatctttgtatcataccaattggtggaggaacaagtgtttcatatggcctgatgtgtcctgcagatgagacaagaacaattatttctttggacacttcacaaatgaatcgaattctctgggttgatgagaacaatttgacagctcatgtrgaggctggcataacaggacaagagttggaaagacagcttaaagaaagtggttattgtacaggtcatgaaccagattccctggagttcagtaytgtaggaggatgggtatctactcgcgcatcaggcatgaagaagaatatctatggcaatatcgaggacctggtggttcatataaaaatggtaacacctagaggtataatagaaaaaagctgtcaaggacctcgtatgtcaacaggccctgatatccatcacttcatcatgggatctgaaggaactcttggtgtaataacagaagctacaataaaaatcagaccagtccctgaataccaaaagtatggctcagtagctttccctaattttgaacaaggagtagcctgtttaagagaaattgcaaaacagagatgtgctccggcatctattcgcctcatggacaacaagcagtttcagtttggtcatgctcttaaacctcaggtttcctctatytttacatcatttttggacggattaaaaaagttttatattacaaagtttaaaggatttgacccaaatcagctaagtgtagccacattacygtttgagggggatcgtgagaaggttcttcaacatgaaaaacaagtgtatgatattgctgcaaaatttggtgggttggcagctggagaagataatggacagagaggttatttgctgacctatgttattgcatacattcgagacttggctttggaatactatgtattaggagaatcttttgagacttctgctccttgggacagggtggtagatctctgtagaaatgtaaaagaaagaataacaagggaatgcaaagagaagggtgttcagtttgctcctttttctacatgcagggtgacrcagacttacgatgcaggtgcttgtatctacttctattttgcctttaactacaggggaattagtgacccactgaccgtatttgaacaaactgaggcagctgctagagaagaaatccttgctaatggagggagcctgtcacatcaccatggagtgggcaagttacggaagcaatggctaaaggaaagtatctctgatgtcggctttgggatgctgaagtctgtcaaggaatatgtggaccccaataacatctttggaaacagaaaccttttataaatccattagtaccattacaaaaaaatgtcaattttttttttaagttttcaactgtggttatactagtaatcaaatatatcatggactatattttggatacatttgtttctttggtttaaaataagtttgttttcattctgtagtttgttttgtttctacatctatggattgacagatagtattcctaaatctctctcattgtaggtacatcattttacattcagcggttgtcatttcaaattttagtcaggcagcacaaagctgtcaattattccagaggaagctgctgccagctgttttgtattgttgcttcctcttggggaacaaagacagatttggtatcattgattgctcagctagcctctttttaaaagaacgtttctgggaatcagatgtctagggaaggattccactgaggagtgatacacgtgtacattgtttaagagcatagtctagtgtgagtaggccrttaaggggaaggatattcatgaaagaatttaggcaacctgttatttagaaagccttcacgtctgtaaggtgcttggcctacttttttttttaaattagtatacatgcataaaaccttgtatcatcaatatacaaattattctgttaggggacatgtttttgttctccatgtttctgyttctattgtggtatgagttgtatttgtatcactgagataacctattgttatattctaattcattgataatatgttttgtaagaaaagctgacatccttcattgcaagtgaagaacaggtttaccatgaaatgaatgcctttattcaacttagagtcctaatgtttctgatttcacattcttgttgctgaaatgcagaagaaacagctacagcaagagcrgaaggaaaactcttagacttaatgtctccaattgcaagaattgtttcactaaagaaacagtcatcattcaactactgaatttgaaagcctcagcagtttcaatgacaaaaatcatttttgattttttaaaattaatcccaatggcatgataaattttcatataaaaagtaaagtttcaatttagtttttaataatggtttaatgccttttttgaataactggtttaacctaattttttttaaatgtaatgtattaatgcatataccataatcaaaagtttgaaatatcctgtttcttaaataatgagaacattaatcacatttagcaagcatttgtacattcaaacctggatattaaagtgaaatgattactttgaatcactgtctgccaaggttcatgattcacattttgagatggattcttttcttaatgcaatacctaacttttgataattttttaaaactaatatttgatcagataatgtaagtcaaaatgcagacgatcctttaaaaggatgcattgtctgtgtatgtagcaacagctccaaagtatttttgggcagtttgataccttttatatctgaagtagccttaaccagaaaaatggtaatttaaaattgacaaaatgatatttttaagacttcaaaatgataaataatttttaactattaaaattggcctcaaactaataaatctgtaattaaattagaattaaatatcagtttaacaacaaaatgaaatatttattttttagaagctgcctctcttcattggtcatttatttttaattataaaatttccaacagatctttgctttaagcccttgatatttgacctagttggacacttgatgaggaagttgcctctagaattataaaaatctcagctttataaaatgcatctgttcacgaaggtaatttctttaattggtgatcaaaatataaaattaaagaaggtactaatgtctcactggaagtatatatatatatatatatatatgtatgcgtgtgtgtgtgtgtatatatatatatatatgtatatgtttctgagtaatttttaaaaaataaaacaggttaataagaaga

SEQ ID NO: 4683 - DNA, 4015 bp, Homo sapiens
cgggatgcgccgcagcgaatggtcgcgccgggcgccgctctgagtgacctttcacccgcgcccagcggttccgggcggcagcacaaggcggtagccatggcggaggcggcggctgcagcgggtgggactggcttgggcgcgggcgcgagctacgggtctgcagcggaccgggaccgggacccggacccggaccgcgccgggcggaggctgcgggttctctctggccatctgctgggccggccycgggaggctctgagtaccaatgagtgcaaagcgcggagagccgcgtcggcggccacggcrgcgcccacggccactcccgccgcgcaggagtcgggcaccatcccaaagaagcggcaagaagttatgaaatggaatggatggggatataatgattctaaattcatcttcaataagaagggccaaattgaattgactggtaccctcttagtggcatgggtttaccaacatttaaagaatggatccaaaatacccttggagtaaatgtggagcataaaactacctctaaagcatccttaaatcctagtgatacacctccttctgttgtaaatgaagattttcttcatgaccttaaagaaactaatatttcatattcacaagaggcagatgatcgagtatttagagctcatggtcattgtcttcatgagatatttttgctcagggaaggaatgtttgagcgaattcctgatatagttttatggccaacatgccatgatgatgtagttaagattgtgaatctagcttgcaaatataatctttgtatcataccaattggtggaggaacaagtgtttcatatggcctgatgtgtcctgcagatgagacaagaacaattatttctttggacacttcacaaatgaatcgaattctctgggttgatgagaacaatttgacagctcatgtrgaggctggcataacaggacaagagttggaaagacagcttaaagaaagtggttattgtacaggtcatgaaccagattccctggagttcagtaytgtaggaggatgggtatctactcgcgcatcaggcatgaagaagaatatctatggcaatatcgaggacctggtggttcatataaaaatggtaacacctagaggtataatagaaaaaagctgtcaaggacctcgtatgtcaacaggccctgatatccatcacttcatcatgggatctgaaggaactcttggtgtaataacagaagctacaataaaaatcagaccagtccctgaataccaaaagtatggctcagtagctttccctaattttgaacaaggagtagcctgtttaagagaaattgcaaaacagagatgtgctccggcatctattcgcctcatggacaacaagcagtttcagtttggtcatgctcttaaacctcaggtttcctctatytttacatcatttttggacggattaaaaaagttttatattacaaagtttaaaggatttgacccaaatcagctaagtgtagccacattacygtttgagggggatcgtgagaaggttcttcaacatgaaaaacaagtgtatgatattgctgcaaaatttggtgggttggcagctggagaagataatggacagagaggttatttgctgacctatgttattgcatacattcgagacttggctttggaatactatgtattaggagaatcttttgagacttctgctccttgggacagggtggtagatctctgtagaaatgtaaaagaaagaataacaagggaatgcaaagagaagggtgttcagtttgctcctttttctacatgcagggtgacrcagacttacgatgcaggtgcttgtatctacttctattttgcctttaactacaggggaattagtgacccactgaccgtatttgaacaaactgaggcagctgctagagaagaaatccttgctaatggagggagcctgtcacatcaccatggagtgggcaagttacggaagcaatggctaaaggaaagtatctctgatgtcggctttgggatgctgaagtctgtcaaggaatatgtggaccccaataacatctttggaaacagaaaccttttataaatccattagtaccattacaaaaaaatgtcaattttttttttaagttttcaactgtggttatactagtaatcaaatatatcatggactatattttggatacatttgtttctttggtttaaaataagtttgttttcattctgtagtttgttttgtttctacatctatggattgacagatagtattcctaaatctctctcattgtaggtacatcattttacattcagcggttgtcatttcaaattttagtcaggcagcacaaagctgtcaattattccagaggaagctgctgccagctgttttgtattgttgcttcctcttggggaacaaagacagatttggtatcattgattgctcagctagcctctttttaaaagaacgtttctgggaatcagatgtctagggaaggattccactgaggagtgatacacgtgtacattgtttaagagcatagtctagtgtgagtaggccrttaaggggaaggatattcatgaaagaatttaggcaacctgttatttagaaagccttcacgtctgtaaggtgcttggcctacttttttttttaaattagtatacatgcataaaaccttgtatcatcaatatacaaattattctgttaggggacatgtttttgttctccatgtttctgyttctattgtggtatgagttgtatttgtatcactgagataacctattgttatattctaattcattgataatatgttttgtaagaaaagctgacatccttcattgcaagtgaagaacaggtttaccatgaaatgaatgcctttattcaacttagagtcctaatgtttctgatttcacattcttgttgctgaaatgcagaagaaacagctacagcaagagcrgaaggaaaactcttagacttaatgtctccaattgcaagaattgtttcactaaagaaacagtcatcattcaactactgaatttgaaagcctcagcagtttcaatgacaaaaatcatttttgattttttaaaattaatcccaatggcatgataaattttcatataaaaagtaaagtttcaatttagtttttaataatggtttaatgccttttttgaataactggtttaacctaattttttttaaatgtaatgtattaatgcatataccataatcaaaagtttgaaatatcctgtttcttaaataatgagaacattaatcacatttagcaagcatttgtacattcaaacctggatattaaagtgaaatgattactttgaatcactgtctgccaaggttcatgattcacattttgagatggattcttttcttaatgcaatacctaacttttgataattttttaaaactaatatttgatcagataatgtaagtcaaaatgcagacgatcctttaaaaggatgcattgtctgtgtatgtagcaacagctccaaagtatttttgggcagtttgataccttttatatctgaagtagccttaaccagaaaaatggtaatttaaaattgacaaaatgatatttttaagacttcaaaatgataaataatttttaactattaaaattggcctcaaactaataaatctgtaattaaattagaattaaatatcagtttaacaacaaaatgaaatatttattttttagaagctgcctctcttcattggtcatttatttttaattataaaatttccaacagatctttgctttaagcccttgatatttgacctagttggacacttgatgaggaagttgcctctagaattataaaaatctcagctttataaaatgcatctgttcacgaaggtaatttctttaattggtgatcaaaatataaaattaaagaaggtactaatgtctcactggaagtatatatatatatatatatatatgtatgcgtgtgtgtgtgtgtatatatatatatatatgtatatgtttctgagtaatttttaaaaaataaaacaggttaataagaaga

SEQ ID NO: 4684 - DNA, 1692 bp, Homo sapiens
cccctcccccgacccgcttccccaaactgggctgctacccccaaagcctggtcaggaaagaccctacctccataggcaaaggggttggagggcctcaattctggatttccacgtgcagcagccctgaccaacgctccaataggccgggatccagccatacttcaatggatcccaggggtatcttgaaggcatttcccaagcggcagaaaattcatgctgatgcatcatcaaaagtacttgcaaagattcctaggagggaagagggagaagaagcagaaggaggcctgcagtatccctgggattgggaagcggatggctgagaaaatcatagagatcctggagagcgggcatttgcggaagctggaccatatcagtgagagcgtgcctgtcttggagctcttctccaacatctggggagctgggaccaagactgcccagatgtggtaccaacagggcttccgaagtctggaagacatccgcagccaggcctccctgacaacccagcaggccatcggcctgaagcattacagtgacttcctggaacgtatgcccagggaggaggctacagagattgagcagacagtccagaaagcagcccaggcctttaactcygggctgctgtgtgtggcatgtggttcataccgacggggaaaggcgacctgtggtgatgtcgacgtgctcatcactcacccagatggcyggtcccaccggggtatcttcagccgcctccttgacagtcttcggcaggaagggttcctcacagatgacttggtgagccaagaggagaatggtcagcaacagaagtacttgggggtgtgccggctcccagggccagggcggcggcaccggcgcctggacatcatcgtggtgccctatagcgagtttgcctgtgccctgctctacttcaccggctctgcacacttcaaccgctccatgcgagccctggccaaaaccaagggcatgagtctgtcagaacatgccctcagcactgctgtggtccggaacacccatggctgcaaggtggggcctggccgagtgctgcccactcccactgagaaggatgtcttcaggctcttaggcctcccctaccgagaacctgctgagcgggactggtgacccatggctgggggtgctgaggagagccgagttggactggctacccctcctggccacccagtactccctccagcctcagctggctgaacctcgccgctccaaccaccagcttcctcagcgagcagggcccagggctctgggcctgaagcaagagccagcccggctcccagtgtctgcccggctcccagtgtctgcccagccctctcccagacaggagcaggctgccaccccttctacctcaccactgcccctcgaagaattttgcaaatggccccttgccccattttaagcaggagcaggtggctggtttgaagccccaggtatcccccttccctgctatgggaaaggccaagctgctgggtggggacagaagctgcaggggagagggaagcagccgtgctgtcaacatcatccggcaccctctggggtaggagaacagccattccacatgtgttccctctatccgtcctgcttccyggkcagctggtggtgctgggaatggggtgccccagccttggtgaggacagtgttgggaggcccaggggcccagtaaagtgcatttgacattgaacctgc

SEQ ID NO: 4685 - DNA, 2353 bp, Homo sapiens
cttcgtccgctctcattggctctgctggccgggatccagccatacttcaatggatcccaggggtatcttgaaggcatttcccaagcggcagaaaattcatgctgatgcatcatcaaaagtacttgcaaagattcctaggagggaagagggagaagaagcagaagagtggctgagctcccttcgggcccatgttgtgcgcactggcattggacgagcccgggcagaactctttgagaagcagattgttcagcatggcggccagctatgccctgcccagggcccaggtgtcactcacattgtggtggatgaaggcatggactatgagcgagccctccgccttctcagactaccccagctgcccccgggtgctcagctggtgaagtcagcctggctgagcttgtgccttcaggagaggaggctggtggatgtagctggattcagcatcttcatccccagtaggtacttggaccatccacagcccagcaaggcagagcaggatgcttctattcctcctggcacccatgaggccctgcttcagacagccctttctcctcctcctcctcccaccaggcctgtgtctcctccccaaaaggcaaaagaggcaccaaacmcccaagcccagcccatctctgatgatgaagccagtgatggggaagaaacccaggttagtgcagctgatctggaagccctcatcagtggccactaccccmcctcccttgagggagattgtgagcctagcccagcccctgctgtcctggataagtgggtctgtgcacagccctcaagccagaaggcgaccaatcacaacctccatatcacagagaagctggaagttctggccaaagcctacagtgttcagggagacaagtggagggccctgggctatgccaaggccatcaatgccctcaagagcttccataagcctgtcacctcgtaccaggaggcctgcagtatccctgggattgggaagcggatggctgagaaaatcatagagatcctggagagcgggcatttgcggaagctggaccatatcagtgagagcgtgcctgtcttggagctcttctccaacatctggggagctgggaccaagactgcccagatgtggtaccaacagggcttccgaagtctggaagacatccgcagccaggcctccctgacaacccagcaggccatcggcctgaagcattacagtgacttcctggaacgtatgcccagggaggaggctacagagattgagcagacagtccagaaagcagcccaggcctttaactcygggctgctgtgtgtggcatgtggttcataccgacggggaaaggcgacctgtggtgatgtcgacgtgctcatcactcacccagatggcyggtcccaccggggtatcttcagccgcctccttgacagtcttcggcaggaagggttcctcacagatgacttggtgagccaagaggagaatggtcagcaacagaagtacttgggggtgtgccggctcccagggccagggcggcggcaccggcgcctggacatcatcgtggtgccctatagcgagtttgcctgtgccctgctctacttcaccggctctgcacacttcaaccgctccatgcgagccctggccaaaaccaagggcatgagtctgtcagaacatgccctcagcactgctgtggtccggaacacccatggctgcaaggtggggcctggccgagtgctgcccactcccactgagaaggatgtcttcaggctcttaggcctcccctaccgagaacctgctgagcgggactggtgacccatggctgggggtgctgaggagagccgagttggactggctacccctcctggccacccagtactccctccagcctcagctggctgaacctcgccgctccaaccaccagcttcctcagcgagcagggcccagggctctgggcctgaagcaagagccagcccggctcccagtgtctgcccggctcccagtgtctgcccagccctctcccagacaggagcaggctgccaccccttctacctcaccactgcccctcgaagaattttgcaaatggccccttgccccattttaagcaggagcaggtggctggtttgaagccccaggtatcccccttccctgctatgggaaaggccaagctgctgggtggggacagaagctgcaggggagagggaagcagccgtgctgtcaacatcatccggcaccctctggggtaggagaacagccattccacatgtgttccctctatccgtcctgcttccyggkcagctggtggtgctgggaatggggtgccccagccttggtgaggacagtgttgggaggcccaggggcccagtaaagtgcatttgacattgaacctgc

SEQ ID NO: 4686 - DNA, 1323 bp, Homo sapiens
atggaagccttgtgtgtgtgctcactcatgcctcttcattggtcctggatccttacagcttcccatctggctgcttttttccagggcttccgaagtctggaagacatccgcagccaggcctccctgacaacccagcaggccatcggcctgaagcattacagtgacttcctggaacgtatgcccagggaggaggctacagagattgagcagacagtccagaaagcagcccaggcctttaactcygggctgctgtgtgtggcatgtggttcataccgacggggaaaggcgacctgtggtgatgtcgacgtgctcatcactcacccagatggcyggtcccaccggggtatcttcagccgcctccttgacagtcttcggcaggaagggttcctcacagatgacttggtgagccaagaggagaatggtcagcaacagaagtacttgggggtgtgccggctcccagggccagggcggcggcaccggcgcctggacatcatcgtggtgccctatagcgagtttgcctgtgccctgctctacttcaccggctctgcacacttcaaccgctccatgcgagccctggccaaaaccaagggcatgagtctgtcagaacatgccctcagcactgctgtggtccggaacacccatggctgcaaggtggggcctggccgagtgctgcccactcccactgagaaggatgtcttcaggctcttaggcctcccctaccgagaacctgctgagcgggactggtgacccatggctgggggtgctgaggagagccgagttggactggctacccctcctggccacccagtactccctccagcctcagctggctgaacctcgccgctccaaccaccagcttcctcagcgagcagggcccagggctctgggcctgaagcaagagccagcccggctcccagtgtctgcccggctcccagtgtctgcccagccctctcccagacaggagcaggctgccaccccttctacctcaccactgcccctcgaagaattttgcaaatggccccttgccccattttaagcaggagcaggtggctggtttgaagccccaggtatcccccttccctgctatgggaaaggccaagctgctgggtggggacagaagctgcaggggagagggaagcagccgtgctgtcaacatcatccggcaccctctggggtaggagaacagccattccacatgtgttccctctatccgtcctgcttccyggkcagctggtggtgctgggaatggggtgccccagccttggtgaggacagtgttgggaggcccaggggcccagtaaagtgcatttgacattgaacctgc

SEQ ID NO: 4687 - DNA, 2683 bp, Homo sapiens
cattggctctgctggtaagtggtctattcctgcccacccccgggtgactagcttggccagtagtcgaccccacccggggaccgactctgggggttggagagactcttggggccggggtcgggcactccagctttcttctagccccgagctgggattccctggcctgcgccagctgcgtacacggcgagtacaccgcacctgcccgggacttcacccgcagctgcgagactcctccattcccggagggctccccacacctgctgcggccgtgccccatctccccgcagctgcggcgctgagcacccccatgtcgagaggctgagaccaggacagcagccctgaccaacgctccaataggccgggatccagccatacttcaatggatcccaggggtatcttgaaggcatttcccaagcggcagaaaattcatgctgatgcatcatcaaaagtacttgcaaagattcctaggagggaagagggagaagaagcagaagagtggctgagctcccttcgggcccatgttgtgcgcactggcattggacgagcccgggcagaactctttgagaagcagattgttcagcatggcggccagctatgccctgcccagggcccaggtgtcactcacattgtggtggatgaaggcatggactatgagcgagccctccgccttctcagactaccccagctgcccccgggtgctcagctggtgaagtcagcctggctgagcttgtgccttcaggagaggaggctggtggatgtagctggattcagcatcttcatccccagtaggtacttggaccatccacagcccagcaaggcagagcaggatgcttctattcctcctggcacccatgaggccctgcttcagacagccctttctcctcctcctcctcccaccaggcctgtgtctcctccccaaaaggcaaaagaggcaccaaacmcccaagcccagcccatctctgatgatgaagccagtgatggggaagaaacccaggttagtgcagctgatctggaagccctcatcagtggccactaccccmcctcccttgagggagattgtgagcctagcccagcccctgctgtcctggataagtgggtctgtgcacagccctcaagccagaaggcgaccaatcacaacctccatatcacagagaagctggaagttctggccaaagcctacagtgttcagggagacaagtggagggccctgggctatgccaaggccatcaatgccctcaagagcttccataagcctgtcacctcgtaccaggaggcctgcagtatccctgggattgggaagcggatggctgagaaaatcatagagatcctggagagcgggcatttgcggaagctggaccatatcagtgagagcgtgcctgtcttggagctcttctccaacatctggggagctgggaccaagactgcccagatgtggtaccaacagggcttccgaagtctggaagacatccgcagccaggcctccctgacaacccagcaggccatcggcctgaagcattacagtgacttcctggaacgtatgcccagggaggaggctacagagattgagcagacagtccagaaagcagcccaggcctttaactcygggctgctgtgtgtggcatgtggttcataccgacggggaaaggcgacctgtggtgatgtcgacgtgctcatcactcacccagatggcyggtcccaccggggtatcttcagccgcctccttgacagtcttcggcaggaagggttcctcacagatgacttggtgagccaagaggagaatggtcagcaacagaagtacttgggggtgtgccggctcccagggccagggcggcggcaccggcgcctggacatcatcgtggtgccctatagcgagtttgcctgtgccctgctctacttcaccggctctgcacacttcaaccgctccatgcgagccctggccaaaaccaagggcatgagtctgtcagaacatgccctcagcactgctgtggtccggaacacccatggctgcaaggtggggcctggccgagtgctgcccactcccactgagaaggatgtcttcaggctcttaggcctcccctaccgagaacctgctgagcgggactggtgacccatggctgggggtgctgaggagagccgagttggactggctacccctcctggccacccagtactccctccagcctcagctggctgaacctcgccgctccaaccaccagcttcctcagcgagcagggcccagggctctgggcctgaagcaagagccagcccggctcccagtgtctgcccggctcccagtgtctgcccagccctctcccagacaggagcaggctgccaccccttctacctcaccactgcccctcgaagaattttgcaaatggccccttgccccattttaagcaggagcaggtggctggtttgaagccccaggtatcccccttccctgctatgggaaaggccaagctgctgggtggggacagaagctgcaggggagagggaagcagccgtgctgtcaacatcatccggcaccctctggggtaggagaacagccattccacatgtgttccctctatccgtcctgcttccyggkcagctggtggtgctgggaatggggtgccccagccttggtgaggacagtgttgggaggcccaggggcccagtaaagtgcatttgacattgaacctgc

SEQ ID NO: 4688 - DNA, 1483 bp, Homo sapiens
cgccgcgcgccgattggtggcgtccgggactctccctgcaggtgactgacggcgccggccgcccctgcccgtcgcccgcccgctgctgccgcccgcccggggtgtggagcccggccgctgctcgcgggctgagtgtctgtcgctgctgccgcctccacccagcctccgccatggacctcttcggggacctgccggagcccgagcgctcgccgcgcccggctgccgggaaagaagctcagaaaggacccctgctctttgatgacctccctccggccagcagtactgactcaggatcagggggacctttgctttttgatgatctcccaccmgctagcagtggcgattcaggttctcttgccacatcaatrtcccagatggtaaagactgaagggaaaggagcaaagagaaaaacctccgaggaagagaagaatggcagtgaagagcttgtggaaaagaaagtttgtaaagcctcttcggtgatctttggtctgaagggctatgtggctgagcggaagggtgagagggaggagatgcaggatgcccacgtcatcctgaacgacatcaccgaggagtgtaggcccccatcgtccctcattactcgggtttcatattttgctgtttttgatggacatggaggaattcgagcctcaaaatttgctgcacagaatttgcatcaaaacttaatcagaaaatttcctaaaggagatgtaatcagtgtagagaaaaccgtgaagagatgccttttggacactttcaagcatactgatgaagagttccttaaacaagcttccagccagaagcctgcctggaaagatgggtccactgccacgtgtgttctggctgtagacaacattctttatattgccaacctcggagatagtcgggcaatcttgtgtcgttataatgaggagagtcaaaaacatgcagccttaagcctcagcaaagagcataatccaactcagtatgaagagcggatgaggatacagaaggctggaggaaacgtcagggatgggcgtgttttgggcgtgctagaggtgtcacgctccattggggacgggcagtacaagcgctgcggtgtcacctctgtgcccgacatcagacgctgccagctgacccccaatgacaggttcattttgttggcctgtgatgggctcttcaaggtctttaccccagaagaagccgtgaacttcatcttgtcctgtctcgaggatgaaaagatccagacccgggaagggaagtccgcagccgaygcccgctacgaagcagcctgcaacaggctggccaacaaggcggtgcagcggggctcggccgacaaygtcactgtgatgrtggtgcggatagggcactgaggggtggcgcgcggccaggagcacgcatggtattgacttaaaaggttcattttgtgtgtgtgcacattgtgtgttttgtgtactcctgtgggactcccatggttgtaaataaaggtttctctttttttttccta

SEQ ID NO: 4689 - DNA, 2495 bp, Homo sapiens
tgctgtggagcatggtttctgcacacctggaatgactggaaccccaaagactcaagaaggagctaaagatcttgaagtagacatgaataaaacagaagttactcccaggctgtggaccacctgtcgagatggagaagtccttctgaggctatccaaacacggaccaggccatgagaccccgatgaccatccctgaattttttcgagagtcagtcaaccgatttggaacttatccagccctcgcatccaagaatggcaaaaagtgggaaattctgaatttcaaccagtactatgaggcttgtcggaaggctgcaaaatccttgatcaagctgggyttggagcgtttccacggagttggtatcctggggtttaactctgcagagtggtttatcactgctgttggtgccatcctagccrggggtctttgtgttggtatttatgccaccaactctgccgaggyttgtcaatatgtcatcactcatgccaragtgaacatcttgctggttgagaatgatcaacagttacagaaaatcctttcgattccacagagcagcctagagcccctaaaagcgatcatccagtacagactrccaatgaagaagaacaacaacttgtactcttgggatgatttcatggaacttggcagaagtatccctgacacccaactggagcaggtcatcgagagccagaaggcgaatcaatgcgcagtgctcatctacacttcagggaccacaggcatacccaagggagtgatgctcagtcatgacaacatcacgtggattgcaggagcagtgacaaaggactttaaactgacagacaagcatgagacggtggttagctacctcccactcagccatattgcagcacagatgatggacatctgggtacccataaagattggggcgctcacatactttgctcaagcagatgctctcaagggcaccttggtaagtactctaaaggaggtaaaacctactgtcttcattggagtgcctcaaatttgggagaagatacatgagatggtgaagaaaaatagtgccaagtccatgggcttgaagaagaaggcattcgtgtgggcaagaaacattggcttcaaggtcaactcaaaaaagatgttggggaaatataatactcccgtgagctaccgcatggctaagactctcgtgttcagcaaagtcaagacatcccttggcttggatcactgtcactcttttatcagtgggactgcgcccctcaaccaagagactgccgagttctttctaagcttggacatacctataggcgagttgtatgggttgagtgaragctcgggaccccacacgatatccaaccagaataactacaggcttctaagctgtggcaagatcttgactgggtgtaagaatatgctgttccagcagaacaaggatggcattggggagatctgcctctggggtaggcacatcttcatgggctatctggaaagtgagactgaaactacagaggccatcgatgatgaaggctggctacactctggggatctgggccagctggacggtctgggtttcctctatgtcaccggccacatcaaagaaatccttatcactgctggtggtgaaaatgtgccccccattcctgttgagaccttggttaagaagaagatccccatcatcagtaacgccatgttagtaggagataaactgaagtttctgagcatgttgctgacgctgaagtgtgagatgaatcagatgagcggagaacctctggacaagctgaacttygaggccatcaacttctgtcrgggtctgggcagccaggcatccaccgtgactgagattgtgaagcagcaagaccscctggtctacaaggccatccagcaaggcatcaatgctgtgaaccaggaagccatgaacaatgcacagargattsaaaagtgggtcatcttggagaaggacttttccatctatggtggagagctaggtccratgatgaaacttaagagmcattttgtagcccagaaatacaaaaaacaaattgatcacatgtaccactgactgctttgatggagctgctctcagctgttctgatgccttcagcaggaagacctcattgcaataagtgaaatgctgctctaggtagaagctctccctgctgtttttaagaagccacattcctcattggtcagtttcttgattgttcgtctgttggagaggtgctccctagaagaayctgccatacgtttcaaagcaataaaatcactgtatatctttctaaggaccttcaagtcatgactccagggaagcctattgggaagtctactaaaaactgcctgatttacaagaaagacctgaacttgtgggctcccatttgatttttttctcctcaggggactcagacattagaaagaaaaagcctcacagatttgaagaactggacccccaaatcaactcacctgcctggaagcaactgggaaacccttccaataagtcctgataataaagcacttcagggtcccat

SEQ ID NO: 4690 - DNA, 2698 bp, Homo sapiens
aggttgaatggggtagaaggcctgttgtggagggaaaccacccatcctcctgcctcccaccaccaccatcatcctggctggacggagagggtgacgggggctgggaaggggcagctcatgttcaggtttccaggaggggctacctgttgactgtctttgcaggaagaagaaaacacctgagtgaccagatgtcccagctccagtgctgtggagcatggtttctgcacacctggaatgactggaaccccaaagactcaagaaggagctaaagatcttgaagtagacatgaataaaacagaagttactcccaggctgtggaccacctgtcgagatggagaagtccttctgaggctatccaaacacggaccaggccatgagaccccgatgaccatccctgaattttttcgagagtcagtcaaccgatttggaacttatccagccctcgcatccaagaatggcaaaaagtgggaaattctgaatttcaaccagtactatgaggcttgtcggaaggctgcaaaatccttgatcaagctgggyttggagcgtttccacggagttggtatcctggggtttaactctgcagagtggtttatcactgctgttggtgccatcctagccrggggtctttgtgttggtatttatgccaccaactctgccgaggyttgtcaatatgtcatcactcatgccaragtgaacatcttgctggttgagaatgatcaacagttacagaaaatcctttcgattccacagagcagcctagagcccctaaaagcgatcatccagtacagactrccaatgaagaagaacaacaacttgtactcttgggatgatttcatggaacttggcagaagtatccctgacacccaactggagcaggtcatcgagagccagaaggcgaatcaatgcgcagtgctcatctacacttcagggaccacaggcatacccaagggagtgatgctcagtcatgacaacatcacgtggattgcaggagcagtgacaaaggactttaaactgacagacaagcatgagacggtggttagctacctcccactcagccatattgcagcacagatgatggacatctgggtacccataaagattggggcgctcacatactttgctcaagcagatgctctcaagggcaccttggtaagtactctaaaggaggtaaaacctactgtcttcattggagtgcctcaaatttgggagaagatacatgagatggtgaagaaaaatagtgccaagtccatgggcttgaagaagaaggcattcgtgtgggcaagaaacattggcttcaaggtcaactcaaaaaagatgttggggaaatataatactcccgtgagctaccgcatggctaagactctcgtgttcagcaaagtcaagacatcccttggcttggatcactgtcactcttttatcagtgggactgcgcccctcaaccaagagactgccgagttctttctaagcttggacatacctataggcgagttgtatgggttgagtgaragctcgggaccccacacgatatccaaccagaataactacaggcttctaagctgtggcaagatcttgactgggtgtaagaatatgctgttccagcagaacaaggatggcattggggagatctgcctctggggtaggcacatcttcatgggctatctggaaagtgagactgaaactacagaggccatcgatgatgaaggctggctacactctggggatctgggccagctggacggtctgggtttcctctatgtcaccggccacatcaaagaaatccttatcactgctggtggtgaaaatgtgccccccattcctgttgagaccttggttaagaagaagatccccatcatcagtaacgccatgttagtaggagataaactgaagtttctgagcatgttgctgacgctgaagtgtgagatgaatcagatgagcggagaacctctggacaagctgaacttygaggccatcaacttctgtcrgggtctgggcagccaggcatccaccgtgactgagattgtgaagcagcaagaccscctggtctacaaggccatccagcaaggcatcaatgctgtgaaccaggaagccatgaacaatgcacagargattsaaaagtgggtcatcttggagaaggacttttccatctatggtggagagctaggtccratgatgaaacttaagagmcattttgtagcccagaaatacaaaaaacaaattgatcacatgtaccactgactgctttgatggagctgctctcagctgttctgatgccttcagcaggaagacctcattgcaataagtgaaatgctgctctaggtagaagctctccctgctgtttttaagaagccacattcctcattggtcagtttcttgattgttcgtctgttggagaggtgctccctagaagaayctgccatacgtttcaaagcaataaaatcactgtatatctttctaaggaccttcaagtcatgactccagggaagcctattgggaagtctactaaaaactgcctgatttacaagaaagacctgaacttgtgggctcccatttgatttttttctcctcaggggactcagacattagaaagaaaaagcctcacagatttgaagaactggacccccaaatcaactcacctgcctggaagcaactgggaaacccttccaataagtcctgataataaagcacttcagggtcccat

SEQ ID NO: 4691 - DNA, 5716 bp, Homo sapiens
  misc_feature (1)...(5716): n = A,T,C or G
aggtcacagagcagtsataactacctgccagtgtctcttaggagtgaggtacctggagttcggggaccccaacctgtgacaatgacagcagacaaattggttttctttgtgaatggcagaaaggtggtggagaaaaatgcagatccagagacaacccttttggcctacctgagaagaaagttggggctgagtggaaccaagctcggctgtggagaggggggctgcggggcttgcacagtgatgctctccaagtatgatcgtctgcagaacaagatcgtccacttttctgccaatgcctgcctggcccccatctgctccttgcaccatgttgcagtgacaactgtggaaggaataggaagcaccaagacgaggctgcatcctgtgcaggagagaattgccaaaagccacggctcccagtgcgggttctgcacccctggcatcgtcatgagtatgtacacactgctccggaatcagcccgagcccaccatggaggagattgagaatgccttccaaggaaatctgtgcygctgcacaggctacagacccatcctccagggcttccggacctttgccagggatggtggatgctgtggaggagatgggaataatccaaattgctgcatgaaccagaagaaagaccactcagtcagcctctcgccatctttattcaaaccagaggagttcacgcccctggatccaacccaggagcccatttttcccccagagttgctgaggctgaaagacactcctcggaagcagctgcgatttgaaggggagcgtgtgacgtggatacaggcctcaaccctcaaggagctgctggacctcaaggctcagcaccctgacgccaagctggtcgtggggaacacggagattggcattgagatgaagttcaagaatatgctgtttcctatgattgtytgcccagcctggatccctgagctgaattcggtagaacatggacccgacggtatctcctttggagctgcttgccccctgagcattgtggaaaaaaccctggtggatgctgttgctaagcttcctgcccaaaagacagaggtgttcagaggggtcctggagcagctgcgctggtttgctgggaagcaagtcaagtctgtggcgtccgttggagggaacatcatcactgccagccccatctccgacctcaaccccgtgttcatggccagtggggccaagctgacacttgtgtccagaggyaccaggagaactgtccagatggaccacaccttcttccctggctacagaawgaccctgctgagcccggaggagatactgctctccatagagatcccctacagcagggagggggagtatttctcagcattcaagcaggcctcccggagagaagatgacattgccaaggtaaccagtggcatgagagttttattcaarccaggaaccacagaggtacaggagctggccctttgctatggtggaatggccaacagaaccatctcagccctcaagaccactcagaggcagctttccaagctctggaaggaggagctgctgcaggacgtgtgtgcaggactggcagaggagctgcatctgcctcccgatgcccctggtggsatggtggacttccggtgcaccctcaccctcagcttcttcttcaagttctacctgacagtccttcagaagctgggccaagagaacctggaagayaagtgtggtaaactggaccccactttcgccagtgcaactttactgtttcagaaagaccccccagccgatgtccagctcttccaagaggtgcccaagggtcagtctgaggaggacatggtgggccggcccctgccccacctggcagcggacatgcaggcctctggtgaggccgtgtactgtgacgacattcctcgctacragaatgagctgtctctccggctggtcaccagcacccgggcccacgccaagatcaagtccatagatacatcagaagctaagaaggttccagggtttgtttgtttcatttccgctgatgatgttcctgggagtaacrtaactggaatttgtaatgatgagacagtctttgcgaaggataaggttacttgtgttgggcatatcattggtgctgtggttgctgacaccccggaacacacacagagagctgcccaaggggtgaaaatcacctatgaagaactaccagccattatcacaattgaggatgctrtaaagaacaactccttttatggacctgagctgaagatcgagaaaggggacctaaagaaggggttttccraagcagataatgttgtgtcaggggagatatacatyggtggccaagagcacttctacctggagactcactgcaccattgctgttccaaaaggcgaggcaggggagatggagctctttgtgtctacacagaacaccatgaagacccagagctttgttgcaaaaatgttgggggttccagcaaaccggattgtggttcgagtgaagagaatgggaggaggctttggaggcaaggagacccggagcactgtggtgtccacggcagtggccctggctgcatataagaccggccgccctgtgcgatgcatgctggaccgtgatgaggacatgctgataactggtggcagacatcccttcctggccagatacaaggttggcttcatgaagactgggacagttgtggctcttgaggtggaccacttcagcaatgtggggaacacccaggatctctctcagagtattatggaacgagctttattccacatggacaactgctataaaatccccaacatccggggcactgggcggctgtgcaaaaccaaccttccctccaamamggccttccggggctttggggggccccaggggatgctcattgccgagtgctggatgagtgaagttgcagtgacctgtgggatgcctgcagaggaggtgcggagaaaaaacctgtacaaagaaggggacctgacacacttcaaccagaagcttgagggtttcaccttgcccagatgctgggaagaatgcctagcaagctctcagtatcatgctcggaagagtgaggttgacaagttcaacaaggagaattgttggaaaaagagaggattgtgcataattcccaccaagtttggaataagcttyacagttccttttctgaatcaggcaggagccctacttcatgtgtacacagatggytctgtgctgctgacccacggggggactgagatgggccaaggccttcataccaaaatggtccaggtggccagtagagctctgaaaatccccacctctaagatttatatcagcgagacaagcactaacactgtgcccaacacctctcccacggctgcctctgtcagcgctgacctcaatggacaggccstctatgcggcttgtcagaccatcttgaaaaggctggaaccctacaagaagaagaatcccagtggctcctgggaagactgggtcacagctgcctacatggacacagtgagcttgtctgccactgggttttatagaacacccaatctgggctacagctttgagactaactcagggaaccscttccactacttcagctatggggtggcttgctctgaagtagaaatcgactgcctaacaggagatcataagaacctccgcacagatattgtcatggatgttggctccagtctaaaccctgccattgatattggacaggtggaaggggcatttgtccagggccttggcctcttcaccctagaggagctacactattcccccgaggggagcctgcacacccgtggccctagcacctacaagatcccggcatttggcagcatccccattgarttcagggtgtccctgctccgcgactgccccaacaagaaggccatctatgcatcgaaggctgttggagagccgcccctcttcctggctgcttctatcttctttgccatcaaagatgccatccgtgcagctcgagctcagcacacaggtaataacgtgaaggaactcttccggctagacagccctgccaccccggagaagatccgcaatgcctgcgtggacaagttcaccaccctgtrtgtcactggtgtcccagaaaactgcaaaccctggtctgtgagggtctaaagagagagtcctcagcagagtcttcttgtgctgcctttggscttccatggagcaggaggaacataccacagaacatggatctattaaagtcacagaatgacagacctgtgatttgtcaagatgggatttggaagacaagtgaatgcaatggaagattttgatcaaaaatgtaatttgtaaacacaatgataakcaaattcaaaactgttatgcctaaatggtgaatatgcaattaggatcattttctgtctgttttaatcatgtatctggaatagggtcgggaagggtttgtgctattccccacttactggacagcctgtataacctcaagttctgatggtgtctgtcctttgaagaggattcccacaaacctctagaagcttaaaccgaagttactttaaatcgtgtgccttcctgtgaaagcctggccttcaaaccaatgaacagcaaagcataaccttgaatctatactcaaattttgcaatgaggcagtggggtaaggttaaatcctctaaccrtctttgaatcattggaaagaataaagaatgaaacaaattcaaggttaattggatctgattttgtgaagctgcataaagcaagattactctataatacaaaaatccaaccaactcaattattgagcacgtacaatgttctagatttctttcccttcctctttgaagagaatatttgtattccaaatactctttgagtatttacaaaaaagattatgtttaatctttacatttgaagccaaagtaatttccacctagaaatgatgctatcagtcctggcatggtggctcacccctataatcccagcactttgggaggctaaggcaggagaattgcttgagcccagcagtttgagaccagcctgggcaacatagagagctcctgtctttaaaaaaaatttttttaattagttggtcttgatagtgcatgcctgtagtcccaactacttgaaaggctgaggtggagagatcatttgagctcaggaggttgaggctgcagtgagctatgattgcgccactgcactcctgcctgagcgactgagcaagatcttgtctctgaagaaaaaaaaagaaataaaaatgctgctatcaaaatcaagcccaaccagaggtagaagagccaagaagcctgggttctcatcctagctctgtctcttctgtctctatctttgtgatcttggactgtcaattccccttcctgtgatccattttactgcaaacataagggttgcagtaaagggttgtctcacgtcttctgctttaaaagcctataaatatatgacctgaaaactccagttacataaaggatctgcagctatctaaggcttggttttcttactgtcatatgatacctgggtctaatgaactctgctgagatcacctcaagtttctgcggttggtaaagagaacaagggaagaacaaacatcccttttattgctccaaatggtgatttaatccctacatggtgctgggtggacaatgtgtcactgtcacatgccttnactgtataaatccaaccttctgccagagagaatctgtggttctggccatggagggaggatagtggaaatgatatagttggactggtgcttgatgtcactaataaatgaaactgtcag

SEQ ID NO: 4692 - DNA, 2492 bp, Homo sapiens
tttcacgtttttgctgcatgtaggtggttgtggccactgtgcccggagggaggcagcagtggccagtaatgcctgggaaactcctctgggggtacattatggaactggaagcacccttggaggagtccgagagccagaagaaggagaggcagaagagctttatggatatcacagtttcggctaatggattatggacctgtacttcccttatatggtttttaygaagatttaaacaagataagctgaaaatacattacacagtgctggagtgacagaaggaagtcaagccaccattatgactcagatgagaaatcagaaacaagagaaaatggtgttacagattacctggatgctcccaagaccaaaaaaattaaaatgaaagagaagctaaatggagacactgaagaaggatttaatagactttcagatgaattctctaaatctcataagtcaagaagaaaagatctactgaatgagatattgatgaatatgaaaaaaaaaaagcaagtatcatccttagatagttctactcatgaatcaagtgataagaagctagaggagaccttaacacatgaacagaaagaaggaaccttctccaatcttcctatttctgaagagactataaagcttctgaaaggttgaggggtaacatctctctttcctgttcaagttaagacctttggtcctgtatatgaaggaaaagatttaatagctcaagcacagacgggaacaggaaagaaagacattctattttgcgatccctttgattgaaagactccaaagagatcaagaaacagttttttgtttgtttgtttgtttgtttgttttttgagacagaatctcgctctgtcgcccaggctggatctcggctcactgcaagctccgccgcccgggttcacaccattttcctgcctcagcctcccaagtagctgggactacaggcacccgccaccacccccgactatttttttttgtatttttagtagagacgggatttcaccgtgttagccaggatggtctcaatctcctgaccttgtgatctgcccatctcggcctcccaaagtgctgggattgcaggcgtgaaccactgtgcccagctctgattggatctttctaaactgtgccatgttgtgcttgatgaagtggatcaaatgttagagttaggttttgctgaacaagttgaagatattattcatgaattctacaaaactgattctgaagacagtcctcagactttacttttttctgcagctcgcccacagtgggtatgcaaagttgcaaaaaaatgagtgaaatccagatacgaacasattgatgtttttggaaaaatgactcaaaaggctgcagcttctgtggaacatttggccatccggtgtcattggtctcagaggccagcagttactggagatgtccttcaagtctacagtgggtctgaagggacggctattattttctgtgagacccagaggagtgtaactgaaatagccatgaatccacacataaaacagaatgcccagtgtttacatggggacattgcacagtcacaaagagaatttacactaaaagacttcagagaaggtagttttaaagttttggtggcaaccaacgtggctgcctgtggtttggacattcctgaagttgacctggtgattcatggttctcctcctcaggatgttgagtctatatccatcgttctggacgcacaggtagagctggacagacagggatttgtatatgtttttatcaaccaagagaaagaggtcaactaagatatgtggaacaaaaagtaggaattacttttaaatgtgtaggtattccttctacaatggatttagttaaatctaaaagcacggatgccataaggtctctggcttctgtttcttatgctgctgttgattttttccaaccatcagctcagatactgacagaagagaaaggggcagtggatgcattggctgcagctttagcccacatttctggtgcatcaggctttgaaccacgatctttgatcacctctgatagggatttgtgaccatgactctggaaagcctagaggaaatacaggatgtcagctgtgcttggaaagaacttaacagaaagctgagtagtaatgcagtgtctcagattaccagaatgtgcctcctgaaaggaaatgtgcgtgtttgctttgatgttcctacaactaagtcagaaaggttacaggcagagtggcatgattccgactggatattctcagtgccagccaaattacctgaaattgaagaatattatgatagaaacacatcttctaattccagacagaggagtggttggtcaagtggccagtcgggccgatcaggtggtcgatctggcagccggtcagttagacagagtccacaagggagtcgctcaggaagttgacaagatggtagaagatgaagagggaatagaaatcgatcaagaagtgggagccacaaacggagttttgactatttgatagttaatctaccagt

SEQ ID NO: 4693 - DNA, 5212 bp, Homo sapiens
ccgagccaccgactgcaggaggagaaggggttgtgctcctggccgaggaaggagaaaggggcggggccggcgggcagcgtgcggcagtgcggagctcctgagaccggcgggcacacgggggtctgtggcccccgccgtagcagtggctgccgccgtcgcttggttcccgtcggtctgcgggaggcgggttatggcggcggcggcagtgagagctgtgaatgaattctccgggtggacgagggaagaagaaaggctccggcggcgccagcaacccggtgcctcccaggcctccgcccccttgcctggcccccgcccctcccgccgccgggccggcccctccgcccgagtygccgcataagcggaacctgtactatttctcctacccgctgtttgtaggcttcgcgctgctgcgtttggtcgccttccacctggggctcctcttcgtgtggctctgccagcgcttctcccgcgccctcatggcagccaagaggagctccggggccgcgccagcacctgcctcggcctcggccccggcgccggtgccgggmsgckaggcckagcgcgtccgagtcttccacaaacaggccttcgagtacatctccattgccctgcgcatcgatgaggatgagaaagcaggacagaaggagcaagctgtggaatggtataagaaaggtattgaagaactggaaaaaggaatagctgttatagttacaggacaaggtgaacagtgtgaaagagctagacgccttcaagctaaaatgatgactaatttggttatggccaaggaccgcttacaacttctagagaagatgcaaccagttttgccattttccaagtcacaaacggacgtctataatgacagtactaacttggcatgccgcaatggacatctccagtcagaaagtggagctgttccaaaaagaaaagaccccttaacacacactagtaattsactgcctcgttsawaaacagttatgaaaactggatctgcaggcctttmaggccaccatagagcacctagttasagtggtttatccatggtttctggagtgaaacagggatctggtcctgctcctaccactcataagggtactccgaaaacaaataggacaaataaaccttctacccctacaactgctactcgtaagaaaaaagacttgaagaattttaggaatgtggacagcaaccttgctaaccttataatgaatgaaattgtggacaatggaacagctgttaaatttgatgatatagctggtcaagacttggcaaaacaagcattgcaagaaattgttattcttccttctctgaggcctgagttgttcacagggcttagagctcctgccagagggctgttactctttggtccacctgggaakgggargacaatgctggctaaagcagtagctgcagaatcgaatgcaaccttctttaatataagtgctgcaagtttaacttcaaaatacgtgggagaaggagagaaattggtgagggctctttttgctgtggctcgagaacttyaaccttctataatttttatagatgaagttgatagccttttgtgtgaaagaagagaaggggagcacgatgctagtagacgcctaaaaactgaatttctaatagaatttgatggtgtacagtctgctggagatgacagagtacttgtaatgggtgcaactaataggccacaagagcttgatgaggctgttctcaggcgtttcatcaaacgggtatatgtgtctttaccaaatgaggasacaagactacttttgcttaaaaatctgttatgtaaacaaggaagtccattgacccaaaaagaactagcacaacttgctagaatgactgatggatactcaggaagtgacctaacagctttggcaaaagatgragcactggytcctatcvyagaactaaaaccagaacaggtgaagaatatgtctgccagtgagatgagaaatattcgattatctgacttcactgaatccttgaaaaaaataaaacgcagcgtcagccctcaaactttagaagcgtacatacgttggaacaaggactttggagataccaytgtttaaggaaatacctttgtaaacctgcagaacattttacttaaaagaggaaacacragatcttcaatgaacgtcatcggctacagaaacagcctaagtttacrggactttttagagtcttacatatttgtgcaccaaacttgaagatgaaccagaaaacagacttaaacaaaatatacaatgcaaatgtaattttttgttgtttaaggccttgccttgatggtcacagttatcccaatggacactaagttagagcacaacaaaacctgattctggtcttctttaccaatataatcataatgtaaataataatttgtatattgtgttgcagatgaaagtattccaggaacagtgaatggtagaagacacaagaacatttgtttgtttgtcttctgatgttttttcttaaaatagtaatttctsctacttttcttttctactgttgtcttaactacaggtgattggaatgccaaacactcttaagtttattttcttttttcgttttataaattcagtgtgccaaatgaaacttttttcctaagtaactgtaataggaaaaagtttattttgagagtttcttcttcataaatctacagacattaaacaattgttgtgttctttttaccttttatttttctattaccttgctaccaaacagtttagatagcaatataatagcaaaaaagcaaatatggtaaaatagagaaggtttgaaggtttgagttactctgtcatataacatgtagatcagtcttcatgtgacctgcagtatttttttttctaatgtatttgtcagaaatctgttgtagactgttaacttcttcctgatggaatttattttctgcaagaattattctgatatttaagagagccaattttaactgctgtgaaaatgtttccagtgcaagagaagggaaatactaggaactaagacatttctaatttattgcttattactttcttaattttacaggataattataagcaagtggaactaccatcttttattcttaataattattaatcccttcaatgaaactttaaaaaaactgaatttttatacatggcatacatttttctagttccttctgcttgctttattaactcaaaagttctagttctagtctgttgatctgccttttgttctcccaaaatgtacagtaattccatttgtttgtataaatatgcctggattttcattataaaaatgtcattgtagggagtagagactcatatcatggccttttaaatattgtaataaaggcaaatagatatttgcccttagtttactggttaaaagtttgtttacagaacttttctctggtgcttaaatgatgctatgtaaaatgtcatgagtggaaagaatatttgtagtagtaacaagaatttttcatttaggaaagatttcttaggttttgaaagaatacattaaaataaaaaacttgcccctactaggtaagaactttataatgaagacatacattcttcttaattttactcttgctcttgttaaagatttgtttgaatatagaagatgcatgatttctgggkttttttttttttttgagacagagtttcgctcttgttgcccaggctggagtgcaatggcgcaatctcgactcaccacaacctccgcctcccaggttcaagcaattctcctgcctcagcctcccgagtagctgggattacaggcatgcgccactaccccagctaattttgtatttttagtagagatggggtttctccatgttggtcaggctggtcttgaactcctgacctcaggtgatccgcctgcctcggcctcccaaagtgctgggattacaggcataagccactgcgcccagccagaagatgcatgatttcttaggatcatatgctgtttgtagccataaggtaaatcatgtctcttccaatcatgactttggaactccctgaataataaaaatgagagttgagataaataggggaaaaaaaatttttttcaagccagagctatgcatatgttaggtgatgggtagtatccctttaaggtctcaaacattacaacatcaattatgaaatactgataacgaaaggtagtaatgaaatatatatgatgaaaagaattgagaagttctaaattaagacatttcagttaagctcataaaatttcattgttttcatttaaaaggagattaacgttattgatacttggataactggctaatcatattaaaggactatgtggttccagctcaacttttaatatattgtctcctttaaaactatcatgrttataattctattgggaaagacttttagataacaaagatttcaaatgttaaaagagataaaagtcaggttaatactatcttaaacactgagtcagaaaatcattactgtatagaagttgctttcctgatcaagtctgaacttcagctagtgctagagaactattttctatgacttaactctaaccaagttttattttaagctgtttctttgatagaagggccatgaaaatagagtaatgatatagtaggagataagggattggtttggtctttttcaataaagatagaagttgctgaagttttctgaattaataatgacttagattgtgaccttttagattcggtgttgagctctgtgttgtattacttcctaaaagataatgcttaaacattaagcattagtgtgctcttcatgttaatatggcagagttttgtaaactaaattaaaacttactgatatattggactttgagccaagggaaagaatgagtactatctttccagatatcttaagggtaaaagcttattctaagacagtctgtccattgagaatattagatttctgacttgcaaatatgtttgtactccagaagaattagaggaaaagcagatactagaattctaatttaattacatatacagccgtctttgtttatagtgtagaattctttatattttgtacaaaaactaattcttttggtaaaatgaaccatttacagttcggttttggactctgagtcaaaggattttcctttaaatgcttgtctcaattttagtctggtcttttgtacttttcttcagaagaaatgaattaaagggtacagttgcataaagtgggtttttatcctaatgtattggaaataaatgataaacttt

SEQ ID NO: 4694 - DNA, 5116 bp, Homo sapiens
ccgagccaccgactgcaggaggagaaggggttgtgctcctggccgaggaaggagaaaggggcggggccggcgggcagcgtgcggcagtgcggagctcctgagaccggcgggcacacgggggtctgtggcccccgccgtagcagtggctgccgccgtcgcttggttcccgtcggtctgcgggaggcgggttatggcggcggcggcagtgagagctgtgaatgaattctccgggtggacgagggaagaagaaaggctccggcggcgccagcaacccggtgcctcccaggcctccgcccccttgcctggcccccgcccctcccgccgccgggccggcccctccgcccgagtygccgcataagcggaacctgtactatttctcctacccgctgtttgtaggcttcgcgctgctgcgtttggtcgccttccacctggggctcctcttcgtgtggctctgccagcgcttctcccgcgccctcatggcagccaagaggagctccggggccgcgccagcacctgcctcggcctcggccccggcgccggtgccgggmsgckaggcckagcgcgtccgagtcttccacaaacaggccttcgagtacatctccattgccctgcgcatcgatgaggatgagaaagcaggacagaaggagcaagctgtggaatggtataagaaaggtattgaagaactggaaaaaggaatagctgttatagttacaggacaaggtgaacagtgtgaaagagctagacgccttcaagctaaaatgatgactaatttggttatggccaaggaccgcttacaacttctagaaagtggagctgttccaaaaagaaaagaccccttaacacacactagtaattsactgcctcgttsawaaacagttatgaaaactggatctgcaggcctttmaggccaccatagagcacctagttasagtggtttatccatggtttctggagtgaaacagggatctggtcctgctcctaccactcataagggtactccgaaaacaaataggacaaataaaccttctacccctacaactgctactcgtaagaaaaaagacttgaagaattttaggaatgtggacagcaaccttgctaaccttataatgaatgaaattgtggacaatggaacagctgttaaatttgatgatatagctggtcaagacttggcaaaacaagcattgcaagaaattgttattcttccttctctgaggcctgagttgttcacagggcttagagctcctgccagagggctgttactctttggtccacctgggaakgggargacaatgctggctaaagcagtagctgcagaatcgaatgcaaccttctttaatataagtgctgcaagtttaacttcaaaatacgtgggagaaggagagaaattggtgagggctctttttgctgtggctcgagaacttyaaccttctataatttttatagatgaagttgatagccttttgtgtgaaagaagagaaggggagcacgatgctagtagacgcctaaaaactgaatttctaatagaatttgatggtgtacagtctgctggagatgacagagtacttgtaatgggtgcaactaataggccacaagagcttgatgaggctgttctcaggcgtttcatcaaacgggtatatgtgtctttaccaaatgaggasacaagactacttttgcttaaaaatctgttatgtaaacaaggaagtccattgacccaaaaagaactagcacaacttgctagaatgactgatggatactcaggaagtgacctaacagctttggcaaaagatgragcactggytcctatcvyagaactaaaaccagaacaggtgaagaatatgtctgccagtgagatgagaaatattcgattatctgacttcactgaatccttgaaaaaaataaaacgcagcgtcagccctcaaactttagaagcgtacatacgttggaacaaggactttggagataccaytgtttaaggaaatacctttgtaaacctgcagaacattttacttaaaagaggaaacacragatcttcaatgaacgtcatcggctacagaaacagcctaagtttacrggactttttagagtcttacatatttgtgcaccaaacttgaagatgaaccagaaaacagacttaaacaaaatatacaatgcaaatgtaattttttgttgtttaaggccttgccttgatggtcacagttatcccaatggacactaagttagagcacaacaaaacctgattctggtcttctttaccaatataatcataatgtaaataataatttgtatattgtgttgcagatgaaagtattccaggaacagtgaatggtagaagacacaagaacatttgtttgtttgtcttctgatgttttttcttaaaatagtaatttctsctacttttcttttctactgttgtcttaactacaggtgattggaatgccaaacactcttaagtttattttcttttttcgttttataaattcagtgtgccaaatgaaacttttttcctaagtaactgtaataggaaaaagtttattttgagagtttcttcttcataaatctacagacattaaacaattgttgtgttctttttaccttttatttttctattaccttgctaccaaacagtttagatagcaatataatagcaaaaaagcaaatatggtaaaatagagaaggtttgaaggtttgagttactctgtcatataacatgtagatcagtcttcatgtgacctgcagtatttttttttctaatgtatttgtcagaaatctgttgtagactgttaacttcttcctgatggaatttattttctgcaagaattattctgatatttaagagagccaattttaactgctgtgaaaatgtttccagtgcaagagaagggaaatactaggaactaagacatttctaatttattgcttattactttcttaattttacaggataattataagcaagtggaactaccatcttttattcttaataattattaatcccttcaatgaaactttaaaaaaactgaatttttatacatggcatacatttttctagttccttctgcttgctttattaactcaaaagttctagttctagtctgttgatctgccttttgttctcccaaaatgtacagtaattccatttgtttgtataaatatgcctggattttcattataaaaatgtcattgtagggagtagagactcatatcatggccttttaaatattgtaataaaggcaaatagatatttgcccttagtttactggttaaaagtttgtttacagaacttttctctggtgcttaaatgatgctatgtaaaatgtcatgagtggaaagaatatttgtagtagtaacaagaatttttcatttaggaaagatttcttaggttttgaaagaatacattaaaataaaaaacttgcccctactaggtaagaactttataatgaagacatacattcttcttaattttactcttgctcttgttaaagatttgtttgaatatagaagatgcatgatttctgggkttttttttttttttgagacagagtttcgctcttgttgcccaggctggagtgcaatggcgcaatctcgactcaccacaacctccgcctcccaggttcaagcaattctcctgcctcagcctcccgagtagctgggattacaggcatgcgccactaccccagctaattttgtatttttagtagagatggggtttctccatgttggtcaggctggtcttgaactcctgacctcaggtgatccgcctgcctcggcctcccaaagtgctgggattacaggcataagccactgcgcccagccagaagatgcatgatttcttaggatcatatgctgtttgtagccataaggtaaatcatgtctcttccaatcatgactttggaactccctgaataataaaaatgagagttgagataaataggggaaaaaaaatttttttcaagccagagctatgcatatgttaggtgatgggtagtatccctttaaggtctcaaacattacaacatcaattatgaaatactgataacgaaaggtagtaatgaaatatatatgatgaaaagaattgagaagttctaaattaagacatttcagttaagctcataaaatttcattgttttcatttaaaaggagattaacgttattgatacttggataactggctaatcatattaaaggactatgtggttccagctcaacttttaatatattgtctcctttaaaactatcatgrttataattctattgggaaagacttttagataacaaagatttcaaatgttaaaagagataaaagtcaggttaatactatcttaaacactgagtcagaaaatcattactgtatagaagttgctttcctgatcaagtctgaacttcagctagtgctagagaactattttctatgacttaactctaaccaagttttattttaagctgtttctttgatagaagggccatgaaaatagagtaatgatatagtaggagataagggattggtttggtctttttcaataaagatagaagttgctgaagttttctgaattaataatgacttagattgtgaccttttagattcggtgttgagctctgtgttgtattacttcctaaaagataatgcttaaacattaagcattagtgtgctcttcatgttaatatggcagagttttgtaaactaaattaaaacttactgatatattggactttgagccaagggaaagaatgagtactatctttccagatatcttaagggtaaaagcttattctaagacagtctgtccattgagaatattagatttctgacttgcaaatatgtttgtactccagaagaattagaggaaaagcagatactagaattctaatttaattacatatacagccgtctttgtttatagtgtagaattctttatattttgtacaaaaactaattcttttggtaaaatgaaccatttacagttcggttttggactctgagtcaaaggattttcctttaaatgcttgtctcaattttagtctggtcttttgtacttttcttcagaagaaatgaattaaagggtacagttgcataaagtgggtttttatcctaatgtattggaaataaatgataaacttt

SEQ ID NO: 4695 - DNA, 7855 bp, Homo sapiens
cgccgccgcgcgcagggagaggcgccggggctgccgcccggtgctcggcgcgctctcgggagccgcccgcccgctggtcccgcagccttccgggaggaagcggtgccggcagcgtccagggcgcgctctcgggcaccctcacctgccggcgcccggccgcttacccggcagggcgtgcgcagggtagggtgcgggaccggggggacctggaggcagaggggagaaccggccgtccgcgccgcagcacagccgctgggagcgcctcagaccccgcgcggggcgccggctccatggcgaccgggctcggggagccggtctatggactttccgaagacgagggagagtcccgtattctcagagtaaaagttgtttctggaattgatctcgccaaaaaggacatctttggagccagtgatccgtatgtgaaactttcattgtacgtagcggatgagaatagagaacttgctttggtccagacaaaaacamttaaaaagacactgaacccaaaatggaatgaagaattttatttcagggtaaacccatctaatcacagactcctatttgaagtatttgacgaaaatagactgacacgagacgacttcctgggccaggtggacgtgccccttagtcaccttccgacagaagatccaaccatgggtcataagtctcgagttaagggatttttgcgattgaaaatggcctatatgccaaaaaatggaggtcaagatgaagaaaacagtgaccagagggatgacatggagcatggatgggaagttgttgactcaaatgactcggcttctcagcaccaagaggaacttcctcctcctcctctgcctcccgggtgggaagaaaaagtggacaatttaggccgaacttactatgtcaaccacaacaaccggaccactcagtggcacagaccaagcctgatggacgtgtcctcggagtcggacaataacatcagacagatcaaccaggaggcagcacaccggcgcttccgctcccgcaggcacatcagcgaagacttggagcccgagccctcggagggcggggatgtccccgaggtacgatgtccccagaatggtgcaaagcccggcagctccttcttcccattggcctatgtacataccacgccgggtctgccttcaggctgggaagaaagaaaagatgctaaggggcgcacatactatgtcaatcataacaatcgaaccacaacttggactcgacctatcatgcagtccccacagccatcaccttacaactcccccaaaccacaacacaaagtcacacagagcttcttgccacccggctgggaaatgaggatagcgccaaacggccggcccttcttcattgatcataacacaaagactacaacctggtgggaagacccaagactgcagaacccagctattactggtccggctgtcccttactccagagaatttaagcagaaatatgactacttcaggaagaaattaaagaaacctgctgatatccccaataggtttgaaatgaaacttcacagaaataacatatttgaagagtcctatcggagaattatgtccgtgaaaagaccagatgtcctaaaagctagactgtggattgagtttgaatcagagaaaggtcttgactatgggggtgtggccagagaatggttcttcttactgtccaaagagatgttcaacccctactacggcctctttgagtactctgccacggacaactacacccttcagatcaaccctaattcaggcctctgtaatgaggatcatttgtcctacttcacttttattggaagagttgctggtctggccgtatttcatgggaagctcttagatgrtttcttcattagaccattttacaagatgatgttgggaaagcagataaccctgaatgacatggaatctgtggatagtgaatattacaactctttgaaatggatcctggagaatgaccctactgagctggacctcatgttctgcatagacgaagaaaactttggacagacatatcaagtggatttgaagcccaatgggtcagaaataatggtcacaaatgaaaacaaaagggaatatatcgacttagtcatccagtggagatttgtgaacagggtccagaagcagatgaacgccttcttggagggattcacagaactacttcctattgatttgattaaaatttttgatgaaaatgagctggagttgctcatgtgcggcctcggtgatgtggatgtgaatgactggagacagcattctatttacaagaacggctactgcccaaaccaccccgtcattcagtggttctggaaggctgtgctactcatggacgccgaaaagcgtatccggttactgcagtttgtcacagggacatcgcgagtacctatgaatggatttgccgaactttatggttccaatggtcctcagctgtttacaatagagcaatggggcagtcctgagaaactgcccagagctcacacatgctttaatcgccttgacttacctccatatgaaacctttgaagatttacgagagaaacttctcatggccgtggaaaatgctcaaggatttgaaggggtggattaagcaccctgtgcctcgggggtggttgttcttcaagcaagttctgcttgcacttttgcatttgcctaacagacttttgcagaggcgatggcagagagcagctgcaggcatggtccctggagccgagccttcaccacgcactcgtccaagttcggatgcgggaacctggtcccagcttgagttcctgcctttcccaccacaaattatcaactggttgatgtgtacactaattacatttcaggaggacttaatgctatttatgttgtgcctctgcaggcaaagcccttaataaatattttacatcctttctaatgacaatgaatggaattaatcactcaacaggtatagtattacgactcatgtttactttttaaaatgatttagaccgattttcagattttatttcgttatgattaaagatgtctcatgtacttggaaaagtgagcatttttttttttttttgtatttcactttcataccaggcttaatgtcaatgacatttttatttttgaagtactctgacacctccaccctctactttattagaattggaaggcaaatttttgtccaaaaacctacagacaagtactttgagagaatttccaatataatattagacataatgataattttttccatactcagaatgaaaaactggatattacgtttttkttttggggtttttttgtacaaatttagctaatagctacaggctgagagaattgtaacatagcatgacaaattttgtgttgacttgaaaggaatcacaccattattccttagaagtaattacatgtgttctaacacatttgagacagggttggactcccatttctcatccgagaaattacttaacccttcctggcgctgtacagtcatcttttattctatttcctctttgctgtttgtagtagagacattttgaatgaaacttggcactgcttgattcaaaactgtggaaaccagatctgtttagtctcctgtttgtatgcgtttgctaatggtagctaaataaccagtttttgttgtaaatgcaccaattctgaaggcactttatgtactacatggaggtcatatctggttttgtttttatttttttatcatgaacattaaatgtgatgatgatttcttttccctgcacacatctttccggtgcaatatctatcaattgtgaatctggctgctggtgtataaaaacctggatgtaaagctgagcctacagacctgtcctcaccaactgttttgtgatttctactcaactacaaagatttatttaatgtactcttaatctaactgagttttgttaccaatgacctgttgcatgcttcaataccgtgtactgcctgagttgtgcctcttgtgtgctagattaaaagtgagacagagacttgacttgatcctctgagctcaagctattgagctggtagtggcagaggactgagggtacctgcacagtttgattcttttccacgtgtaagtctccattgcagaattgtcgtgctttgagaaaacacctgaggcagtgtgggagttgaacgaccctgctgtcctttttaacctgtgttgtcctagaccctgtcggggcagtcaggggacactagagatttgatctcatgcgagtcatcaataggacaaaaaagttgtggtttggggaggtctgtttgttacataaaaaggacctttcggtgtaagaaattgccgtttttaccctgccctggctggcatgtgagaagccatggaaggttgtggttgtaaatgagttgtctaaaggggtgcagaggcctgaggtttytaaaagaaggtagatttctacagagctgagtgttggttcctttttcttattggttgaaaattacctggtagtgatcagaaaacttagatgctatgtaactaaaaaaaaaaaaaaaaaaaaaaaaaaaaaaaaaaaaattcccgctcatgagttttgactattggtgagatgttttccgctacagttaacatgacaaatgtctcagtggcaaaaatcccctttttgtaagcccccatagtctagaggcagttttctttttaagaatcatgccagagcctgagtcgagcagtatgctttcttggtttttgagagtaattgtgtaattgtagagggagaaatccaattctaacctaagaactgggattcttctgtcatcttgtaaaccgtatattgaaaaaaacagaatgtcactaaatgcatattaagtcaagtattggaaagtataaaagaaaaatcattctgacaatttctaagccagaagcaaacaagaattactgaaatctaccccatgaatacttggaaggcagtaattgtgagtgacacctcagttcatcaaccccttaataatatcagcttaattttaatgacaactaaatatgctgaagtgaggatttagtattttttaaaaaagcaaaacaaggttcagtagtcctcagcaattctccaagtttctctctttgcctaaaatggtcatagatcttgatttctctgaatcgtgatgaccacacccagtcatcttcacagcataattgcaggtggcagtaaagagagtgtgctgggtaaggagcagttgctgggtcattccttgggccccgacctgcccggggagtagccctgggggagagagggcagtgttgcctatcccagaggtcccagcagtcacactgctctgcaggccgggctctctttatagccagagaaatcaccttaatgcagtctctttagttgtctgctgaagctgtagttattatgggccacttacatgaggctgagaagtacgtgccggagctcacacactgcctgttgcggttctcttaacatcagttatcacagctgcctgtgggtcccgggtatttccattcctgccccttgttggcccgaggaaggatgtggaaagagcacctggygggatgaaggtccaacagcctgtgcctctccactgctggccctggagccggcagcagtgaggcattcattgtctgtgttgcggtgtattcccagcttcagtgctcttttcctttttgcctgaaatgtttatgcttctctgcagccagtcctctaacaaatctcaagaacaaaggtaagacacttggtttttgtttccaggacccttcagaaggtgacatcagatattccctaaattcagacaatgagggatacagagcgacttggcatgtattatttctcccatgtaaggacaaagggacagattattattgttatttctgagacagagtcttgctctgtagctcaggctggagtgcagtggctcaatctcagctcaccacaacctctgcctcctggcttcaagcgattcttctgcctcagcctccccgaatagttgggattacaggcacccaccaccacgcctggctaatttttgtatttttagtagagatggtttcaccatgctggccaggctggtcttgaactcctgacctcaggtgatcctcccgcctcagccttccaaagtgctgggattacaagcatgagccaccgcacccggcctcacagtgacagattctgagaaacagcrtgcaaaacatttgaaccattttctacatctcccattgttgcatagagagtgtgcaccgctgctatcttgccagatccacactggtcctcccgaaagccaggttcatacacagcaactttttaattattctaacagttacccattaacagtcgactcctgtatttctgagagtcttgtactcacctctgaaatttaaaaacgtataaagagagcctgggttaatcagttctgcagcccctacgtgacactgtgctagttctccttcttctgtctcctccttaccctggccctgcacccctgtacttaagagggagaggtgggaggtgctgtctggtatcatttgctgcctcgccagtagagggtgccgctgtgcagggtaactgcccgcctgctcccttcctgacctcccctgaccccgaagatcactacctctgtcattcaggcattggggtacatcctgataagtcgtgtcagaactgccaatttcaggactgagatgtgtttttaaaaaacaaatccttataaactccactttgtactttagattttaaaactggggaaaaatgtgatattctttggaccacttttttaatttatataagccttaatgaacagtgtctatacatttgcatacacacacccccaccccagagtgttctcagtatgtcagagaaagtgccacagcattaggacgggagcttggagaacgttttctagaaaagggttagcttcctgttggcatgaaattttccaagcaaacctcattaaacatctgttgtttgttaaagatgttccactgaaagcaacgcatgtttcaaaggcacgtctttcygttcgttggttttctgtgtgtaaggagtagcattgctgttggcgcctaacctcgcgtgcactgcattctcaaccccgtaccagtgcatcatcrgaagccttcctcgtgaccataactctgtgtctgcagatatgtgttcccgtgtaagccagttttccccttttactcagactgatttcacctagattgtcacggtttccttcatgttaactttgcgtgactttgttcttcctttactactctgtatgtaatatatatacatatatacgtacatatgctgtccaaatatatttgtatatatttgtatagcatttttacacctttattgagtaatctggtttcgaaaggaggtgagagtttagtcccttctgcagttttctccaagctgtgtcctgtgaatttcaacccttggagcctaagaaaaccctaggaagatgatgttaatttgctgtcatttcctaattcaggatctatcatcaaatgaaacatgaaaaaaacagtgacttttaaggtgaaaagagtttcaagcattccaaataaattatcaatgtttcataactttttattataaacccacctcctaataggaagccaagtactatttgatacagtggtaaaaaccaaactaccttgaatttttttaaggcaacttatgaataatgctcattttcacagtcagaatagctttaaaatatggttgaatttgatacacacaggaagttttcttgaagaacaatcctttcgcttttcttttttcttgagagatctaaagagaaactgtagattgttttcctgacagcaaaagactaatgtgacaaaatgaagtcattgtaaagaagcgatgcaacttgtcaaatatttaataaagaattatggaagctggaacattttctacatca

SEQ ID NO: 4696 - DNA, 8434 bp, Homo sapiens
cgccgccgcgcgcagggagaggcgccggggctgccgcccggtgctcggcgcgctctcgggagccgcccgcccgctggtcccgcagccttccgggaggaagcggtgccggcagcgtccagggcgcgctctcgggcaccctcacctgccggcgcccggccgcttacccggcagggcgtgcgcagggtagggtgcgggaccggggggacctggaggcagaggggagaaccggccgtccgcgccgcagcacagccgctgggagcgcctcagaccccgcgcggggcgccggctccatggcgaccgggctcggggagccggtctatggactttccgaagacgagggagagtcccgtattctcagagtaaaagttgtttctggaattgatctcgccaaaaaggacatctttggagccagtgatccgtatgtgaaactttcattgtacgtagcggatgagaatagagaacttgctttggtccagacaaaaacamttaaaaagacactgaacccaaaatggaatgaagaattttatttcagggtaaacccatctaatcacagactcctatttgaagtatttgacgaaaatagactgacacgagacgacttcctgggccaggtggacgtgccccttagtcaccttccgacagaagatccaaccatggagcgaccctatacatttaaggactttctcctcagaccaagaagtcataagtctcgagttaagggatttttgcgattgaaaatggcctatatgccaaaaaatggaggtcaagatgaagaaaacagtgaccagagggatgacatggagcatggatgggaagttgttgactcaaatgactcggcttctcagcaccaagaggaacttcctcctcctcctctgcctcccgggtgggaagaaaaagtggacaatttaggccgaacttactatgtcaaccacaacaaccggaccactcagtggcacagaccaagcctgatggacgtgtcctcggagtcggacaataacatcagacagatcaaccaggaggcagcacaccggcgcttccgctcccgcaggcacatcagcgaagacttggagcccgagccctcggagggcggggatgtccccgagccttgggagaccatttcagaggaagtgaatatcgctggagactctctcggtctggctctgcccccaccaccggcctccccaggatctcggaccagccctcaggagctgtcagaggaactaagcagaaggcttcagatcactccagactccaatggggaacagttcagctctttgattcaaagagaaccctcctcaaggttgaggtcatgcagtgtcaccgacgcagttgcagaacagggccatctaccaccgccatcagtggcctatgtacataccacgccgggtctgccttcaggctgggaagaaagaaaagatgctaaggggcgcacatactatgtcaatcataacaatcgaaccacaacttggactcgacctatcatgcagcttgcagaagatggtgcgtccggatcagccacaaacagtaacaaccatctaatcgagcctcagatccrccggcctcgtagcctcagctcgccaacagtaactttatctgccccgctggagggtgccaaggactcacccgtacgtcgggctgtgaaagacaccctttccaacccacagtccccacagccatcaccttacaactcccccaaaccacaacacaaagtcacacagagcttcttgccacccggctgggaaatgaggatagcgccaaacggccggcccttcttcattgatcataacacaaagactacaacctgggaagatccacgtttgaaatttccagtacatatgcggtcaaagacatctttaaaccccaatgaccttggcccccttcctcctggctgggaagaaagaattcacttggatggccgaacgttttatattgatcataatagcaaaattactcagtgggaagacccaagactgcagaacccagctattactggtccggctgtcccttactccagagaatttaagcagaaatatgactacttcaggaagaaattaaagaaacctgctgatatccccaataggtttgaaatgaaacttcacagaaataacatatttgaagagtcctatcggagaattatgtccgtgaaaagaccagatgtcctaaaagctagactgtggattgagtttgaatcagagaaaggtcttgactatgggggtgtggccagagaatggttcttcttactgtccaaagagatgttcaacccctactacggcctctttgagtactctgccacggacaactacacccttcagatcaaccctaattcaggcctctgtaatgaggatcatttgtcctacttcacttttattggaagagttgctggtctggccgtatttcatgggaagctcttagatgrtttcttcattagaccattttacaagatgatgttgggaaagcagataaccctgaatgacatggaatctgtggatagtgaatattacaactctttgaaatggatcctggagaatgaccctactgagctggacctcatgttctgcatagacgaagaaaactttggacagacatatcaagtggatttgaagcccaatgggtcagaaataatggtcacaaatgaaaacaaaagggaatatatcgacttagtcatccagtggagatttgtgaacagggtccagaagcagatgaacgccttcttggagggattcacagaactacttcctattgatttgattaaaatttttgatgaaaatgagctggagttgctcatgtgcggcctcggtgatgtggatgtgaatgactggagacagcattctatttacaagaacggctactgcccaaaccaccccgtcattcagtggttctggaaggctgtgctactcatggacgccgaaaagcgtatccggttactgcagtttgtcacagggacatcgcgagtacctatgaatggatttgccgaactttatggttccaatggtcctcagctgtttacaatagagcaatggggcagtcctgagaaactgcccagagctcacacatgctttaatcgccttgacttacctccatatgaaacctttgaagatttacgagagaaacttctcatggccgtggaaaatgctcaaggatttgaaggggtggattaagcaccctgtgcctcgggggtggttgttcttcaagcaagttctgcttgcacttttgcatttgcctaacagacttttgcagaggcgatggcagagagcagctgcaggcatggtccctggagccgagccttcaccacgcactcgtccaagttcggatgcgggaacctggtcccagcttgagttcctgcctttcccaccacaaattatcaactggttgatgtgtacactaattacatttcaggaggacttaatgctatttatgttgtgcctctgcaggcaaagcccttaataaatattttacatcctttctaatgacaatgaatggaattaatcactcaacaggtatagtattacgactcatgtttactttttaaaatgatttagaccgattttcagattttatttcgttatgattaaagatgtctcatgtacttggaaaagtgagcatttttttttttttttgtatttcactttcataccaggcttaatgtcaatgacatttttatttttgaagtactctgacacctccaccctctactttattagaattggaaggcaaatttttgtccaaaaacctacagacaagtactttgagagaatttccaatataatattagacataatgataattttttccatactcagaatgaaaaactggatattacgtttttkttttggggtttttttgtacaaatttagctaatagctacaggctgagagaattgtaacatagcatgacaaattttgtgttgacttgaaaggaatcacaccattattccttagaagtaattacatgtgttctaacacatttgagacagggttggactcccatttctcatccgagaaattacttaacccttcctggcgctgtacagtcatcttttattctatttcctctttgctgtttgtagtagagacattttgaatgaaacttggcactgcttgattcaaaactgtggaaaccagatctgtttagtctcctgtttgtatgcgtttgctaatggtagctaaataaccagtttttgttgtaaatgcaccaattctgaaggcactttatgtactacatggaggtcatatctggttttgtttttatttttttatcatgaacattaaatgtgatgatgatttcttttccctgcacacatctttccggtgcaatatctatcaattgtgaatctggctgctggtgtataaaaacctggatgtaaagctgagcctacagacctgtcctcaccaactgttttgtgatttctactcaactacaaagatttatttaatgtactcttaatctaactgagttttgttaccaatgacctgttgcatgcttcaataccgtgtactgcctgagttgtgcctcttgtgtgctagattaaaagtgagacagagacttgacttgatcctctgagctcaagctattgagctggtagtggcagaggactgagggtacctgcacagtttgattcttttccacgtgtaagtctccattgcagaattgtcgtgctttgagaaaacacctgaggcagtgtgggagttgaacgaccctgctgtcctttttaacctgtgttgtcctagaccctgtcggggcagtcaggggacactagagatttgatctcatgcgagtcatcaataggacaaaaaagttgtggtttggggaggtctgtttgttacataaaaaggacctttcggtgtaagaaattgccgtttttaccctgccctggctggcatgtgagaagccatggaaggttgtggttgtaaatgagttgtctaaaggggtgcagaggcctgaggtttytaaaagaaggtagatttctacagagctgagtgttggttcctttttcttattggttgaaaattacctggtagtgatcagaaaacttagatgctatgtaactaaaaaaaaaaaaaaaaaaaaaaaaaaaaaaaaaaaaattcccgctcatgagttttgactattggtgagatgttttccgctacagttaacatgacaaatgtctcagtggcaaaaatcccctttttgtaagcccccatagtctagaggcagttttctttttaagaatcatgccagagcctgagtcgagcagtatgctttcttggtttttgagagtaattgtgtaattgtagagggagaaatccaattctaacctaagaactgggattcttctgtcatcttgtaaaccgtatattgaaaaaaacagaatgtcactaaatgcatattaagtcaagtattggaaagtataaaagaaaaatcattctgacaatttctaagccagaagcaaacaagaattactgaaatctaccccatgaatacttggaaggcagtaattgtgagtgacacctcagttcatcaaccccttaataatatcagcttaattttaatgacaactaaatatgctgaagtgaggatttagtattttttaaaaaagcaaaacaaggttcagtagtcctcagcaattctccaagtttctctctttgcctaaaatggtcatagatcttgatttctctgaatcgtgatgaccacacccagtcatcttcacagcataattgcaggtggcagtaaagagagtgtgctgggtaaggagcagttgctgggtcattccttgggccccgacctgcccggggagtagccctgggggagagagggcagtgttgcctatcccagaggtcccagcagtcacactgctctgcaggccgggctctctttatagccagagaaatcaccttaatgcagtctctttagttgtctgctgaagctgtagttattatgggccacttacatgaggctgagaagtacgtgccggagctcacacactgcctgttgcggttctcttaacatcagttatcacagctgcctgtgggtcccgggtatttccattcctgccccttgttggcccgaggaaggatgtggaaagagcacctggygggatgaaggtccaacagcctgtgcctctccactgctggccctggagccggcagcagtgaggcattcattgtctgtgttgcggtgtattcccagcttcagtgctcttttcctttttgcctgaaatgtttatgcttctctgcagccagtcctctaacaaatctcaagaacaaaggtaagacacttggtttttgtttccaggacccttcagaaggtgacatcagatattccctaaattcagacaatgagggatacagagcgacttggcatgtattatttctcccatgtaaggacaaagggacagattattattgttatttctgagacagagtcttgctctgtagctcaggctggagtgcagtggctcaatctcagctcaccacaacctctgcctcctggcttcaagcgattcttctgcctcagcctccccgaatagttgggattacaggcacccaccaccacgcctggctaatttttgtatttttagtagagatggtttcaccatgctggccaggctggtcttgaactcctgacctcaggtgatcctcccgcctcagccttccaaagtgctgggattacaagcatgagccaccgcacccggcctcacagtgacagattctgagaaacagcrtgcaaaacatttgaaccattttctacatctcccattgttgcatagagagtgtgcaccgctgctatcttgccagatccacactggtcctcccgaaagccaggttcatacacagcaactttttaattattctaacagttacccattaacagtcgactcctgtatttctgagagtcttgtactcacctctgaaatttaaaaacgtataaagagagcctgggttaatcagttctgcagcccctacgtgacactgtgctagttctccttcttctgtctcctccttaccctggccctgcacccctgtacttaagagggagaggtgggaggtgctgtctggtatcatttgctgcctcgccagtagagggtgccgctgtgcagggtaactgcccgcctgctcccttcctgacctcccctgaccccgaagatcactacctctgtcattcaggcattggggtacatcctgataagtcgtgtcagaactgccaatttcaggactgagatgtgtttttaaaaaacaaatccttataaactccactttgtactttagattttaaaactggggaaaaatgtgatattctttggaccacttttttaatttatataagccttaatgaacagtgtctatacatttgcatacacacacccccaccccagagtgttctcagtatgtcagagaaagtgccacagcattaggacgggagcttggagaacgttttctagaaaagggttagcttcctgttggcatgaaattttccaagcaaacctcattaaacatctgttgtttgttaaagatgttccactgaaagcaacgcatgtttcaaaggcacgtctttcygttcgttggttttctgtgtgtaaggagtagcattgctgttggcgcctaacctcgcgtgcactgcattctcaaccccgtaccagtgcatcatcrgaagccttcctcgtgaccataactctgtgtctgcagatatgtgttcccgtgtaagccagttttccccttttactcagactgatttcacctagattgtcacggtttccttcatgttaactttgcgtgactttgttcttcctttactactctgtatgtaatatatatacatatatacgtacatatgctgtccaaatatatttgtatatatttgtatagcatttttacacctttattgagtaatctggtttcgaaaggaggtgagagtttagtcccttctgcagttttctccaagctgtgtcctgtgaatttcaacccttggagcctaagaaaaccctaggaagatgatgttaatttgctgtcatttcctaattcaggatctatcatcaaatgaaacatgaaaaaaacagtgacttttaaggtgaaaagagtttcaagcattccaaataaattatcaatgtttcataactttttattataaacccacctcctaataggaagccaagtactatttgatacagtggtaaaaaccaaactaccttgaatttttttaaggcaacttatgaataatgctcattttcacagtcagaatagctttaaaatatggttgaatttgatacacacaggaagttttcttgaagaacaatcctttcgcttttcttttttcttgagagatctaaagagaaactgtagattgttttcctgacagcaaaagactaatgtgacaaaatgaagtcattgtaaagaagcgatgcaacttgtcaaatatttaataaagaattatggaagctggaacattttctacatca

SEQ ID NO: 4697 - DNA, 3499 bp, Homo sapiens
cctctttttttgttctccttctcacagggagagtcccgtattctcagagtaaaagttgtttctggaattgatctcgccaaaaaggacatctttggagccagtgatccgtatgtgaaactttcattgtacgtagcggatgagaatagagaacttgctttggtccagacaaaaacamttaaaaagacactgaacccaaaatggaatgaagaattttatttcagggtaaacccatctaatcacagactcctatttgaagtatttgacgaaaatagactgacacgagacgacttcctgggccaggtggacgtgccccttagtcaccttccgacagaagatccaaccatggagcgaccctatacatttaaggactttctcctcagaccaagaagtcataagtctcgagttaagggatttttgcgattgaaaatggcctatatgccaaaaaatggaggtcaagatgaagaaaacagtgaccagagggatgacatggagcatggatgggaagttgttgactcaaatgactcggcttctcagcaccaagaggaacttcctcctcctcctctgcctcccgggtgggaagaaaaagtggacaatttaggccgaacttactatgtcaaccacaacaaccggaccactcagtggcacagaccaagcctgatggacgtgtcctcggagtcggacaataacatcagacagatcaaccaggaggcagcacaccggcgcttccgctcccgcaggcacatcagcgaagacttggagcccgagccctcggagggcggggatgtccccgagccttgggagaccatttcagaggaagtgaatatcgctggagactctctcggtctggctctgcccccaccaccggcctccccaggatctcggaccagccctcaggagctgtcagaggaactaagcagaaggcttcagatcactccagactccaatggggaacagttcagctctttgattcaaagagaaccctcctcaaggttgaggtcatgcagtgtcaccgacgcagttgcagaacagggccatctaccaccgccatcagtggcctatgtacataccacgccgggtctgccttcaggctgggaagaaagaaaagatgctaaggggcgcacatactatgtcaatcataacaatcgaaccacaacttggactcgacctatcatgcagcttgcagaagatggtgcgtccggatcagccacaaacagtaacaaccatctaatcgagcctcagatccrccggcctcgtagcctcagctcgccaacagtaactttatctgccccgctggagggtgccaaggactcacccgtacgtcgggctgtgaaagacaccctttccaacccacagtccccacagccatcaccttacaactcccccaaaccacaacacaaagtcacacagagcttcttgccacccggctgggaaatgaggatagcgccaaacggccggcccttcttcattgatcataacacaaagactacaacctgggaagatccacgtttgaaatttccagtacatatgcggtcaaagacatctttaaaccccaatgaccttggcccccttcctcctggctgggaagaaagaattcacttggatggccgaacgttttatattgatcataatagcaaaattactcagtgggaagacccaagactgcagaacccagctattactggtccggctgtcccttactccagagaatttaagcagaaatatgactacttcaggaagaaattaaagaaacctgctgatatccccaataggtttgaaatgaaacttcacagaaataacatatttgaagagtcctatcggagaattatgtccgtgaaaagaccagatgtcctaaaagctagactgtggattgagtttgaatcagagaaaggtcttgactatgggggtgtggccagagaatggttcttcttactgtccaaagagatgttcaacccctactacggcctctttgagtactctgccacggacaactacacccttcagatcaaccctaattcaggcctctgtaatgaggatcatttgtcctacttcacttttattggaagagttgctggtctggccgtatttcatgggaagctcttagatgrtttcttcattagaccattttacaagatgatgttgggaaagcagataaccctgaatgacatggaatctgtggatagtgaatattacaactctttgaaatggatcctggagaatgaccctactgagctggacctcatgttctgcatagacgaagaaaactttggacagacatatcaagtggatttgaagcccaatgggtcagaaataatggtcacaaatgaaaacaaaagggaatatatcgacttagtcatccagtggagatttgtgaacagggtccagaagcagatgaacgccttcttggagggattcacagaactacttcctattgatttgattaaaatttttgatgaaaatgagctggagttgctcatgtgcggcctcggtgatgtggatgtgaatgactggagacagcattctatttacaagaacggctactgcccaaaccaccccgtcattcagtggttctggaaggctgtgctactcatggacgccgaaaagcgtatccggttactgcagtttgtcacagggacatcgcgagtacctatgaatggatttgccgaactttatggttccaatggtcctcagctgtttacaatagagcaatggggcagtcctgagaaactgcccagagctcacacatgctttaatcgccttgacttacctccatatgaaacctttgaagatttacgagagaaacttctcatggccgtggaaaatgctcaaggatttgaaggggtggattaagcaccctgtgcctcgggggtggttgttcttcaagcaagttctgcttgcacttttgcatttgcctaacagacttttgcagaggcgatggcagagagcagctgcaggcatggtccctggagccgagccttcaccacgcactcgtccaagttcggatgcgggaacctggtcccagcttgagttcctgcctttcccaccacaaattatcaactggttgatgtgtacactaattacatttcaggaggacttaatgctatttatgttgtgcctctgcaggcaaagcccttaataaatattttacatcctttctaatgacaatgaatggaattaatcactcaacaggtatagtattacgactcatgtttactttttaaaatgatttagaccgattttcagattttatttcgttatgattaaagatgtctcatgtacttggaaaagtgagcatttttttttttttttttttttgtacaaatttagctaatagctacaggctgagagaattgtaacatagcatgacaaattttgtgttgacttgaaaggaatcacaccattggactcccatttctcatccgagaaattacttaacccttcctggcgctgtacagtcatcttttattctatttcctctttgctgtttgtagtagagacattt

SEQ ID NO: 4698 - DNA, 1119 bp, Homo sapiens
atgtttatgttccagaagcataaacacatgacctgtgcccgtcccgtgttcttcgtccatgtccccagagaggccgtggatgggatggtgcaagaaacccatcaggaagcagaattaatcyttcctgcgggtggtccctgtgaagaagacacagcggccggtggtgtgacagcccacagctgtcgaaggaagggagaagagagggaccgagggccagcaatarggttttacagctacgtgctagtcagggcccaacagagggacctcatgcgaggagttgctccacaggtgtggaggatgaaagaacaagttggggcgaccctgagagagcccagagacaagctctgcaggaagcaggcaccaccactgggccagtgctacctggccagctctcagccttgggaggccacctgcccgtgtttgacctgggttaatgaccgccagttcctttcccttaatacractcatctgctctcctgcatgctcgctccttggggagagtcccgtattctcagagtaaaagttgtttctggaattgatctcgccaaaaaggacatctttggagccagctgccctctcatctgtcagggcccagtttgggtggcaacactcctgctgaggcccctgcccgcctcatcaccccagcccaagaggacagaacactgctgcccgcctcatcaccccagcccaagaggacagaacactgctgcccgcctcatcaccccagcccaagaggacagaacactgctgcccgcctcatcaccccagcccaagaggacagaacactgctgcccgcctcatcaccccagcccaaggggacagaacactgctgcccgcctcatcaccccagcccaagaggacagaacactgctgcccgcctcatcaccccagcccaaggggacagaacactgctgcccgcctcatcaccccagcccaagrggacagracactgctgcccgcctcatcaccccagcccaagrggacagracactgctgcccgcctcatcaccccagcccaagrggacagracactgctgcccgcctcatcaccccagcccaagaggacagaacactgctgcccacctcatcaccccagcccaaggggacagaacactgctg

SEQ ID NO: 4699 - DNA, 3558 bp, Homo sapiens
cgccgccgcgcgcagggagaggcgccggggctgccgcccggtgctcggcgcgctctcgggagccgcccgcccgctggtcccgcagccttccgggaggaagcggtgccggcagcgtccagggcgcgctctcgggcaccctcacctgccggcgcccggccgcttacccggcagggcgtgcgcagggtagggtgcgggaccggggggacctggaggcagaggggagaaccggccgtccgcgccgcagcacagccgctgggagcgcctcagaccccgcgcggggcgccggctccatggcgaccgggctcggggagccggtctatggactttccgaagacgagggagagtcccgtattctcagagtaaaagttgtttctggaattgatctcgccaaaaaggacatctttggagccagtgatccgtatgtgaaactttcattgtacgtagcggatgagaatagagaacttgctttggtccagacaaaaacamttaaaaagacactgaacccaaaatggaatgaagaattttatttcagggtaaacccatctaatcacagactcctatttgaagtatttgacgaaaatagactgacacgagacgacttcctgggccaggtggacgtgccccttagtcaccttccgacagaagatccaaccatggagcgaccctatacatttaaggactttctcctcagaccaagaagtcataagtctcgagttaagggatttttgcgattgaaaatggcctatatgccaaaaaatggaggtcaagatgaagaaaacagtgaccagagggatgacatggagcatggatgggaagttgttgactcaaatgactcggcttctcagcaccaagaggaacttcctcctcctcctctgcctcccgggtgggaagaaaaagtggacaatttaggccgaacttactatgtcaaccacaacaaccggaccactcagtggcacagaccaagcctgatggacgtgtcctcggagtcggacaataacatcagacagatcaaccaggaggcagcacaccggcgcttccgctcccgcaggcacatcagcgaagacttggagcccgagccctcggagggcggggatgtccccgagccttgggagaccatttcagaggaagtgaatatcgctggagactctctcggtctggctctgcccccaccaccggcctccccaggatctcggaccagccctcaggagctgtcagaggaactaagcagaaggcttcagatcactccagactccaatggggaacagttcagctctttgattcaaagagaaccctcctcaaggttgaggtcatgcagtgtcaccgacgcagttgcagaacagggccatctaccaccgggtgccaaggactcacccgtacgtcgggctgtgaaagacaccctttccaacccacagtccccacagccatcaccttacaactcccccaaaccacaacacaaagtcacacagagcttcttgccacccggctgggaaatgaggatagcgccaaacggccggcccttcttcattgatcataacacaaagactacaacctgggaagatccacgtttgaaatttccagtacatatgcggtcaaagacatctttaaaccccaatgaccttggcccccttcctcctggctgggaagaaagaattcacttggatggccgaacgttttatattgatcataatagcaaaattactcagtgggaagacccaagactgcagaacccagctattactggtccggctgtcccttactccagagaatttaagcagaaatatgactacttcaggaagaaattaaagaaacctgctgatatccccaataggtttgaaatgaaacttcacagaaataacatatttgaagagtcctatcggagaattatgtccgtgaaaagaccagatgtcctaaaagctagactgtggattgagtttgaatcagagaaaggtcttgactatgggggtgtggccagagaatggttcttcttactgtccaaagagatgttcaacccctactacggcctctttgagtactctgccacggacaactacacccttcagatcaaccctaattcaggcctctgtaatgaggatcatttgtcctacttcacttttattggaagagttgctggtctggccgtatttcatgggaagctcttagatgrtttcttcattagaccattttacaagatgatgttgggaaagcagataaccctgaatgacatggaatctgtggatagtgaatattacaactctttgaaatggatcctggagaatgaccctactgagctggacctcatgttctgcatagacgaagaaaactttggacagacatatcaagtggatttgaagcccaatgggtcagaaataatggtcacaaatgaaaacaaaagggaatatatcgacttagtcatccagtggagatttgtgaacagggtccagaagcagatgaacgccttcttggagggattcacagaactacttcctattgatttgattaaaatttttgatgaaaatgagctggagttgctcatgtgcggcctcggtgatgtggatgtgaatgactggagacagcattctatttacaagaacggctactgcccaaaccaccccgtcattcagtggttctggaaggctgtgctactcatggacgccgaaaagcgtatccggttactgcagtttgtcacagggacatcgcgagtacctatgaatggatttgccgaactttatggttccaatggtcctcagctgtttacaatagagcaatggggcagtcctgagaaactgcccagagctcacacatgctttaatcgccttgacttacctccatatgaaacctttgaagatttacgagagaaacttctcatggccgtggaaaatgctcaaggatttgaaggggtggattaagcaccctgtgcctcgggggtggttgttcttcaagcaagttctgcttgcacttttgcatttgcctaacagacttttgcagaggcgatggcagagagcagctgcaggcatggtccctggagccgagccttcaccacgcactcgtccaagttcggatgcgggaacctggtcccagcttgagttcctgcctttcccaccacaaattatcaactggttgatgtgtacactaattacatttcaggaggacttaatgctatttatgttgtgcctctgcaggcaaagcccttaataaatattttacatcctttctaatgacaatgaatggaattaatcactcaacaggtatagtattacgactcatgtttactttttaaaatgatttagaccgattttcagattttatttcgttatgattaaagatgtctcatgtacttggaaaagtgagcatttttttttttttttttttttgtacaaatttagctaatagctacaggctgagagaattgtaacatagcatgacaaattttgtgttgacttgaaaggaatcacaccattggactcccatttctcatccgagaaattacttaacccttcctggcgctgtacagtcatcttttattctatttcctctttgctgtttgtagtagagacattt

SEQ ID NO: 4700 - DNA, 8257 bp, Homo sapiens
acttgctggtattcccccggtatcagcagaggtgtgtaygggcactgctttaaaactgggaaggaggaagacgaggccagggagccggagggtcaccaaggtagatttccagcagcgctagtccagctgaacactttccagccttgtttttcagcagctttgaggaaaagtatagtgatccgtatgtgaaactttcattgtacgtagcggatgagaatagagaacttgctttggtccagacaaaaacamttaaaaagacactgaacccaaaatggaatgaagaattttatttcagggtaaacccatctaatcacagactcctatttgaagtatttgacgaaaatagactgacacgagacgacttcctgggccaggtggacgtgccccttagtcaccttccgacagaagatccaaccatggagcgaccctatacatttaaggactttctcctcagaccaagaagtcataagtctcgagttaagggatttttgcgattgaaaatggcctatatgccaaaaaatggaggtcaagatgaagaaaacagtgaccagagggatgacatggagcatggatgggaagttgttgactcaaatgactcggcttctcagcaccaagaggaacttcctcctcctcctctgcctcccgggtgggaagaaaaagtggacaatttaggccgaacttactatgtcaaccacaacaaccggaccactcagtggcacagaccaagcctgatggacgtgtcctcggagtcggacaataacatcagacagatcaaccaggaggcagcacaccggcgcttccgctcccgcaggcacatcagcgaagacttggagcccgagccctcggagggcggggatgtccccgagccttgggagaccatttcagaggaagtgaatatcgctggagactctctcggtctggctctgcccccaccaccggcctccccaggatctcggaccagccctcaggagctgtcagaggaactaagcagaaggcttcagatcactccagactccaatggggaacagttcagctctttgattcaaagagaaccctcctcaaggttgaggtcatgcagtgtcaccgacgcagttgcagaacagggccatctaccaccgcccagtgccccagctgggagagcgcgttcatcaactgtcacgggtggtgaggaaccaacgccatcagtggcctatgtacataccacgccgggtctgccttcaggctgggaagaaagaaaagatgctaaggggcgcacatactatgtcaatcataacaatcgaaccacaacttggactcgacctatcatgcagcttgcagaagatggtgcgtccggatcagccacaaacagtaacaaccatctaatcgagcctcagatccrccggcctcgtagcctcagctcgccaacagtaactttatctgccccgctggagggtgccaaggactcacccgtacgtcgggctgtgaaagacaccctttccaacccacagtccccacagccatcaccttacaactcccccaaaccacaacacaaagtcacacagagcttcttgccacccggctgggaaatgaggatagcgccaaacggccggcccttcttcattgatcataacacaaagactacaacctgggaagatccacgtttgaaatttccagtacatatgcggtcaaagacatctttaaaccccaatgaccttggcccccttcctcctggctgggaagaaagaattcacttggatggccgaacgttttatattgatcataatagcaaaattactcagtgggaagacccaagactgcagaacccagctattactggtccggctgtcccttactccagagaatttaagcagaaatatgactacttcaggaagaaattaaagaaacctgctgatatccccaataggtttgaaatgaaacttcacagaaataacatatttgaagagtcctatcggagaattatgtccgtgaaaagaccagatgtcctaaaagctagactgtggattgagtttgaatcagagaaaggtcttgactatgggggtgtggccagagaatggttcttcttactgtccaaagagatgttcaacccctactacggcctctttgagtactctgccacggacaactacacccttcagatcaaccctaattcaggcctctgtaatgaggatcatttgtcctacttcacttttattggaagagttgctggtctggccgtatttcatgggaagctcttagatgrtttcttcattagaccattttacaagatgatgttgggaaagcagataaccctgaatgacatggaatctgtggatagtgaatattacaactctttgaaatggatcctggagaatgaccctactgagctggacctcatgttctgcatagacgaagaaaactttggacagacatatcaagtggatttgaagcccaatgggtcagaaataatggtcacaaatgaaaacaaaagggaatatatcgacttagtcatccagtggagatttgtgaacagggtccagaagcagatgaacgccttcttggagggattcacagaactacttcctattgatttgattaaaatttttgatgaaaatgagctggagttgctcatgtgcggcctcggtgatgtggatgtgaatgactggagacagcattctatttacaagaacggctactgcccaaaccaccccgtcattcagtggttctggaaggctgtgctactcatggacgccgaaaagcgtatccggttactgcagtttgtcacagggacatcgcgagtacctatgaatggatttgccgaactttatggttccaatggtcctcagctgtttacaatagagcaatggggcagtcctgagaaactgcccagagctcacacatgctttaatcgccttgacttacctccatatgaaacctttgaagatttacgagagaaacttctcatggccgtggaaaatgctcaaggatttgaaggggtggattaagcaccctgtgcctcgggggtggttgttcttcaagcaagttctgcttgcacttttgcatttgcctaacagacttttgcagaggcgatggcagagagcagctgcaggcatggtccctggagccgagccttcaccacgcactcgtccaagttcggatgcgggaacctggtcccagcttgagttcctgcctttcccaccacaaattatcaactggttgatgtgtacactaattacatttcaggaggacttaatgctatttatgttgtgcctctgcaggcaaagcccttaataaatattttacatcctttctaatgacaatgaatggaattaatcactcaacaggtatagtattacgactcatgtttactttttaaaatgatttagaccgattttcagattttatttcgttatgattaaagatgtctcatgtacttggaaaagtgagcatttttttttttttttgtatttcactttcataccaggcttaatgtcaatgacatttttatttttgaagtactctgacacctccaccctctactttattagaattggaaggcaaatttttgtccaaaaacctacagacaagtactttgagagaatttccaatataatattagacataatgataattttttccatactcagaatgaaaaactggatattacgtttttkttttggggtttttttgtacaaatttagctaatagctacaggctgagagaattgtaacatagcatgacaaattttgtgttgacttgaaaggaatcacaccattattccttagaagtaattacatgtgttctaacacatttgagacagggttggactcccatttctcatccgagaaattacttaacccttcctggcgctgtacagtcatcttttattctatttcctctttgctgtttgtagtagagacattttgaatgaaacttggcactgcttgattcaaaactgtggaaaccagatctgtttagtctcctgtttgtatgcgtttgctaatggtagctaaataaccagtttttgttgtaaatgcaccaattctgaaggcactttatgtactacatggaggtcatatctggttttgtttttatttttttatcatgaacattaaatgtgatgatgatttcttttccctgcacacatctttccggtgcaatatctatcaattgtgaatctggctgctggtgtataaaaacctggatgtaaagctgagcctacagacctgtcctcaccaactgttttgtgatttctactcaactacaaagatttatttaatgtactcttaatctaactgagttttgttaccaatgacctgttgcatgcttcaataccgtgtactgcctgagttgtgcctcttgtgtgctagattaaaagtgagacagagacttgacttgatcctctgagctcaagctattgagctggtagtggcagaggactgagggtacctgcacagtttgattcttttccacgtgtaagtctccattgcagaattgtcgtgctttgagaaaacacctgaggcagtgtgggagttgaacgaccctgctgtcctttttaacctgtgttgtcctagaccctgtcggggcagtcaggggacactagagatttgatctcatgcgagtcatcaataggacaaaaaagttgtggtttggggaggtctgtttgttacataaaaaggacctttcggtgtaagaaattgccgtttttaccctgccctggctggcatgtgagaagccatggaaggttgtggttgtaaatgagttgtctaaaggggtgcagaggcctgaggtttytaaaagaaggtagatttctacagagctgagtgttggttcctttttcttattggttgaaaattacctggtagtgatcagaaaacttagatgctatgtaactaaaaaaaaaaaaaaaaaaaaaaaaaaaaaaaaaaaaattcccgctcatgagttttgactattggtgagatgttttccgctacagttaacatgacaaatgtctcagtggcaaaaatcccctttttgtaagcccccatagtctagaggcagttttctttttaagaatcatgccagagcctgagtcgagcagtatgctttcttggtttttgagagtaattgtgtaattgtagagggagaaatccaattctaacctaagaactgggattcttctgtcatcttgtaaaccgtatattgaaaaaaacagaatgtcactaaatgcatattaagtcaagtattggaaagtataaaagaaaaatcattctgacaatttctaagccagaagcaaacaagaattactgaaatctaccccatgaatacttggaaggcagtaattgtgagtgacacctcagttcatcaaccccttaataatatcagcttaattttaatgacaactaaatatgctgaagtgaggatttagtattttttaaaaaagcaaaacaaggttcagtagtcctcagcaattctccaagtttctctctttgcctaaaatggtcatagatcttgatttctctgaatcgtgatgaccacacccagtcatcttcacagcataattgcaggtggcagtaaagagagtgtgctgggtaaggagcagttgctgggtcattccttgggccccgacctgcccggggagtagccctgggggagagagggcagtgttgcctatcccagaggtcccagcagtcacactgctctgcaggccgggctctctttatagccagagaaatcaccttaatgcagtctctttagttgtctgctgaagctgtagttattatgggccacttacatgaggctgagaagtacgtgccggagctcacacactgcctgttgcggttctcttaacatcagttatcacagctgcctgtgggtcccgggtatttccattcctgccccttgttggcccgaggaaggatgtggaaagagcacctggygggatgaaggtccaacagcctgtgcctctccactgctggccctggagccggcagcagtgaggcattcattgtctgtgttgcggtgtattcccagcttcagtgctcttttcctttttgcctgaaatgtttatgcttctctgcagccagtcctctaacaaatctcaagaacaaaggtaagacacttggtttttgtttccaggacccttcagaaggtgacatcagatattccctaaattcagacaatgagggatacagagcgacttggcatgtattatttctcccatgtaaggacaaagggacagattattattgttatttctgagacagagtcttgctctgtagctcaggctggagtgcagtggctcaatctcagctcaccacaacctctgcctcctggcttcaagcgattcttctgcctcagcctccccgaatagttgggattacaggcacccaccaccacgcctggctaatttttgtatttttagtagagatggtttcaccatgctggccaggctggtcttgaactcctgacctcaggtgatcctcccgcctcagccttccaaagtgctgggattacaagcatgagccaccgcacccggcctcacagtgacagattctgagaaacagcrtgcaaaacatttgaaccattttctacatctcccattgttgcatagagagtgtgcaccgctgctatcttgccagatccacactggtcctcccgaaagccaggttcatacacagcaactttttaattattctaacagttacccattaacagtcgactcctgtatttctgagagtcttgtactcacctctgaaatttaaaaacgtataaagagagcctgggttaatcagttctgcagcccctacgtgacactgtgctagttctccttcttctgtctcctccttaccctggccctgcacccctgtacttaagagggagaggtgggaggtgctgtctggtatcatttgctgcctcgccagtagagggtgccgctgtgcagggtaactgcccgcctgctcccttcctgacctcccctgaccccgaagatcactacctctgtcattcaggcattggggtacatcctgataagtcgtgtcagaactgccaatttcaggactgagatgtgtttttaaaaaacaaatccttataaactccactttgtactttagattttaaaactggggaaaaatgtgatattctttggaccacttttttaatttatataagccttaatgaacagtgtctatacatttgcatacacacacccccaccccagagtgttctcagtatgtcagagaaagtgccacagcattaggacgggagcttggagaacgttttctagaaaagggttagcttcctgttggcatgaaattttccaagcaaacctcattaaacatctgttgtttgttaaagatgttccactgaaagcaacgcatgtttcaaaggcacgtctttcygttcgttggttttctgtgtgtaaggagtagcattgctgttggcgcctaacctcgcgtgcactgcattctcaaccccgtaccagtgcatcatcrgaagccttcctcgtgaccataactctgtgtctgcagatatgtgttcccgtgtaagccagttttccccttttactcagactgatttcacctagattgtcacggtttccttcatgttaactttgcgtgactttgttcttcctttactactctgtatgtaatatatatacatatatacgtacatatgctgtccaaatatatttgtatatatttgtatagcatttttacacctttattgagtaatctggtttcgaaaggaggtgagagtttagtcccttctgcagttttctccaagctgtgtcctgtgaatttcaacccttggagcctaagaaaaccctaggaagatgatgttaatttgctgtcatttcctaattcaggatctatcatcaaatgaaacatgaaaaaaacagtgacttttaaggtgaaaagagtttcaagcattccaaataaattatcaatgtttcataactttttattataaacccacctcctaataggaagccaagtactatttgatacagtggtaaaaaccaaactaccttgaatttttttaaggcaacttatgaataatgctcattttcacagtcagaatagctttaaaatatggttgaatttgatacacacaggaagttttcttgaagaacaatcctttcgcttttcttttttcttgagagatctaaagagaaactgtagattgttttcctgacagcaaaagactaatgtgacaaaatgaagtcattgtaaagaagcgatgcaacttgtcaaatatttaataaagaattatggaagctggaacattttctacatca

SEQ ID NO: 4701 - DNA, 8064 bp, Homo sapiens
ccagtcacagaggaagccatttccagagaggaacaaccgtgtagactgctttcctgggagtcaagttaaaacttctctcctgtgaccttgtcacccggcagtggaaagttacccttggctgcagccacgacttccgcatactcttcagaacttgctctgcccttgagttttccagctttcctttaatgcactaaacctttaatattgtattctcctaaatgagacgtctcgcatttgagcargtaacactcgggagagtcccgtattctcagagtaaaagttgtttctggaattgatctcgccaaaaaggacatctttggagccagcggatgagaatagagaacttgctttggtccagacaaaaacamttaaaaagacactgaacccaaaatggaatgaagaattttatttcagggtaaacccatctaatcacagactcctatttgaagtatttgacgaaaatagactgacacgagacgacttcctgggccaggtggacgtgccccttagtcaccttccgacagaagatccaaccatggagcgaccctatacatttaaggactttctcctcagaccaagaagtcataagtctcgagttaagggatttttgcgattgaaaatggcctatatgccaaaaaatggaggtcaagatgaagaaaacagtgaccagagggatgacatggagcatggatgggaagttgttgactcaaatgactcggcttctcagcaccaagaggaacttcctcctcctcctctgcctcccgggtgggaagaaaaagtggacaatttaggccgaacttactatgtcaaccacaacaaccggaccactcagtggcacagaccaagcctgatggacgtgtcctcggagtcggacaataacatcagacagatcaaccaggaggcagcacaccggcgcttccgctcccgcaggcacatcagcgaagacttggagcccgagccctcggagggcggggatgtccccgagccttgggagaccatttcagaggaagtgaatatcgctggagactctctcggtctggctctgcccccaccaccggcctccccaggatctcggaccagccctcaggagctgtcagaggaactaagcagaaggcttcagatcactccagactccaatggggaacagttcagctctttgattcaaagagaaccctcctcaaggttgaggtcatgcagtgtcaccgacgcagttgcagaacagggccatctaccaccgggtgccaaggactcacccgtacgtcgggctgtgaaagacaccctttccaacccacagtccccacagccatcaccttacaactcccccaaaccacaacacaaagtcacacagagcttcttgccacccggctgggaaatgaggatagcgccaaacggccggcccttcttcattgatcataacacaaagactacaacctgggaagatccacgtttgaaatttccagtacatatgcggtcaaagacatctttaaaccccaatgaccttggcccccttcctcctggctgggaagaaagaattcacttggatggccgaacgttttatattgatcataatagcaaaattactcagtgggaagacccaagactgcagaacccagctattactggtccggctgtcccttactccagagaatttaagcagaaatatgactacttcaggaagaaattaaagaaacctgctgatatccccaataggtttgaaatgaaacttcacagaaataacatatttgaagagtcctatcggagaattatgtccgtgaaaagaccagatgtcctaaaagctagactgtggattgagtttgaatcagagaaaggtcttgactatgggggtgtggccagagaatggttcttcttactgtccaaagagatgttcaacccctactacggcctctttgagtactctgccacggacaactacacccttcagatcaaccctaattcaggcctctgtaatgaggatcatttgtcctacttcacttttattggaagagttgctggtctggccgtatttcatgggaagctcttagatgrtttcttcattagaccattttacaagatgatgttgggaaagcagataaccctgaatgacatggaatctgtggatagtgaatattacaactctttgaaatggatcctggagaatgaccctactgagctggacctcatgttctgcatagacgaagaaaactttggacagacatatcaagtggatttgaagcccaatgggtcagaaataatggtcacaaatgaaaacaaaagggaatatatcgacttagtcatccagtggagatttgtgaacagggtccagaagcagatgaacgccttcttggagggattcacagaactacttcctattgatttgattaaaatttttgatgaaaatgagctggagttgctcatgtgcggcctcggtgatgtggatgtgaatgactggagacagcattctatttacaagaacggctactgcccaaaccaccccgtcattcagtggttctggaaggctgtgctactcatggacgccgaaaagcgtatccggttactgcagtttgtcacagggacatcgcgagtacctatgaatggatttgccgaactttatggttccaatggtcctcagctgtttacaatagagcaatggggcagtcctgagaaactgcccagagctcacacatgctttaatcgccttgacttacctccatatgaaacctttgaagatttacgagagaaacttctcatggccgtggaaaatgctcaaggatttgaaggggtggattaagcaccctgtgcctcgggggtggttgttcttcaagcaagttctgcttgcacttttgcatttgcctaacagacttttgcagaggcgatggcagagagcagctgcaggcatggtccctggagccgagccttcaccacgcactcgtccaagttcggatgcgggaacctggtcccagcttgagttcctgcctttcccaccacaaattatcaactggttgatgtgtacactaattacatttcaggaggacttaatgctatttatgttgtgcctctgcaggcaaagcccttaataaatattttacatcctttctaatgacaatgaatggaattaatcactcaacaggtatagtattacgactcatgtttactttttaaaatgatttagaccgattttcagattttatttcgttatgattaaagatgtctcatgtacttggaaaagtgagcatttttttttttttttgtatttcactttcataccaggcttaatgtcaatgacatttttatttttgaagtactctgacacctccaccctctactttattagaattggaaggcaaatttttgtccaaaaacctacagacaagtactttgagagaatttccaatataatattagacataatgataattttttccatactcagaatgaaaaactggatattacgtttttkttttggggtttttttgtacaaatttagctaatagctacaggctgagagaattgtaacatagcatgacaaattttgtgttgacttgaaaggaatcacaccattattccttagaagtaattacatgtgttctaacacatttgagacagggttggactcccatttctcatccgagaaattacttaacccttcctggcgctgtacagtcatcttttattctatttcctctttgctgtttgtagtagagacattttgaatgaaacttggcactgcttgattcaaaactgtggaaaccagatctgtttagtctcctgtttgtatgcgtttgctaatggtagctaaataaccagtttttgttgtaaatgcaccaattctgaaggcactttatgtactacatggaggtcatatctggttttgtttttatttttttatcatgaacattaaatgtgatgatgatttcttttccctgcacacatctttccggtgcaatatctatcaattgtgaatctggctgctggtgtataaaaacctggatgtaaagctgagcctacagacctgtcctcaccaactgttttgtgatttctactcaactacaaagatttatttaatgtactcttaatctaactgagttttgttaccaatgacctgttgcatgcttcaataccgtgtactgcctgagttgtgcctcttgtgtgctagattaaaagtgagacagagacttgacttgatcctctgagctcaagctattgagctggtagtggcagaggactgagggtacctgcacagtttgattcttttccacgtgtaagtctccattgcagaattgtcgtgctttgagaaaacacctgaggcagtgtgggagttgaacgaccctgctgtcctttttaacctgtgttgtcctagaccctgtcggggcagtcaggggacactagagatttgatctcatgcgagtcatcaataggacaaaaaagttgtggtttggggaggtctgtttgttacataaaaaggacctttcggtgtaagaaattgccgtttttaccctgccctggctggcatgtgagaagccatggaaggttgtggttgtaaatgagttgtctaaaggggtgcagaggcctgaggtttytaaaagaaggtagatttctacagagctgagtgttggttcctttttcttattggttgaaaattacctggtagtgatcagaaaacttagatgctatgtaactaaaaaaaaaaaaaaaaaaaaaaaaaaaaaaaaaaaaattcccgctcatgagttttgactattggtgagatgttttccgctacagttaacatgacaaatgtctcagtggcaaaaatcccctttttgtaagcccccatagtctagaggcagttttctttttaagaatcatgccagagcctgagtcgagcagtatgctttcttggtttttgagagtaattgtgtaattgtagagggagaaatccaattctaacctaagaactgggattcttctgtcatcttgtaaaccgtatattgaaaaaaacagaatgtcactaaatgcatattaagtcaagtattggaaagtataaaagaaaaatcattctgacaatttctaagccagaagcaaacaagaattactgaaatctaccccatgaatacttggaaggcagtaattgtgagtgacacctcagttcatcaaccccttaataatatcagcttaattttaatgacaactaaatatgctgaagtgaggatttagtattttttaaaaaagcaaaacaaggttcagtagtcctcagcaattctccaagtttctctctttgcctaaaatggtcatagatcttgatttctctgaatcgtgatgaccacacccagtcatcttcacagcataattgcaggtggcagtaaagagagtgtgctgggtaaggagcagttgctgggtcattccttgggccccgacctgcccggggagtagccctgggggagagagggcagtgttgcctatcccagaggtcccagcagtcacactgctctgcaggccgggctctctttatagccagagaaatcaccttaatgcagtctctttagttgtctgctgaagctgtagttattatgggccacttacatgaggctgagaagtacgtgccggagctcacacactgcctgttgcggttctcttaacatcagttatcacagctgcctgtgggtcccgggtatttccattcctgccccttgttggcccgaggaaggatgtggaaagagcacctggygggatgaaggtccaacagcctgtgcctctccactgctggccctggagccggcagcagtgaggcattcattgtctgtgttgcggtgtattcccagcttcagtgctcttttcctttttgcctgaaatgtttatgcttctctgcagccagtcctctaacaaatctcaagaacaaaggtaagacacttggtttttgtttccaggacccttcagaaggtgacatcagatattccctaaattcagacaatgagggatacagagcgacttggcatgtattatttctcccatgtaaggacaaagggacagattattattgttatttctgagacagagtcttgctctgtagctcaggctggagtgcagtggctcaatctcagctcaccacaacctctgcctcctggcttcaagcgattcttctgcctcagcctccccgaatagttgggattacaggcacccaccaccacgcctggctaatttttgtatttttagtagagatggtttcaccatgctggccaggctggtcttgaactcctgacctcaggtgatcctcccgcctcagccttccaaagtgctgggattacaagcatgagccaccgcacccggcctcacagtgacagattctgagaaacagcrtgcaaaacatttgaaccattttctacatctcccattgttgcatagagagtgtgcaccgctgctatcttgccagatccacactggtcctcccgaaagccaggttcatacacagcaactttttaattattctaacagttacccattaacagtcgactcctgtatttctgagagtcttgtactcacctctgaaatttaaaaacgtataaagagagcctgggttaatcagttctgcagcccctacgtgacactgtgctagttctccttcttctgtctcctccttaccctggccctgcacccctgtacttaagagggagaggtgggaggtgctgtctggtatcatttgctgcctcgccagtagagggtgccgctgtgcagggtaactgcccgcctgctcccttcctgacctcccctgaccccgaagatcactacctctgtcattcaggcattggggtacatcctgataagtcgtgtcagaactgccaatttcaggactgagatgtgtttttaaaaaacaaatccttataaactccactttgtactttagattttaaaactggggaaaaatgtgatattctttggaccacttttttaatttatataagccttaatgaacagtgtctatacatttgcatacacacacccccaccccagagtgttctcagtatgtcagagaaagtgccacagcattaggacgggagcttggagaacgttttctagaaaagggttagcttcctgttggcatgaaattttccaagcaaacctcattaaacatctgttgtttgttaaagatgttccactgaaagcaacgcatgtttcaaaggcacgtctttcygttcgttggttttctgtgtgtaaggagtagcattgctgttggcgcctaacctcgcgtgcactgcattctcaaccccgtaccagtgcatcatcrgaagccttcctcgtgaccataactctgtgtctgcagatatgtgttcccgtgtaagccagttttccccttttactcagactgatttcacctagattgtcacggtttccttcatgttaactttgcgtgactttgttcttcctttactactctgtatgtaatatatatacatatatacgtacatatgctgtccaaatatatttgtatatatttgtatagcatttttacacctttattgagtaatctggtttcgaaaggaggtgagagtttagtcccttctgcagttttctccaagctgtgtcctgtgaatttcaacccttggagcctaagaaaaccctaggaagatgatgttaatttgctgtcatttcctaattcaggatctatcatcaaatgaaacatgaaaaaaacagtgacttttaaggtgaaaagagtttcaagcattccaaataaattatcaatgtttcataactttttattataaacccacctcctaataggaagccaagtactatttgatacagtggtaaaaaccaaactaccttgaatttttttaaggcaacttatgaataatgctcattttcacagtcagaatagctttaaaatatggttgaatttgatacacacaggaagttttcttgaagaacaatcctttcgcttttcttttttcttgagagatctaaagagaaactgtagattgttttcctgacagcaaaagactaatgtgacaaaatgaagtcattgtaaagaagcgatgcaacttgtcaaatatttaataaagaattatggaagctggaacattttctacatca

SEQ ID NO: 4702 - DNA, 8348 bp, Homo sapiens
ccagtcacagaggaagccatttccagagaggaacaaccgtgtagactgctttcctgggagtcaagttaaaacttctctcctgtgaccttgtcacccggcagtggaaagttacccttggctgcagccacgacttccgcatactcttcagaacttgctctgcccttgagttttccagctttcctttaatgcactaaacctttaatattgtattctcctaaatgagacgtctcgcatttgagcargtaacactcgggagagtcccgtattctcagagtaaaagttgtttctggaattgatctcgccaaaaaggacatctttggagccagtgatccgtatgtgaaactttcattgtacgtagcggatgagaatagagaacttgctttggtccagacaaaaacamttaaaaagacactgaacccaaaatggaatgaagaattttatttcagggtaaacccatctaatcacagactcctatttgaagtatttgacgaaaatagactgacacgagacgacttcctgggccaggtggacgtgccccttagtcaccttccgacagaagatccaaccatggagcgaccctatacatttaaggactttctcctcagaccaagaagtcataagtctcgagttaagggatttttgcgattgaaaatggcctatatgccaaaaaatggaggtcaagatgaagaaaacagtgaccagagggatgacatggagcatggatgggaagttgttgactcaaatgactcggcttctcagcaccaagaggaacttcctcctcctcctctgcctcccgggtgggaagaaaaagtggacaatttaggccgaacttactatgtcaaccacaacaaccggaccactcagtggcacagaccaagcctgatggacgtgtcctcggagtcggacaataacatcagacagatcaaccaggaggcagcacaccggcgcttccgctcccgcaggcacatcagcgaagacttggagcccgagccctcggagggcggggatgtccccgagccttgggagaccatttcagaggaagtgaatatcgctggagactctctcggtctggctctgcccccaccaccggcctccccaggatctcggaccagccctcaggagctgtcagaggaactaagcagaaggcttcagatcactccagactccaatggggaacagttcagctctttgattcaaagagaaccctcctcaaggttgaggtcatgcagtgtcaccgacgcagttgcagaacagggccatctaccaccgccatcagtggcctatgtacataccacgccgggtctgccttcaggctgggaagaaagaaaagatgctaaggggcgcacatactatgtcaatcataacaatcgaaccacaacttggactcgacctatcatgcagcttgcagaagatggtgcgtccggatcagccacaaacagtaacaaccatctaatcgagcctcagatccrccggcctcgtagcctcagctcgccaacagtaactttatctgccccgctggagggtgccaaggactcacccgtacgtcgggctgtgaaagacaccctttccaacccacagtccccacagccatcaccttacaactcccccaaaccacaacacaaagtcacacagagcttcttgccacccggctgggaaatgaggatagcgccaaacggccggcccttcttcattgatcataacacaaagactacaacctgggaagatccacgtttgaaatttccagtacatatgcggtcaaagacatctttaaaccccaatgaccttggcccccttcctcctggctgggaagaaagaattcacttggatggccgaacgttttatattgatcataatagcaaaattactcagtgggaagacccaagactgcagaacccagctattactggtccggctgtcccttactccagagaatttaagcagaaatatgactacttcaggaagaaattaaagaaacctgctgatatccccaataggtttgaaatgaaacttcacagaaataacatatttgaagagtcctatcggagaattatgtccgtgaaaagaccagatgtcctaaaagctagactgtggattgagtttgaatcagagaaaggtcttgactatgggggtgtggccagagaatggttcttcttactgtccaaagagatgttcaacccctactacggcctctttgagtactctgccacggacaactacacccttcagatcaaccctaattcaggcctctgtaatgaggatcatttgtcctacttcacttttattggaagagttgctggtctggccgtatttcatgggaagctcttagatgrtttcttcattagaccattttacaagatgatgttgggaaagcagataaccctgaatgacatggaatctgtggatagtgaatattacaactctttgaaatggatcctggagaatgaccctactgagctggacctcatgttctgcatagacgaagaaaactttggacagacatatcaagtggatttgaagcccaatgggtcagaaataatggtcacaaatgaaaacaaaagggaatatatcgacttagtcatccagtggagatttgtgaacagggtccagaagcagatgaacgccttcttggagggattcacagaactacttcctattgatttgattaaaatttttgatgaaaatgagctggagttgctcatgtgcggcctcggtgatgtggatgtgaatgactggagacagcattctatttacaagaacggctactgcccaaaccaccccgtcattcagtggttctggaaggctgtgctactcatggacgccgaaaagcgtatccggttactgcagtttgtcacagggacatcgcgagtacctatgaatggatttgccgaactttatggttccaatggtcctcagctgtttacaatagagcaatggggcagtcctgagaaactgcccagagctcacacatgctttaatcgccttgacttacctccatatgaaacctttgaagatttacgagagaaacttctcatggccgtggaaaatgctcaaggatttgaaggggtggattaagcaccctgtgcctcgggggtggttgttcttcaagcaagttctgcttgcacttttgcatttgcctaacagacttttgcagaggcgatggcagagagcagctgcaggcatggtccctggagccgagccttcaccacgcactcgtccaagttcggatgcgggaacctggtcccagcttgagttcctgcctttcccaccacaaattatcaactggttgatgtgtacactaattacatttcaggaggacttaatgctatttatgttgtgcctctgcaggcaaagcccttaataaatattttacatcctttctaatgacaatgaatggaattaatcactcaacaggtatagtattacgactcatgtttactttttaaaatgatttagaccgattttcagattttatttcgttatgattaaagatgtctcatgtacttggaaaagtgagcatttttttttttttttgtatttcactttcataccaggcttaatgtcaatgacatttttatttttgaagtactctgacacctccaccctctactttattagaattggaaggcaaatttttgtccaaaaacctacagacaagtactttgagagaatttccaatataatattagacataatgataattttttccatactcagaatgaaaaactggatattacgtttttkttttggggtttttttgtacaaatttagctaatagctacaggctgagagaattgtaacatagcatgacaaattttgtgttgacttgaaaggaatcacaccattattccttagaagtaattacatgtgttctaacacatttgagacagggttggactcccatttctcatccgagaaattacttaacccttcctggcgctgtacagtcatcttttattctatttcctctttgctgtttgtagtagagacattttgaatgaaacttggcactgcttgattcaaaactgtggaaaccagatctgtttagtctcctgtttgtatgcgtttgctaatggtagctaaataaccagtttttgttgtaaatgcaccaattctgaaggcactttatgtactacatggaggtcatatctggttttgtttttatttttttatcatgaacattaaatgtgatgatgatttcttttccctgcacacatctttccggtgcaatatctatcaattgtgaatctggctgctggtgtataaaaacctggatgtaaagctgagcctacagacctgtcctcaccaactgttttgtgatttctactcaactacaaagatttatttaatgtactcttaatctaactgagttttgttaccaatgacctgttgcatgcttcaataccgtgtactgcctgagttgtgcctcttgtgtgctagattaaaagtgagacagagacttgacttgatcctctgagctcaagctattgagctggtagtggcagaggactgagggtacctgcacagtttgattcttttccacgtgtaagtctccattgcagaattgtcgtgctttgagaaaacacctgaggcagtgtgggagttgaacgaccctgctgtcctttttaacctgtgttgtcctagaccctgtcggggcagtcaggggacactagagatttgatctcatgcgagtcatcaataggacaaaaaagttgtggtttggggaggtctgtttgttacataaaaaggacctttcggtgtaagaaattgccgtttttaccctgccctggctggcatgtgagaagccatggaaggttgtggttgtaaatgagttgtctaaaggggtgcagaggcctgaggtttytaaaagaaggtagatttctacagagctgagtgttggttcctttttcttattggttgaaaattacctggtagtgatcagaaaacttagatgctatgtaactaaaaaaaaaaaaaaaaaaaaaaaaaaaaaaaaaaaaattcccgctcatgagttttgactattggtgagatgttttccgctacagttaacatgacaaatgtctcagtggcaaaaatcccctttttgtaagcccccatagtctagaggcagttttctttttaagaatcatgccagagcctgagtcgagcagtatgctttcttggtttttgagagtaattgtgtaattgtagagggagaaatccaattctaacctaagaactgggattcttctgtcatcttgtaaaccgtatattgaaaaaaacagaatgtcactaaatgcatattaagtcaagtattggaaagtataaaagaaaaatcattctgacaatttctaagccagaagcaaacaagaattactgaaatctaccccatgaatacttggaaggcagtaattgtgagtgacacctcagttcatcaaccccttaataatatcagcttaattttaatgacaactaaatatgctgaagtgaggatttagtattttttaaaaaagcaaaacaaggttcagtagtcctcagcaattctccaagtttctctctttgcctaaaatggtcatagatcttgatttctctgaatcgtgatgaccacacccagtcatcttcacagcataattgcaggtggcagtaaagagagtgtgctgggtaaggagcagttgctgggtcattccttgggccccgacctgcccggggagtagccctgggggagagagggcagtgttgcctatcccagaggtcccagcagtcacactgctctgcaggccgggctctctttatagccagagaaatcaccttaatgcagtctctttagttgtctgctgaagctgtagttattatgggccacttacatgaggctgagaagtacgtgccggagctcacacactgcctgttgcggttctcttaacatcagttatcacagctgcctgtgggtcccgggtatttccattcctgccccttgttggcccgaggaaggatgtggaaagagcacctggygggatgaaggtccaacagcctgtgcctctccactgctggccctggagccggcagcagtgaggcattcattgtctgtgttgcggtgtattcccagcttcagtgctcttttcctttttgcctgaaatgtttatgcttctctgcagccagtcctctaacaaatctcaagaacaaaggtaagacacttggtttttgtttccaggacccttcagaaggtgacatcagatattccctaaattcagacaatgagggatacagagcgacttggcatgtattatttctcccatgtaaggacaaagggacagattattattgttatttctgagacagagtcttgctctgtagctcaggctggagtgcagtggctcaatctcagctcaccacaacctctgcctcctggcttcaagcgattcttctgcctcagcctccccgaatagttgggattacaggcacccaccaccacgcctggctaatttttgtatttttagtagagatggtttcaccatgctggccaggctggtcttgaactcctgacctcaggtgatcctcccgcctcagccttccaaagtgctgggattacaagcatgagccaccgcacccggcctcacagtgacagattctgagaaacagcrtgcaaaacatttgaaccattttctacatctcccattgttgcatagagagtgtgcaccgctgctatcttgccagatccacactggtcctcccgaaagccaggttcatacacagcaactttttaattattctaacagttacccattaacagtcgactcctgtatttctgagagtcttgtactcacctctgaaatttaaaaacgtataaagagagcctgggttaatcagttctgcagcccctacgtgacactgtgctagttctccttcttctgtctcctccttaccctggccctgcacccctgtacttaagagggagaggtgggaggtgctgtctggtatcatttgctgcctcgccagtagagggtgccgctgtgcagggtaactgcccgcctgctcccttcctgacctcccctgaccccgaagatcactacctctgtcattcaggcattggggtacatcctgataagtcgtgtcagaactgccaatttcaggactgagatgtgtttttaaaaaacaaatccttataaactccactttgtactttagattttaaaactggggaaaaatgtgatattctttggaccacttttttaatttatataagccttaatgaacagtgtctatacatttgcatacacacacccccaccccagagtgttctcagtatgtcagagaaagtgccacagcattaggacgggagcttggagaacgttttctagaaaagggttagcttcctgttggcatgaaattttccaagcaaacctcattaaacatctgttgtttgttaaagatgttccactgaaagcaacgcatgtttcaaaggcacgtctttcygttcgttggttttctgtgtgtaaggagtagcattgctgttggcgcctaacctcgcgtgcactgcattctcaaccccgtaccagtgcatcatcrgaagccttcctcgtgaccataactctgtgtctgcagatatgtgttcccgtgtaagccagttttccccttttactcagactgatttcacctagattgtcacggtttccttcatgttaactttgcgtgactttgttcttcctttactactctgtatgtaatatatatacatatatacgtacatatgctgtccaaatatatttgtatatatttgtatagcatttttacacctttattgagtaatctggtttcgaaaggaggtgagagtttagtcccttctgcagttttctccaagctgtgtcctgtgaatttcaacccttggagcctaagaaaaccctaggaagatgatgttaatttgctgtcatttcctaattcaggatctatcatcaaatgaaacatgaaaaaaacagtgacttttaaggtgaaaagagtttcaagcattccaaataaattatcaatgtttcataactttttattataaacccacctcctaataggaagccaagtactatttgatacagtggtaaaaaccaaactaccttgaatttttttaaggcaacttatgaataatgctcattttcacagtcagaatagctttaaaatatggttgaatttgatacacacaggaagttttcttgaagaacaatcctttcgcttttcttttttcttgagagatctaaagagaaactgtagattgttttcctgacagcaaaagactaatgtgacaaaatgaagtcattgtaaagaagcgatgcaacttgtcaaatatttaataaagaattatggaagctggaacattttctacatca

SEQ ID NO: 4703 - DNA, 3795 bp, Homo sapiens
cgccgccgcgcgcagggagaggcgccggggctgccgcccggtgctcggcgcgctctcgggagccgcccgcccgctggtcccgcagccttccgggaggaagcggtgccggcagcgtccagggcgcgctctcgggcaccctcacctgccggcgcccggccgcttacccggcagggcgtgcgcagggtagggtgcgggaccggggggacctggaggcagaggggagaaccggccgtccgcgccgcagcacagccgctgggagcgcctcagaccccgcgcggggcgccggctccatggcgaccgggctcggggagccggtctatggactttccgaagacgagggagagtcccgtattctcagagtaaaagttgtttctggaattgatctcgccaaaaaggacatctttggagccagtgatccgtatgtgaaactttcattgtacgtagcggatgagaatagagaacttgctttggtccagacaaaaacamttaaaaagacactgaacccaaaatggaatgaagaattttatttcagggtaaacccatctaatcacagactcctatttgaagtatttgacgaaaatagactgacacgagacgacttcctgggccaggtggacgtgccccttagtcaccttccgacagaagatccaaccatggagcgaccctatacatttaaggactttctcctcagaccaagaagtcataagtctcgagttaagggatttttgcgattgaaaatggcctatatgccaaaaaatggaggtcaagatgaagaaaacagtgaccagagggatgacatggagcatggatgggaagttgttgactcaaatgactcggcttctcagcaccaagaggaacttcctcctcctcctctgcctcccgggtgggaagaaaaagtggacaatttaggccgaacttactatgtcaaccacaacaaccggaccactcagtggcacagaccaagcctgatggacgtgtcctcggagtcggacaataacatcagacagatcaaccaggaggcagcacaccggcgcttccgctcccgcaggcacatcagcgaagacttggagcccgagccctcggagggcggggatgtccccgagccttgggagaccatttcagaggaagtgaatatcgctggagactctctcggtctggctctgcccccaccaccggcctccccaggatctcggaccagccctcaggagctgtcagaggaactaagcagaaggcttcagatcactccagactccaatggggaacagttcagctctttgattcaaagagaaccctcctcaaggttgaggtcatgcagtgtcaccgacgcagttgcagaacagggccatctaccaccgcccagtgccccagctgggagagcgcgttcatcaactgtcacgggtggtgaggaaccaacgccatcagtggcctatgtacataccacgccgggtctgccttcaggctgggaagaaagaaaagatgctaaggggcgcacatactatgtcaatcataacaatcgaaccacaacttggactcgacctatcatgcagcttgcagaagatggtgcgtccggatcagccacaaacagtaacaaccatctaatcgagcctcagatccrccggcctcgtagcctcagctcgccaacagtaactttatctgccccgctggagggtgccaaggactcacccgtacgtcgggctgtgaaagacaccctttccaacccacagtccccacagccatcaccttacaactcccccaaaccacaacacaaagtcacacagagcttcttgccacccggctgggaaatgaggatagcgccaaacggccggcccttcttcattgatcataacacaaagactacaacctgggaagatccacgtttgaaatttccagtacatatgcggtcaaagacatctttaaaccccaatgaccttggcccccttcctcctggctgggaagaaagaattcacttggatggccgaacgttttatattgatcataatagcaaaattactcagtgggaagacccaagactgcagaacccagctattactggtccggctgtcccttactccagagaatttaagcagaaatatgactacttcaggaagaaattaaagaaacctgctgatatccccaataggtttgaaatgaaacttcacagaaataacatatttgaagagtcctatcggagaattatgtccgtgaaaagaccagatgtcctaaaagctagactgtggattgagtttgaatcagagaaaggtcttgactatgggggtgtggccagagaatggttcttcttactgtccaaagagatgttcaacccctactacggcctctttgagtactctgccacggacaactacacccttcagatcaaccctaattcaggcctctgtaatgaggatcatttgtcctacttcacttttattggaagagttgctggtctggccgtatttcatgggaagctcttagatgrtttcttcattagaccattttacaagatgatgttgggaaagcagataaccctgaatgacatggaatctgtggatagtgaatattacaactctttgaaatggatcctggagaatgaccctactgagctggacctcatgttctgcatagacgaagaaaactttggacagacatatcaagtggatttgaagcccaatgggtcagaaataatggtcacaaatgaaaacaaaagggaatatatcgacttagtcatccagtggagatttgtgaacagggtccagaagcagatgaacgccttcttggagggattcacagaactacttcctattgatttgattaaaatttttgatgaaaatgagctggagttgctcatgtgcggcctcggtgatgtggatgtgaatgactggagacagcattctatttacaagaacggctactgcccaaaccaccccgtcattcagtggttctggaaggctgtgctactcatggacgccgaaaagcgtatccggttactgcagtttgtcacagggacatcgcgagtacctatgaatggatttgccgaactttatggttccaatggtcctcagctgtttacaatagagcaatggggcagtcctgagaaactgcccagagctcacacatgctttaatcgccttgacttacctccatatgaaacctttgaagatttacgagagaaacttctcatggccgtggaaaatgctcaaggatttgaaggggtggattaagcacccgcgatggcagagagcagctgcaggcatggtccctggagccgagccttcaccacgcactcgtccaagttcggatgcgggaacctggtcccagcttgagttcctgcctttcccaccacaaattatcaactggttgatgtgtacactaattacatttcaggaggacttaatgctatttatgttgtgcctctgcaggcaaagcccttaataaatattttacatcctttctaatgacaatgaatggaattaatcactcaacaggtatagtattacgactcatgtttactttttaaaatgatttagaccgattttcagattttatttcgttatgattaaagatgtctcatgtacttggaaaagtgagcatttttttttttttttttttttgtacaaatttagctaatagctacaggctgagagaattgtaacatagcatgacaaattttgtgttgacttgaaaggaatcacaccattggactcccatttctcatccgagaaattacttaacccttcctggcgctgtacagtcatcttttattctatttcctctttgctgtttgtagtagagacattt

SEQ ID NO: 4704 - DNA, 3516 bp, Homo sapiens
ccgggtgggtggctgcgcavggccctacctgggcgggagcggctgcagagccctgtccacgcggtgcctccccagcacggcacctcccactccaggctgttggttacctggccgggagctggcrgagaccaggatttctcctcgccgccgttgctgttgttaggggaaacagaccatctgcatctagacctgcctctctctccgctccccacttcagacgagctcttcctgcctggaatctgtgatccgtatgtgaaactttcattgtacgtagcggatgagaatagagaacttgctttggtccagacaaaaacamttaaaaagacactgaacccaaaatggaatgaagaattttatttcagggtaaacccatctaatcacagactcctatttgaagtatttgacgaaaatagactgacacgagacgacttcctgggccaggtggacgtgccccttagtcaccttccgacagaagatccaaccatggagcgaccctatacatttaaggactttctcctcagaccaagaagtcataagtctcgagttaagggatttttgcgattgaaaatggcctatatgccaaaaaatggaggtcaagatgaagaaaacagtgaccagagggatgacatggagcatggatgggaagttgttgactcaaatgactcggcttctcagcaccaagaggaacttcctcctcctcctctgcctcccgggtgggaagaaaaagtggacaatttaggccgaacttactatgtcaaccacaacaaccggaccactcagtggcacagaccaagcctgatggacgtgtcctcggagtcggacaataacatcagacagatcaaccaggaggcagcacaccggcgcttccgctcccgcaggcacatcagcgaagacttggagcccgagccctcggagggcggggatgtccccgagccttgggagaccatttcagaggaagtgaatatcgctggagactctctcggtctggctctgcccccaccaccggcctccccaggatctcggaccagccctcaggagctgtcagaggaactaagcagaaggcttcagatcactccagactccaatggggaacagttcagctctttgattcaaagagaaccctcctcaaggttgaggtcatgcagtgtcaccgacgcagttgcagaacagggccatctaccaccgccatcagtggcctatgtacataccacgccgggtctgccttcaggctgggaagaaagaaaagatgctaaggggcgcacatactatgtcaatcataacaatcgaaccacaacttggactcgacctatcatgcagcttgcagaagatggtgcgtccggatcagccacaaacagtaacaaccatctaatcgagcctcagatccrccggcctcgtagcctcagctcgccaacagtaactttatctgccccgctggagggtgccaaggactcacccgtacgtcgggctgtgaaagacaccctttccaacccacagtccccacagccatcaccttacaactcccccaaaccacaacacaaagtcacacagagcttcttgccacccggctgggaaatgaggatagcgccaaacggccggcccttcttcattgatcataacacaaagactacaacctgggaagatccacgtttgaaatttccagtacatatgcggtcaaagacatctttaaaccccaatgaccttggcccccttcctcctggctgggaagaaagaattcacttggatggccgaacgttttatattgatcataatagcaaaattactcagtgggaagacccaagactgcagaacccagctattactggtccggctgtcccttactccagagaatttaagcagaaatatgactacttcaggaagaaattaaagaaacctgctgatatccccaataggtttgaaatgaaacttcacagaaataacatatttgaagagtcctatcggagaattatgtccgtgaaaagaccagatgtcctaaaagctagactgtggattgagtttgaatcagagaaaggtcttgactatgggggtgtggccagagaatggttcttcttactgtccaaagagatgttcaacccctactacggcctctttgagtactctgccacggacaactacacccttcagatcaaccctaattcaggcctctgtaatgaggatcatttgtcctacttcacttttattggaagagttgctggtctggccgtatttcatgggaagctcttagatgrtttcttcattagaccattttacaagatgatgttgggaaagcagataaccctgaatgacatggaatctgtggatagtgaatattacaactctttgaaatggatcctggagaatgaccctactgagctggacctcatgttctgcatagacgaagaaaactttggacagacatatcaagtggatttgaagcccaatgggtcagaaataatggtcacaaatgaaaacaaaagggaatatatcgacttagtcatccagtggagatttgtgaacagggtccagaagcagatgaacgccttcttggagggattcacagaactacttcctattgatttgattaaaatttttgatgaaaatgagctggagttgctcatgtgcggcctcggtgatgtggatgtgaatgactggagacagcattctatttacaagaacggctactgcccaaaccaccccgtcattcagtggttctggaaggctgtgctactcatggacgccgaaaagcgtatccggttactgcagtttgtcacagggacatcgcgagtacctatgaatggatttgccgaactttatggttccaatggtcctcagctgtttacaatagagcaatggggcagtcctgagaaactgcccagagctcacacatgctttaatcgccttgacttacctccatatgaaacctttgaagatttacgagagaaacttctcatggccgtggaaaatgctcaaggatttgaaggggtggattaagcaccctgtgcctcgggggtggttgttcttcaagcaagttctgcttgcacttttgcatttcctttcccaccacaaattatcaactggttgatgtgtacactaattacatttcaggaggacttaatgctatttatgttgtgcctctgcaggcaaagcccttaataaatattttacatcctttctaatgacaatgaatggaattaatcactcaacaggtatagtattacgactcatgtttactttttaaaatgatttagaccgattttcagattttatttcgttatgattaaagatgtctcatgtacttggaaaagtgagcatttttttttttttttttttttgtacaaatttagctaatagctacaggctgagagaattgtaacatagcatgacaaattttgtgttgacttgaaaggaatcacaccattggactcccatttctcatccgagaaattacttaacccttcctggcgctgtacagtcatcttttattctatttcctctttgctgtttgtagtagagacattt

SEQ ID NO: 4705 - DNA, 976 bp, Homo sapiens
agggaggccgactagcgcaggcggacgggagagaatgggggaggggtgggatgggagcaggggcagagacgggcagagggcagagggcggagcggcgccggagcgggcgtcatggcgcggctcctctggttgctccggggcctgaccctcggaactgcgcctcggcgggcggtgcggggccaagcgggcggcggcgggcccggcaccgggccgggactgggggaggcagggtctcttgcaacgtgtgrgctkcctcttgccaagagtgagtggcaaaagaaactaaccccggagcagttctacgtcacaagagaaaagggaacggaaccgcctttcagtgggatctacctgaataacaaggaagcaggaatgtatcattgcgtgtgctgcgacagtccactcttcagttctgagaaaaagtactgctctggcactgggtggccttcgttttcygaggctcatggtacgtctggctctgatgaaagccacacagggatcctgagacgtctggatacctcgttaggatcagctcgcacagaggttgtctgcaagcagtgtgaagctcatctaggtcacgtgtttcctgatggacctgggcccaatggtcagaggttttgcatcaacagtgtggctttgaagttcaaaccaaggaaacactgaccatcttcaagagtcccrttcccttgccaccccttcacgtgcaccctcaatttccacaattcacttgaatgacttgttttatttgcaataaaactgggctgaatttgctgctgtctccagcgagtcattgcttctcttaatttatttacctggaatcaacttaatcctgtgtgttaggctgttcttgtgttgctataaagaagtacctgatcaggatctgggagaatttgaaaaaaaaagaaaaactagaaaaataaacaaaattaaaaagaaaaaaaaatacctgagactgagtaacttataaagaaaagaggtt

SEQ ID NO: 4706 - DNA, 1065 bp, Homo sapiens
agggaggccgactagcgcaggcggacgggagagaatgggggaggggtgggatgggagcaggggcagagacgggcagagggcagagggcggagcggcgccggagcgggcgtcatggcgcggctcctctggttgctccggggcctgaccctcggaactgcgcctcggcgggcggtgcggggccaagcgggcggcggcgggcccggcaccgggccgggactgggggaggcagggtctcttgcaacgtgtgrgctkcctcttgccaagagtgagtggcaaaagaaactaaccccggagcagttctacgtcacaagagaaaagggaacggaaccgcctttcagtgggatctacctgaataacaaggaagcaggaatgtatcattgcgtgtgctgcgacagtccactcttcagatccttgttggatatccagaaagaagtctttagcatcaaaggatcaagaagtccttccacttcgagaggcaatggcttcgatagtgaagttctgagaaaaagtactgctctggcactgggtggccttcgttttcygaggctcatggtacgtctggctctgatgaaagccacacagggatcctgagacgtctggatacctcgttaggatcagctcgcacagaggttgtctgcaagcagtgtgaagctcatctaggtcacgtgtttcctgatggacctgggcccaatggtcagaggttttgcatcaacagtgtggctttgaagttcaaaccaaggaaacactgaccatcttcaagagtcccrttcccttgccaccccttcacgtgcaccctcaatttccacaattcacttgaatgacttgttttatttgcaataaaactgggctgaatttgctgctgtctccagcgagtcattgcttctcttaatttatttacctggaatcaacttaatcctgtgtgttaggctgttcttgtgttgctataaagaagtacctgatcaggatctgggagaatttgaaaaaaaaagaaaaactagaaaaataaacaaaattaaaaagaaaaaaaaatacctgagactgagtaacttataaagaaaagaggtt

SEQ ID NO: 4707 - DNA, 849 bp, Homo sapiens
ctctggttgctccggggcctgaccctcggaactgcgcctcggcgggcggtgcggggccaagcgggcggcggcgggcccggcaccgggccgggactgggggagggtctcttgcaacgtgtgrgctkcctcttgccaagagtgagtggcaaaagaaactaaccccggagcagttctacgtcacaagagaaaagggaacggaaccgcctttcagtgggatctacctgaataacaaggaagcaggaatgtatcattgcgtgtgctgcgacagtccactcttcagttctgagaaaaagtactgctctggcactgggtggccttcgttttcygaggctcatggtacgtctggctctgatgaaagccacacagggatcctgagacgtctggatacctcgttaggatcagctcgcacagaggttgtctgcaagcagtgtgaagctcatctaggtcacgtgtttcctgatggacctgggcccaatggtcagaggttttgcatcaacagtgtggctttgaagttcaaaccaaggaaacactgaccatcttcaagagtcccrttcccttgccaccccttcacgtgcaccctcaatttccacaattcacttgaatgacttgttttatttgcaataaaactgggctgaatttgctgctgtctccagcgagtcattgcttctcttaatttatttacctggaatcaacttaatcctgtgtgttaggctgttcttgtgttgctataaagaagtacctgatcaggatctgggagaatttgaaaaaaaaagaaaaactagaaaaataaacaaaattaaaaagaaaaaaaaatacctgagactgagtaacttataaagaaaagaggtt

SEQ ID NO: 4708 - DNA, 902 bp, Homo sapiens
agggaggccgactagcgcaggcggacgggagagaatgggggaggggtgggatgggagcaggggcagagacgggcagagggcagagggcggagcggcgccggagcgggcgtcatggcgcggctcctctggttgctccggggcctgaccctcggaactgcgcctcggcgggcggtgcggggccaagcgggcggcggcgggcccggcaccgggccgggactgggggaggcagggtctcttgcaacgtgtgrgctkcctcttgccaagagtgagtggcaaaagaaactaaccccggagcagttctacgtcacaagagaaaagggaacggaaccgcctttcagtgggatctacctgaataacaaggaagcaggaatgtatcattgcgtgtgctgcgacagtccactcttcagtgtgaagctcatctaggtcacgtgtttcctgatggacctgggcccaatggtcagaggttttgcatcaacagtgtggctttgaagttcaaaccaaggaaacactgaccatcttcaagagtcccrttcccttgccaccccttcacgtgcaccctcaatttccacaattcacttgaatgacttgttttatttgcaataaaactgggctgaatttgctgctgtctccagcgagtcattgcttctcttaatttatttacctggaatcaacttaatcctgtgtgttaggctgttcttgtgttgctataaagaagtacctgatcaggatctgggagaatttgaaaaaaaaagaaaaactagaaaaataaacaaaattaaaaagaaaaaaaaatacctgagactgagtaacttataaagaaaagaggtttaattgactcacagttctgcagggtgtacagaaagcatggtgccagcatttgctcggattctggggagacctga

SEQ ID NO: 4709 - DNA, 3837 bp, Homo sapiens
agccgcgggctgagcgcggatccgcggcgggcgcaggatacgggccggggcgcgagccgagcgcagtctgccgggccgagcgggcggagcgagccgagtggggctgagcgcgccggcggcggcgggcggagcggagcgcggcgcgccggggccgccgccggggggatgcggctgcctccccgggccggggtgtagagagggcgggtccccggcctcgggagcacggcggtggaggggacataggaggcggccatggcgacccccggcaacctagggtcctcygtcctggcgagcaagaccaagaccaagaagaagcacttcgtagcgcagaaagtgaagctgtttcgggccagcgacccgctgctcagcgtcctcatgtggggggtaaaccactcgatcaatgaactgagccatgttcaaatccctgttatgttgatgccagatgacttcaaagcctattcaaaaataaaggtggacaatcacctttttaacaaagaaaacatgccgagccatttcaagtttaaggaatactgcccgatggtcttccgtaacctgcgggagaggtttggaattgatgatcaagatttccagaattccctgaccaggagcgcacccctccccaacgactcccaggcccgcagtggagctcgttttcacacttcctacgacaaaagatacatcatcaagactattaccagtgaagacgtggccgaaatgcacaacatcctgaagaaataccaccagtacatagtggaatgtcatgggatcacccttcttccccagttcttgggcatgtaccggcttaatgttgatggagttgaaatatatgtgatagttacaagaaatgtrttcagccaccgtttgtctgtgtataggaaatacgacttaaagggctctacagtggctagagaagctagtgacaaagaaaaggccaaagaactgccaactctgaaagataatgatttcattaatgagggccaaaagatttatattgatgacaacarcaagaaggtcttcctggaaaaactaaaaaaggatgttgagtttctggcccagctgaagctcatggactacagtctgctggtgggaattcatgatgtggagagagccgaacaggaggaagtggagtgtgaggagaacgatggggaggaggagggcgagagygatggcacccacccrgtgggaacccccccagatagccccgggaatacactgaacagctcaccacccmtggctcccggggagttcgatccgaacatcgacgtctatggaattaagtgccatgaaaactcgcctaggaaggaggtgtacttcatggcaattattgacatccttactcattatgatgcaaaaaagaaagctgcccatgctgcaaaaactgttaaacatggcgctggcgcggagatctccaccgtgaacccagaacagtattcaaagcgctttttggactttattggccacatcttgacgtaacctcctgcgcagcctcggacagacatgaacattggakggacagaggtggcttcggtgtaggaaaaatgaaaaccaaactcagtgaagtactcatcttgcaggaagcaaacctccttgtttacatcttcaggccaagatgactgatttgggggctactcgctttacagctacctgattttcccagcatcgttctagctatttctgactttgtgtatatgtgtgtgtgtgtgtgttgggggggggtgagtgtgtgcgcgcgtgtgcattttaaaagtcataaattaattaaaacagatccacttcggtcagtatgtgtcccaacaaagaccctttgattccagctatggccgaatgaatgagtgagtgagtgagtgagtgaatgaacacacgtgtgggggaggggagaaggaagtgcatgatgtcaggcaccgtgttggcatcacacaacaaactgtggatcagttttttttttttttttttttttttttggagttgaaagatgtgagacagtattcagaataatgaagataataatratgattattataataatgatgatgattccaaggaaaaaacctacagcgaatgttccatttctaccccgcacgcagacactctccctaacactgataacctgagmccccagcactggacggaagaatgctggcgtctccgtgtgtactggttcagggttctggccccagccttgtcaggaccccctggtgtccagagcccccacccctcccgcaacaagcagctgatgccccagtgattctctmtacatttttcacctcggccaatatgtccaggaaaactgcttacttctcttttcttgcctggagcyttcattgttcacccttacgttgcaatataggaattaatgctacaaaataaaagtaaagcttacctgaaaagtgcatagtttggggcaatggtatctacatctcccactgtgggaaaaccagcaaagcatcaaaactctcaattctcctgttaccraatgcagatctgaattataagatgtttatgtttgaccattgtttcaacaatgggattttgttacgaattatccctttaactgaaaccctcagttttactgtttacattattaggaaaacagggatatcttttgaatctaaaaatttgatgtacagcatgtgatttttgaagtttacatgtaaagtcacagtataggtgaaataacgtttgtcatattttgagacgtatcctgcagccatgtttttacgtgagtgttttagtcaaagtacatggtagacagtctttcacaataaaaggaaaaggattttttttcctccaaatgtacatttatcaacctaatgattgatttttttaaaaagagatttcgccccagtctggtttatgaaagttcattgccctaaactgtgctgattgtttttaatcaagttataaatttccaacctagatcatgtatctaccaactctcctgcattttccaaaaggcattgagcttaaatattagtcttgcttagagtaggttatccacttacatgctgcgctaaagccatgcctttgaaactccttgtttaaaacatgatatgatttttgtgggcagtttcagaaaagaaaacaaacaaacaaaaatcgaccctttaattattacttgcaactcaacagatctccctgccgtactgccttttccaggaactttacttcagggctgtccagattgcagttgtgccccgtgtatgtggatctagttcacagagtctttggaagccagcagtcgtgccctccgtatactgtccactcattttatgtagatttggtatcctcagcagccagtgttaacaccactgtcacgtagtgtacagattcatcttttatgtatttaaagtaatccatactatgatttggtttttccctgcaccattaattctggcatcagatcagtttttgtgttgtgaagttctactgtggtttgacccaagaccacaaccatgagaccctgaagtaaagataaggtacacatacattatttgagtaaytgtttccttgggggccaatctgtgtatgcttttagaagtttacagaatgcttttatttttgtctataacaaacagtctgtcatttatttctgttgataaaccatttggacagagtgaggacgtttgccctgttatctcctagtgctaacaatacactccagtcatgagccgggctttacaaataaagcacttttgatgactcacaagatgaatccttttttcctctgtcccaattgtgtgtctctgttccaaacacattttaaatactcggtcctgacastgtctttagctaatccttgaagaaatraaagtggaattgaatctttttagtttctag

SEQ ID NO: 4710 - DNA, 3773 bp, Homo sapiens
agccgcgggctgagcgcggatccgcggcgggcgcaggatacgggccggggcgcgagccgagcgcagtctgccgggccgagcgggcggagcgagccgagtggggctgagcgcgccggcggcggcgggcggagcggagcgcggcgcgccggggccgccgccggggggatgcggctgcctccccgggccggggtgtagagagggcgggtccccggcctcgggagcacggcggtggaggggacataggaggcggccatggcgacccccggcaacctagggtcctcygtcctggcgagcaagaccaagaccaagaagaagcacttcgtagcgcagaaagtgaagctgtttcgggccagcgacccgctgctcagcgtcctcatgtggggggtaaaccactcgatcaatgaactgagccatgttcaaatccctgttatgttgatgccagatgacttcaaagcctattcaaaaataaaggtggacaatcacctttttaacaaagaaaacatgccgagccatttcaagtttaaggaatactgcccgatggtcttccgtaacctgcgggagaggtttggaattgatgatcaagatttccagaattccctgaccaggagcgcacccctccccaacgactcccaggcccgcagtggagctcgttttcacacttcctacgacaaaagatacatcatcaagactattaccagtgaagacgtggccgaaatgcacaacatcctgaagaaataccaccagtacatagtggaatgtcatgggatcacccttcttccccagttcttgggcatgtaccggcttaatgttgatggagttgaaatatatgtgatagttacaagaaatgtrttcagccaccgtttgtctgtgtataggaaatacgacttaaagggctctacagtggctagagaagctagtgacaaagaaaaggccaaagaactgccaactctgaaagataatgatttcattaatgagggccaaaagatttatattgatgacaacarcaagaaggtcttcctggaaaaactaaaaaaggatgttgagtttctggcccagctgaagctcatggactacagtctgctggtgggaattcatgatgtggagagagccgaacaggaggaagtggagtgtgaggagaacgatggggaggaggagggcgagagygatggcacccacccrgtgggaacccccccagatagccccgggaatacactgaacagctcaccacccmtggctcccggggagttcgatccgaacatcgacgtctatggaattaagtgccatgaaaactcgcctaggaaggaggtgtacttcatggcaattattgacatccttactcattatgatgcaaaaaagaaagctgcccatgctgcaaaaactgttaaacatggcgctggcgcggagatctccaccgtgaacccagaacagtattcaaagcgctttttggactttattggccacatcttgacgtaacctcctgcgcagcctcggacagacatgaacattggakggacagaggtggcttcggtgtaggaaaaatgaaaaccaaactcagtgaagtactcatcttgcaggaagcaaacctccttgtttacatcttcaggccaagatgactgatttgggggctactcgctttacagctacctgattttcccagcatcgttctagctatttctgactttgtgtatatgtgtgtgtgtgtgtgttgggggggggtgagtgtgtgcgcgcgtgtgcattttaaaagtcataaattaattaaaacagatccacttcggtcagtatgtgtcccaacaaagaccctttgattccagctatggccgaatgaatgagtgagtgagtgagtgagtgaatgaacacacgtgtgggggaggggagaaggaagtgcatgatgtcaggcaccgtgttggcatcacacaacaaactgtggatcagttttttttttttttttttttttttttggagttgaaagatgtgagacagtattcagaataatgaagataataatratgattattataataatgatgatgattccaaggaaaaaacctacagcgaatgttccatttctaccccgcacgcagacactctccctaacactgataacctgagmccccagcactggacggaagaatgctggcgtctccgtgtgtactggttcagggttctggccccagccttgtcaggaccccctggtgtccagagcccccacccctcccgcaacaagcagctgatgccccagtgattctctmtacatttttcacctcggccaatatgtccaggaaaactgcttacttctcttttcttgcctggagcyttcattgttcacccttacgttgcaatataggaattaatgctacaaaataaaagtaaagcttacctgaaaagtgcatagtctcctgttaccraatgcagatctgaattataagatgtttatgtttgaccattgtttcaacaatgggattttgttacgaattatccctttaactgaaaccctcagttttactgtttacattattaggaaaacagggatatcttttgaatctaaaaatttgatgtacagcatgtgatttttgaagtttacatgtaaagtcacagtataggtgaaataacgtttgtcatattttgagacgtatcctgcagccatgtttttacgtgagtgttttagtcaaagtacatggtagacagtctttcacaataaaaggaaaaggattttttttcctccaaatgtacatttatcaacctaatgattgatttttttaaaaagagatttcgccccagtctggtttatgaaagttcattgccctaaactgtgctgattgtttttaatcaagttataaatttccaacctagatcatgtatctaccaactctcctgcattttccaaaaggcattgagcttaaatattagtcttgcttagagtaggttatccacttacatgctgcgctaaagccatgcctttgaaactccttgtttaaaacatgatatgatttttgtgggcagtttcagaaaagaaaacaaacaaacaaaaatcgaccctttaattattacttgcaactcaacagatctccctgccgtactgccttttccaggaactttacttcagggctgtccagattgcagttgtgccccgtgtatgtggatctagttcacagagtctttggaagccagcagtcgtgccctccgtatactgtccactcattttatgtagatttggtatcctcagcagccagtgttaacaccactgtcacgtagtgtacagattcatcttttatgtatttaaagtaatccatactatgatttggtttttccctgcaccattaattctggcatcagatcagtttttgtgttgtgaagttctactgtggtttgacccaagaccacaaccatgagaccctgaagtaaagataaggtacacatacattatttgagtaaytgtttccttgggggccaatctgtgtatgcttttagaagtttacagaatgcttttatttttgtctataacaaacagtctgtcatttatttctgttgataaaccatttggacagagtgaggacgtttgccctgttatctcctagtgctaacaatacactccagtcatgagccgggctttacaaataaagcacttttgatgactcacaagatgaatccttttttcctctgtcccaattgtgtgtctctgttccaaacacattttaaatactcggtcctgacastgtctttagctaatccttgaagaaatraaagtggaattgaatctttttagtttctag

SEQ ID NO: 4711 - DNA, 1864 bp, Homo sapiens
atgcggctgtgttgctaaggaacgaggatctgagagcgggctgtttggttttccatttagaggcgaggtcccgggagaaggctgctccccgcggtggtgtggttgggccgtggagacgagctgctgatgatggaccgtacgccgacctactcggctggaactggggcgctggctccctgctgaacgcaccagagggcagctccgctggctttgcgtaccctttgccagacgatgccctcggcacagccgccaggccgtcttcctggggagccgccggagcgcgggcaactgggagagggggcggtgcccagttcccggcccggccctccccgcggaggtggccacgtcagcgcagcgtcgctcggagctcgcggccggatggggaaggcggcggcggcggtggcctttggggccgaagtgggcgtgcggctcgcgctgttcgcggccttcctggtgacggagctgctccccccgttccagagactcatccagccggaggagatgtggctctaccggaacccctacgtggaggcggagtatttccccaccaagccgatgtttgttattgcatttctctctccactgtctctgatcttcctggccaaatttctcaagaaggcagacacaagagacagcagacaagcctgcctggctgccagccttgccctggctctgaatggcgtctttaccaacacaataaaactgatcgtagggaggccacgcccagatttcttctaccgctgcttccctgatgggctagcccattctgacttgatgtgtacaggggataaggacgtggtgaatgagggccgaaagagcttccccagtggacattcttcctctgtgattgcactgtcccrcacatgtgactacaagcatcactggcaaggtctgggttctgtactaagtacatttaaaattataggaaagataagacaaaaagagtttaccaaagataaacatcctaatttttccattatttgaagcattgtaagttcaagttaaactgcatctacaggaaatttaaaacctcaaagttcaatttactctcttaaaaatcaggttcattgtcataggacttttgttcaaaaacataagtaaaattcaagaaaacataaaattataattaaaccaaacaaatttaagctgaatgctatagtaagtaaaatatccaaattacagaacacctggcttggcgcggtggctcacacctcagcactttgggaggctgaggcaggcggatcacctgtagtcaggaattcgagaccagcctggccaacatattgaaaccccgtctctactaaaaatacaaaaattgaggccaggtgcagtggctcatgcctgtaatcacagcactttgggaaggtgaggtaggtggatcacctgaggtcaggagttgaagaccagcctgaccaacagtgaaacgctatctctactaaaaatacaaaatcagctgggcatggtggcacacgcctttaatcccagctacttgggaggctgaggcaggagaatggtgctgggattacaggcgtgagtcaccgtgcccggcgagaagcaactcttaaaatactttattccttcctctaggaccctttaaatggtgaaaatgggcagatgaatagcaataagtggacctttgttactcttctgagttagaaaaattctaatttagtacactctgaacaaagcttattatacttacttaagatgtgttttgatttggtgttcagaaagcaacctgacaatgataatactgtaactatgataaaattgagaataaaaagatagagtatcctggagggccaggtcctctatgctatgtgtatgtaataggatttaggagcctaatattaagagaagacct

SEQ ID NO: 4712 - DNA, 795 bp, Homo sapiens
ccgggcccgggcggccccgcttcccagggtgacggagctgctccccccgttccagagactcatccagccggaggagatgtggctctaccggaacccctacgtggaggcggagtatttccccaccaagccgatgtttgttattgcatttctctctccactgtctctgatcttcctggccaaatttctcaagaaggcagacacaagagacagcagacaagcctgcctggctgccagccttgccctggctctgaatggcgtctttaccaacacaataaaactgatcgtagggaggccacgcccagatttcttctaccgctgcttccctgatgggctagcccattctgacttgatgtgtacaggggataaggacgtggtgaatgagggccgaaagagcttccccagtggacattcttcctttgcatttgctggtctggcctttgcgtccttctacctggcagggaagttacactgcttcacaccacaaggccgtgggaaatcttggaggttctgtgcctttctgtcacctctactttttgcagctgtgattgcactgtcccrcacatgtgactacaagcatcactggcaaggaccctttaaatggtgaaaatgggcagatgaatagcaataagtggacctttgttactcttctgagttagaaaaattctaatttagtacactctgaacaaagcttattatacttacttaagatgtgttttgatttggtgttcagaaagcaacctgacaatgataatactgtaactatgataaaattgagaataaaaagattttatttag

SEQ ID NO: 4713 - DNA, 2357 bp, Homo sapiens
atgcggctgtgttgctaaggaacgaggatctgagagcgggctgtttggttttccatttagaggcgaggtcccgggagaaggctgctccccgcggtggtgtggttgggccgtggagacgagctgctgatgatggaccgtacgccgacctactcggctggaactggggcgctggctccctgctgaacgcaccagagggcagctccgctggctttgcgtaccctttgccagacgatgccctcggcacagccgccaggccgtcttcctggggagccgccggagcgcgggcaactgggagagggggcggtgcccagttcccggcccggccctccccgcggaggtggccacgtcagcgcagcgtcgctcggagctcgcggccggatggggaaggcggcggcggcggtggcctttggggccgaagtgggcgtgcggctcgcgctgttcgcggccttcctggtgacggagctgctccccccgttccagagactcatccagccggaggagatgtggctctaccggaacccctacgtggaggcggagtatttccccaccaagccgatgtttgttattgcatttctctctccactgtctctgatcttcctggccaaatttctcaagaaggcagacacaagagacagcagacaagcctgcctggctgccagccttgccctggctctgaatggcgtctttaccaacacaataaaactgatcgtagggaggccacgcccagatttcttctaccgctgcttccctgatgggctagcccattctgacttgatgtgtacaggggataaggacgtggtgaatgagggccgaaagagcttccccagtggacattcttcctctgtgattgcactgtcccrcacatgtgactacaagcatcactggcaagatgtactagttggatccatgattggaatgacatttgcctatgtctgctatcggcagtattatcctcctctgactgatgcagaatgccataaaccatttcaagacaaacttgtactttccactgcacagaagcctggggattcttattgttttgatatttaaaaattgaatctggccgggcgtggtggctcatgcctgtaatcccaacactttgggaggctgaggagggtggatcacctgaggtcaggaccagcctggccaacatggtgaaccctgtctctactaaaaatacaaaaattagccaggagttgtgtgccgtaatcccagctacctgggaggctgaggtaggagaattgcttgaacctgggagctggaggttccagtgagccgagatcgcaccactgcactccagcctaggcaacagagtgagaccccatctcaaaaaaaaaaaaaattgaatctatctcaatagagaacaggtgaactagccctcctaaccggaccatgcacaagacaagaaattctagcctttttttccccttccaaggtgcaagtgaggacataagccacactgtattctgcctccaaatgattacacacttttgcccctgctcatctatcttgaggagttacggttcttttccactactgtatgccacatgttctagtaaaaggatctttcaaaggtgtccaacaccttatgaatctggtctatcagattaatatctgaagatctacagtgtttttacatttaatttaaatgccattcttagaaggatcttgtcacaaagaagcctttacatagccccaccttgtctcagaagctagagttcattatcaaaacttaatttccatttcatatagctcaaaatcttaaaatctagggcatggccaactaaattactttgattctgtttaccttctctgatgacaattccatcaagccttaaataggaaaatgtcgaatctagggtaatttatcacttttgtgtgcatcttatctgagtccagccatctggtactgctgtgcattttgaacaccgtgggcataaacaatttgttgaattactaagtgaaaacaataataaagaagaaaatggtcaggagtgtggtttcagcactactaacagatgactgtttctacctcatttgaccataactgtacttgtgagcttctttccttccattcatgactgaagatctgctcaaatgcaccaacactgccaagtgactaaggtagaaaagaaaaatgacaggtatcgtcatctgaaggacagatgaatctttttctgccccttcttcacaatggaatataaggaacaattatgggatgtcatcagaatggatgccataggacctacagctccctttctcttkattgtgattatactttaaatatgacrttgtcttttatgtgtatgttcctatattttcaatgtatctttttccttcagtaaacctgatattca

SEQ ID NO: 4714 - DNA, 3112 bp, Homo sapiens
gggttttagtcaggcagtgctccaggcgcctggctgccaggctacgggagaaaagtcctccgctcggccgcacccgttagaggcgctctccactgctgtcctcttcagctcaakatggtggcctgccgggcgattggcatcctcagccgcttttctgccttcaggatcctccgctcccgaggttatatatgccgcaattttacagggtcttctgctttgctgaccagaacccatattaactatggagtcaaaggggatgtggcagttgttcgaattaactctcccaattcaaaggtaaatacactgagtaaagagctacattcagagttctcagaagttatgaatgaaatctgggctagtgatcaaatcagaagtgccgtccttatctcatcaaagccaggctgctttattgcaggtgctgatatcaacatgttagccgcttgcaagacccttcaagaagtaacacagctatcacaagaagcacagagaatagttgagaaacttgaaaagtccacaaagcctattgtggctgccatcaatggatcctgcctgggaggaggacttgaggttgccatttcatgccaatacagaatagcaacaaaagacagaaaaacagtattaggtacccctgaagttttgctgggggccttaccaggagcaggaggcacacaaaggctgcccaaaatggtgagttgtgcctgctgctttggacatgatgctgactggtagaagcattcgtgcagacagggcaaagaaaatgggactggttgaccaactggtggaacccctgggaccaggactaaaacctccagaggaacggacaatagaatacctagaagaagttgcaattacttttgccaaaggactagctgataagaagatctctccaaagagagacaagggattggtggaaaaattgacagcgtatgccatgactattccatttgtcaggcaacaggtttacaaaaaagtggaagaaaaagtgygaaagcagactaaaggcctttatcctgcacctctgaaaataawtgatgtggtaaagactggaattgagcaagggagtgatgccggttatctctgtgaatctcagaaatttggagagcttgtaatgaccaaagaatcaaaggccttgatgggacyctaccatggtcaggtcctgtgcaagaagaataaatttggagctccamagaaggatgttaagcatctggctattcttggtgcagggctgatgggagcaggcatcgccyaagtctccgtggataaggggctaaagactatacttaaagatgccaccctcactgcgctagaccgaggacagcaacaagtgttcaaaggattgaatgacaaagtgaagaagaaagctctaacatcatttgaaagggattccatcttcagcaacttgactgggcagcttgattaccaaggttttgaaaaggccgacatggtgattgaagctgtgtttgaggaccttagtcttaagcacagagtgctaaaggaagtagaagcggtgattccagatcactgtatctttgccagtaacacatctgctctcccaatcagtgaaatcgctgctgtcagcaaaagacctgagaaggtgattggcatgcactacttctctcccgtggacaagatgcagctgctgsagattatcacgaccgagaaaacttccaaagacaccagtgcttcagctgtagcagttggtctcaagcaggggaaggtcatcattgtggttaaggatggacctggcttctatactaccaggtgtcttgcgcccatgatgtctgaagtcatccgaatcctccaggaaggagttgacccgaagaagctggattccctgaccacaagctttggctttcctgtgggtgccgccacactggtggatgaagttggtgtggatgtagcgaaacatgtggcggaagatctgggcaaagtctttggggagcggtttggaggtggaracccagaactgctgacacagatggtgtccaagggcttcctaggtcgtaaatctgggaagggcttttacatctatcaggagggtgtgaagaggaaggatttgaattctgacatggatagtattttagcgagtctgaagctgcctcctaagtctgaagtctcatcagacgaagacatccagttccgcctggtgacaagatttgtgaatgaggcagtcatgtgcctgcaagaggggatcttggccacacctgcagagggagacatcggagccgtctttgggcttggcttcccgccttgtctgggaggttggtctcgcaggttgggaaggaagctcactttagcctggagcccgtgttgcgtctccttcaacgaagtcctctttctctattcagggcctttccgctttgtggatctgtatggcgcccagaagatagtggaccggctcaagaaatatgaagctgcctatggaaaacagttcaccccatgccagctgctagctgaccatgctaacagccctaacaagaagttctaccagygagcaggcctcatgcctcgctcagtcagtgcactaaccccagctgccggcagtgctggttctccaacagagtggtgtctagatttatcagagtaackagaagacaaactccggcactgggtttgctccctgattaaagtgccttcagccaagaccatctctccctcctggtgaagtgtgacttcgaattagtttgcacttcctrttggaaggtagagcccmmtgctcattgtataagccccgaggcctagagtggcagccaagagccatctgaagccacctctytgcctgttcctcccaaragrccagggtggccaggggtggtgagggcagttytgcmcccagccaaacacataacaataaaaaccaaactctgtgtcagcatctttgcccttctggtttaaacgcctccttcaaaaagcaatctggaagaaagccctgtgctttgggggagtaagaatgtgtgtgcagaattctaggcagcaccttagggagggactgggatgagagaaagtgggacctggtgggctcaaccacacacacctgtctgtgcagatgctttgcccaggcttctcaccacggtgtaccgggatattaaacctctttccccagcctggattt

SEQ ID NO: 4715 - DNA, 3024 bp, Homo sapiens
gggttttagtcaggcagtgctccaggcgcctggctgccaggctacgggagaaaagtcctccgctcggccgcacccgttagaggcgctctccactgctgtcctcttcagctcaakatggtggcctgccgggcgattggcatcctcagccgcttttctgccttcaggatcctccgctcccgaggttatatatgccgcaattttacagggtcttctgctttgctgaccagaacccatattaactatggagtcaaaggggatgtggcagttgttcgaattaactctcccaattcaaaggtaaatacactgagtaaagagctacattcagagttctcagaagttatgaatgaaatctgggctagtgatcaaatcagaagtgccgtccttatctcatcaaagccaggctgctttattgcaggtgctgatatcaacatgttagccgcttgcaagacccttcaagaagtaacacagctatcacaagaagcacagagaatagttgagaaacttgaaaagtccacaaagcctattgtggctgccatcaatggatcctgcctgggaggaggacttgaggttgccatttcatgccaatacagaatagcaacaaaagacagaaaaacagtattaggtacccctgaagttttgctgggggccttaccaggagcaggaggcacacaaaggctgcccaaaatggtgggtgtgcctgctgctttggacatgatgctgactggtagaagcattcgtgcagacagggcaaagaaaatgggactggttgaccaactggtggaacccctgggaccaggactaaaacctccagaggaacggacaatagaatacctagaagaagttgcaattacttttgccaaaggactagctgataagaagatctctccaaagagagacaagggattggtggaaaaattgacagcgtatgccatgactattccatttgtcaggcaacaggtttacaaaaaagtggaagaaaaagtgygaaagcagactaaaggcctttatcctgcacctctgaaaataawtgatgtggtaaagactggaattgagcaagggagtgatgccggttatctctgtgaatctcagaaatttggagagcttgtaatgaccaaagaatcaaaggccttgatgggacyctaccatggtcaggtcctgtgcaagaagaataaatttggagctccamagaaggatgttaagcatctggctattcttggtgcagggctgatgggagcaggcatcgccyaagtctccgtggataaggggctaaagactatacttaaagatgccaccctcactgcgctagaccgaggacagcaacaagtgttcaaaggattgaatgacaaagtgaagaagaaagctctaacatcatttgaaagggattccatcttcagcaacttgactgggcagcttgattaccaaggttttgaaaaggccgacatggtgattgaagctgtgtttgaggaccttagtcttaagcacagagtgctaaaggaagtagaagcggtgattccagatcactgtatctttgccagtaacacatctgctctcccaatcagtgaaatcgctgctgtcagcaaaagacctgagaaggtgattggcatgcactacttctctcccgtggacaagatgcagctgctgsagattatcacgaccgagaaaacttccaaagacaccagtgcttcagctgtagcagttggtctcaagcaggggaaggtcatcattgtggttaaggatggacctggcttctatactaccaggtgtcttgcgcccatgatgtctgaagtcatccgaatcctccaggaaggagttgacccgaagaagctggattccctgaccacaagctttggctttcctgtgggtgccgccacactggtggatgaagttggtgtggatgtagcgaaacatgtggcggaagatctgggcaaagtctttggggagcggtttggaggtggaracccagaactgctgacacagatggtgtccaagggcttcctaggtcgtaaatctgggaagggcttttacatctatcaggagggtgtgaagaggaaggatttgaattctgacatggatagtattttagcgagtctgaagctgcctcctaagtctgaagtctcatcagacgaagacatccagttccgcctggtgacaagatttgtgaatgaggcagtcatgtgcctgcaagaggggatcttggccacacctgcagagggagacatcggagccgtctttgggcttggcttcccgccttgtctgggagggcctttccgctttgtggatctgtatggcgcccagaagatagtggaccggctcaagaaatatgaagctgcctatggaaaacagttcaccccatgccagctgctagctgaccatgctaacagccctaacaagaagttctaccagygagcaggcctcatgcctcgctcagtcagtgcactaaccccagctgccggcagtgctggttctccaacagagtggtgtctagatttatcagagtaackagaagacaaactccggcactgggtttgctccctgattaaagtgccttcagccaagaccatctctccctcctggtgaagtgtgacttcgaattagtttgcacttcctrttggaaggtagagcccmmtgctcattgtataagccccgaggcctagagtggcagccaagagccatctgaagccacctctytgcctgttcctcccaaragrccagggtggccaggggtggtgagggcagttytgcmcccagccaaacacataacaataaaaaccaaactctgtgtcagcatctttgcccttctggtttaaacgcctccttcaaaaagcaatctggaagaaagccctgtgctttgggggagtaagaatgtgtgtgcagaattctaggcagcaccttagggagggactgggatgagagaaagtgggacctggtgggctcaaccacacacacctgtctgtgcagatgctttgcccaggcttctcaccacggtgtaccgggatattaaacctctttccccagcctggattt

SEQ ID NO: 4716 - DNA, 2519 bp, Homo sapiens
ccgggctggggcaggcggcagcgaaagggagacgcggctccggggccaccccagtmccggcaggagttctgcccggaggtctgggatgccctcggccaggcctcacctcgggagcggaggatcctgaaggcagaaaagcggctgaggatgccaatcgcccggcaggccaccatmttgagctgaagaggacagcagtggagagcgcctctaacgggtgcggccgagcggaggacttttctcccgtagcctggcagccaggcgcctggagcactgcctgactaaaacccagatgccgagtggccgccggccccttagccctgcccctcgctcctggctaacatggccgaaaggtcgtattctccgggggaggacggrggcccggagaggagggggtggagtgccyggttttccagtcaggcggccggagggcagccctcaagaacggccctgaccgcccgcggggtgaggggccctttctgggcaggacccgccccttggtcccgcagagccttggtacttggacctgaaccttgctccgagagggagtcctcgcggacgtcagccaagattccagaatgactactatcttgacttacccctttaaaaatcttcccactgcatcaaaatgggccctcagattttccataagacctctgagctgttcctcccagctacgagctgccccagctgtccagaccaaaacgaagaagacgttagccaaacccaatataaggaatgttgtggtggtggatggtgttcgcactccatttttgctgtctggcacttcatataaagacctgatgccacatgatttggctagagcagcgcttacgggtttgttgcatcggaccagtgtccctaaggaagtagttgattatatcatctttggtacagttattcaggaagtgaaaacaagcaatgtggctagagaggctgcccttggagctggcttctctgacaagactcctgctcacactgtcaccatggcttgtatctctgccaaccaagccatgaccacaggtgttggcttgattgcttctggccagtgtgatgtgatcgtggcaggtggtgttgagttgatgtccratgtccctattcgtcactcaaggaaaatgagaaaactgatgcttgatctcaataaggccaaatctatgggccagcgactgtctttaatctctaaattccgatttaatttcctagcacctgagctccctgcggtttctgagttctccaccagtgagaccatgggccactctgcagaccgactggccgctgcctttgctgtttctcggctggaacaggatgaatatgcactgcrctctcacagtctagccaagaaggcacaggatgaaggactyctttctgatgtggtacccttcaaagtaccaggaaaagatacagtyaccaaagataatggcatccgtccttcctcactggagcagatggccaaactaaaacctgcattcatcaagccctacggcacagtgacagctgcaaattcttctttcttgactgatggtgcatctgcaatgttaatcatggcggaggaaaaggctctggccatgggttataagccgaagtcatttttgaggggattttatgtatgtgtctcaggatccaaaagatcaactattacttggaccaacatatgctactccaaaagttctagaaaaggcaggattgaccatgaatgatattgatgcttttgaatttcatgaagctttctcgggtcagattttggcaaattttaaagccatggattctgattggtttgcagaaaactacatgggtagaaaaaccaaggttggattgcctcctttggagaagtttaataactggggtggatctctgtccctgggacacccatttggagccactggctgcaggttggtcatggctgctgccaacarattacggaaagaaggaggccagtatggcttagtggctgcgtgtgcagctggagggcagggccatgctatgatagtggaagcttatccaaaataatagatccagaagaagtgacctgaagtttctgtgcaacactcacactaggcaatgccatttcaatgcattactaaatgacatttgtagttcctwgctcctcttaggaaaacagttcttgtggccttctattaaatastttgcacttaagccttgccagtgttctgagcttttcaataatcagtttactgctctttcrgggatttctaagccaccagaatctcacatgagatgtgtgggtggttgtttttggtctctgttgtcactaaagactaaatgagggtttgcagttgggaaagaggtcaactgagatttggaaatcatctttgtaatatttgcaaattatacttgttcttatctgtgtcctaaagatgtgttctctataaaatacaaaccaacgtgcctaattaattatggaaaaataattcagaatctaaacmccmctgaaaacttataaaaaatgtttagatacataaatatggtggtcagcgttaataaagtggagaaatattggagaa

SEQ ID NO: 4717 - DNA, 2354 bp, Homo sapiens
ccgggctggggcaggcggcagcgaaagggagacgcggctccggggccaccccagtmccggcaggagttctgcccggaggtctgggatgccctcggccaggcctcacctcgggagcggaggatcctgaaggcagaaaagcggctgaggatgccaatcgcccggcaggccaccatmttgagctgaagaggacagcagtggagagcgcctctaacgggtgcggccgagcggaggacttttctcccgtagcctggcagccaggcgcctggagcactgcctgactaaaacccagatgccgagtggccgccggccccttagccctgcccctcgctcctggctaacatggccgaaaggtcgtattctccgggggaggacggrggcccggagaggagggggtggagtgccyggttttccagtcaggcggccggagggcagccctcaagaacggccctgaccgcccgcggggtgaggggccctttctgggcaggacccgccccttggtcccgcagagccttggtacttggacctgaaccttgctccgagagggagtcctcgcggacgtcagccaagattccagaatgactactatcttgacttacccctttaaaaatcttcccactgcatcaaaatgggccctcagattttccataagacctctgagctgttcctcccagctacgagctgccccagctgtccagaccaaaacgaagaagacgttagccaaacccaatataaggaatgttgtggtggtggatggtgttcgcactccatttttgctgtctggcacttcatataaagacctgatgccacatgatttggctagagcagcgcttacgggtttgttgcatcggaccagtgtccctaaggaagtagttgattatatcatctttggtacagttattcaggaagtgaaaacaagcaatgtggctagagaggctgcccttggagctggcttctctgacaagactcctgctcacactgtcaccatggcttgtatctctgccaaccaagccatgaccacaggtgttggcttgattgcttctggccagtgtgatgtgatcgtggcaggtggtgttgagttgatgtccratgtccctattcgtcactcaaggaaaatgagaaaactgatgcttgatctcaataaggccaaatctatgggccagcgactgtctttaatctctaaattccgatttaatttcctagcacctgagctccctgcggtttctgagttctccaccagtgagaccatgggccactctgcagaccgactggccgctgcctttgctgtttctcggctggaacaggatgaatatgcactgcrctctcacagtctagccaagaaggcacaggatgaaggactyctttctgatgtggtacccttcaaagtaccaggaaaagatacagtyaccaaagataatggcatccgtccttcctcactggagcagatggccaaactaaaacctgcattcatcaagccctacggcacagtgacagctgcaaattcttctttcttgactgatggtgcatctgcaatgttaatcatggcggaggaaaaggctctggccatgggttataagccgaagtcatttttgaggggattttatgtatgtgtctcaggatccaaaagatcaactattacttggaccaacatatgctactccaaaagttctagaaaaggcaggattgaccatgaatgatattgatgcttttgaatttcatgaagctttctcgggtcagattttggcaaattttaaagccatggattctgattggtttgcagaaaactacatgggtagaaaaaccaagggccatgctatgatagtggaagcttatccaaaataatagatccagaagaagtgacctgaagtttctgtgcaacactcacactaggcaatgccatttcaatgcattactaaatgacatttgtagttcctwgctcctcttaggaaaacagttcttgtggccttctattaaatastttgcacttaagccttgccagtgttctgagcttttcaataatcagtttactgctctttcrgggatttctaagccaccagaatctcacatgagatgtgtgggtggttgtttttggtctctgttgtcactaaagactaaatgagggtttgcagttgggaaagaggtcaactgagatttggaaatcatctttgtaatatttgcaaattatacttgttcttatctgtgtcctaaagatgtgttctctataaaatacaaaccaacgtgcctaattaattatggaaaaataattcagaatctaaacmccmctgaaaacttataaaaaatgtttagatacataaatatggtggtcagcgttaataaagtggagaaatattggagaa

SEQ ID NO: 4718 - DNA, 1645 bp, Homo sapiens
gagcgaaggatgaagtagcaagtgyacgtctttcttgggagcaggatgttgcgcaagtttacacttctgaccccatcacactgcttcccactgagatgcaagagaggattcctcatcttccagatgtgcaggctgaaatatttatggatgaaattgtcagatgcctagcatttgctccatgataatctgagacctgccccgaatacagtacaggagcatcttcaaagtacttccagtgggtgccctggacagcagctaagaacccyggggtaaaacgagtttcctctctactgttacaaatcagaaacctcctccgtaaaagcctcagatctgggaaacgcggatgcatatgccaacttttgagtctcagkctgcgcctgcgcacgtgacctctacacgtctcctctgcgcctgcgccgctcaagttagcgcgaggctactcagtcgagggtgggactacgcttcgcgttttgggattgggcgctgaaggccaaaccggacgacgcggaaatracgtcacgccgggggccctgccgcgcggtggctgctgggtgccgcacgccttcccatcctyctcctctcccctcccccatcyctccccgccccctcggccgctccgctccctggcgtgactcggcactgagagtcccgggagaagactcggcggtcgccacctcttctgtccaggcctcggccttcctgagyatctctccttcctctcccagatcgtcttctccttcagtttcaaagccagtggcgtcgcggccaccctgccgggctctctgtgaggatggtgggggtgaagcccgtcgggagcgacccggatttccagccagagctgagcggcgcgggctccagactcgccgtggtcaagttcaccatgagagggtgtgggccatgtttgaggattgccccagcrttcagttctatgagtaataaatatccacaggctgttttcttggaagtcgatgtacatcagtgtcagggaacagctgccaccaacaatatatcagcaacacctacatttttgttttttcgaaacaaagtgagaattgatcaatatcaaggagcagatgctgtgggattagaagaaaaaatcaagcagcacttagaaaatgaccctggaagcaatgaggacacagatattccaaaaggctatatggatttaatgccttttattaacaaagctggttgtgaatgtcttaatgaaagtgatgagcatggatttgacaactgtttacgaaaagacacaaccttcttggaatctgactgtgatgaacagctgcttattactgtggcattcaatcaacctgttaagctttattccatgaaatttcaagggccagataatggtcagggccctaaatatgtaaaaatttttatcaacctrccccgatctatggattttgaagaggcagaaagaagtgaaccaactcaagctctggaactgacagaggatgatattaaagaagatggcattgttccacttcgttatgttaagtttcagaatgttaacagtgtaactatatttgttcagtcgaatcaaggtgaagaggaaacaacaagaatttcatattttacttttattggtactccagtccaggcaacaaatatgaatgacttcaaacgagtaagtttgcttaaa

SEQ ID NO: 4719 - DNA, 2175 bp, Homo sapiens
gagcgaaggatgaagtagcaagtgyacgtctttcttgggagcaggatgttgcgcaagtttacacttctgaccccatcacactgcttcccactgagatgcaagagaggattcctcatcttccagatgtgcaggctgaaatatttatggatgaaattgtcagatgcctagcatttgctccatgataatctgagacctgccccgaatacagtacaggagcatcttcaaagtacttccagtgggtgccctggacagcagctaagaacccyggggtaaaacgagtttcctctctactgttacaaatcagaaacctcctccgtaaaagcctcagatctgggaaacgcggatgcatatgccaacttttgagtctcagkctgcgcctgcgcacgtgacctctacacgtctcctctgcgcctgcgccgctcaagttagcgcgaggctactcagtcgagggtgggactacgcttcgcgttttgggattgggcgctgaaggccaaaccggacgacgcggaaatracgtcacgccgggggccctgccgcgcggtggctgctgggtgccgcacgccttcccatcctyctcctctcccctcccccatcyctccccgccccctcggccgctccgctccctggcgtgactcggcactgagagtcccgggagaagactcggcggtcgccacctcttctgtccaggcctcggccttcctgagyatctctccttcctctcccagatcgtcttctccttcagtttcaaagccagtggcgtcgcggccaccctgccgggctctctgtgaggatggtgggggtgaagcccgtcgggagcgacccggatttccagccagagctgagcggcgcgggctccagactcgccgtggtcaagttcaccatgagagggtgtgggccatgtttgaggattgccccagcrttcagttctatgagtaataaatatccacaggctgttttcttggaagtcgatgtacatcagtgtcagggaacagctgccaccaacaatatatcagcaacacctacatttttgttttttcgaaacaaagtgagaattgatcaatatcaaggagcagatgctgtgggattagaagaaaaaatcaagcagcacttagaaaatgaccctggaagcaatgaggacacagatattccaaaaggctatatggatttaatgccttttattaacaaagctggttgtgaatgtcttaatgaaagtgatgagcatggatttgacaactgtttacgaaaagacacaaccttcttggaatctgactgtgatgaacagctgcttattactgtggcattcaatcaacctgttaagctttattccatgaaatttcaagggccagataatggtcagggccctaaatatgtaaaaatttttatcaacctrccccgatctatggattttgaagaggcagaaagaagtgaaccaactcaagctctggaactgacagaggatgatattaaagaagatggcattgttccacttcgttatgttaagtttcagaatgttaacagtgtaactatatttgttcagtcgaatcaaggtgaagaggaaacaacaagaatttcatattttacttttattggtactccagtccaggcaacaaatatgaatgacttcaaacgagtagttggcaaaaaaggagaaagccactaaggtacaaaagacactggacaaccatattgcaatcagatctacagctcctggataattgcttgattctcgccagagactgtcaatgtttcattcattgccattaccaataaatcattgcttttgttcagatggtatcactagtgtttccattgtaatcttgacacatgcawttgtaaataaaagtcaccacttttgccaagcttaatttttgtcwttctaaatcagtattttctctttccatgtatttgaaaactggttaacttctgattttagtagagacttaagtgtctggtagtatattgattgaaagccagtttctttagaaaaggagaaactgttctagggaattaagaagtacatgtgtacacattcatggcaagttattttgataagtgaacctggaacagctaaccatgttaaattattactgcatttttattaaaggacatttgtatatctgagctatggaaattactcaaattataaattagaagaaataaacaggtttaatgaga

SEQ ID NO: 4720 - DNA, 1984 bp, Homo sapiens
acctgccccgaatacagtacaggagcatcttcaaagtacttccagtgggtgccctggacagcagctaagaacccyggggtaaaacgagtttcctctctactgttacaaatcagaaacctcctccgtaaaagcctcagatctgggaaacgcggatgcatatgccaacttttgagtctcagkctgcgcctgcgcacgtgacctctacacgtctcctctgcgcctgcgccgctcaagttagcgcgaggctactcagtcgagggtgggactacgcttcgcgttttgggattgggcgctgaaggccaaaccggacgacgcggaaatracgtcacgccgggggccctgccgcgcggtggctgctgggtgccgcacgccttcccatcctyctcctctcccctcccccatcyctccccgccccctcggccgctccgctccctggcgtgactcggcactgagagtcccgggagaagactcggcggtcgccacctcttctgtccaggcctcggccttcctgagyatctctccttcctctcccagatcgtcttctccttcagtttcaaagccagtggcgtcgcggccaccctgccgggctctctgtgaggatggtgggggtgaagcccgtcgggagcgacccggatttccagccagagctgagcggcgcgggctccagactcgccgtggtcaagttcaccatgagagggtgtgggccatgtttgaggattgccccagcrttcagttctatgagtaataaatatccacaggctgttttcttggaagtcgatgtacatcagtgtcagggaacagctgccaccaacaatatatcagcaacacctacatttttgttttttcgaaacaaagtgagaattgatcaatatcaaggagcagatgctgtgggattagaagaaaaaatcaagcagcacttagaaaatgaccctggaagcaatgaggacacagatattccaaaaggctatatggatttaatgccttttattaacaaagctggttgtgaatgtcttaatgaaagtgatgagcatggatttgacaactgtttacgaaaagacacaaccttcttggaatctgactgtgatgaacagctgcttattactgtggcattcaatcaacctgttaagctttattccatgaaatttcaagggccagataatggtcagggccctaaatatgtaaaaatttttatcaacctrccccgatctatggattttgaagaggcagaaagaagtgaaccaactcaagctctggaactgacagaggatgatattaaagaagatggcattgttccacttcgttatgttaagtttcagaatgttaacagtgtaactatatttgttcagtcgaatcaaggtgaagaggaaacaacaagaatttcatattttacttttattggtactccagtccaggcaacaaatatgaatgacttcaaacgagtagttggcaaaaaaggagaaagccactaaggtacaaaagacactggacaaccatattgcaatcagatctacagctcctggataattgcttgattctcgccagagactgtcaatgtttcattcattgccattaccaataaatcattgcttttgttcagatggtatcactagtgtttccattgtaatcttgacacatgcawttgtaaataaaagtcaccacttttgccaagcttaatttttgtcwttctaaatcagtattttctctttccatgtatttgaaaactggttaacttctgattttagtagagacttaagtgtctggtagtatattgattgaaagccagtttctttagaaaaggagaaactgttctagggaattaagaagtacatgtgtacacattcatggcaagttattttgataagtgaacctggaacagctaaccatgttaaattattactgcatttttattaaaggacatttgtatatctgagctatggaaattactcaaattataaattagaagaaataaacaggtttaatgaga

SEQ ID NO: 4721 - DNA, 1925 bp, Homo sapiens
gagcgaaggatgaagtagcaagtgyacgtctttcttgggagcaggatgttgcgcaagtttacacttctgaccccatcacactgcttcccactgagatgcaagagaggattcctcatcttccagatgtgcaggctgaaatatttatggatgaaattgtcagatgcctagcatttgctccatgataatctgagacctgccccgaatacagtacaggagcatcttcaaagtacttccagtgggtgccctggacagcagctaagaacccyggggtaaaacgagtttcctctctactgttacaaatcagaaacctcctccgtaaaagcctcagatctgggaaacgcggatgcatatgccaacttttgagtctcagkctgcgcctgcgcacgtgacctctacacgtctcctctgcgcctgcgccgctcaagttagcgcgaggctactcagtcgagggtgggactacgcttcgcgttttgggattgggcgctgaaggccaaaccggacgacgcggaaatracgtcacgccgggggccctgccgcgcggtggctgctgggtgccgcacgccttcccatcctyctcctctcccctcccccatcyctccccgccccctcggccgctccgctccctggcgtgactcggcactgagagtcccgggagaagactcggcggtcgccacctcttctgtccaggcctcggccttcctgagyatctctccttcctctcccagatcgtcttctccttcagtttcaaagccagtggcgtcgcggccaccctgccgggctctctgtgaggatggtgggggtgaagcccgtcgggagcgacccggatttccagccagagctgagcggcgcgggctccagactcgccgtggtcaagttcaccatgagagggtgtgggccatgtttgaggattgccccagcrttcagttctatgagtaataaatatccacaggctgttttcttggaagtcgatgtacatcagtgtcagggaacagctgccaccaacaatatatcagcaacacctacatttttgttttttcgaaacaaagtgagaattgatcaatatcaaggagcagatgctgtgggattagaagaaaaaatcaagcagcacttagaaaatgaccctggaagcaatgaggacacagatattccaaaaggctatatggatttaatgccttttattaacaaagctggttgtgaatgtcttaatgaaagtgatgagcatggatttgacaactgtttacgaaaagacacaaccttcttggaatctgactgtgatgaacagctgcttattactgtggcattcaatcaacctgttaagctttattccatgaaatttcaagggccagataatggtcagggccctaaatatgtaaaaatttttatcaacctrccccgatctatggattttgaagaggcagaaagaagtgaaccaactcaagctctggaactgacagaggatgatattaaagaagatggcattgttccacttcgttatgttaagtttcagaatgttaacagtgtaactatatttgttcagtcgaatcaaggtgaagaggaaacaacaagaatttcatattttacttttattggtactccagtccaggcaacaaatatgaatgacttcaaacgacacctgtctgctctcacccttcccatgttctcgccattgttggtgcaagatttctacagcttctatcatctggatcagccttgttacctagaaaatacacattggcaagttgagagttatcaacctgtgaaacagtagttggcaaaaaaggagaaagccactaaggtacaaaagacactggacaaccatattgcaatcagatctacagctcctggataattgcttgattctcgccagagactgtcaatgtttcattcattgccattaccaataaatcattgcttttgttcagatg

SEQ ID NO: 4722 - DNA, 805 bp, Homo sapiens
ctccgggctctgggtcgcaggccgggcgctttctgcgtccagcagcccctttccgcccaggctttttgaaaaggaaggtgcacacctgatccaccgcctttcctggagaaagctgctctgccattttagagtccygagctccgaaacagccgtggctgcctgggttgcacttggcccctgcacgtcactccacgttgcgcgctccgccgggagtcgaagcaaaagacactgacggaagaggactgcgagagcscgagcgcccgtctctcttgtgccctagcagakkccgtcgcttcttccggagccgtacgtggcaccgccccgctcgcgggcggccgcggggcttgctgggaagagaggcgaagccaggtcaccyttcaaggacccagaagtagggttttggcctaggtaacggggcagagatgtgrttcgagattctccccggactctccgtcatgggcgtgtgcttgttgattccaggactggctactgcgtacatccacaggttcactaacsggggcaaggaaaaaagggttgctcattttgggtatcactggagtctgatggaaagagataggcgcatctctggagttgatcgttactatgtgtcaaagggtttggagaacattgattaaggaagcattttcctgattgatgaaaaaaataactcagttatggccatctacccctgctagaaggttacagtgtattatgtagcatgcaatgtgttatgtagtgcttaataaaaataaaatgaaaaaaatgcatttcttttttttaaatatgttacacaaaatcaagcaat

SEQ ID NO: 4723 - DNA, 1876 bp, Homo sapiens
ctgagtcccgcaggccctgcgtccccgctgcacacccccgtccactcccgtggtccccggtccggcatggcgcgcgcggtggggcccgagcggaggctgctggccgtctacaccggcggcaccattggcatgcggagtgagctcggcgtgcttgtgcccgggacgggcctggctgccatcctgaggacactgcccatgttccatgacgaggagcaygcccgagcccgcggcctctctgaggacaccctggtgctacccccggmcagccgcaaccagaggatyctctacaccgtgctggagtgccagcccctcttcgactccagtgacatgaccatcgctgagtgggttygcsttgcccagaccatcaagaggcactacgagcagtaccayggctttgtggtcatccacggcaccgacaccatggcctttgctgcctcgatgctgtccttcatgctggagaacctgcagaagactgtcatcctcactggggcccaggtgcccatccatgccctgtggagcgacggccgtgagaacctkctgggggcactgctcatggctggccagtatgtgatcccagaggtctgccttttcttccagaatcagctgtttcggggcaaccgggcaaccaaggtagacgctcggaggttcgcagctttctgctccccgaacctgctgcctctggccacagtgggtgctgacatcacaatcaacagggagctggtgcggaaggtggacgggaaggctgggctggtggtgcacagcagcatggagcaggacgtgggcctgctgcgcctctaccctgggatccctgccgccctggttcgggccttcttgcagcctcccctgaagggcgtggtcatggagaccttcggttcagggaacggacccaccaagcccgacctgctgcaggagctgcgggtggccaccgagcgcggcctggtcatcgtcaactgtacccactgcctccagggggctgtgaccacagactatgmagctggcatggccatggcgggagccggcgtcatctcaggcttcgacatgacatcggaggccgccctggccaagctatcgtatgtgctgggccagccagggctgagsctggatgtcaggaaggagctgctgaccaaggaccttcggggggagatgacgccaccctcggtggaagagcgccggccctcactgcagggcaacacgctgggcggtggggtctcctggctcctcagtctgagcggcagccaggaggcagatgccctgcggaatgccctggtgcccagcctggcctgtgctgctgcccacgccggtgacgtggaggcgctgcaggcgcttgtggagctgggcagtgacctgggcctggtggactttaacggccaaaccccactgcacgcggccgcccggggaggccacacagaggcagtcaccatgctgctgcagagaggtgtggacgtgaacacccgggacacggatggcttcagcccgctgctgctggccgtgcggggcaggcatccgggtgtcattgggttgctscgggaagccggggcctccctgtccacccaggagctggaggaagcagggacggagctgtgcaggctggcatacagggccgacctcgaaggcctgcaggtgtggtggcaggcaggggctgacctggggcagccgggctatgacgggcacagcgccctgcacgtcgcagaggcagccgggaacctggcagtggtggcctttctacagagcctggagggtgcggttggtgcccaggccccatgcccagaagtgctgcctggtgtctaacctgaaggcgtcctgctgcagtataagccattccttcctcccatgacctgctggaggggtctcaggcatgaccccactgctggggctg

SEQ ID NO: 4724 - DNA, 2002 bp, Homo sapiens
gctaagctgaggggggaaagtgggcttaggaccgcctgcccagggcaaccctgaaycaagctttagccgccgaggcctcgtgtcccaaaggccagtcatccctcctctgtgttgccatgggtattcaaggcctggccaaactaattgctgatgtggcccccagtgccacccgggagaatgacatcaagagctactttggccgtaaggtggccattgatgcctctatgagcacttatcagttcctgattgctgttcgccagggtggggatstgctgcagaacgaggagggtgagaccaccagccacctgataggcatgttctaccgcactattcgcgtgatggagaacggcatcaagcccatgtatgtctttgagggcacgccaccacagcacaagtcaggcgagctggccaaatgcagtgaactgcrgggctgaggcagagaagcagctacagcaggctcaggctgctggggccgagcaggtggtggaaaaattcactaagtggctggtgaaggtcactaagcagcacaacgataagtgcaaacatctgctgagcctcatgggcatcccttaccttgatgcacccatcgaggcagaggccagctgtgctgccctggtgaaggctggcaaagtctatcctgtggctaccgaggacatggactgcttcaccttcrgcagccctgtgctaatgcaacacctgactgccagtgaagccaaaaagctgccaatccaggaattccacctgagctggattctgcaggagctagaaccaggaacagtttgtggatctgtgcatcctgctaggcagtgactactgtaagagtatctggagtattgggcccaagcgggctgtggatctaatccagaagcacaagagcatcgaggagatcgtgcagcgacttgaccccaacaagtaccctttgycagaaaatcggctccacaaggaggcttaccagctcttcttggaacctgaggtgctgggcccagagtctgtggagctgaagtggagcgagccaaatgaagaagagctggtcaagttcgtgtgtggtgaaaagcagttctctgaggagcgaatccacagtggggtcaagaggctgagtaagagtcattaaggcagcacccagggccgcctggatgatttcttcaaggtgactggctcactctcttcagctaagtgcaaggagccagaatcaaagggatccactaagaagaaggcaaagactggggcagcaaggaagtttaaaaggggaaaataaatgtgtttccccattatacctccttgacaccagaatatttgccctcttgtacccttaagagctacagctagagaaaccttcacaggggtggagagagcattctaaggtttttctagcgtgacccttttcagtagtgctagtcccttttttacttgatcttaatggcaagaaggccacagaggtacttttccttttttagctcaggaaaatatgtcaggctcaaaccacttctcaggcagtttagtkratggacartaagtccattgttacatgaaagtgatagatagcaacaagttttggagaagagagagggagataaaagggggakacaaaagatgtacaraaatgatttcctggctggccaactggtggccagtgggaggtgatggtggacctagactgcttttctgtcttgttcagccttgacccaccttgagagasagccaycaggaaggcgcatcttagcagatgggaggaactgctgagagaagatrggcagaragctggagcccctggagttgrctgtgtctatgtctgtgactgattgctggctgtgtcttgggtgggcagamactcgaacttgctatgtaatttgtgtctagttattcagaggagtaagacggtgatgttcatctggcaatcagctgagttgagactttgggataagacactggttttcatgtgctgtttttgttttaaagttataaagaaaaaagtcaataaaattataaaagtaaaaaaaaagaa

SEQ ID NO: 4725 - DNA, 5543 bp, Homo sapiens
gagcagccgcgggagccgggaccgggtagccgcgcgctgggggtgggcgccgctcgctccgccccgcgaagcccctgcgcgctcagggacgcggcccccccgcggcagccgcgctaggctccggcgtgtggccgcggccgccgccgccgctgccatgtctccggggaagcccggggcgggcggagcggggacgaggcggaccggctggcggaggaggaggcgaaggagacggcaggaggcggcgacgacggtgcccgggctcgggcgcacggcggggcccgattcgcgcgtccggggcacgttccagggcgcgcggggcatgaagccggcggcgcgggaggcgcggctgcctccgcgctcgcccgggctgcgctgggcgctgccgctgctgctgctgctgctgcgcctgggccaggtaagcgccgggtggcccctagtccaattcctgacccttcagtagcaactgttgccacaggggaaaatggcataacgcagatcagcagtacagcagaatcctttcataaacagaatggaactggaacacctcaggtggaaacaaacaccagtgaggatggtgaaagctctggagccaacgatagtttaagaacacctgaacaaggatctaatgggactgatggggcatctcaaaaaactcccagtagcactgggcccagtcctgtgtttgacattaaagctgtttccatcagtccaaccaatgtgatcttaacttggaaaagtaatgacacagctgcttctgagtacaagtatgtagtaaagcataagatggaaaatgagaagacaattactgttgtgcatcaaccatggtgtaacatcacaggcttacgtccagcgacttcatatgtattctccatcactccaggaataggcartgagacttggggagatcccagagtcataaaagtcatcacagarccgatcccagtttctgatctccgtgttgccctcacgggtgtgaggaaggctgctctctcctggagcaatggcaatggcacygcctcctgccgggttcttcttgaaagcattggaagccatgaggagttgactcaagactcaagacttcaggtcaatatctcgggcctgaagccaggggttcaatacaacatcaacccgtatcttctacmatcaaataagacaaagggagaccccttgggcacagaaggtggcttggatrccagcaatacagagagaagccgggcagggagccccaccgcccctgtgcatgatgagtccctcgtgggacctgtggacccatcctccggccagcagtcccragacacggaagtcctgcttgtcgggttagagcctggcacccgatacaatgccaccgtttattcccaagcagcgaatggcacagaaggacagccccaggccatagagttcaggacaaatgctattcaggtttttgacrtcaccgctgtgaacatcagtgccacaagcctgaccctgatctggaaagtcagcgataacgagtcgtcatctaactatacctacaagatacatgtggcgggggagacagattcttccaatctcaacgtcagtgagcctcrcgctgtcatccccggactccgctccagcaccttctacaacatcacagtgtgtcctgtcctaggtgacatcgagggcacgccgggcttcctccaagtgcrcaccccccctgttccagtttctgacttccgagtgacagtggtcagcacgacggagatcggcttrgcatggagcagccatgatgcagaatcatttcagatgcatatcacacaggagggagctggcaattctcgggtagaaataaccaccaaccaaagtattatcattggtggcttgttccctggaaccaagtattgctttgaaatagttccaaaaggaccaaatgggactgaaggggcatctcggacagtttgcaatagaactgttcccagtgcagtgtttgacatccacgtggtctacgtcaccaccacggagatgtggctggactggaagagccctgacggtgcttccgagtatgtctaccatttagtcatagagtccaagcatggctctaaccacacaagcacgtatgacaaagcgattactctccagggcctgattccgggcaccttatataacatcaccatctctccagaagtggaccacgtctggggggaccccaactccactgcacagtacacacggcccagcaatgtgtccaacattgatgtaagtaccaacaccacagcagcaactttaagttggcagaactttgatgacgcctctcccacgtactcctactgccttcttattgagaaggctggaaattccagcaacgcaacacaagtagtcacggacattggaattactgacgctacagtcactgaattaatacctggctcatcatacacagtggagatctttgcacaagtaggggatgggatcaagtcactggaacctggccggaagtcattctgtacagatcctgcgtccatggcctccttcgactgcgaagtggtccccaaagagccagccctggttctcaaatggacctgccctcctggcgccaatgcaggctttgagctggaggtcagcagtggagcctggaacaatgcgacccacctggagagctgctcctctgagartggcactgagtatagaacggaagtcacgtatttgaatttttctacctcgtacaacatcagcatcaccactgtgtcctgtggaaagatggcagcccccacccggaacacctgcactactggcatcacagatccccctcctccagatggatcccctaatattacatctgtcagtcacaattcagtaaaggtcaagttcagtggatttgaagccagccacggacccatcaaagcctatgctgtcattctcaccaccggggaagctggtcacccttctgcagatgtcctgaaatacacgtatgasgatttcaaaaagggagcctcagatacttatgtgacatacctcataagaacagaagaaaagggacgttctcagagcttgtctgaagttttgaaatatgaaattgacgttgggaatgagtcaaccacacttggttattacaatgggaagctggaacctctgggctcctaccgggcttgtgtggctggcttcaccaacattaccttccaccctcaaaacaaggggctcattgatggggytgagagctatgtgtccttcagtcgytactcagatgctgtttccttgccccaggatccaggtgtcatctgtggagcggtttttggctgtatctttggtgccctggttattgtgactgtgggaggcttcatcttctggagaaagaagaggaaagatgcaaagaataatgaagtgtccttttctcaaattaaatctaagttaatcagagtggagaattttgaggcctacttcaagaagcagcaagctgactccaactgtgggttcgcagaggaatacgaagatctgaagcttgttggaattagtcaacctaaatatgcagcagaactggctgagaatagaggaaagaatcgctataataatgttctgccctatgatatttcccgtgtcaaactttcggtccagacccattcaacggatgactacatcaatgccaactacatgcctggctaccactccaagaaagattttattgccacacaaggacctttaccgaacactttgaaagatttttggcgtatggtttgggagaaaaatgtatatgccatcattatgttgactaaatgtgttgaacagggaagaaccaaatgtgaggagtattggccctccaagcaggctcaggactatggagacataactgtggcaatgacatcagaaattgttcttccggaatggaccatcagagatttcacagtgaaaaatatccagacaagtgagagtcaccctctgagacagttccatttcacctcctggccagaccacggtgttcccgacaccactgacctgctcatcaacttccggtacctcgttcgtgactacatgaagcagagtcctcccgaatcgccgaytctggtgcattgcagtgctggggtcggaaggacgggcactttcattgccattgatcgtctcatctaccagatagagaatgagaacaccgtggatgtgtatgggattgtgtatgaccttcgaatgcataggcctttaatggtgcagacagaggaccagtatgttttcctcaatcagtgtgttttggatattgtcagatcccagaaagactcaaaagtagatcttatctaccagaacacaactgcaatgacaatctatgaaaaccttgcrcccgtgaccacatttggaaagaccaatggttacatmgcctaattccaaaggaataacctttctggagtgaaccagaccgtcgcacccacagcgaaggcacatgccccgatgtcgacatgtttttatatgtctaatatcttaattctttgttctgttttgtgagaactaattttgagggcatgaagctgcatatgatagatgacaaattggggctgtcgggggctgtggatgggtggggagcaaatcatctgcattcctgatgaccaatgggatgaggtcactttttttttttttcccccttgaggattgyggaaaaccaggaaaagggakctatgatttttttttccaaaacaatttcttttttaaaaaagactattttatatgattcacatgctaaagccaggattgtgttgggttgaatatattttaagtatcagaggtctatttttacctactgtgtcttggaatctagccgatggaaaatacctaattgtggatgatgattgcgcagggaggggtacgtggcacctcttccgaatgggttttctatttgaacatgtgccttttctgaattatgcttccacaggcaaaactcagtagagatctatatttttgtactgaatctcataattggaatatacggaatatttaaacagtagcttagcatcagaggtttgcttcctcagtaacatttctgttctcatttgatcaggggaggcctctttgccccgrccccgcttcccctgccccctgtasatttgtgctccattttttcttcccttttccctcccagttttctccaaagactcttctgttggcaacattttcaacccattggttgggtgagaatggcgactcaaatatcaccttgagaatttctgtgggtgggaatgggagaagcagaggaatcctacagtggcagaaatccttttcttgtccctgtattatcctttttctcatgtctgtatttggtatgaaggattatttaaaggtgcaatatgtgaattagtgattcatgatgttctaggtttttagtaacgttttactcaggttggcattttatgtgtctgtgtctgtatgtgtgtgtgtatgttcagaagcgtggcaatctgtgaacacttcagcgtgaattcagtgtcagattaatccctccttccccaaagtccactggctttcgtctctctctgccgtgacacatatcggaatctactgtatatatatatatatatatatatatatatatatatatatatatatatrcacta

SEQ ID NO: 4726 - DNA, 5547 bp, Homo sapiens
gagcagccgcgggagccgggaccgggtagccgcgcgctgggggtgggcgccgctcgctccgccccgcgaagcccctgcgcgctcagggacgcggcccccccgcggcagccgcgctaggctccggcgtgtggccgcggccgccgccgccgctgccatgtctccggggaagcccggggcgggcggagcggggacgaggcggaccggctggcggaggaggaggcgaaggagacggcaggaggcggcgacgacggtgcccgggctcgggcgcacggcggggcccgattcgcgcgtccggggcacgttccagggcgcgcggggcatgaagccggcggcgcgggaggcgcggctgcctccgcgctcgcccgggctgcgctgggcgctgccgctgctgctgctgctgctgcgcctgggccaggtaagcgccgggtggcccctagtccaattcctgacccttcagtagcaactgttgccacaggggaaaatggcataacgcagatcagcagtacagcagaatcctttcataaacagaatggaactggaacacctcaggtggaaacaaacaccagtgaggatggtgaaagctctggagccaacgatagtttaagaacacctgaacaaggatctaatgggactgatggggcatctcaaaaaactcccagtagcactgggcccagtcctgtgtttgacattaaagctgtttccatcagtccaaccaatgtgatcttaacttggaaaagtaatgacacagctgcttctgagtacaagtatgtagtaaagcataagatggaaaatgagaagacaattactgttgtgcatcaaccatggtgtaacatcacaggcttacgtccagcgacttcatatgtattctccatcactccaggaataggcartgagacttggggagatcccagagtcataaaagtcatcacagarccgatcccagtttctgatctccgtgttgccctcacgggtgtgaggaaggctgctctctcctggagcaatggcaatggcacygcctcctgccgggttcttcttgaaagcattggaagccatgaggagttgactcaagactcaagacttcaggtcaatatctcgggcctgaagccaggggttcaatacaacatcaacccgtatcttctacmatcaaataagacaaagggagaccccttgggcacagaaggtggcttggatrccagcaatacagagagaagccgggcagggagccccaccgcccctgtgcatgatgagtccctcgtgggacctgtggacccatcctccggccagcagtcccragacacggaagtcctgcttgtcgggttagagcctggcacccgatacaatgccaccgtttattcccaagcagcgaatggcacagaaggacagccccaggccatagagttcaggacaaatgctattcaggtttttgacrtcaccgctgtgaacatcagtgccacaagcctgaccctgatctggaaagtcagcgataacgagtcgtcatctaactatacctacaagatacatgtggcgggggagacagattcttccaatctcaacgtcagtgagcctcrcgctgtcatccccggactccgctccagcaccttctacaacatcacagtgtgtcctgtcctaggtgacatcgagggcacgccgggcttcctccaagtgcrcaccccccctgttccagtttctgacttccgagtgacagtggtcagcacgacggagatcggcttrgcatggagcagccatgatgcagaatcatttcagatgcatatcacacaggagggagctggcaattctcgggtagaaataaccaccaaccaaagtattatcattggtggcttgttccctggaaccaagtattgctttgaaatagttccaaaaggaccaaatgggactgaaggggcatctcggacagtttgcaatagaactgttcccagtgcagtgtttgacatccacgtggtctacgtcaccaccacggagatgtggctggactggaagagccctgacggtgcttccgagtatgtctaccatttagtcatagagtccaagcatggctctaaccacacaagcacgtatgacaaagcgattactctccagggcctgattccgggcaccttatataacatcaccatctctccagaagtggaccacgtctggggggaccccaactccactgcacagtacacacggcccagcaatgtgtccaacattgatgtaagtaccaacaccacagcagcaactttaagttggcagaactttgatgacgcctctcccacgtactcctactgccttcttattgagaaggctggaaattccagcaacgcaacacaagtagtcacggacattggaattactgacgctacagtcactgaattaatacctggctcatcatacacagtggagatctttgcacaagtaggggatgggatcaagtcactggaacctggccggaagtcattctgtacagatcctgcgtccatggcctccttcgactgcgaagtggtccccaaagagccagccctggttctcaaatggacctgccctcctggcgccaatgcaggctttgagctggaggtcagcagtggagcctggaacaatgcgacccacctggagagctgctcctctgagartggcactgagtatagaacggaagtcacgtatttgaatttttctacctcgtacaacatcagcatcaccactgtgtcctgtggaaagatggcagcccccacccggaacacctgcactactggcatcacagatccccctcctccagatggatcccctaatattacatctgtcagtcacaattcagtaaaggtcaagttcagtggatttgaagccagccacggacccatcaaagcctatgctgtcattctcaccaccggggaagctggtcacccttctgcagatgtcctgaaatacacgtatgasgatttcaaaaagggagcctcagatacttatgtgacatacctcataagaacagaagaaaagggacgttctcagagcttgtctgaagttttgaaatatgaaattgacgttgggaatgagtcaaccacacttggttattacaatgggaagctggaacctctgggctcctaccgggcttgtgtggctggcttcaccaacattaccttccaccctcaaaacaaggggctcattgatggggytgagagctatgtgtccttcagtcgytactcagatgctgtttccttgccccaggatccaggtgtcatctgtggagcggtttttggctgtatctttggtgccctggttattgtgactgtgggaggcttcatcttctggagaaagaagaggaaagatgcaaagaataatgaagtgtccttttctcaaattaagtaaatctaagttaatcagagtggagaattttgaggcctacttcaagaagcagcaagctgactccaactgtgggttcgcagaggaatacgaagatctgaagcttgttggaattagtcaacctaaatatgcagcagaactggctgagaatagaggaaagaatcgctataataatgttctgccctatgatatttcccgtgtcaaactttcggtccagacccattcaacggatgactacatcaatgccaactacatgcctggctaccactccaagaaagattttattgccacacaaggacctttaccgaacactttgaaagatttttggcgtatggtttgggagaaaaatgtatatgccatcattatgttgactaaatgtgttgaacagggaagaaccaaatgtgaggagtattggccctccaagcaggctcaggactatggagacataactgtggcaatgacatcagaaattgttcttccggaatggaccatcagagatttcacagtgaaaaatatccagacaagtgagagtcaccctctgagacagttccatttcacctcctggccagaccacggtgttcccgacaccactgacctgctcatcaacttccggtacctcgttcgtgactacatgaagcagagtcctcccgaatcgccgaytctggtgcattgcagtgctggggtcggaaggacgggcactttcattgccattgatcgtctcatctaccagatagagaatgagaacaccgtggatgtgtatgggattgtgtatgaccttcgaatgcataggcctttaatggtgcagacagaggaccagtatgttttcctcaatcagtgtgttttggatattgtcagatcccagaaagactcaaaagtagatcttatctaccagaacacaactgcaatgacaatctatgaaaaccttgcrcccgtgaccacatttggaaagaccaatggttacatmgcctaattccaaaggaataacctttctggagtgaaccagaccgtcgcacccacagcgaaggcacatgccccgatgtcgacatgtttttatatgtctaatatcttaattctttgttctgttttgtgagaactaattttgagggcatgaagctgcatatgatagatgacaaattggggctgtcgggggctgtggatgggtggggagcaaatcatctgcattcctgatgaccaatgggatgaggtcactttttttttttttcccccttgaggattgyggaaaaccaggaaaagggakctatgatttttttttccaaaacaatttcttttttaaaaaagactattttatatgattcacatgctaaagccaggattgtgttgggttgaatatattttaagtatcagaggtctatttttacctactgtgtcttggaatctagccgatggaaaatacctaattgtggatgatgattgcgcagggaggggtacgtggcacctcttccgaatgggttttctatttgaacatgtgccttttctgaattatgcttccacaggcaaaactcagtagagatctatatttttgtactgaatctcataattggaatatacggaatatttaaacagtagcttagcatcagaggtttgcttcctcagtaacatttctgttctcatttgatcaggggaggcctctttgccccgrccccgcttcccctgccccctgtasatttgtgctccattttttcttcccttttccctcccagttttctccaaagactcttctgttggcaacattttcaacccattggttgggtgagaatggcgactcaaatatcaccttgagaatttctgtgggtgggaatgggagaagcagaggaatcctacagtggcagaaatccttttcttgtccctgtattatcctttttctcatgtctgtatttggtatgaaggattatttaaaggtgcaatatgtgaattagtgattcatgatgttctaggtttttagtaacgttttactcaggttggcattttatgtgtctgtgtctgtatgtgtgtgtgtatgttcagaagcgtggcaatctgtgaacacttcagcgtgaattcagtgtcagattaatccctccttccccaaagtccactggctttcgtctctctctgccgtgacacatatcggaatctactgtatatatatatatatatatatatatatatatatatatatatatatatrcacta

SEQ ID NO: 4727 - DNA, 857 bp, Homo sapiens
atgcctgggtacattgcrtgctctggggaccagtatgttttcctcaatcagtgtgttttggatattgtcagatcccagaaagactcaaaagtagatcttatctaccagaacacaactgcaatgacaatctatgaaaaccttgcrcccgtgaccacatttggaaagaccaatgaaaagcagctggtatgggtttgggtgtcaatgaaagggccaaagactggtggccagctggtttgggggatttgggccattgatagcatctcccaggaacaacgactttttgcctccaaagttggatctagtgatgatcagcaccagcaggaaatgacatttggtgtctgcccactgcagccatactgtgacctccagccagacttccgcctaattgactccactggatttgtgctctgttgagtcagaggctcccgggggttggggatcgaggggcgggggtcagctatgcagcccatcacgtgtgtttttcatctgggatgaaaaagcctggttctcttttgaaatgcttgattgtacttattgagctaaacaagtcttggtgactgttgttgatttgcctcaaaagttttaagtcctgggttttcagactactgtgtagcagctgtgtgtttaacatactgtagctttttctcccttgggggcacatacaaataggatgtgttgatgtggactctaaactgtaattttcctgtaactattttggaatgatgcatatttctaatgtttgttatacttgtacagagtattgctgttggttgcttttttttttttttaaggaaaaaatggcctgaaaacatttttttaaagacttacaaataccaaatataaaaaaatgtcaatgc

SEQ ID NO: 4728 - DNA, 5117 bp, Homo sapiens
cccctagtccaattcctgacccttcagtagcaactgttgccacaggggaaaatggcataacgcagatcagcagtacagcagaatcctttcataaacagaatggaactggaacacctcaggtggaaacaaacaccagtgaggatggtgaaagctctggagccaacgatagtttaagaacacctgaacaaggatctaatgggactgatggggcatctcaaaaaactcccagtagcactgggcccagtcctgtgtttgacattaaagctgtttccatcagtccaaccaatgtgatcttaacttggaaaagtaatgacacagctgcttctgagtacaagtatgtagtaaagcataagatggaaaatgagaagacaattactgttgtgcatcaaccatggtgtaacatcacaggcttacgtccagcgacttcatatgtattctccatcactccaggaataggcartgagacttggggagatcccagagtcataaaagtcatcacagarccgatcccagtttctgatctccgtgttgccctcacgggtgtgaggaaggctgctctctcctggagcaatggcaatggcacygcctcctgccgggttcttcttgaaagcattggaagccatgaggagttgactcaagactcaagacttcaggtcaatatctcgggcctgaagccaggggttcaatacaacatcaacccgtatcttctacmatcaaataagacaaagggagaccccttgggcacagaaggtggcttggatrccagcaatacagagagaagccgggcagggagccccaccgcccctgtgcatgatgagtccctcgtgggacctgtggacccatcctccggccagcagtcccragacacggaagtcctgcttgtcgggttagagcctggcacccgatacaatgccaccgtttattcccaagcagcgaatggcacagaaggacagccccaggccatagagttcaggacaaatgctattcaggtttttgacrtcaccgctgtgaacatcagtgccacaagcctgaccctgatctggaaagtcagcgataacgagtcgtcatctaactatacctacaagatacatgtggcgggggagacagattcttccaatctcaacgtcagtgagcctcrcgctgtcatccccggactccgctccagcaccttctacaacatcacagtgtgtcctgtcctaggtgacatcgagggcacgccgggcttcctccaagtgcrcaccccccctgttccagtttctgacttccgagtgacagtggtcagcacgacggagatcggcttrgcatggagcagccatgatgcagaatcatttcagatgcatatcacacaggagggagctggcaattctcgggtagaaataaccaccaaccaaagtattatcattggtggcttgttccctggaaccaagtattgctttgaaatagttccaaaaggaccaaatgggactgaaggggcatctcggacagtttgcaatagaactgttcccagtgcagtgtttgacatccacgtggtctacgtcaccaccacggagatgtggctggactggaagagccctgacggtgcttccgagtatgtctaccatttagtcatagagtccaagcatggctctaaccacacaagcacgtatgacaaagcgattactctccagggcctgattccgggcaccttatataacatcaccatctctccagaagtggaccacgtctggggggaccccaactccactgcacagtacacacggcccagcaatgtgtccaacattgatgtaagtaccaacaccacagcagcaactttaagttggcagaactttgatgacgcctctcccacgtactcctactgccttcttattgagaaggctggaaattccagcaacgcaacacaagtagtcacggacattggaattactgacgctacagtcactgaattaatacctggctcatcatacacagtggagatctttgcacaagtaggggatgggatcaagtcactggaacctggccggaagtcattctgtacagatcctgcgtccatggcctccttcgactgcgaagtggtccccaaagagccagccctggttctcaaatggacctgccctcctggcgccaatgcaggctttgagctggaggtcagcagtggagcctggaacaatgcgacccacctggagagctgctcctctgagartggcactgagtatagaacggaagtcacgtatttgaatttttctacctcgtacaacatcagcatcaccactgtgtcctgtggaaagatggcagcccccacccggaacacctgcactactggcatcacagatccccctcctccagatggatcccctaatattacatctgtcagtcacaattcagtaaaggtcaagttcagtggatttgaagccagccacggacccatcaaagcctatgctgtcattctcaccaccggggaagctggtcacccttctgcagatgtcctgaaatacacgtatgasgatttcaaaaagggagcctcagatacttatgtgacatacctcataagaacagaagaaaagggacgttctcagagcttgtctgaagttttgaaatatgaaattgacgttgggaatgagtcaaccacacttggttattacaatgggaagctggaacctctgggctcctaccgggcttgtgtggctggcttcaccaacattaccttccaccctcaaaacaaggggctcattgatggggytgagagctatgtgtccttcagtcgytactcagatgctgtttccttgccccaggatccaggtgtcatctgtggagcggtttttggctgtatctttggtgccctggttattgtgactgtgggaggcttcatcttctggagaaagaagaggaaagatgcaaagaataatgaagtgtccttttctcaaattaagtaaatctaagttaatcagagtggagaattttgaggcctacttcaagaagcagcaagctgactccaactgtgggttcgcagaggaatacgaagatctgaagcttgttggaattagtcaacctaaatatgcagcagaactggctgagaatagaggaaagaatcgctataataatgttctgccctatgatatttcccgtgtcaaactttcggtccagacccattcaacggatgactacatcaatgccaactacatgcctggctaccactccaagaaagattttattgccacacaaggacctttaccgaacactttgaaagatttttggcgtatggtttgggagaaaaatgtatatgccatcattatgttgactaaatgtgttgaacagggaagaaccaaatgtgaggagtattggccctccaagcaggctcaggactatggagacataactgtggcaatgacatcagaaattgttcttccggaatggaccatcagagatttcacagtgaaaaatatccagacaagtgagagtcaccctctgagacagttccatttcacctcctggccagaccacggtgttcccgacaccactgacctgctcatcaacttccggtacctcgttcgtgactacatgaagcagagtcctcccgaatcgccgaytctggtgcattgcagtgctggggtcggaaggacgggcactttcattgccattgatcgtctcatctaccagatagagaatgagaacaccgtggatgtgtatgggattgtgtatgaccttcgaatgcataggcctttaatggtgcagacagaggaccagtatgttttcctcaatcagtgtgttttggatattgtcagatcccagaaagactcaaaagtagatcttatctaccagaacacaactgcaatgacaatctatgaaaaccttgcrcccgtgaccacatttggaaagaccaatggttacatmgcctaattccaaaggaataacctttctggagtgaaccagaccgtcgcacccacagcgaaggcacatgccccgatgtcgacatgtttttatatgtctaatatcttaattctttgttctgttttgtgagaactaattttgagggcatgaagctgcatatgatagatgacaaattggggctgtcgggggctgtggatgggtggggagcaaatcatctgcattcctgatgaccaatgggatgaggtcactttttttttttttcccccttgaggattgyggaaaaccaggaaaagggakctatgatttttttttccaaaacaatttcttttttaaaaaagactattttatatgattcacatgctaaagccaggattgtgttgggttgaatatattttaagtatcagaggtctatttttacctactgtgtcttggaatctagccgatggaaaatacctaattgtggatgatgattgcgcagggaggggtacgtggcacctcttccgaatgggttttctatttgaacatgtgccttttctgaattatgcttccacaggcaaaactcagtagagatctatatttttgtactgaatctcataattggaatatacggaatatttaaacagtagcttagcatcagaggtttgcttcctcagtaacatttctgttctcatttgatcaggggaggcctctttgccccgrccccgcttcccctgccccctgtasatttgtgctccattttttcttcccttttccctcccagttttctccaaagactcttctgttggcaacattttcaacccattggttgggtgagaatggcgactcaaatatcaccttgagaatttctgtgggtgggaatgggagaagcagaggaatcctacagtggcagaaatccttttcttgtccctgtattatcctttttctcatgtctgtatttggtatgaaggattatttaaaggtgcaatatgtgaattagtgattcatgatgttctaggtttttagtaacgttttactcaggttggcattttatgtgtctgtgtctgtatgtgtgtgtgtatgttcagaagcgtggcaatctgtgaacacttcagcgtgaattcagtgtcagattaatccctccttccccaaagtccactggctttcgtctctctctgccgtgacacatatcggaatctactgtatatatatatatatatatatatatatatatatatatatatatatatrcacta

SEQ ID NO: 4729 - DNA, 5548 bp, Homo sapiens
gagcagccgcgggagccgggaccgggtagccgcgcgctgggggtgggcgccgctcgctccgccccgcgaagcccctgcgcgctcagggacgcggcccccccgcggcagccgcgctaggctccggcgtgtggccgcggccgccgccgccgctgccatgtctccggggaagcccggggcgggcggagcggggacgaggcggaccggctggcggaggaggaggcgaaggagacggcaggaggcggcgacgacggtgcccgggctcgggcgcacggcggggcccgattcgcgcgtccggggcacgttccagggcgcgcggggcatgaagccggcggcgcgggaggcgcggctgcctccgcgctcgcccgggctgcgctgggcgctgccgctgctgctgctgctgctgcgcctgggccaggtaagcgccgggtggcccctagtccaattcctgacccttcagtagcaactgttgccacaggggaaaatggcataacgcagatcagcagtacagcagaatcctttcataaacagaatggaactggaacacctcaggtggaaacaaacaccagtgaggatggtgaaagctctggagccaacgatagtttaagaacacctgaacaaggatctaatgggactgatggggcatctcaaaaaactcccagtagcactgggcccagtcctgtgtttgacattaaagctgtttccatcagtccaaccaatgtgatcttaacttggaaaagtaatgacacagctgcttctgagtacaagtatgtagtaaagcataagatggaaaatgagaagacaattactgttgtgcatcaaccatggtgtaacatcacaggcttacgtccagcgacttcatatgtattctccatcactccaggaataggcartgagacttggggagatcccagagtcataaaagtcatcacagarccgatcccagtttctgatctccgtgttgccctcacgggtgtgaggaaggctgctctctcctggagcaatggcaatggcacygcctcctgccgggttcttcttgaaagcattggaagccatgaggagttgactcaagactcaagacttcaggtcaatatctcgggcctgaagccaggggttcaatacaacatcaacccgtatcttctacmatcaaataagacaaagggagaccccttgggcacagaaggtggcttggatrccagcaatacagagagaagccgggcagggagccccaccgcccctgtgcatgatgagtccctcgtgggacctgtggacccatcctccggccagcagtcccragacacggaagtcctgcttgtcgggttagagcctggcacccgatacaatgccaccgtttattcccaagcagcgaatggcacagaaggacagccccaggccatagagttcaggacaaatgctattcaggtttttgacrtcaccgctgtgaacatcagtgccacaagcctgaccctgatctggaaagtcagcgataacgagtcgtcatctaactatacctacaagatacatgtggcgggggagacagattcttccaatctcaacgtcagtgagcctcrcgctgtcatccccggactccgctccagcaccttctacaacatcacagtgtgtcctgtcctaggtgacatcgagggcacgccgggcttcctccaagtgcrcaccccccctgttccagtttctgacttccgagtgacagtggtcagcacgacggagatcggcttrgcatggagcagccatgatgcagaatcatttcagatgcatatcacacaggagggagctggcaattctcgggtagaaataaccaccaaccaaagtattatcattggtggcttgttccctggaaccaagtattgctttgaaatagttccaaaaggaccaaatgggactgaaggggcatctcggacagtttgcaatagaactgttcccagtgcagtgtttgacatccacgtggtctacgtcaccaccacggagatgtggctggactggaagagccctgacggtgcttccgagtatgtctaccatttagtcatagagtccaagcatggctctaaccacacaagcacgtatgacaaagcgattactctccagggcctgattccgggcaccttatataacatcaccatctctccagaagtggaccacgtctggggggaccccaactccactgcacagtacacacggcccagcaatgtgtccaacattgatgtaagtaccaacaccacagcagcaactttaagttggcagaactttgatgacgcctctcccacgtactcctactgccttcttattgagaaggctggaaattccagcaacgcaacacaagtagtcacggacattggaattactgacgctacagtcactgaattaatacctggctcatcatacacagtggagatctttgcacaagtaggggatgggatcaagtcactggaacctggccggaagtcattctgtacagatcctgcgtccatggcctccttcgactgcgaagtggtccccaaagagccagccctggttctcaaatggacctgccctcctggcgccaatgcaggctttgagctggaggtcagcagtggagcctggaacaatgcgacccacctggagagctgctcctctgagartggcactgagtatagaacggaagtcacgtatttgaatttttctacctcgtacaacatcagcatcaccactgtgtcctgtggaaagatggcagcccccacccggaacacctgcactactggcatcacagatccccctcctccagatggatcccctaatattacatctgtcagtcacaattcagtaaaggtcaagttcagtggatttgaagccagccacggacccatcaaagcctatgctgtcattctcaccaccggggaagctggtcacccttctgcagatgtcctgaaatacacgtatgasgatttcaaaaagggagcctcagatacttatgtgacatacctcataagaacagaagaaaagggacgttctcagagcttgtctgaagttttgaaatatgaaattgacgttgggaatgagtcaaccacacttggttattacaatgggaagctggaacctctgggctcctaccggtaatggcttgtgtggctggcttcaccaacattaccttccaccctcaaaacaaggggctcattgatggggytgagagctatgtgtccttcagtcgytactcagatgctgtttccttgccccaggatccaggtgtcatctgtggagcggtttttggctgtatctttggtgccctggttattgtgactgtgggaggcttcatcttctggagaaagaagaggaaagatgcaaagaataatgaagtgtccttttctcaaattaaatctaagttaatcagagtggagaattttgaggcctacttcaagaagcagcaagctgactccaactgtgggttcgcagaggaatacgaagatctgaagcttgttggaattagtcaacctaaatatgcagcagaactggctgagaatagaggaaagaatcgctataataatgttctgccctatgatatttcccgtgtcaaactttcggtccagacccattcaacggatgactacatcaatgccaactacatgcctggctaccactccaagaaagattttattgccacacaaggacctttaccgaacactttgaaagatttttggcgtatggtttgggagaaaaatgtatatgccatcattatgttgactaaatgtgttgaacagggaagaaccaaatgtgaggagtattggccctccaagcaggctcaggactatggagacataactgtggcaatgacatcagaaattgttcttccggaatggaccatcagagatttcacagtgaaaaatatccagacaagtgagagtcaccctctgagacagttccatttcacctcctggccagaccacggtgttcccgacaccactgacctgctcatcaacttccggtacctcgttcgtgactacatgaagcagagtcctcccgaatcgccgaytctggtgcattgcagtgctggggtcggaaggacgggcactttcattgccattgatcgtctcatctaccagatagagaatgagaacaccgtggatgtgtatgggattgtgtatgaccttcgaatgcataggcctttaatggtgcagacagaggaccagtatgttttcctcaatcagtgtgttttggatattgtcagatcccagaaagactcaaaagtagatcttatctaccagaacacaactgcaatgacaatctatgaaaaccttgcrcccgtgaccacatttggaaagaccaatggttacatmgcctaattccaaaggaataacctttctggagtgaaccagaccgtcgcacccacagcgaaggcacatgccccgatgtcgacatgtttttatatgtctaatatcttaattctttgttctgttttgtgagaactaattttgagggcatgaagctgcatatgatagatgacaaattggggctgtcgggggctgtggatgggtggggagcaaatcatctgcattcctgatgaccaatgggatgaggtcactttttttttttttcccccttgaggattgyggaaaaccaggaaaagggakctatgatttttttttccaaaacaatttcttttttaaaaaagactattttatatgattcacatgctaaagccaggattgtgttgggttgaatatattttaagtatcagaggtctatttttacctactgtgtcttggaatctagccgatggaaaatacctaattgtggatgatgattgcgcagggaggggtacgtggcacctcttccgaatgggttttctatttgaacatgtgccttttctgaattatgcttccacaggcaaaactcagtagagatctatatttttgtactgaatctcataattggaatatacggaatatttaaacagtagcttagcatcagaggtttgcttcctcagtaacatttctgttctcatttgatcaggggaggcctctttgccccgrccccgcttcccctgccccctgtasatttgtgctccattttttcttcccttttccctcccagttttctccaaagactcttctgttggcaacattttcaacccattggttgggtgagaatggcgactcaaatatcaccttgagaatttctgtgggtgggaatgggagaagcagaggaatcctacagtggcagaaatccttttcttgtccctgtattatcctttttctcatgtctgtatttggtatgaaggattatttaaaggtgcaatatgtgaattagtgattcatgatgttctaggtttttagtaacgttttactcaggttggcattttatgtgtctgtgtctgtatgtgtgtgtgtatgttcagaagcgtggcaatctgtgaacacttcagcgtgaattcagtgtcagattaatccctccttccccaaagtccactggctttcgtctctctctgccgtgacacatatcggaatctactgtatatatatatatatatatatatatatatatatatatatatatatatrcacta

SEQ ID NO: 4730 - DNA, 5281 bp, Homo sapiens
atccccattttccagagcgggaagccgacgctcaaccccgcgccgcgacttgcccgaggtcacccagtgggccagcggctccgggaccgaggcgcggggcgggttgaggccggcgctgcaggcagcggcggctgcgcggtgaacgaggcggcctgcgcggcggagtgctgagtcccgatccccggctctgtccggcccacggatcctcaagcccgggccccgggcccggccccagcctcagccctgagcgtctcggggcggatggcgcggggcggcgggggcgggcggtgctgagccctgcgcgggccatggcctcggcctgcggggcgccgggcccggggggcgccctgggcagccaggccccctcctggtaccaccgcgacctgagccgggcggccgcggaggagctgctggcccgggcgggccgcgatggcagcttcctggtccgagacagcgagagcgtggcgggggccttcgcgctctgcgtcctgtatcagaagcatgtgcacacgtatcgcattctgcctgatggagaagatttcttggctgtgcagacctcgcagggtgtgcctgtgcgccgcttccagaccctgggtgagctcatcggcctgtacgcccagcccaaccagggmcttgtgtgcgccctgcttcttcctgtagagggtgagcgagagccggacccaccggatgaccgggatgcctcagatggggaggatgagaagcccccgctgcccccgcgctctggctccaccagcatttctgcccccactgggcccagcagtcccctgccagctcctgagactcccacrgctccagctgctgagagtgctcccaatgggctgagcaccgtctcgcacgactacctgaaaggcagctatgggctggacctggaagctgtgaggggtggagccagccacctgccccacctcacccgtaccctcgctacctcatgccggaggctgcacagtgaggtggacaaggtcctgtcaggcctggagatcctgtccaaggtgtttgaccagcagagctcgcccatggtgacccgccttttgcagcagcagaacctgccacagacaggggagcaggaactagagagcctggtgctgaakctgtcagtgctaaaggacttcctgtcaggcatccagaagaaggccctgaaggccctacaggacatgagctccacagcacccccagctccgcagccatccacacgtaaggccaagaccatccccgtgcaggcctttgaggtgaagctagatgtgaccctgggtgacctgaccaagattgggaagtcrcagaagttcacgctgagcgtggatgtggagggtgggcggctggtgctgctgcggagacagcgggactcccaggaggactggaccaccttcacgcacgaccgcatccgccagctcattaagtcccagcgtgtccagaacaagctgggtgttgtgtttgagaaggagaaggaccggactcagcgcaaggacttcatctttgtcagtgcccggaagcgggaggccttctgccagctgttgcagctcatgaagaacaagcactccaagcaggacgagcccgacatgatctcagtcttcataggcacctggaacatgggaagtgtaccacctccaaaaaacgtgacatcctggttcacatcgaagggtctggggaagaccctggacgaggtcacagtgaccataccccatgacatctatgtctttgggacccaggagaactcagtgggcgaccgcgagtggctggacctactgcgcgggggcctcaaggagcttacggatctggattaccgcccgattgccatgcaatcactgtggaatatcaaggtggcagtgctggtcaagccagagcacgagaaccgtatcagccatgtcagtacgtccagtgtgaagactggcatcgccaacaccctggggaacaagggggctgtgggcgtctccttcatgtttaatggcacctcatttggctttgtgaattgtcacctcacctcgggaaatgagaagacggctcggaggaaccaaaactacttggacatcctgcggctgctctcgctgggcgaccggcagctcaatgcctttgacatctctctgcgtttcacacacctcttctggtttggggacctcaactaccgcctggacatggatatccaggagatcctgaactacatcagcaggaaagagtttgagcccctcctcagggtggaccagctcaacctggagcgggagaagcacaaggtcttccttcgattcagtgaggaggagatctccttcccacccacctaccgctatgagcggggttcccgggacacatatgcctggcacaagcagaagccaactggggtccggaccaatgtgccctcatggtgtgaccggattctgtggaaatcctaccctgaaactcacatcatctgcaattcttatggttgcactgatgacatcgtcaccagcgaccattcccccgtgtttgggacatttgaggttggagttacctcccagttcatctccaagaaagggctctcraagacttcagaccaggcctacattgagtttgagagcatcgaggccattgtgaagacagccagccgcaccaagttcttcatcgagttctactctacctgcctggaggaatmcaagaagagctttgagaatgatgcccagagcagtgacaacatcaacttcctcaaagtgcagtggtcttcacgccagctgcccacsctcaaaccaattctggctgatatcgagtmcctgcaggaccagcacctcctgctcacagtcaagtccatggatggctatgaatcctatggggagtgtgtggttgcactcaaatccatgatcggcagcacggcccaacagttcctgaccttcctatcccmccgtggcgaggagacaggcaatatcagaggctccatgaaggtgcgggtgcccacggagcgcctgggcacccgtgagcggctctacgagtggatcagcattgataaggatgaggcaggagcaaagagcaaagccccctctgtgtcccgagggagccaggagcccaggtcagggagccgcaagccagccttcacagaggcctcctgcccgctctccaggttatttgaagaaccagagaaaccgccaccaacggggaggcccccagccccaccccgagcagctccccgggaggagcccttgacccccaggttgaagccagagggagctcctgaaccagaaggggtggcggcccccccacccaagaacagcttcaataaccctgcctactacgtccttgaaggggtcccgcaccagctgctgcccccggagccaccctcgcctgccagggcccctgtcccatctgccaccaagaacaaagtggccattacagtgcctgctccacagcttgggcaccaccggcaccctcgtgtgggagaggggagttcttcagatgaggagtctggaggcacactgccccctccagactttccacctccaccactgccggactcagccatcttcctgccccccagcctggatcctttaccagggccagtggtccggggccgtggtggggstgaggcccgtggcccaccacctcccaaggcccatccaaggcctccactgcccccaggcccctcaccagccagcactttcctgggggaagtggscagtggggatgaccggtcctgctcggtgctgcagatggccaagacgctgagcgaggtggactatgcccctgctgggcctgcacgctcagcgctcctcccaggccccctggagctgcagcccccccggggactgccctcggactatggccggcccctcagcttccctccaccccgcatccgggagagcatccaggaagacctggcagaggaggctccgtgcctgcagggcgggcgggccagcgggctgggcgaggcaggcatgagtgcctggctgcgggccatcggcttggagcgctatgaggagggcctggtgcataatggctgggacgacctggagtttctcagtgacatcaccgaggaggacttggaggaggctggggtgcaggacccggctcacaagcgcctccttctggacaccctgcagctcagcaagtgatagcggaggcaccacgaagctgtgaactcagagcccctccctgctaccaaggcccagctatggccccagggttgaaaagttatgagggtcagggcagtatctctctgcctatttattggggtgcctatttattggggatctgcattccccgctgcccaatcatttgcaatgccctaattagggcatcctgcccctcgccttttaggctcaggacggaaggtcagttgccatggttaccgaggaccctggttactctggtgctgtcctsttttactggaccccgcctcccagccccaggggtgcctgtgggggtccatttgggtacgtctgggcccccactttcaccagtttctgcggccttccaccgggcctgaaccacagcggaggagctccgctaagacctccccacccccgctgggggtgggggcgggtgtccgtccggaaatgaaggaatagcccgaggaccgggctggggtttatttaaactgttctgtgtgggtctggggagggagagcaccttaatattattggggttggttggggtggggcaggatctcagccataaagtgccagtttgcttagttctcactgtctcctggtctgtgctgccctgctctggggatgcacggcggcagggtgggggagggaggttcctcgcaggtctcagcccgggacagggtcttgcaagcagcctcctgggcagtcgtaagggttgcggcgtgatgtcttcaataaattaagttttatttggattgagtaaaacttcaataaattacaagtttttcaaagaaaaaggacaaccaaaaaaattagggaaagagaatccctctgtcccattccccaggcagcccctccactcctctaacaggtccaccctctgtgccagacgggctagggaagagaggagacacgtgagggatgaattggcggtggtcattaattatcccggcgaccaccagcctctgtacgggtgggcccgaggggtggggcagcgggctttcctgatcaccagcgtaaggggtgacccagccgctgcagagccagggaagggggctgtgccgatcctccttgaggaccttcactttgagggcactgttagggacaggcctcatgtgataccgcatccaaagaaggccaagctagaaggagctccggggttctcctggaggaggtcccggtataaagaactccgctct

SEQ ID NO: 4731 - DNA, 5178 bp, Homo sapiens
ttgaggccggcgctgcaggcagcggcggctgcgcggtgaacgaggcggcctgcgcggcggagtgctgagtcccgatccccggctctgtccggcccacggatcctcaagcccgggccccgggcccggccccagcctcagccctgagcgtctcggggcggatggcgcggggcggcgggggcgggcggtgctgagccctgcgcgggccatggcctcggcctgcggggcgccgggcccggggggcgccctgggcagccaggccccctcctggtaccaccgcgacctgagccgggcggccgcggaggagctgctggcccgggcgggccgcgatggcagcttcctggtccgagacagcgagagcgtggcgggggccttcgcgctctgcgtcctgtatcagaagcatgtgcacacgtatcgcattctgcctgatggagaagatttcttggctgtgcagacctcgcagggtgtgcctgtgcgccgcttccagaccctgggtgagctcatcggcctgtacgcccagcccaaccagggmcttgtgtgcgccctgcttcttcctgtagagggtgagcgagagccggacccaccggatgaccgggatgcctcagatggggaggatgagaagcccccgctgcccccgcgctctggctccaccagcatttctgcccccactgggcccagcagtcccctgccagctcctgagactcccacrgctccagctgctgagagtgctcccaatgggctgagcaccgtctcgcacgactacctgaaaggcagctatgggctggacctggaagctgtgaggggtggagccagccacctgccccacctcacccgtaccctcgctacctcatgccggaggctgcacagtgaggtggacaaggtcctgtcaggcctggagatcctgtccaaggtgtttgaccagcagagctcgcccatggtgacccgccttttgcagcagcagaacctgccacagacaggggagcaggaactagagagcctggtgctgaakctgtcagtgctaaaggacttcctgtcaggcatccagaagaaggccctgaaggccctacaggacatgagctccacagcacccccagctccgcagccatccacacgtaaggccaagaccatccccgtgcaggcctttgaggtgaagctagatgtgaccctgggtgacctgaccaagattgggaagtcrcagaagttcacgctgagcgtggatgtggagggtgggcggctggtgctgctgcggagacagcgggactcccaggaggactggaccaccttcacgcacgaccgcatccgccagctcattaagtcccagcgtgtccagaacaagctgggtgttgtgtttgagaaggagaaggaccggactcagcgcaaggacttcatctttgtcagtgcccggaagcgggaggccttctgccagctgttgcagctcatgaagaacaagcactccaagcaggacgagcccgacatgatctcagtcttcataggcacctggaacatgggaagtgtaccacctccaaaaaacgtgacatcctggttcacatcgaagggtctggggaagaccctggacgaggtcacagtgaccataccccatgacatctatgtctttgggacccaggagaactcagtgggcgaccgcgagtggctggacctactgcgcgggggcctcaaggagcttacggatctggattaccgcccgattgccatgcaatcactgtggaatatcaaggtggcagtgctggtcaagccagagcacgagaaccgtatcagccatgtcagtacgtccagtgtgaagactggcatcgccaacaccctggggaacaagggggctgtgggcgtctccttcatgtttaatggcacctcatttggctttgtgaattgtcacctcacctcgggaaatgagaagacggctcggaggaaccaaaactacttggacatcctgcggctgctctcgctgggcgaccggcagctcaatgcctttgacatctctctgcgtttcacacacctcttctggtttggggacctcaactaccgcctggacatggatatccaggagatcctgaactacatcagcaggaaagagtttgagcccctcctcagggtggaccagctcaacctggagcgggagaagcacaaggtcttccttcgattcagtgaggaggagatctccttcccacccacctaccgctatgagcggggttcccgggacacatatgcctggcacaagcagaagccaactggggtccggaccaatgtgccctcatggtgtgaccggattctgtggaaatcctaccctgaaactcacatcatctgcaattcttatggttgcactgatgacatcgtcaccagcgaccattcccccgtgtttgggacatttgaggttggagttacctcccagttcatctccaagaaagggctctcraagacttcagaccaggcctacattgagtttgagagcatcgaggccattgtgaagacagccagccgcaccaagttcttcatcgagttctactctacctgcctggaggaatmcaagaagagctttgagaatgatgcccagagcagtgacaacatcaacttcctcaaagtgcagtggtcttcacgccagctgcccacsctcaaaccaattctggctgatatcgagtmcctgcaggaccagcacctcctgctcacagtcaagtccatggatggctatgaatcctatggggagtgtgtggttgcactcaaatccatgatcggcagcacggcccaacagttcctgaccttcctatcccmccgtggcgaggagacaggcaatatcagaggctccatgaaggtgcgggtgcccacggagcgcctgggcacccgtgagcggctctacgagtggatcagcattgataaggatgaggcaggagcaaagagcaaagccccctctgtgtcccgagggagccaggagcccaggtcagggagccgcaagccagccttcacagaggcctcctgcccgctctccaggttatttgaagaaccagagaaaccgccaccaacggggaggcccccagccccaccccgagcagctccccgggaggagcccttgacccccaggttgaagccagagggagctcctgaaccagaaggggtggcggcccccccacccaagaacagcttcaataaccctgcctactacgtccttgaaggggtcccgcaccagctgctgcccccggagccaccctcgcctgccagggcccctgtcccatctgccaccaagaacaaagtggccattacagtgcctgctccacagcttgggcaccaccggcaccctcgtgtgggagaggggagttcttcagatgaggagtctggaggcacactgccccctccagactttccacctccaccactgccggactcagccatcttcctgccccccagcctggatcctttaccagggccagtggtccggggccgtggtggggstgaggcccgtggcccaccacctcccaaggcccatccaaggcctccactgcccccaggcccctcaccagccagcactttcctgggggaagtggscagtggggatgaccggtcctgctcggtgctgcagatggccaagacgctgagcgaggtggactatgcccctgctgggcctgcacgctcagcgctcctcccaggccccctggagctgcagcccccccggggactgccctcggactatggccggcccctcagcttccctccaccccgcatccgggagagcatccaggaagacctggcagaggaggctccgtgcctgcagggcgggcgggccagcgggctgggcgaggcaggcatgagtgcctggctgcgggccatcggcttggagcgctatgaggagggcctggtgcataatggctgggacgacctggagtttctcagtgacatcaccgaggaggacttggaggaggctggggtgcaggacccggctcacaagcgcctccttctggacaccctgcagctcagcaagtgatagcggaggcaccacgaagctgtgaactcagagcccctccctgctaccaaggcccagctatggccccagggttgaaaagttatgagggtcagggcagtatctctctgcctatttattggggtgcctatttattggggatctgcattccccgctgcccaatcatttgcaatgccctaattagggcatcctgcccctcgccttttaggctcaggacggaaggtcagttgccatggttaccgaggaccctggttactctggtgctgtcctsttttactggaccccgcctcccagccccaggggtgcctgtgggggtccatttgggtacgtctgggcccccactttcaccagtttctgcggccttccaccgggcctgaaccacagcggaggagctccgctaagacctccccacccccgctgggggtgggggcgggtgtccgtccggaaatgaaggaatagcccgaggaccgggctggggtttatttaaactgttctgtgtgggtctggggagggagagcaccttaatattattggggttggttggggtggggcaggatctcagccataaagtgccagtttgcttagttctcactgtctcctggtctgtgctgccctgctctggggatgcacggcggcagggtgggggagggaggttcctcgcaggtctcagcccgggacagggtcttgcaagcagcctcctgggcagtcgtaagggttgcggcgtgatgtcttcaataaattaagttttatttggattgagtaaaacttcaataaattacaagtttttcaaagaaaaaggacaaccaaaaaaattagggaaagagaatccctctgtcccattccccaggcagcccctccactcctctaacaggtccaccctctgtgccagacgggctagggaagagaggagacacgtgagggatgaattggcggtggtcattaattatcccggcgaccaccagcctctgtacgggtgggcccgaggggtggggcagcgggctttcctgatcaccagcgtaaggggtgacccagccgctgcagagccagggaagggggctgtgccgatcctccttgaggaccttcactttgagggcactgttagggacaggcctcatgtgataccgcatccaaagaaggccaagctagaaggagctccggggttctcctggaggaggtcccggtataaagaactccgctct

SEQ ID NO: 4732 - DNA, 5283 bp, Homo sapiens
atccccattttccagagcgggaagccgacgctcaaccccgcgccgcgacttgcccgaggtcacccagtgggccagcggctccgggaccgaggcgcggggcgggttgaggccggcgctgcaggcagcggcggctgcgcggtgaacgaggcggcctgcgcggcggagtgctgagtcccgatccccggctctgtccggcccacggatcctcaagcccgggccccgggcccggccccagcctcagccctgagcgtctcggggcggatggcgcggggcggcgggggcgggcggtgctgagccctgcgcgggccatggcctcggcctgcggggcgccgggcccggggggcgccctgggcagccaggccccctcctggtaccaccgcgacctgagccgggcggccgcggaggagctgctggcccgggcgggccgcgatggcagcttcctggtccgagacagcgagagcgtggcgggggccttcgcgctctgcgtcctgtatcagaagcatgtgcacacgtatcgcattctgcctgatggagaagatttcttggctgtgcagacctcgcagggtgtgcctgtgcgccgcttccagaccctgggtgagctcatcggcctgtacgcccagcccaaccagggmcttgtgtgcgccctgcttcttcctgtagagggtgagcgagagccggacccaccggatgaccgggatgcctcagatggggaggatgagaagcccccgctgcccccgcgctctggctccaccagcatttctgcccccactgggcccagcagtcccctgccagctcctgagactcccacrgctccagctgctgagagtgctcccaatgggctgagcaccgtctcgcacgactacctgaaaggcagctatgggctggacctggaagctgtgaggggtggagccagccacctgccccacctcacccgtaccctcgctacctcatgccggaggctgcacagtgaggtggacaaggtcctgtcaggcctggagatcctgtccaaggtgtttgaccagcagagctcgcccatggtgacccgccttttgcagcagcagaacctgccacagacaggggagcaggaactagagagcctggtgctgaakctgtcagtgctaaaggacttcctgtcaggcatccagaagaaggccctgaaggccctacaggacatgagctccacagcacccccagctccgcagccatccacacgtaaggccaagaccatccccgtgcaggcctttgaggtgaagctagatgtgaccctgggtgacctgaccaagattgggaagtcrcagaagttcacgctgagcgtggatgtggagggtgggcggctggtgctgctgcggagacagcgggactcccaggaggactggaccaccttcacgcacgaccgcatccgccagctcattaagtcccagcgtgtccagaacaagctgggtgttgtgtttgagaaggagaaggaccggactcagcgcaaggacttcatctttgtcagtgcccggaagcgggaggccttctgccagctgttgcagctcatgaagaacaagcactccaagcaggacgagcccgacatgatctcagtcttcataggcacctggaacatgggaagtgtaccacctccaaaaaacgtgacatcctggttcacatcgaagggtctggggaagaccctggacgaggtcacagtgaccataccccatgacatctatgtctttgggacccaggagaactcagtgggcgaccgcgagtggctggacctactgcgcgggggcctcaaggagcttacggatctggattaccgcccgattgccatgcaatcactgtggaatatcaaggtggcagtgctggtcaagccagagcacgagaaccgtatcagccatgtcagtacgtccagtgtgaagactggcatcgccaacaccctggggaacaagggggctgtgggcgtctccttcatgtttaatggcacctcatttggctttgtgaattgtcacctcacctcgggaaatgagaagacggctcggaggaaccaaaactacttggacatcctgcggctgctctcgctgggcgaccggcagctcaatgcctttgacatctctctgcgtttcacacacctcttctggtttggggacctcaactaccgcctggacatggatatccaggagatcctgaactacatcagcaggaaagagtttgagcccctcctcagggtggaccagctcaacctggagcgggagaagcacaaggtcttccttcgattcagtgaggaggagatctccttcccacccacctaccgctatgagcggggttcccgggacacatatgcctggcacaagcagaagccaactggggtccggaccaatgtgccctcatggtgtgaccggattctgtggaaatcctaccctgaaactcacatcatctgcaattcttatggttgcactgatgacatcgtcaccagcgaccattcccccgtgtttgggacatttgaggttggagttacctcccagttcatctccaagaaagggctctcraagacttcagaccaggcctacattgagtttgagagcatcgaggccattgtgaagacagccagccgcaccaagttcttcatcgagttctactctacctgcctggaggaatmcaagaagagctttgagaatgatgcccagagcagtgacaacatcaacttcctcaaagtgcagtggtcttcacgccagctgcccacsctcaaaccaattctggctgatatcgagtmcctgcaggaccagcacctcctgctcacagtcaagtccatggatggctatgaatcctatggggagtgtgtggttgcactcaaatccatgatcggcagcacggcccaacagttcctgaccttcctatcccmccgtggcgaggagacaggcaatatcagaggctccatgaaggtgcgggtgcccacggagcgcctgggcacccgtgagcggctctacgagtggatcagcattgataaggatgaggcaggagcaaagagcaaagccccctctgtgtcccgagggagccaggagcccaggtcagggagccgcaagccagccttcacagaggcctcctgcccgctctccaggttatttgaagaaccagagaaaccgccaccaacggggaggcccccagccccaccccgagcagctccccgggaggagcccttgacccccaggttgaagccagagggagctcctgaaccagaaggggtggcggcccccccacccaagaacagcttcaataaccctgcctactacgtccttgaaggggtcccgcaccagctgctgcccccggagccaccctcgcctgccagggcccctgtcccatctgccaccaagaacaaagtggccattacagtgcctgctccacagcttgggcaccaccggcaccctcgtgtgggagaggggagttcttcagatgaggagtctggaggcacactgccccctccagactttccacctccaccactgccggactcagccatcttcctgccccccagcctggatcctttaccagggccagtggtccggggccgtggtggggstgaggcccgtggcccaccacctcccaaggcccatccaaggcctccactgcccccaggcccctcaccagccagcactttcctgggggaagtggscagtggggatgaccggtcctgctcggtgctgcagatggccaagacgctgagcgaggtggactatgcccctgctgggcctgcacgctcagcgctcctcccaggccccctggagctgcagcccccccggggactgccctcggactatggccggcccctcagcttccctccaccccgcatccgggagagcatccaggaagacctggcagaggaggctccgtgcctgcagggcgggcgggccagcgggctgggcgaggcaggcatgagtgcctggctgcgggccatcggcttggagcgctatgaggagggcctggtgcataatggctgggacgacctggagttttccacagtgacatcaccgaggaggacttggaggaggctggggtgcaggacccggctcacaagcgcctccttctggacaccctgcagctcagcaagtgatagcggaggcaccacgaagctgtgaactcagagcccctccctgctaccaaggcccagctatggccccagggttgaaaagttatgagggtcagggcagtatctctctgcctatttattggggtgcctatttattggggatctgcattccccgctgcccaatcatttgcaatgccctaattagggcatcctgcccctcgccttttaggctcaggacggaaggtcagttgccatggttaccgaggaccctggttactctggtgctgtcctsttttactggaccccgcctcccagccccaggggtgcctgtgggggtccatttgggtacgtctgggcccccactttcaccagtttctgcggccttccaccgggcctgaaccacagcggaggagctccgctaagacctccccacccccgctgggggtgggggcgggtgtccgtccggaaatgaaggaatagcccgaggaccgggctggggtttatttaaactgttctgtgtgggtctggggagggagagcaccttaatattattggggttggttggggtggggcaggatctcagccataaagtgccagtttgcttagttctcactgtctcctggtctgtgctgccctgctctggggatgcacggcggcagggtgggggagggaggttcctcgcaggtctcagcccgggacagggtcttgcaagcagcctcctgggcagtcgtaagggttgcggcgtgatgtcttcaataaattaagttttatttggattgagtaaaacttcaataaattacaagtttttcaaagaaaaaggacaaccaaaaaaattagggaaagagaatccctctgtcccattccccaggcagcccctccactcctctaacaggtccaccctctgtgccagacgggctagggaagagaggagacacgtgagggatgaattggcggtggtcattaattatcccggcgaccaccagcctctgtacgggtgggcccgaggggtggggcagcgggctttcctgatcaccagcgtaaggggtgacccagccgctgcagagccagggaagggggctgtgccgatcctccttgaggaccttcactttgagggcactgttagggacaggcctcatgtgataccgcatccaaagaaggccaagctagaaggagctccggggttctcctggaggaggtcccggtataaagaactccgctct

SEQ ID NO: 4733 - DNA, 3855 bp, Homo sapiens
ctcgcccgccccggcccggcagcgaatgagcgggcgcgccgggagggcgcgaggtcagggggctggggacgcgcgtggggatcgctacccggctcggccactgctgggcggacacctgggcgcgccgccgcgggaggagcccggactcgggccgaggctgcccaggcaatgcgttcactcggcgcaaacatggctgcggccctgcgcgccgcgggcgtcctgctccgcgatccgctggcatccagcagctggagggtctgtcagccatggaggtggaagtcaggtgcagctgcagcggccgtcaccacagaaacagcccagcatgcccagkgtgcaaaacctcaagttcaaccgcagaagaggaagccgaaaactggaatattaatgctaaacatgggaggccctgaaactcttggagatgttcacgacttccttctgagactcttcttggaccragacctcatgacacttcctattcagaataagctggcaccattcatcgccaaacgccgaacccccaagattcaagagcagtaccgcaggattggaggcggatcccccatcaagatatggacttccaagcagggagagggcatggtgaagctgctggatgaattgycccccaacacagcccctcacaaatactatattggatttcggtacgtccatcctttaacagaagaagcaattgaagagatggagagagatggcckagaaagggctaytgctttcacacagtatccacagtacagctgctccaccacaggcagcagcttaaatgccatttacagatactataatcaagtgggacggaagcccacgatgaagtggagcactattgacaggtggcccacacatcacctcctcatccagtgctttgcagatcatattctaaaggaactggaccattttccacttgagaagagaagcgaggtggtcattctgttttctgctcactyactgccsatrtctgtggtcaacagaggcgacccatatcctcaggaggtaagcgccaytgtccaaaaagtcawggaaaggctggagtactgcaacccctaccgactggtgtgrcaatccaaggttggtccdatgccctggttgggtcctcaaacagacgaatctatcaaagggctttgtgagagggggaggaagaatatcctcttggttcygatagcatttaccagtgaccatattgaaacgctgtatgagctggacatcgagtactctcaagttttagccaaggagtgtggagktgaaaacatcagaagagctgagtctcttaatggaaatccattgttctctaaggccctggccgacttggtgcmttcacacatccagtcaaacgagctgtgttccaagcagctgaccctgagctgtccgctctvtgtcaatcctgtctgcagggagactaaatcctycttcaccagccagcagctgtgacccccgccggtggaccccgtggcgttaggcaaatgcccaacctccagatacctccgatgtggagagggtgttatttagagatcaaggaaggaagtcatccttccttgatatatatayagcctttgggtacaaattgtgtggtttcttgaggattggactcttgatggatttctatttttatataactatacagtaagcatttgtattttctctctctaggtataagttactagtttggaatgtccatyaggacctttaataaatgagttaaaaatttgtcttatgagacacacctatttaagyacagattttggctttattgcccaaaaccctycygaaagggtacggagagtcccctctgtgggctggcagtgtgaatgagatctgtttagtctcgtgcatatagttgctgttttttaaawgaacacagttgagtatttgaagtgaatttgaaaaagaaatgttacttaatctttccctragcccatgggttacagaatgctagggaggcaatttggttacctgcaatggctgcttttgccagcgaggccaccattcattggtcatcttggtatttgtgtgtgaatctcactttcctcaatgtaaaaaggaatcaagtatggatttcagaggtgctcttagattccccatacacccaagggtaataaacgtgtacaagtacagtgttcatgatacgtgccttggtgggagtccgtggtgccacagggaaggggctcccactgcttctggtctccagggacagtgctgctggaaaggctagtgatgagcttcaccctggagctcctcccgggaccttgcaagcctctccatccagcatcttctctatcttagttgaatgccttctttctgaacatttgttttaagaattatyttataaagtcaacaatactttgcttgaattctttcttaatttacgattttttattataaaaawgtatagtgatacaatgggacatgtgaagaatacagaaaagtaaccactttaatgcaataactgttatcataatattgtatttcgtggtagtcctttcctgtagatatttttaatgccatttaatgccattgtcaccttggatttatgagtgaaaagtgtttctaaaaatatagaaataatgtcagatcagagtctgatcttctatgtttgtatttaaatggattaaaagatccccggtggttccatgaagaatttgtaaagatcactttctctttcctccaagccctgaaactttgttcttcaaaagagcgtttcttttttttttttttttttwaagccagtttataaagtggaagtattaggagattcataaatcttctatattgagaattggctatgttaataaatattacaacatcattaaggttttagctaagtttgattcatgctgtctgttaaatcaaaactgatctaaatcagaattattaaatgtgaggagcttttttaatacaggaaaagaaacatgtcatccacttgagttaatagttttcctacgttgatgacagccctcatgagtagcatccacatttttaaaatttcaaattggtttttctactagtagattgtgtttctagagaaagatacaaggcataggtgattgtttaggattttcctctagcctttgccattacctttttggggatgaggttcacagtagactttgagtgaccgtcccaccgtgaagtgaattctctgagctggtggtgtggtgctggaaggaaggttatttttggagccactctctccccttaaggatatttcccaagggcctgcttcaattctttgatgactttagaggtgaaaaaatatttttatggagatgatgcagaaaactccaattcaggagcccttgcgagtatatctgaagcacttatttgctaaggaaacctgaattgatagcagtactgtgctgtctggaataatgtccttgatactgagttgggaccagactggcttttatagtgacaggcaaagaggaatttattgagatcactgctcatggcatttgttgctgtaagaagtgttgcctttgattgttactaaccacggatgggtaacggtcatacattaggctagtgtttggtaggacaaaatctttttagagctttgagaattgtcatcctgttggtcaactttgaaatacaaatgtttgccctggtaattagcaatgaactgctggcagtttcttcagctgtgtatatacggatctggcttttaattgatgaatcaacttctacagaaacttttgcagggacagtgttgatgaggcagtttagcttgccagggtgatgataaagcccaggtccctgcatgtatagtgctcttctaaagaatatgcattcttgaactacttaactttttaaaaatcacaataaatttttgcactcaaaatttgcttc

SEQ ID NO: 4734 - DNA, 3111 bp, Homo sapiens
gaagggtgcaaaagtgacactgtgccagggtctccagggccgcggagctccgggacaggcagcgccttccgagctgcacaaacgcgtggggcggggcgtctcyggatccggaagttgcctctgccctcaccaaagatggcggccccggcgccgctygcccacctctcgtaaccaatggaaccgcggcgctcggccgattctckcagrcgccctcagatctacgctctctgatgcaacgccggaatcgcggaaaccgccggtgcacgttggagtcataagacggcgtcggtgttgcagtctgtgtccttggaggtgaccagggccactgcaggcatggtgctagagctgtacgtctctgaccgagagggaagcgatgccacgggagatggaaccaaggagaaaccatttaaaacaggtctaaaggctttgatgacagtagggaaagaaccatttcctaccatttacgtagattcacaaaaagaaaatgagaggtggaatgttatttctaaatcacagttgaagaacattaaaaagatgtggcatagggaacaaatgaagagtgaatcccgggaaaagaaagaggcagaagatagtttacgaagagaaaagaacctggaagaagcaaagaagattaccattaaaaatgatccaagtctcccagagccaaaatgtgtgaagattggtgcgttagaaggatatagaggccaaagagtaaaggtgtttggctgggtccacaggctgcgcaggcaaggaaagaatttaatgtttctggtgttgcgagatggtacaggttatcttcagtgtgtcttggcggatgagttgtgtcagtgctacaatggagttctcttgtccacggagagcagtgttgcagtgtatggaatgctaaatcttaccccaaagggcaagcaggctccaggtggccatgagctgagttgtgacttctgggaactaattgggttggcccctgctggaggagctgacaacctgatcaatgaggagtctgacgttgatgtccagctcaacaacagacacatgatgatccgaggagaaaacatgtccaaaatcctaaaagcacgatccatggtcaccaggtgctttagagatcacttctttgatagggggtactatgaagttactcctccaacattagtgcaaacacaagtagaaggtggtgccacactcttcaagcttgactattttggggaagaggcatttttgactcaatcctctcagttgtacttggagacctgcctcccagccctgggagatgttttttgtattgctcagtcataccgggcagagcagtccagaacacgaaggcacctggctgagtacactcacgtggaagctgagtgtcctttcctgacttttgacgacctcctgaaccggttggaggacttggtttgtgatgtggtagatcgaatattgaagtcacctgcagggagcatagtgcatgagctcaacccgaactttcagccccccaaacggcctttcaaacggatgaactattcagatgctatcgtttggctaaaagaacatgatgtaaagaaagaagatggaactttctatgaatttggagaagatatcccagaagctcctgagagactgatgacagacaccattaatgaaccaatyttgctgtgtcgatttcctgtggagatcaagtccttctacatgcagcgatgtcctgaggattcccgtcttactgaatctgtcgaygtgttgatgcccaatgttggtgagattgtgggaggctcaatgcgtatctttgatagtgaagaaatactggcaggttataaaagggaagggattgaccccactccctattactggtatacggatcagagaaaatacggtacatgtccccatggaggatatggcttgggcttggaacgattcttaacgtggattctgaataggtatcacatccgagacgtgtgcttataccctcgatttgtccagcgttgcacgccataaccattttctccagaagcrtggaggaaagattatgaaaggaacaggctctttaaaaaagaaaacaaaaagcyagaatcttcctttttttgtttcattggggtttctctttctgtttttctttctactaccataaaaactatctcaaatcacctgaacatcaagtgatattaaggttgtcatcttaagaaaaaatatccatttttttcttaagttcgggaaacaaagttcggggaaaatayctggcatgaaactgtagttagggatacatttcagcattttactcactttatccaagttattcattttattcaagttatatgtatgtataattcaacaattttagattatggtgtaagatactccagtaacttatctttctgtccttttaagtgtacctkgaattctttgatttattttattgcatcaatgaattaaaacaaaaatcttgggggaagaaattggcaatatcgtataaaaatctgctcatattagaacacagtataattcagcagtaaacmctagaatcaaatgaatagccttttgtatcagttattaatcttttctaactctgcttagctgctaataatcctgaggcatagaaattgaagaatttgtaaaaatagaattgccttaaaggatttgaagtaagaacataattttggggagagttttttagtgattcacagtatccctcttagcattaatttaaggtaaagaggcagattgattttccctctttcctggtaattcctaagtaattaagaataaataagttccaaaagaaattgtagctggaatcttaataacaattgtgagtggctgtttgagttgcccccmccatgtccttagatytaatctgtgctaccttattaactcacagcaggcttactgaatggcttcatttcagatttagttgatttctccmccaaatgcatgtcatgtattctcaataggctgtattcccagcagtcaataaatgaacacccgtaaaaactctttgctggcttaattttcttaaagctaaacatctctttgtcacattcgttcatgcttttgcaattattttatcttttttatgatgtatatatgtgaaattaagtactactaaatttagtagatattgctaacgttata

SEQ ID NO: 4735 - DNA, 3114 bp, Homo sapiens
gaagggtgcaaaagtgacactgtgccagggtctccagggccgcggagctccgggacaggcagcgccttccgagctgcacaaacgcgtggggcggggcgtctcyggatccggaagttgcctctgccctcaccaaagatggcggccccggcgccgctygcccacctctcgtaaccaatggaaccgcggcgctcggccgattctckcagrcgccctcagatctacgctctctgatgcaacgccggaatcgcggaaaccgccggtgcacgttggagtcataagacggcgtcggtgttgcagtctgtgtccttggaggtgaccagggccactgcaggcatggtgctagcagagctgtacgtctctgaccgagagggaagcgatgccacgggagatggaaccaaggagaaaccatttaaaacaggtctaaaggctttgatgacagtagggaaagaaccatttcctaccatttacgtagattcacaaaaagaaaatgagaggtggaatgttatttctaaatcacagttgaagaacattaaaaagatgtggcatagggaacaaatgaagagtgaatcccgggaaaagaaagaggcagaagatagtttacgaagagaaaagaacctggaagaagcaaagaagattaccattaaaaatgatccaagtctcccagagccaaaatgtgtgaagattggtgcgttagaaggatatagaggccaaagagtaaaggtgtttggctgggtccacaggctgcgcaggcaaggaaagaatttaatgtttctggtgttgcgagatggtacaggttatcttcagtgtgtcttggcggatgagttgtgtcagtgctacaatggagttctcttgtccacggagagcagtgttgcagtgtatggaatgctaaatcttaccccaaagggcaagcaggctccaggtggccatgagctgagttgtgacttctgggaactaattgggttggcccctgctggaggagctgacaacctgatcaatgaggagtctgacgttgatgtccagctcaacaacagacacatgatgatccgaggagaaaacatgtccaaaatcctaaaagcacgatccatggtcaccaggtgctttagagatcacttctttgatagggggtactatgaagttactcctccaacattagtgcaaacacaagtagaaggtggtgccacactcttcaagcttgactattttggggaagaggcatttttgactcaatcctctcagttgtacttggagacctgcctcccagccctgggagatgttttttgtattgctcagtcataccgggcagagcagtccagaacacgaaggcacctggctgagtacactcacgtggaagctgagtgtcctttcctgacttttgacgacctcctgaaccggttggaggacttggtttgtgatgtggtagatcgaatattgaagtcacctgcagggagcatagtgcatgagctcaacccgaactttcagccccccaaacggcctttcaaacggatgaactattcagatgctatcgtttggctaaaagaacatgatgtaaagaaagaagatggaactttctatgaatttggagaagatatcccagaagctcctgagagactgatgacagacaccattaatgaaccaatyttgctgtgtcgatttcctgtggagatcaagtccttctacatgcagcgatgtcctgaggattcccgtcttactgaatctgtcgaygtgttgatgcccaatgttggtgagattgtgggaggctcaatgcgtatctttgatagtgaagaaatactggcaggttataaaagggaagggattgaccccactccctattactggtatacggatcagagaaaatacggtacatgtccccatggaggatatggcttgggcttggaacgattcttaacgtggattctgaataggtatcacatccgagacgtgtgcttataccctcgatttgtccagcgttgcacgccataaccattttctccagaagcrtggaggaaagattatgaaaggaacaggctctttaaaaaagaaaacaaaaagcyagaatcttcctttttttgtttcattggggtttctctttctgtttttctttctactaccataaaaactatctcaaatcacctgaacatcaagtgatattaaggttgtcatcttaagaaaaaatatccatttttttcttaagttcgggaaacaaagttcggggaaaatayctggcatgaaactgtagttagggatacatttcagcattttactcactttatccaagttattcattttattcaagttatatgtatgtataattcaacaattttagattatggtgtaagatactccagtaacttatctttctgtccttttaagtgtacctkgaattctttgatttattttattgcatcaatgaattaaaacaaaaatcttgggggaagaaattggcaatatcgtataaaaatctgctcatattagaacacagtataattcagcagtaaacmctagaatcaaatgaatagccttttgtatcagttattaatcttttctaactctgcttagctgctaataatcctgaggcatagaaattgaagaatttgtaaaaatagaattgccttaaaggatttgaagtaagaacataattttggggagagttttttagtgattcacagtatccctcttagcattaatttaaggtaaagaggcagattgattttccctctttcctggtaattcctaagtaattaagaataaataagttccaaaagaaattgtagctggaatcttaataacaattgtgagtggctgtttgagttgcccccmccatgtccttagatytaatctgtgctaccttattaactcacagcaggcttactgaatggcttcatttcagatttagttgatttctccmccaaatgcatgtcatgtattctcaataggctgtattcccagcagtcaataaatgaacacccgtaaaaactctttgctggcttaattttcttaaagctaaacatctctttgtcacattcgttcatgcttttgcaattattttatcttttttatgatgtatatatgtgaaattaagtactactaaatttagtagatattgctaacgttata

SEQ ID NO: 4736 - DNA, 5826 bp, Homo sapiens
caggtagttccaatttgccagcagaatgagtacagaaagagactcagaaacgacatttgacgaggattctcagcctaatgacgaagtggttccctacagtgatgatgaaacagaagatgaacttgatgaccaggggtctgctgttgaaccagaacaaaaccgagtcaacagggaagcagaggagaaccgggagccattcagaaaagaatgtacatggcaagtcaaagcaaacgatcgcaagtaccacgaacaacctcastttatgaacacaaaattcttgtgtattaaggagagtaaatatgcgaataatgcaattaaaacatacaagtacaacgcatttacctttataccaatgaatctgtttgagcagtttaagagagcagccaatttatatttcctggctcttcttatcttacaggcagttcctcaaatctctaccctggcttggtacaccacactagtgcccctgcttgtggtgctgggcgtcactgcaatcaaagacctggtggacgatgtggctcgccataaaatggataaggaaatcaacaataggacgtgtgaagtcattaaggatggcaggttcaaagttgctaagtggaaagaaattcaagttggagacgtcattcgtctgaaaaaaaatgattttgttccagctgacattctcctgctgtctagctctgagcctaacagcctctgctatgtggaaacagcagaactggayggagaaaccaatttaaaatttaagatgtcacttgaaatcacagaccagtacctccaaagagaagatacattggctacatttgatggttttattgaatgtgaagaacccaataacmgactagataagtttacaggaacactattttggagaaacacaagttttccttyggatgctgataaaattttgttacgtggctgtgtaattaggaacaccgatttctgccacgkcttagtcatttttgcaggtgctgacactaaaataatgaagaatagtgggaaaaccagatttaaaagaactaaaattgattacttgatgaactacatggtttacacgatctttgttgttcttattctgctttctgctggtcttgccatcggccatgcttattgggaagcacaggtgggcaattcctcttggtacctctatgatggagaagacgatacaccctcctaccrtggattcctcattttctggggctatatcattgttctcaacaccatggtacccatctctctctatgtcagcgtggaagtgattcgtcttggacagagtcacttcatcaactgggacctgcaaatgtactatgctgmgaaggacacacccgcaaaagctagaaccaccacactcaatgaacagctcgggcagatccattatatcttctctgataagacggggacactcacacaaaatatcatgacctttaaaaagtgctgtatcaacgggcagatatatggggaccatcgggatgcctctcaacacaaccacaacaaaatagagcaagttgattttagctggaatacatatgctgatgggaagcttgcattttatgaccactatcttattgagcaaatccagtcagggaaagagccagaagtacgacagttcttcttcttgctcgcagtttgccacacagtcatggtggataggactgatggtcagctcaactaccaggcagcctctcccgatgaaggtgccctggtaaacgctgccaggaactttggctttgccttcctcgccaggacccagaacaccrtcaccatcartgaactgggcactgaaaggacttacaatgttcttgccattttggacttcaacagtgaccggaagcgaatgtctatcattgtaagaaccccagaaggcaatatcaagctttactgtaaaggtgctgacactgttatttatgaacggttacatcgaatgaatcctactaagcaagaaacacaggatgccctggatatctttgcaaatgaaactcttagaaccctatgcctttgctacaaggaaaytgaagaaaaagaatttacagaatggaataaaaagtttatggctgccagtgtggcctccaccaaccgggacgaagctctggataaagtatatgaggagattgaaaaagacttaattctcctgggagctacagctattgaagacaagctacaggatggagttccagaaaccatttcaaaacttgcaaaagctgacattaagatctgggtgcttactggagacaaaaaggaaactgctgaaaatataggatttgcttgtgaacttctgactgaagacaccaccatctgctatggggaggatattaattctcttcttcatgcaaggatggaaaaccagaggaatagaggtggcgtctacgcaaagtttgcacctcctgtrcaggaatctttttttccacccggtggaaaccgtgccttaatcatcactggttcttggttgaatgaaattcttctcgagaaaaagaccaagagaaataagattctgaagctgaagttcccaagaacagaagaagaaagacggatgcggacccaaagtaaaaggaggctagaagctaagaaagagcagcggcagaaaaactttgtggacctggcctgcgagtgcagcgcagtcatctgctgccgcgtcacccccaagcagaaggccatggtggtggacctggtgaagaggtacaagaaagccatcackctggccatcggagatggggccaatgacgtgaacatgatcaaaactgcccacattggcgttggaataagtggacaagaaggaatgcaagctgtcatgtcgagtgactattcctttgctcagttccgatatctgcagaggctactgctggtgcatggccgatggtcttacataaggatgtgcaagttcctacratacttcttttacaaaaactttgcctttactttggttcatttctggtactccttcttcaatggctactctgcgcagactgcatacgaggattggttcatcaccctctacaacgtgctgtacaccagcctgcccgtgctcctcatggggctgctcgaccaggatgtgagtgacaaactgagcctccgattccctgggttatacatagtgggacaaagagacttactattcaactataagagattctttgtaagcttgttgcatggggtcctaacatcgatgatcctcttcttcatacctcttggagcttatctgcaaaccgtagggcaggatggagaggcaccttccgactaccagtcttttgccgtcaccattgcctctgctcttgtaataacagtcaatttccagattggcttggatacttcttattggacttttgtgaatgctttttcaatttttggaagcattgcactttattttggcatcatgtttgactttcatagtgctggaatacatgttctctttccatctgcatttcaatttacaggcacagcttcaaacgctctgagacagccatacatttggttaactatcatcctgrctgttgctgtgtgcttactacccgtcgttgccattcgattcctgtcaatgaccatctggccatcagaaagtgataagatccagaagcatcgcaagcggttgaaggcggaggagcagtggcagcgacggcagcaggtgttccgccggggcgtgtcaacgcggcgctcggcctacgccttctcgcaccagcggggctacgcggacctcatctcctccgggcgcagcatccgcaagaagcgctcgccrcttgatgccatcgtggcggatggcaccgcggagtacaggcgcacmggggacagctgatcccttacccccaggctgggatgcggccacaaagcacgtctatttttttatgaaagactctcaggactttgtgtgtgtgtgtgaattgcattcatcacaaagatattgaagacaataaataatctttataacaaactccttgggttggactattaaacaatagcagagccaagaaataggacttttaaaagtcctattattcggccgggcgtggtggctcaggtctgtaatcccagcactttaggaggctgaggaggggagatcacctgaggccaggagttcragaccagcccagccaacatggtgaaaccctgtctctaccataaattaaaaattagccgggcttggtggtgggcacccgtaatcccacctatttgagaagctgaagcagaagaatcgcttgaacctgggagatggaggttacagtgagccgagattgcgccactgcactccagcctgggtgacagagcaagactctgtcttaagaaaaatttaaaaataggccgggcatggtggctcatgcctgtcatcctagcactttgggaggccaaggcaggtggatcacttgaggtcaggagaccagcccrgccaacatggtgaaaccccatctctactaaaaatacaaaaattagctggaaatcgcttgaacctgggaggtggaggttccagtgagccgagatcgtggcactgcactccaacctgagcaacagagtgagacaccagctcaaaaaaaattttttaataataataaaagtcctattattcaactggttatgtacattatggttgaaagggaacgttttaatccagtctcaatccagggcaatagaattacaaagcatgttgtatttcagttcaaatggtattgtattataaaattacagttacattttcctttckgtgatcttcagcataatttcccagaggcccctttttcctccctataggccatcttattaacagattttaaaatttatagtaatgacaaatgacttatcagtgttcatcatctgaaagctaagtggttcgttcaatcactttttcaaagttgatagtagattgcatggtttcatgtttcctcatattggtttattaattctatttaatcaaggaaaataacttcagattccataaagtttcagtttatttttagtttactactaggtgagatagcacattacatacttttactatcaaatattattttagcagcttcccatagtaccaaatgatttgattccctactctcatttyttaaagcatataaatatttatgggcttaaaaagggggtttttaaaaactgaggatatcagtaataaattgcagaatattttgcaaagctttcttttggaaagcaaacttttgtgcctgcctatatgcaaagtattttatcagggacttgaacaaagacctcactctttttcacttgtcttatgtcgagagaaaaggttattggcagccacattcctaagactggggaatggtgtgtccttttaaatttgaagatractttaggtaattatggaaactcctcaaagaggagaaagtaatttttttccagacatttttctcattctgtgtctttcacacactagtttccatagttcgagaattctgttttttaccattgggctgtgaatgttcacaatatcagtcctgttgaattcctatgaggtaatcacaatgtgtatatgttcattttctaggtatgataaaagaatrtatggctttttattctgtggaagtaaaatcctgaacgtttacaacttttccttaacttgtaaataaaaaattgtaagttttttctttttttacagaaaacttagcttgtgtaattctgttagtttcagatttctctcctgtttttgcaaattgtgggaaagattgacaatgcaaatgtgtcaaagacatactgttgggtgcaatattaacaatwttaaatgcaaatttctttggataaattatttctatattctgtaaatctgagatttaatgtatattttgtttaaaaaaatgatttagtaaaatctttgaaaagtatgat

SEQ ID NO: 4737 - DNA, 6295 bp, Homo sapiens
gactccatctcaaaaaataaagcagcaaggttcaggaactcaggcttattttaaaaaaaagaaaatgaagaagaagaaagaaggaaaaggggctggatayggtagctcatgcctgtaatcccagtattttgtgaggccaaggagggaggattgcttgacctcaggagttcaagagcatcctgagcaaactagcaagacctcatctctactaaaaaccaaaaaaattagctgggtgtgatggtgcacacctttagtctcagctacttaggaggctgaggcaggaggatcacttgagcctgggagattgaggctgcagtgagcttgatcaccccagtgtactccagcctaggtgacagagcaagaacttgaatcaacaaccaaaaaaaaaaaaaaaaaggaagaaaaaagaagcaaaccacctcatgtgtatgccacactcacaggaaattaaagatgtgaacaccaaaagcaggtagttccaatttgccagcagaatgagtacagaaagagactcagaaacgacatttgacgaggattctcagcctaatgacgaagtggttccctacagtgatgatgaaacagaagatgaacttgatgaccaggggtctgctgttgaaccagaacaaaaccgagtcaacagggaagcagaggagaaccgggagccattcagaaaagaatgtacatggcaagtcaaagcaaacgatcgcaagtaccacgaacaacctcastttatgaacacaaaattcttgtgtattaaggagagtaaatatgcgaataatgcaattaaaacatacaagtacaacgcatttacctttataccaatgaatctgtttgagcagtttaagagagcagccaatttatatttcctggctcttcttatcttacaggcagttcctcaaatctctaccctggcttggtacaccacactagtgcccctgcttgtggtgctgggcgtcactgcaatcaaagacctggtggacgatgtggctcgccataaaatggataaggaaatcaacaataggacgtgtgaagtcattaaggatggcaggttcaaagttgctaagtggaaagaaattcaagttggagacgtcattcgtctgaaaaaaaatgattttgttccagctgacattctcctgctgtctagctctgagcctaacagcctctgctatgtggaaacagcagaactggayggagaaaccaatttaaaatttaagatgtcacttgaaatcacagaccagtacctccaaagagaagatacattggctacatttgatggttttattgaatgtgaagaacccaataacmgactagataagtttacaggaacactattttggagaaacacaagttttccttyggatgctgataaaattttgttacgtggctgtgtaattaggaacaccgatttctgccacgkcttagtcatttttgcaggtgctgacactaaaataatgaagaatagtgggaaaaccagatttaaaagaactaaaattgattacttgatgaactacatggtttacacgatctttgttgttcttattctgctttctgctggtcttgccatcggccatgcttattgggaagcacaggtgggcaattcctcttggtacctctatgatggagaagacgatacaccctcctaccrtggattcctcattttctggggctatatcattgttctcaacaccatggtacccatctctctctatgtcagcgtggaagtgattcgtcttggacagagtcacttcatcaactgggacctgcaaatgtactatgctgmgaaggacacacccgcaaaagctagaaccaccacactcaatgaacagctcgggcagatccattatatcttctctgataagacggggacactcacacaaaatatcatgacctttaaaaagtgctgtatcaacgggcagatatatggggaccatcgggatgcctctcaacacaaccacaacaaaatagagcaagttgattttagctggaatacatatgctgatgggaagcttgcattttatgaccactatcttattgagcaaatccagtcagggaaagagccagaagtacgacagttcttcttcttgctcgcagtttgccacacagtcatggtggataggactgatggtcagctcaactaccaggcagcctctcccgatgaaggtgccctggtaaacgctgccaggaactttggctttgccttcctcgccaggacccagaacaccrtcaccatcartgaactgggcactgaaaggacttacaatgttcttgccattttggacttcaacagtgaccggaagcgaatgtctatcattgtaagaaccccagaaggcaatatcaagctttactgtaaaggtgctgacactgttatttatgaacggttacatcgaatgaatcctactaagcaagaaacacaggatgccctggatatctttgcaaatgaaactcttagaaccctatgcctttgctacaaggaaaytgaagaaaaagaatttacagaatggaataaaaagtttatggctgccagtgtggcctccaccaaccgggacgaagctctggataaagtatatgaggagattgaaaaagacttaattctcctgggagctacagctattgaagacaagctacaggatggagttccagaaaccatttcaaaacttgcaaaagctgacattaagatctgggtgcttactggagacaaaaaggaaactgctgaaaatataggatttgcttgtgaacttctgactgaagacaccaccatctgctatggggaggatattaattctcttcttcatgcaaggatggaaaaccagaggaatagaggtggcgtctacgcaaagtttgcacctcctgtrcaggaatctttttttccacccggtggaaaccgtgccttaatcatcactggttcttggttgaatgaaattcttctcgagaaaaagaccaagagaaataagattctgaagctgaagttcccaagaacagaagaagaaagacggatgcggacccaaagtaaaaggaggctagaagctaagaaagagcagcggcagaaaaactttgtggacctggcctgcgagtgcagcgcagtcatctgctgccgcgtcacccccaagcagaaggccatggtggtggacctggtgaagaggtacaagaaagccatcackctggccatcggagatggggccaatgacgtgaacatgatcaaaactgcccacattggcgttggaataagtggacaagaaggaatgcaagctgtcatgtcgagtgactattcctttgctcagttccgatatctgcagaggctactgctggtgcatggccgatggtcttacataaggatgtgcaagttcctacratacttcttttacaaaaactttgcctttactttggttcatttctggtactccttcttcaatggctactctgcgcagactgcatacgaggattggttcatcaccctctacaacgtgctgtacaccagcctgcccgtgctcctcatggggctgctcgaccaggatgtgagtgacaaactgagcctccgattccctgggttatacatagtgggacaaagagacttactattcaactataagagattctttgtaagcttgttgcatggggtcctaacatcgatgatcctcttcttcatacctcttggagcttatctgcaaaccgtagggcaggatggagaggcaccttccgactaccagtcttttgccgtcaccattgcctctgctcttgtaataacagtcaatttccagattggcttggatacttcttattggacttttgtgaatgctttttcaatttttggaagcattgcactttattttggcatcatgtttgactttcatagtgctggaatacatgttctctttccatctgcatttcaatttacaggcacagcttcaaacgctctgagacagccatacatttggttaactatcatcctgrctgttgctgtgtgcttactacccgtcgttgccattcgattcctgtcaatgaccatctggccatcagaaagtgataagatccagaagcatcgcaagcggttgaaggcggaggagcagtggcagcgacggcagcaggtgttccgccggggcgtgtcaacgcggcgctcggcctacgccttctcgcaccagcggggctacgcggacctcatctcctccgggcgcagcatccgcaagaagcgctcgccrcttgatgccatcgtggcggatggcaccgcggagtacaggcgcacmggggacagctgatcccttacccccaggctgggatgcggccacaaagcacgtctatttttttatgaaagactctcaggactttgtgtgtgtgtgtgaattgcattcatcacaaagatattgaagacaataaataatctttataacaaactccttgggttggactattaaacaatagcagagccaagaaataggacttttaaaagtcctattattcggccgggcgtggtggctcaggtctgtaatcccagcactttaggaggctgaggaggggagatcacctgaggccaggagttcragaccagcccagccaacatggtgaaaccctgtctctaccataaattaaaaattagccgggcttggtggtgggcacccgtaatcccacctatttgagaagctgaagcagaagaatcgcttgaacctgggagatggaggttacagtgagccgagattgcgccactgcactccagcctgggtgacagagcaagactctgtcttaagaaaaatttaaaaataggccgggcatggtggctcatgcctgtcatcctagcactttgggaggccaaggcaggtggatcacttgaggtcaggagaccagcccrgccaacatggtgaaaccccatctctactaaaaatacaaaaattagctggaaatcgcttgaacctgggaggtggaggttccagtgagccgagatcgtggcactgcactccaacctgagcaacagagtgagacaccagctcaaaaaaaattttttaataataataaaagtcctattattcaactggttatgtacattatggttgaaagggaacgttttaatccagtctcaatccagggcaatagaattacaaagcatgttgtatttcagttcaaatggtattgtattataaaattacagttacattttcctttckgtgatcttcagcataatttcccagaggcccctttttcctccctataggccatcttattaacagattttaaaatttatagtaatgacaaatgacttatcagtgttcatcatctgaaagctaagtggttcgttcaatcactttttcaaagttgatagtagattgcatggtttcatgtttcctcatattggtttattaattctatttaatcaaggaaaataacttcagattccataaagtttcagtttatttttagtttactactaggtgagatagcacattacatacttttactatcaaatattattttagcagcttcccatagtaccaaatgatttgattccctactctcatttyttaaagcatataaatatttatgggcttaaaaagggggtttttaaaaactgaggatatcagtaataaattgcagaatattttgcaaagctttcttttggaaagcaaacttttgtgcctgcctatatgcaaagtattttatcagggacttgaacaaagacctcactctttttcacttgtcttatgtcgagagaaaaggttattggcagccacattcctaagactggggaatggtgtgtccttttaaatttgaagatractttaggtaattatggaaactcctcaaagaggagaaagtaatttttttccagacatttttctcattctgtgtctttcacacactagtttccatagttcgagaattctgttttttaccattgggctgtgaatgttcacaatatcagtcctgttgaattcctatgaggtaatcacaatgtgtatatgttcattttctaggtatgataaaagaatrtatggctttttattctgtggaagtaaaatcctgaacgtttacaacttttccttaacttgtaaataaaaaattgtaagttttttctttttttacagaaaacttagcttgtgtaattctgttagtttcagatttctctcctgtttttgcaaattgtgggaaagattgacaatgcaaatgtgtcaaagacatactgttgggtgcaatattaacaatwttaaatgcaaatttctttggataaattatttctatattctgtaaatctgagatttaatgtatattttgtttaaaaaaatgatttagtaaaatctttgaaaagtatgat

SEQ ID NO: 4738 - DNA, 1950 bp, Homo sapiens
gtaagaaccccagaaggcaatatcaagctttactgtaaaggtgctgacactgttatttatgaacggttacatcgaatgaatcctactaagcaagaaacacaggatgccctggatgaaaytgaagaaaaagaatttacagaatggaataaaaagtttatggctgccagtgtggcctccaccaaccgggacgaagctctggataaagtatatgaggagattgaaaaagacttaattctcctgggagctacagctattgaagacaagctacaggatggagttccagaaaccatttcaaaacttgcaaaagctgacattaagatctgggtgcttactggagacaaaaaggaaactgctgaaaatataggatttgcttgtgaacttctgactgaagacaccaccatctgctatggggaggatattaattctcttcttcatgcaaggatggaaaaccagaggaatagaggtggcgtctacgcaaagtttgcacctcctgtrcaggaatctttttttccacccggtggaaaccgtgccttaatcatcactggttcttggttgaatgaaattcttctcgagaaaaagaccaagagaaataagattctgaagctgaagttcccaagaacagaagaagaaagacggatgcggacccaaagtaaaaggaggctagaagctaagaaagagcagcggcagaaaaactttgtggacctggcctgcgagtgcagcgcagtcatctgctgccgcgtcacccccaagcagaaggccatggtggtggacctggtgaagaggtacaagaaagccatcackctggccatcggagatggggccaatgacgtgaacatgatcaaaactgcccacattggcgttggaataagtggacaagaaggaatgcaagctgtcatgtcgagtgactattcctttgctcagttccgatatctgcagaggctactgctggtgcatggccgatggtcttacataaggatgtgcaagttcctacratacttcttttacaaaaactttgcctttactttggttcatttctggtactccttcttcaatggctactctgcgcagactgcatacgaggattggttcatcaccctctacaacgtgctgtacaccagcctgcccgtgctcctcatggggctgctcgaccaggatgtgagtgacaaactgagcctccgattccctgggttatacatagtgggacaaagagacttactattcaactataagagattctttgtaagcttgttgcatggggtcctaacatcgatgatcctcttcttcatacctcttggagcttatctgcaaaccgtagggcaggatggagaggcaccttccgactaccagtcttttgccgtcaccattgcctctgctcttgtaataacagtcaatttccagattggcttggatacttcttattggacttttgtgaatgctttttcaatttttggaagcattgcactttattttggcatcatgtttgactttcatagtgctggaatacatgttctctttccatctgcatttcaatttacaggcacagcttcaaacgctctgagacagccatacatttggttaactatcatcctgrctgttgctgtgtgcttactacccgtcgttgccattcgattcctgtcaatgaccatctggccatcagaaagtgataagaaaccaaagcgtttcccaacagcacgtttcctgcaaaattctaagctcatgggaagtttgatccagaagcatcgcaagcggttgaaggcggaggagcagtggcagcgacggcagcaggtgttccgccggggcgtgtcaacgcggcgctcggcctacgccttctcgcaccagcggggctacgcggacctcatctcctccgggcgcagcatccgcaagaagcgctcgccrcttgatgccatcgtggcggatggcaccgcggagtacaggcgcacmggggacagc

SEQ ID NO: 4739 - DNA, 1190 bp, Homo sapiens
cgccagcttcagtgtcagctcgcgagccctggcgtcgcgtaggagggaggatggagagcggcgacgaagcggccatcgagaggcaccgcgtccacttgcgctccgccacattgcgcgacgccgtacccgccacactgcatctgctgccctgcgaggttgcggtggacgggcccgccccggtggggcgcttcttcacgcccgccatccgccagggccccgagggactcgaagtgtcgtttcggggccgctgtctacggggagaggaggtggcggtgccgcctggcctcgtgggatacgtgatggtgacagaagagaagaaggtgtcgatggggaagccagaccccttgcgggattccgggactgacgaccaagaggaggagccgctggagcgggacttcgaccgcttcattggagccactgccaacttcagccgcttcaccctgtggggtctggagaccatccctggcccggatgccaaagtgcgtggggccttaacttggcccagccttgcgactcctgttgcagattcacgcacaggtgcccgaggactgagaaccagagcttgaaattcaaagctgcgatcccttcacagcagtaaaccagctctttggaaccgattccatcaccccaataaaggagctcttcacagcacctgtgagtctgggcgccttagagcccctaagccagcatgggccctttccccctccccaccaagaactttgcatggctctggcatatagaaacaatttattgccgggggcaataggggtaagagaagccagaaatttttgcagccagcacccaccccasccccaacttctactttacaaaagaaatttttacaatcaccagccctctgtacagagctcccccatccggatcccttctcactgtacacagctgcctggctccctctggtccctgcttcagaggaggcctgggcctgtggccagctgaccttggagttggtctgagcccggagctcgccttggtgctgggcaccagtgggcccctgccaggcctgtcctctcctttttgagctgtcctcagccccatctcccttagagtgctttgtgggagctgcagtgggggcggggtgggctatcagccccagtcctgctgccgtcttggcactgcagtgggcagtgtctggtcaccacttccccctcttgctccagtccttgggagtg

SEQ ID NO: 4740 - DNA, 1183 bp, Homo sapiens
cgccagcttcagtgtcagctcgcgagccctggcgtcgcgtaggagggaggatggagagcggcgacgaagcggccatcgagaggcaccgcgtccacttgcgctccgccacattgcgcgacgccgtacccgccacactgcatctgctgccctgcgaggttgcggtggacgggcccgccccggtggggcgcttcttcacgcccgccatccgccagggccccgagggactcgaagtgtcgtttcggggccgctgtctacggggagaggaggtggcggtgccgcctggcctcgtgggatacgtgatggtgacagaagagaagaaggtgtcgatggggaagccagaccccttgcgggattccgggactgacgaccaagaggaggagccgctggagcgggacttcgaccgcttcattggagccactgccaacttcagccgcttcaccctgtggggtctggagaccatccctggcccggatgccaaagtgcgtggggccttaacttggcccagccttgcggcagckattcacgcacaggtgcccgaggactgagaaccagagcttgaaattcaaagctgcgatcccttcacagcagtaaaccagctctttggaaccgattccatcaccccaataaaggagctcttcacagcacctgtgagtctgggcgccttagagcccctaagccagcatgggccctttccccctccccaccaagaactttgcatggctctggcatatagaaacaatttattgccgggggcaataggggtaagagaagccagaaatttttgcagccagcacccaccccasccccaacttctactttacaaaagaaatttttacaatcaccagccctctgtacagagctcccccatccggatcccttctcactgtacacagctgcctggctccctctggtccctgcttcagaggaggcctgggcctgtggccagctgaccttggagttggtctgagcccggagctcgccttggtgctgggcaccagtgggcccctgccaggcctgtcctctcctttttgagctgtcctcagccccatctcccttagagtgctttgtgggagctgcagtgggggcggggtgggctatcagccccagtcctgctgccgtcttggcactgcagtgggcagtgtctggtcaccacttccccctcttgctccagtccttgggagtg

SEQ ID NO: 4741 - DNA, 3969 bp, Homo sapiens
gcgccggggccgggtagctgctccaggcgcgcgagctaaccgagtgcggcgagggcctaccaggggcgacaggcacggtttctctccgcaagcgcgcgatgcagcgggcggcggcgctggtccggcggggctgtggtccccggacccccagctcctggggccgcagccagagcagcgcggccgccgaggcctcggcggtgctcaaggtgcggcccgagcgcagccggcgcgagcgcatcctcacgctggagtccatgaacccgcaggtgaaggcggtggagtacgccgtgcggggacccatcgtgctcaaggccggcgagatcgagctcgagctgcagcggggtatcaaaaagccattcacagaggtcatccgagccaacatcggggacgcccaggctatggggcagcagccaatcaccttcctccggcaggtgatggcactatgcacctacccaaacctgctggacagccccagcttcccagaagatgctaagaaacgtgcccggcggatcctgcaggcttgtggcgggaacagcctggggtcctacagtgctagccagggtgtcaactgcatccgtgaagatgtggctgcctacatcaccaggagggatggcggtgtgcctgcggaccccgacaacatctacctgaccacgggagctagtgacggcatttctacgatcctgaagatcctcgtctccgggggcggcaagtcacggacaggtgtgatgatccccatcccacaatatcccctctattcagctgtcatctctgagctcgacgccatccaggtgaattactacctggacgaggagaactgctgggcgctgaatgtgaatgagctccggcgggcggtgcaggaggccaaagaccactgtgatcctaaggtgctctgcataatcaaccctgggaaccccacaggccaggtacaaagcagaaagtgcatagaagatgtgatccactttgcctgggaagagaagctctttctcctggctgatgaggtgtaccaggacaacgtgtactctccagattgcagattccactccttcaagaaggtgctgtacgagatggggcccgagtactccagcaacgtggagctcgcctccttccactccacctccaagggctacatgggcgagtgtggttacagaggaggctacatggaggtgatcaacctgcaccctgagatcaagggccagctggtgaagctgctgtcggtgcgcctgtgccccccagtgtctgggcaggccgccatggacattgtcgtgaacccccckgtggcaggagaggagtcctttgagcaattcagccgagagaaggartcggtcctgggtaatctggccaaaaaagcaaagctgacggaagacctgtttaaccaagtcccaggaattcactgcaaccccttgcagggggccatgtacgccttccctcggatcttcattcctgccaaagctgtggaggctgctcaggcccatcaaatggctccagacatgttctactgcatgaagctcctggaggagactggcatctgtgtcgtgcccggcagtggctttgggcagagggaaggcacttaccacttcaggatgactatcctccctccagtggagaagctgaaaacggtgctgcagaaggtgaaagacttccacatcaacttcctggagaagtacgcgtgaggacgcctgagccccagcgggagacctgtccttggctcttcctcccaatgcccgtcaggctgaactcgcctcccccgtgactytgcctcgggcctcgcagaggccgctggtcacttcgtcatcattttgcccctggagacgtctttctttgtgccttgatgttgagagcgcctctcttttgagcaaacaagcattctatatgcaaccagagtagaggggacctgctcagcaggtgtgaccagggttctctgaatctgttattgtttttgcttctggaaagttcatttggggtttacaacaactaggatgtgttgggtgagatgtttcagatctggagaaatgagcaggtgtcgggaaatgtgtgacttaaccgtggtgagggctggaaatccaaactcaccaccatgatctgtgaaataaagcccttagcggtgtgaagcatccggtcctttgaacagaagggcctggaaggcccctggggctgagaaagggtccgcccggtggcctggaggcaggcgccrggagcgcagtagcacgtggactgggcaggatgttgcactagcttggggtagatgctgggggctgcggccacggtcagagggccccactgtgaggcgtgggtgtgagccaggctgcaggaggaactgggcctccgcttcccagcaacgcagccaggcctgagaattctgtgcgcccggcgggctttgggaatgaggggttcccttgaacatgcgtaggctggaaccccgtctgagaggtctccctgaatttcagtgacacatagtgcagcccggcagtgtcccacttccgtggagagagccgctggaatggtgtggacccatcccgcgggtgaccggtgcctgttctcccctgaccgagcctgtgagcacatcgccccctgctggcgacagcggggaaatgagggctgaaaatatcctccccacaagggcaatccccgggacctgccgagcagccaaggccctgtcctttcttgaatggtggcgagctgaatctggtcggtttcctagcttttaggtggtaaaagtgcctggcagcttggctgccgtggaggagtcagtcgtggttggaggttcattgccgtgctttcatgcagagtgttttgccttcatgttagcttccggctcccctcccaggctgcagactctgacctgtggcatcaggcttctcccagtacaggagggtgccatcccccagcatgcggcttctctgccattagcagccctgggcgggccgaccacactcgaggctgcggtgctacgggcttagccctcgcctccctcactgggagcttccccatcctccctgccttccccagtgggaagttagggaagctcaggagcctgggaccccgcatgtcccaaaatgggattggagaagctggagagaaagcagaagaggccgaggagtgaggcagcagcctctatgcttgatttccacaccgggtccgtgcagaggaaacagaaactcccaactgtccttacccaccgacatcacagcccctatgaagaaagtagccacaatctcaaataacaaaagggaatgttctaaaactttttcttccttaaaaaatggagaaaattgcacttgtgcttgctgtgtggtatataaaccaggattagtcccagggtcgtgaggtttctggtgaaaaggttaaatcgtagaagctagtatattttttatatttttgtaacaattgcttttttcatgggggaggcggggttagtatttatagtcctaacaagtccagtaattttttataaatcttcagattataaacagcccctaaaaactttacaacgtttacacagttttttaaaaagagactgtatacacttgatttgctttcaaaataaataaggtcagctagtctaggaggttaacgtcgggtaggaatgctgatcatgataggtttggttttctacagattctgttccggtgcctttcctatccaggcaccacctgagaaagttgtcatttgaggtcgcacttggaagttacatctgtgaagtttctgtcattcgtccagatctgtgtgtgtagcatgtgctgaggaagcacgtgctgggctgtgcctcagacagtgcatcaccgggcacccagaggcttgcctggctattcctgttctggtgtgtgtggagtgttggggaggaacagatgcagatcaacctgtggctgttttcccgtctaggttctcacaggtatctcctgacagaggtacttaacaatggctctgctggaaatttctatraataaaatgtccaaaatggtgactgcgttt

SEQ ID NO: 4742 - DNA, 3985 bp, Homo sapiens
gcgcggggatgcggctgtgggcgccggggccgggtagctgctccaggcgcgcgagctaaccgagtgcggcgagggcctaccaggggcgacagggtttctctccgcaagcgcgcgatgcagcgggcggcggcgctggtccggcggggctgtggtccccggacccccagctcctggggccgcagccagagcagcgcggccgccgaggcctcggcggtgctcaaggtgcggcccgagcgcagccggcgcgagcgcatcctcacgctggagtccatgaacccgcaggtgaaggcggtggagtacgccgtgcggggacccatcgtgctcaaggccggcgagatcgagctcgagctgcagcggggtatcaaaaagccattcacagaggtcatccgagccaacatcggggacgcccaggctatggggcagcagccaatcaccttcctccggcaggtgatggcactatgcacctacccaaacctgctggacagccccagcttcccagaagatgctaagaaacgtgcccggcggatcctgcaggcttgtggcgggaacagcctggggtcctacagtgctagccagggtgtcaactgcatccgtgaagatgtggctgcctacatcaccaggagggatggcggtgtgcctgcggaccccgacaacatctacctgaccacgggagctagtgacggcatttctacgatcctgaagatcctcgtctccgggggcggcaagtcacggacaggtgtgatgatccccatcccacaatatcccctctattcagctgtcatctctgagctcgacgccatccaggtgaattactacctggacgaggagaactgctgggcgctgaatgtgaatgagctccggcgggcggtgcaggaggccaaagaccactgtgatcctaaggtgctctgcataatcaaccctgggaaccccacaggccaggtacaaagcagaaagtgcatagaagatgtgatccactttgcctgggaagagaagctctttctcctggctgatgaggtgtaccaggacaacgtgtactctccagattgcagattccactccttcaagaaggtgctgtacgagatggggcccgagtactccagcaacgtggagctcgcctccttccactccacctccaagggctacatgggcgagtgtggttacagaggaggctacatggaggtgatcaacctgcaccctgagatcaagggccagctggtgaagctgctgtcggtgcgcctgtgccccccagtgtctgggcaggccgccatggacattgtcgtgaacccccckgtggcaggagaggagtcctttgagcaattcagccgagagaaggartcggtcctgggtaatctggccaaaaaagcaaagctgacggaagacctgtttaaccaagtcccaggaattcactgcaaccccttgcagggggccatgtacgccttccctcggatcttcattcctgccaaagctgtggaggctgctcaggcccatcaaatggctccagacatgttctactgcatgaagctcctggaggagactggcatctgtgtcgtgcccggcagtggctttgggcagagggaaggcacttaccacttcaggatgactatcctccctccagtggagaagctgaaaacggtgctgcagaaggtgaaagacttccacatcaacttcctggagaagtacgcgtgaggacgcctgagccccagcgggagacctgtccttggctcttcctcccaatgcccgtcaggctgaactcgcctcccccgtgactytgcctcgggcctcgcagaggccgctggtcacttcgtcatcattttgcccctggagacgtctttctttgtgccttgatgttgagagcgcctctcttttgagcaaacaagcattctatatgcaaccagagtagaggggacctgctcagcaggtgtgaccagggttctctgaatctgttattgtttttgcttctggaaagttcatttggggtttacaacaactaggatgtgttgggtgagatgtttcagatctggagaaatgagcaggtgtcgggaaatgtgtgacttaaccgtggtgagggctggaaatccaaactcaccaccatgatctgtgaaataaagcccttagcggtgtgaagcatccggtcctttgaacagaagggcctggaaggcccctggggctgagaaagggtccgcccggtggcctggaggcaggcgccrggagcgcagtagcacgtggactgggcaggatgttgcactagcttggggtagatgctgggggctgcggccacggtcagagggccccactgtgaggcgtgggtgtgagccaggctgcaggaggaactgggcctccgcttcccagcaacgcagccaggcctgagaattctgtgcgcccggcgggctttgggaatgaggggttcccttgaacatgcgtaggctggaaccccgtctgagaggtctccctgaatttcagtgacacatagtgcagcccggcagtgtcccacttccgtggagagagccgctggaatggtgtggacccatcccgcgggtgaccggtgcctgttctcccctgaccgagcctgtgagcacatcgccccctgctggcgacagcggggaaatgagggctgaaaatatcctccccacaagggcaatccccgggacctgccgagcagccaaggccctgtcctttcttgaatggtggcgagctgaatctggtcggtttcctagcttttaggtggtaaaagtgcctggcagcttggctgccgtggaggagtcagtcgtggttggaggttcattgccgtgctttcatgcagagtgttttgccttcatgttagcttccggctcccctcccaggctgcagactctgacctgtggcatcaggcttctcccagtacaggagggtgccatcccccagcatgcggcttctctgccattagcagccctgggcgggccgaccacactcgaggctgcggtgctacgggcttagccctcgcctccctcactgggagcttccccatcctccctgccttccccagtgggaagttagggaagctcaggagcctgggaccccgcatgtcccaaaatgggattggagaagctggagagaaagcagaagaggccgaggagtgaggcagcagcctctatgcttgatttccacaccgggtccgtgcagaggaaacagaaactcccaactgtccttacccaccgacatcacagcccctatgaagaaagtagccacaatctcaaataacaaaagggaatgttctaaaactttttcttccttaaaaaatggagaaaattgcacttgtgcttgctgtgtggtatataaaccaggattagtcccagggtcgtgaggtttctggtgaaaaggttaaatcgtagaagctagtatattttttatatttttgtaacaattgcttttttcatgggggaggcggggttagtatttatagtcctaacaagtccagtaattttttataaatcttcagattataaacagcccctaaaaactttacaacgtttacacagttttttaaaaagagactgtatacacttgatttgctttcaaaataaataaggtcagctagtctaggaggttaacgtcgggtaggaatgctgatcatgataggtttggttttctacagattctgttccggtgcctttcctatccaggcaccacctgagaaagttgtcatttgaggtcgcacttggaagttacatctgtgaagtttctgtcattcgtccagatctgtgtgtgtagcatgtgctgaggaagcacgtgctgggctgtgcctcagacagtgcatcaccgggcacccagaggcttgcctggctattcctgttctggtgtgtgtggagtgttggggaggaacagatgcagatcaacctgtggctgttttcccgtctaggttctcacaggtatctcctgacagaggtacttaacaatggctctgctggaaatttctatraataaaatgtccaaaatggtgactgcgttt

SEQ ID NO: 4743 - DNA, 3954 bp, Homo sapiens
ggccgcgtgccgggcgtgccatctgccgctccgctgcaaggtctcgcccgggaccggggctggcggagcgcgcgcccgcgagtaggggccgggccggggaccccgcctaggcggcggcggccgggtccccaaggctgggcgctgcttgcggaaccgacggggcggagaggagcgtggcgggaggaggagtaggagaagggggctggtcaagggaagtgcgacgtgtctgcggagcctttttatacctccttcccgggagtccggcagccgctgctgctgctgctgctgctgctgctgccgccgccgccgccgccgtccctgcgtccttcggtctctgctcccgggacccgggctccgccgcagccagccagcatgtcggggatcaagaagcaaaagacgragaaccagcagaaatccaccaatgtagtctatcaggcccaccatgtgagcaggaataagagagggcaagtggttggaacaaggggtgggttccgaggatgtaccgtgtggctaacaggtctctctggtgctggaaaaacaacgataagttttgccctggaggagtaccttgtctcccatgccatcccttgttactccctggatggggacaatgtccgtcatggccttaacagaaatctcggattctctcctggggacagagaggaaaatatccgccggattgctgaggtggctaagctgtttgctgatgctggtctggtctgcattaccagctttatttctccattcgcaaaggatcgtgagaatgcccgcaaaatacatgaatcagcagggctgccattctttgaaatatttgtagatgcacctctaaatatttgtgaaagcagagacgtaaaaggcctctataaaagggccagagctggggagattaaaggatttacaggtattgattctgattatgagaaacctgaaactcctgagcgtgtgcttaaaaccaatttgtccacagtgagtgactgtgtccaccaggtagtggaacttctgcaagagcagaacattgtaccctatactataatcaaagatatccacgaactctttgtgccggaaaacaaacttgaccacgtccgagctgaggctgaaactctcccttcattatcaattactaagctggatctccagtgggtccaggttttgagcgaaggctgggccactcccctcaaaggtttcatgcgggagaaggagtacttacaggttatgcactttgacaccctgctagatgatggcgtgatcaacatgagcatccccattgtactgcccgtctctgcagaggataagacacggctggaagggtgcagcaagtttgtcctggcacatggtggacggagggtagctatcttacgagacgctgaattctatgaacacagaaaagaggaacgctgttcccgtgtttgggggacaacatgtacaaaacacccccatatcaaaatggtgatggaaagtggggactggctggttggtggagaccttcaggtgctggagaaaataagatggaatgatgggctggaccaataccgtctgacacctctggagctcaaacagaaatgtaaagaaatgaatgctgatgcggtgtttgcattccagttgcgcaatcctgtccacaatggccatgccctgttgatgcaggacactcgccgcaggctcctagagaggggctacaagcacccggtcctcctactacaccctctgggcggctggaccaaggatgacgatgtgcctctagactggcggatgaagcagcacgyggctgtgctcgaggaaggggtcctggatcccaagtmaaccattgttgccatctttccgtctcccatgttatatgctggccccacagaggtccagtggcactgcaggtcccggatgattgcgggtgccaatttctacattgtggggagggaccctgcaggaatgccccatcctgaaaccaagaaggatctgtatgaacccactcatgggggcaaggtcttgagcatggcccctggcctcacctctgtggaaatcattccattccgagtggctgcctacaacaaagccaaaaaagccatggacttctatgatccagcaaggcacaatgagtttgacttcatctcaggaactcgaatgaggaagctcgcccgggaaggagagaatcccccagatggcttcatggcccccaaagcatggaaggtcctgacagattattacaggtccctggagaagaactaagcctttggstccagagtttctttctgaagtgctctttgattaccttttctatttttatgattagatgctttgtattaaattgcttctcaatgatgcattttaatcttttataatgaagtaaaagttgtgtctataattaaaaaaawatatatatatatacacacacacatatacatacaaagtcaaactgaagaccaaatcttagcaggtaaaagcaatattcttatacatttcataataaaattagctctatgtattttctactgcacctgagcaggcaggtcccagatttcttaaggctttgtttgaccatgtgtctagttacttgctgaaaagtgaatatattttccagcatgtcttgacaacctgtactcttccaatgtcatttatcagttgtaaaatatatcagattgtgtcctcttctgtacaattgaccaaaaaaaaaaaatttttttttctcactctaaaagaggtgtggctcacatcaagattcttcctgatattttacctcatgctgtacaaagccttaatgttgtaatcatatcttacgtgttgaagacctgactggagaaacaaaatgtgcaataacgtgaattttatcttagagatctgtgcagcctatttctgtcacaaaagttatattgtctaataagagaagtcttaatggcctctgtgaataatgtaactccagttacacggtgacttttaatagcatacagtgatttgatgaaaggacgtcaaacaatgtggcgatgtcgtggaaagttatctttcccgctctttgctgtggtcattgtgtcttgcagaaaggatggccctgatgcagcagcagcgccagctgtaataaaaaataattcacactatcagactagcaaggcactagaactggaraagaccacagaaaacaaagaatccaaccctttcatcttacaggtgaacaaactgtgatgatgcacatgtatgtgttttgtaagctgtgagcaccgtaacaaaatgtaaatttgccattattaggaagtgctggtggcagtgaagaagcacccaggccacttgactcccagtctggtgccctgtctacaccagacaacacaggagctgggtcagattcccctcagctgcttaacaaagttcctcgaacagaaagtgcttacaaagctgccttctcggatactgaaaggtcgagttttctgaactgcactgattttattgcagttgaaaaaaaaaaaaagctattccaaagatttcaagctgttctgagacatcttctgatggctttacttcctgagaggcaatgtttttactttatgcataattcattgttgccaaggaataaagtgaagaaacagcaccttttaatatataggtctctctggaagagacctaaattagaaagagaaaactgtgacaattttcatattctcattcttaaaaaacactaatcttaactaacaaaagttcttttgagaataagttacacacaatggccacagcagtttgtctttaatagtatagtgcctatactcatgtaatcggttactcactactgcctttaaaaaaaaaaamcagcatatttattgaaaacatgagacaggattatagtgccttaaccgatatattttgtgacttaaaaaatacatttaaaactgctcttctgctctagtaccatgcttagtgcaaatgattatttctatgtacaactgatgcttgttcttattttaataaatttatcagagtgaa

SEQ ID NO: 4744 - DNA, 3943 bp, Homo sapiens
ggccgcgtgccgggcgtgccatctgccgctccgctgcaaggtctcgcccgggaccggggctggcggagcgcgcgcccgcgagtaggggccgggccggggaccccgcctaggcggcggcggccgggtccccaaggctgggcgctgcttgcggaaccgacggggcggagaggagcgtggcgggaggaggagtaggagaagggggctggtcaagggaagtgcgacgtgtctgcggagcctttttatacctccttcccgggagtccggcagccgctgctgctgctgctgctgctgctgctgccgccgccgccgccgccgtccctgcgtccttcggtctctgctcccgggacccgggctccgccgcagccagccagcatgtcggggatcaagaagcaaaagacgragaaccagcagaaatccaccaatgtagtctatcaggcccaccatgtgagcaggaataagagagggcaagtggttggaacaaggggtgggttccgaggatgtaccgtgtggctaacaggtctctctggtgctggaaaaacaacgataagttttgccctggaggagtaccttgtctcccatgccatcccttgttactccctggatggggacaatgtccgtcatggccttaacagaaatctcggattctctcctggggacagagaggaaaatatccgccggattgctgaggtggctaagctgtttgctgatgctggtctggtctgcattaccagctttatttctccattcgcaaaggatcgtgagaatgcccgcaaaatacatgaatcagcagggctgccattctttgaaatatttgtagatgcacctctaaatatttgtgaaagcagagacgtaaaaggcctctataaaagggccagagctggggagattaaaggatttacaggtattgattctgattatgagaaacctgaaactcctgagcgtgtgcttaaaaccaatttgtccacagtgagtgactgtgtccaccaggtagtggaacttctgcaagagcagaacattgtaccctatactataatcaaagatatccacgaactctttgtgccggaaaacaaacttgaccacgtccgagctgaggctgaaactctcccttcattatcaattactaagctggatctccagtgggtccaggttttgagcgaaggctgggccactcccctcaaaggtttcatgcgggagaaggagtacttacaggttatgcactttgacaccctgctagatgcacatggctctttccacagatggcgtgatcaacatgagcatccccattgtactgcccgtctctgcagaggataagacacggctggaagggtgcagcaagtttgtcctggcacatggtggacggagggtagctatcttacgagacgctgaattctatgaacacagaaaagaggaacgctgttcccgtgtttgggggacaacatgtacaaaacacccccatatcaaaatggtgatggaaagtggggactggctggttggtggagaccttcaggtgctggagaaaataagatggaatgatgggctggaccaataccgtctgacacctctggagctcaaacagaaatgtaaagaaatgaatgctgatgcggtgtttgcattccagttgcgcaatcctgtccacaatggccatgccctgttgatgcaggacactcgccgcaggctcctagagaggggctacaagcacccggtcctcctactacaccctctgggcggctggaccaaggatgacgatgtgcctctagactggcggatgaagcagcacgyggctgtgctcgaggaaggggtcctggatcccaagtmaaccattgttgccatctttccgtctcccatgttatatgctggccccacagaggtccagtggcactgcaggtcccggatgattgcgggtgccaatttctacattgtggggagggaccctgcaggaatgccccatcctgaaaccaagaaggatctgtatgaacccactcatgggggcaaggtcttgagcatggcccctggcctcacctctgtggaaatcattccattccgagtggctgcctacaacaaagccaaaaaagccatggacttctatgatccagcaagttctttgttgccaccctgtaacaggcacaatgagtttgacttcatctcaggaactcgaatgaggaagctcgcccgggaaggagagaatcccccagatggcttcatggcccccaaagcatggaaggtcctgacagattattacaggtccctggagaagaactaagcctttggstccagagtttctttctgaagtgctctttgattaccttttctatttttatgattagatgctttgtattaaattgcttctcaatgatgcattttaatcttttataatgaagtaaaagttgtgtctataattaaaaaaawatatatatatatacacacacacatatacatacaaagtcaaactgaagaccaaatcttagcaggtaaaagcaatattcttatacatttcataataaaattagctctatgtattttctactgcacctgagcaggcaggtcccagatttcttaaggctttgtttgaccatgtgtctagttacttgctgaaaagtgaatatattttccagcatgtcttgacaacctgtactcttccaatgtcatttatcagttgtaaaatatatcagattgtgtcctcttctgtacaattgacattcttcctgatattttacctcatgctgtacaaagccttaatgttgtaatcatatcttacgtgttgaagacctgactggagaaacaaaatgtgcaataacgtgaattttatcttagagatctgtgcagcctatttctgtcacaaaagttatattgtctaataagagaagtcttaatggcctctgtgaataatgtaactccagttacacggtgacttttaatagcatacagtgatttgatgaaaggacgtcaaacaatgtggcgatgtcgtggaaagttatctttcccgctctttgctgtggtcattgtgtcttgcagaaaggatggccctgatgcagcagcagcgccagctgtaataaaaaataattcacactatcagactagcaaggcactagaactggaraagaccacagaaaacaaagaatccaaccctttcatcttacaggtgaacaaactgtgatgatgcacatgtatgtgttttgtaagctgtgagcaccgtaacaaaatgtaaatttgccattattaggaagtgctggtggcagtgaagaagcacccaggccacttgactcccagtctggtgccctgtctacaccagacaacacaggagctgggtcagattcccctcagctgcttaacaaagttcctcgaacagaaagtgcttacaaagctgccttctcggatactgaaaggtcgagttttctgaactgcactgattttattgcagttgaaaaaaaaaaaaagctattccaaagatttcaagctgttctgagacatcttctgatggctttacttcctgagaggcaatgtttttactttatgcataattcattgttgccaaggaataaagtgaagaaacagcaccttttaatatataggtctctctggaagagacctaaattagaaagagaaaactgtgacaattttcatattctcattcttaaaaaacactaatcttaactaacaaaagttcttttgagaataagttacacacaatggccacagcagtttgtctttaatagtatagtgcctatactcatgtaatcggttactcactactgcctttaaaaaaaaaaamcagcatatttattgaaaacatgagacaggattatagtgccttaaccgatatattttgtgacttaaaaaatacatttaaaactgctcttctgctctagtaccatgcttagtgcaaatgattatttctatgtacaactgatgcttgttcttattttaataaatttatcagagtgaa

SEQ ID NO: 4745 - DNA, 3930 bp, Homo sapiens
ggccgcgtgccgggcgtgccatctgccgctccgctgcaaggtctcgcccgggaccggggctggcggagcgcgcgcccgcgagtaggggccgggccggggaccccgcctaggcggcggcggccgggtccccaaggctgggcgctgcttgcggaaccgacggggcggagaggagcgtggcgggaggaggagtaggagaagggggctggtcaagggaagtgcgacgtgtctgcggagcctttttatacctccttcccgggagtccggcagccgctgctgctgctgctgctgctgctgctgccgccgccgccgccgccgtccctgcgtccttcggtctctgctcccgggacccgggctccgccgcagccagccagcatgtcggggatcaagaagcaaaagacgragaaccagcagaaatccaccaatgtagtctatcaggcccaccatgtgagcaggaataagagagggcaagtggttggaacaaggggtgggttccgaggatgtaccgtgtggctaacaggtctctctggtgctggaaaaacaacgataagttttgccctggaggagtaccttgtctcccatgccatcccttgttactccctggatggggacaatgtccgtcatggccttaacagaaatctcggattctctcctggggacagagaggaaaatatccgccggattgctgaggtggctaagctgtttgctgatgctggtctggtctgcattaccagctttatttctccattcgcaaaggatcgtgagaatgcccgcaaaatacatgaatcagcagggctgccattctttgaaatatttgtagatgcacctctaaatatttgtgaaagcagagacgtaaaaggcctctataaaagggccagagctggggagattaaaggatttacaggtattgattctgattatgagaaacctgaaactcctgagcgtgtgcttaaaaccaatttgtccacagtgagtgactgtgtccaccaggtagtggaacttctgcaagagcagaacattgtaccctatactataatcaaagatatccacgaactctttgtgccggaaaacaaacttgaccacgtccgagctgaggctgaaactctcccttcattatcaattactaagctggatctccagtgggtccaggttttgagcgaaggctgggccactcccctcaaaggtttcatgcgggagaaggagtacttacaggttatgcactttgacaccctgctagatgttttcgtgcatcacatggctctttccacagatggcgtgatcaacatgagcatccccattgtactgcccgtctctgcagaggataagacacggctggaagggtgcagcaagtttgtcctggcacatggtggacggagggtagctatcttacgagacgctgaattctatgaacacagaaaagaggaacgctgttcccgtgtttgggggacaacatgtacaaaacacccccatatcaaaatggtgatggaaagtggggactggctggttggtggagaccttcaggtgctggagaaaataagatggaatgatgggctggaccaataccgtctgacacctctggagctcaaacagaaatgtaaagaaatgaatgctgatgcggtgtttgcattccagttgcgcaatcctgtccacaatggccatgccctgttgatgcaggacactcgccgcaggctcctagagaggggctacaagcacccggtcctcctactacaccctctgggcggctggaccaaggatgacgatgtgcctctagactggcggatgaagcagcacgyggctgtgctcgaggaaggggtcctggatcccaagtmaaccattgttgccatctttccgtctcccatgttatatgctggccccacagaggtccagtggcactgcaggtcccggatgattgcgggtgccaatttctacattgtggggagggaccctgcaggaatgccccatcctgaaaccaagaaggatctgtatgaacccactcatgggggcaaggtcttgagcatggcccctggcctcacctctgtggaaatcattccattccgagtggctgcctacaacaaagccaaaaaagccatggacttctatgatccagcaaggcacaatgagtttgacttcatctcaggaactcgaatgaggaagctcgcccgggaaggagagaatcccccagatggcttcatggcccccaaagcatggaaggtcctgacagattattacaggtccctggagaagaactaagcctttggstccagagtttctttctgaagtgctctttgattaccttttctatttttatgattagatgctttgtattaaattgcttctcaatgatgcattttaatcttttataatgaagtaaaagttgtgtctataattaaaaaaawatatatatatatacacacacacatatacatacaaagtcaaactgaagaccaaatcttagcaggtaaaagcaatattcttatacatttcataataaaattagctctatgtattttctactgcacctgagcaggcaggtcccagatttcttaaggctttgtttgaccatgtgtctagttacttgctgaaaagtgaatatattttccagcatgtcttgacaacctgtactcttccaatgtcatttatcagttgtaaaatatatcagattgtgtcctcttctgtacaattgacattcttcctgatattttacctcatgctgtacaaagccttaatgttgtaatcatatcttacgtgttgaagacctgactggagaaacaaaatgtgcaataacgtgaattttatcttagagatctgtgcagcctatttctgtcacaaaagttatattgtctaataagagaagtcttaatggcctctgtgaataatgtaactccagttacacggtgacttttaatagcatacagtgatttgatgaaaggacgtcaaacaatgtggcgatgtcgtggaaagttatctttcccgctctttgctgtggtcattgtgtcttgcagaaaggatggccctgatgcagcagcagcgccagctgtaataaaaaataattcacactatcagactagcaaggcactagaactggaraagaccacagaaaacaaagaatccaaccctttcatcttacaggtgaacaaactgtgatgatgcacatgtatgtgttttgtaagctgtgagcaccgtaacaaaatgtaaatttgccattattaggaagtgctggtggcagtgaagaagcacccaggccacttgactcccagtctggtgccctgtctacaccagacaacacaggagctgggtcagattcccctcagctgcttaacaaagttcctcgaacagaaagtgcttacaaagctgccttctcggatactgaaaggtcgagttttctgaactgcactgattttattgcagttgaaaaaaaaaaaaagctattccaaagatttcaagctgttctgagacatcttctgatggctttacttcctgagaggcaatgtttttactttatgcataattcattgttgccaaggaataaagtgaagaaacagcaccttttaatatataggtctctctggaagagacctaaattagaaagagaaaactgtgacaattttcatattctcattcttaaaaaacactaatcttaactaacaaaagttcttttgagaataagttacacacaatggccacagcagtttgtctttaatagtatagtgcctatactcatgtaatcggttactcactactgcctttaaaaaaaaaaamcagcatatttattgaaaacatgagacaggattatagtgccttaaccgatatattttgtgacttaaaaaatacatttaaaactgctcttctgctctagtaccatgcttagtgcaaatgattatttctatgtacaactgatgcttgttcttattttaataaatttatcagagtgaa

SEQ ID NO: 4746 - DNA, 3313 bp, Homo sapiens
gttacttggagtgatatagcaggtttagatgatgtcattacggatctgaaagacacagtcatcttacctatcaaaaagaaacatttgtttgagaattccaggcttctgcagcctccaaaaggtgttcttctctatgggcctccaggctgtggtaaaacgttgattgccaaggccacagccaaagaagcaggctgtcgatttattaaccttcagccttcgacactgaccgataagtggtatggagaatctcagaaattggctgctgctgtcttctcccttgccataaagctacaaccatccatcatctttatagatgaaatagactcctttctacgaaaccgttcaagttctgaccatgaagctacagccatgatgaaagctcagtttatgagtctctgggatggattggatactgatcacagctgccaggtcatagtaatgggagctaccaatcgtcctcaggaccttgactcggctataatgagaagaatgcctacaagatttcatatcaaccagcctgctttaaaacagagagaagcaatcctgaaactcatcttgaaaaatgaaaatgtggataggcatgtagacctgctagaagttgcccaggaaactgatgggttttcaggaagtgacctaaaagagatgtgtcgagatgctgccctcctctgtgttagagaatatgttaattctacatcagaagaaagccatgacgaagatgaaattcggcctgttcaacagcaggacctgcatcgggcaattgaaaagatgaagaaatcaaaggatgcagcatttcagaatgttttaacacatgtttgtttagattaagagtaaagatcatttgtacagttcagtgatctagtttggtgtgtcctcttatcagttagtggaaatagaacggaaagagtgctctttaaacaatgagggagctcagtgtttatggttttatactctgaattctaagttattgagatatagttgttacataggtggtattactgttggtcaaaaatcatgaggaggaacagttgaatccagcctgaacgtgggtgcttgtgtttgaccttttcagccatatattgtacagccttatagaatctaagctggtcttaaagtcataaatgattcattgggtcattagtgagaaacggggatgtggttaggtgctggttcctagacatgtgagtatgcgtttgtgtgtgtgcgtgtatgtatgtgtatattaaatgtatatatccacacattttatattgacattctgtagatatgtttgaatatagaaactttttttaccccaactactgaatccaggagtaccaaataatatatagtaaaactaagatttaaggttgtgtcaaaaaggtacagtgattcagccatttccatttgtcatttgtttcaaccttttttaagttgagtgtttttatttctgcagttattagttggatcctccacatcttgcatatatacatgggctcaattattatgtttgtcaggataatcaaatgaaaatactagttcagtgatcagcattgaatggttgttaggcagccatgtgctcaacactgatttcacctcttgagtataaactttttaaatttaaattggtttacatgaaagtggattaaaaggcctttcaaaagaatgggtttgaaaaacctcagtaccctttaatacatgtacatttctttccttttttcatttaatgtaacatgtctgttgtaactatgtttcttaaatattattttaaggttatgtgttctttaattatggtcaaatataatttggtcaccaaaaatgaaataatagtttaaaacaartagctgttactaagtgtgctaaaaatactcattttataattaattttagttttcttagtatattattataaattgtgccctaagtcaggtacaaatgtacacatcaaaatgcccatattgtatctatctgtagtcgtttaatgtgaattatatgtgaatttttttcaaaattttactaaccagaattctgttataggcacctaaccacgcagcatgaggaaaacggcacaacacaatcttgaggtgccttctgaatcatcagattaaattatgcttcatatgtttttgcttttactgtatttctttaaaaactctaaatctttattcatgtgtyactggattaatttatctgataatgtgtctcacaagaatctgttagatcgtttattcttcagttgtactttgaatggtggggtggaagtttcaggtgaacaatggataacaaaaagcaagttatggaagattgtgaagaggatggaaaaactgaatacaagataccaaaaatgaaaaaaagtgtcccatttttaataactatattctattattttataaatgtgtaataaaggggtccctctttattggttgttctccacttaatctttggtctttttcrgtaattttaagttttctgggattttttttggtttataaaacttgtgtttagactttatcttgctatggagttttcacacttctatagcacatatcctagtatctagtcatttctgttttaatatgaatttcagtaatttaattttaatctggtgacatattaatcgaaaataaggagtaatgtatacctccacatgtcctttctttttgtcttctcttaaattcacaatatccagtaggagtggttattcaatttcttcgtggttttaatcatcaaatgaagttagagaagtatactaatcccagcaactatgactcatctaggcatgttaagaccataaagtaattcaggaaactattttcctgatttttaaataacttttagtgttatgtaacatctatccttctgttttagacatgcatttcacatatagttgaattctagattctaagataattcattttgggtaatacttcagagtactggatctagaatcaggcttcctgaatttaaactcaggctccccatthactgtgtgtctgtgagcccagtttctcatctgtaaaatggggcaacagtggcactcatcttaaagggttggataataaaataatgcatgtaaggccctcagcatagtgcctggcacagaattactgctcaaatgttagctgtcgtattaatattgtcacttttgcacactgatgtacatttcctgttgaccaggctcattctttaagcattctccatgcttaaaccagttccataatccctaggcctgtactccagggattgagactgaaaggatcatttatgccatgtttctctaaaagcatcattgctggaagacttttgataagtctgatgtgtctcaagctattctcag

SEQ ID NO: 4747 - DNA, 3744 bp, Homo sapiens
ctcccaggttgcgtttccttcctgtgtgaggccggctgagggcacttgctcttgctgtttctgcccctgggttaacattcaagatggtacatgctgaagccttttctcgtcctttgagtcggaatgaagttgttggtttaattttccgtttgacaatatttggtgcagtgacatactttactatcaaatggatggtagatgcaattgatccaaccagaaagcaaaaagtagaagctcagaaacaggcagaaaaactaatgaagcaaattggagtgaaaaatgtgaagctctcagaatatgaaatgagtattgctgctcatcttgtagaccctcttaatatgcatgttacttggagtgatatagcaggtttagatgatgtcattacggatctgaaagacacagtcatcttacctatcaaaaagaaacatttgtttgagaattccaggcttctgcagcctccaaaaggtgttcttctctatgggcctccaggctgtggtaaaacgttgattgccaaggccacagccaaagaagcaggctgtcgatttattaaccttcagccttcgacactgaccgataagtggtatggagaatctcagaaattggctgctgctgtcttctcccttgccataaagctacaaccatccatcatctttatagatgaaatagactcctttctacgaaaccgttcaagttctgaccatgaagctacagccatgatgaaagctcagtttatgagtctctgggatggattggatactgatcacagctgccaggtcatagtaatgggagctaccaatcgtcctcaggaccttgactcggctataatgagaagaatgcctacaagatttcatatcaaccagcctgctttaaaacagagagaagcaatcctgaaactcatcttgaaaaatgaaaatctgaggaaactgaaacccagagaagttttgtaataacttgcccaggattacacaaagaagtgatggagcctactcttaaccattagggtggataggcatgtagacctgctagaagttgcccaggaaactgatgggttttcaggaagtgacctaaaagagatgtgtcgagatgctgccctcctctgtgttagagaatatgttaattctacatcagaagaaagccatgacgaagatgaaattcggcctgttcaacagcaggacctgcatcgggcaattgaaaagatgaagaaatcaaaggatgcagcatttcagaatgttttaacacatgtttgtttagattaagagtaaagatcatttgtacagttcagtgatctagtttggtgtgtcctcttatcagttagtggaaatagaacggaaagagtgctctttaaacaatgagggagctcagtgtttatggttttatactctgaattctaagttattgagatatagttgttacataggtggtattactgttggtcaaaaatcatgaggaggaacagttgaatccagcctgaacgtgggtgcttgtgtttgaccttttcagccatatattgtacagccttatagaatctaagctggtcttaaagtcataaatgattcattgggtcattagtgagaaacggggatgtggttaggtgctggttcctagacatgtgagtatgcgtttgtgtgtgtgcgtgtatgtatgtgtatattaaatgtatatatccacacattttatattgacattctgtagatatgtttgaatatagaaactttttttaccccaactactgaatccaggagtaccaaataatatatagtaaaactaagatttaaggttgtgtcaaaaaggtacagtgattcagccatttccatttgtcatttgtttcaaccttttttaagttgagtgtttttatttctgcagttattagttggatcctccacatcttgcatatatacatgggctcaattattatgtttgtcaggataatcaaatgaaaatactagttcagtgatcagcattgaatggttgttaggcagccatgtgctcaacactgatttcacctcttgagtataaactttttaaatttaaattggtttacatgaaagtggattaaaaggcctttcaaaagaatgggtttgaaaaacctcagtaccctttaatacatgtacatttctttccttttttcatttaatgtaacatgtctgttgtaactatgtttcttaaatattattttaaggttatgtgttctttaattatggtcaaatataatttggtcaccaaaaatgaaataatagtttaaaacaartagctgttactaagtgtgctaaaaatactcattttataattaattttagttttcttagtatattattataaattgtgccctaagtcaggtacaaatgtacacatcaaaatgcccatattgtatctatctgtagtcgtttaatgtgaattatatgtgaatttttttcaaaattttactaaccagaattctgttataggcacctaaccacgcagcatgaggaaaacggcacaacacaatcttgaggtgccttctgaatcatcagattaaattatgcttcatatgtttttgcttttactgtatttctttaaaaactctaaatctttattcatgtgtyactggattaatttatctgataatgtgtctcacaagaatctgttagatcgtttattcttcagttgtactttgaatggtggggtggaagtttcaggtgaacaatggataacaaaaagcaagttatggaagattgtgaagaggatggaaaaactgaatacaagataccaaaaatgaaaaaaagtgtcccatttttaataactatattctattattttataaatgtgtaataaaggggtccctctttattggttgttctccacttaatctttggtctttttcrgtaattttaagttttctgggattttttttggtttataaaacttgtgtttagactttatcttgctatggagttttcacacttctatagcacatatcctagtatctagtcatttctgttttaatatgaatttcagtaatttaattttaatctggtgacatattaatcgaaaataaggagtaatgtatacctccacatgtcctttctttttgtcttctcttaaattcacaatatccagtaggagtggttattcaatttcttcgtggttttaatcatcaaatgaagttagagaagtatactaatcccagcaactatgactcatctaggcatgttaagaccataaagtaattcaggaaactattttcctgatttttaaataacttttagtgttatgtaacatctatccttctgttttagacatgcatttcacatatagttgaattctagattctaagataattcattttgggtaatacttcagagtactggatctagaatcaggcttcctgaatttaaactcaggctccccatthactgtgtgtctgtgagcccagtttctcatctgtaaaatggggcaacagtggcactcatcttaaagggttggataataaaataatgcatgtaaggccctcagcatagtgcctggcacagaattactgctcaaatgttagctgtcgtattaatattgtcacttttgcacactgatgtacatttcctgttgaccaggctcattctttaagcattctccatgcttaaaccagttccataatccctaggcctgtactccagggattgagactgaaaggatcatttatgccatgtttctctaaaagcatcattgctggaagacttttgataagtctgatgtgtctcaagctattctcag

SEQ ID NO: 4748 - DNA, 3748 bp, Homo sapiens
ctctgtggggactaggttcagaagatgtcatctcccccatagactagcttcccagagaatgtcacctgcaaactagaatgatgctagtctcagcttaactgtgcaaagagaaaaccagaacgcgctccccaggaacaaggttcattcacagttgtcagaaggttaacattcaagatggtacatgctgaagccttttctcgtcctttgagtcggaatgaagttgttggtttaattttccgtttgacaatatttggtgcagtgacatactttactatcaaatggatggtagatgcaattgatccaaccagaaagcaaaaagtagaagctcagaaacaggcagaaaaactaatgaagcaaattggagtgaaaaatgtgaagctctcagaatatgaaatgagtattgctgctcatcttgtagaccctcttaatatgcatgttacttggagtgatatagcaggtttagatgatgtcattacggatctgaaagacacagtcatcttacctatcaaaaagaaacatttgtttgagaattccaggcttctgcagcctccaaaaggtgttcttctctatgggcctccaggctgtggtaaaacgttgattgccaaggccacagccaaagaagcaggctgtcgatttattaaccttcagccttcgacactgaccgataagtggtatggagaatctcagaaattggctgctgctgtcttctcccttgccataaagctacaaccatccatcatctttatagatgaaatagactcctttctacgaaaccgttcaagttctgaccatgaagctacagccatgatgaaagctcagtttatgagtctctgggatggattggatactgatcacagctgccaggtcatagtaatgggagctaccaatcgtcctcaggaccttgactcggctataatgagaagaatgcctacaagatttcatatcaaccagcctgctttaaaacagagagaagcaatcctgaaactcatcttgaaaaatgaaaatgtggataggcatgtagacctgctagaagttgcccaggaaactgatgggttttcaggaagtgacctaaaagagatgtgtcgagatgctgccctcctctgtgttagagaatatgttaattctacatcagaagaaagccatgacgaagatgaaattcggcctgttcaacagcaggacctgcatcgggcaattgaaaagatgaagaaatcaaaggatgcagcatttcagaatgttttaacacatgtttgtttagattaagagtaaagatcatttgtacagttcagtgatctagtttggtgtgtcctcttatcagttagtggaaatagaacggaaagagtgctctttaaacaatgagggagctcagtgtttatggttttatactctgaattctaagttattgagatatagttgttacataggtggtattactgttggtcaaaaatcatgaggaggaacagttgaatccagcctgaacgtgggtgcttgtgtttgaccttttcagccatatattgtacagccttatagaatctaagctggtcttaaagtcataaatgattcattgggtcattagtgagaaacggggatgtggttaggtgctggttcctagacatgtgagtatgcgtttgtgtgtgtgcgtgtatgtatgtgtatattaaatgtatatatccacacattttatattgacattctgtagatatgtttgaatatagaaactttttttaccccaactactgaatccaggagtaccaaataatatatagtaaaactaagatttaaggttgtgtcaaaaaggtacagtgattcagccatttccatttgtcatttgtttcaaccttttttaagttgagtgtttttatttctgcagttattagttggatcctccacatcttgcatatatacatgggctcaattattatgtttgtcaggataatcaaatgaaaatactagttcagtgatcagcattgaatggttgttaggcagccatgtgctcaacactgatttcacctcttgagtataaactttttaaatttaaattggtttacatgaaagtggattaaaaggcctttcaaaagaatgggtttgaaaaacctcagtaccctttaatacatgtacatttctttccttttttcatttaatgtaacatgtctgttgtaactatgtttcttaaatattattttaaggttatgtgttctttaattatggtcaaatataatttggtcaccaaaaatgaaataatagtttaaaacaartagctgttactaagtgtgctaaaaatactcattttataattaattttagttttcttagtatattattataaattgtgccctaagtcaggtacaaatgtacacatcaaaatgcccatattgtatctatctgtagtcgtttaatgtgaattatatgtgaatttttttcaaaattttactaaccagaattctgttataggcacctaaccacgcagcatgaggaaaacggcacaacacaatcttgaggtgccttctgaatcatcagattaaattatgcttcatatgtttttgcttttactgtatttctttaaaaactctaaatctttattcatgtgtyactggattaatttatctgataatgtgtctcacaagaatctgttagatcgtttattcttcagttgtactttgaatggtggggtggaagtttcaggtgaacaatggataacaaaaagcaagttatggaagattgtgaagaggatggaaaaactgaatacaagataccaaaaatgaaaaaaagtgtcccatttttaataactatattctattattttataaatgtgtaataaaggggtccctctttattggttgttctccacttaatctttggtctttttcrgtaattttaagttttctgggattttttttggtttataaaacttgtgtttagactttatcttgctatggagttttcacacttctatagcacatatcctagtatctagtcatttctgttttaatatgaatttcagtaatttaattttaatctggtgacatattaatcgaaaataaggagtaatgtatacctccacatgtcctttctttttgtcttctcttaaattcacaatatccagtaggagtggttattcaatttcttcgtggttttaatcatcaaatgaagttagagaagtatactaatcccagcaactatgactcatctaggcatgttaagaccataaagtaattcaggaaactattttcctgatttttaaataacttttagtgttatgtaacatctatccttctgttttagacatgcatttcacatatagttgaattctagattctaagataattcattttgggtaatacttcagagtactggatctagaatcaggcttcctgaatttaaactcaggctccccatthactgtgtgtctgtgagcccagtttctcatctgtaaaatggggcaacagtggcactcatcttaaagggttggataataaaataatgcatgtaaggccctcagcatagtgcctggcacagaattactgctcaaatgttagctgtcgtattaatattgtcacttttgcacactgatgtacatttcctgttgaccaggctcattctttaagcattctccatgcttaaaccagttccataatccctaggcctgtactccagggattgagactgaaaggatcatttatgccatgtttctctaaaagcatcattgctggaagacttttgataagtctgatgtgtctcaagctattctcag

SEQ ID NO: 4749 - DNA, 3657 bp, Homo sapiens
ctcccaggttgcgtttccttcctgtgtgaggccggctgagggcacttgctcttgctgtttctgcccctgggttaacattcaagatggtacatgctgaagccttttctcgtcctttgagtcggaatgaagttgttggtttaattttccgtttgacaatatttggtgcagtgacatactttactatcaaatggatggtagatgcaattgatccaaccagaaagcaaaaagtagaagctcagaaacaggcagaaaaactaatgaagcaaattggagtgaaaaatgtgaagctctcagaatatgaaatgagtattgctgctcatcttgtagaccctcttaatatgcatgttacttggagtgatatagcaggtttagatgatgtcattacggatctgaaagacacagtcatcttacctatcaaaaagaaacatttgtttgagaattccaggcttctgcagcctccaaaaggtgttcttctctatgggcctccaggctgtggtaaaacgttgattgccaaggccacagccaaagaagcaggctgtcgatttattaaccttcagccttcgacactgaccgataagtggtatggagaatctcagaaattggctgctgctgtcttctcccttgccataaagctacaaccatccatcatctttatagatgaaatagactcctttctacgaaaccgttcaagttctgaccatgaagctacagccatgatgaaagctcagtttatgagtctctgggatggattggatactgatcacagctgccaggtcatagtaatgggagctaccaatcgtcctcaggaccttgactcggctataatgagaagaatgcctacaagatttcatatcaaccagcctgctttaaaacagagagaagcaatcctgaaactcatcttgaaaaatgaaaatgtggataggcatgtagacctgctagaagttgcccaggaaactgatgggttttcaggaagtgacctaaaagagatgtgtcgagatgctgccctcctctgtgttagagaatatgttaattctacatcagaagaaagccatgacgaagatgaaattcggcctgttcaacagcaggacctgcatcgggcaattgaaaagatgaagaaatcaaaggatgcagcatttcagaatgttttaacacatgtttgtttagattaagagtaaagatcatttgtacagttcagtgatctagtttggtgtgtcctcttatcagttagtggaaatagaacggaaagagtgctctttaaacaatgagggagctcagtgtttatggttttatactctgaattctaagttattgagatatagttgttacataggtggtattactgttggtcaaaaatcatgaggaggaacagttgaatccagcctgaacgtgggtgcttgtgtttgaccttttcagccatatattgtacagccttatagaatctaagctggtcttaaagtcataaatgattcattgggtcattagtgagaaacggggatgtggttaggtgctggttcctagacatgtgagtatgcgtttgtgtgtgtgcgtgtatgtatgtgtatattaaatgtatatatccacacattttatattgacattctgtagatatgtttgaatatagaaactttttttaccccaactactgaatccaggagtaccaaataatatatagtaaaactaagatttaaggttgtgtcaaaaaggtacagtgattcagccatttccatttgtcatttgtttcaaccttttttaagttgagtgtttttatttctgcagttattagttggatcctccacatcttgcatatatacatgggctcaattattatgtttgtcaggataatcaaatgaaaatactagttcagtgatcagcattgaatggttgttaggcagccatgtgctcaacactgatttcacctcttgagtataaactttttaaatttaaattggtttacatgaaagtggattaaaaggcctttcaaaagaatgggtttgaaaaacctcagtaccctttaatacatgtacatttctttccttttttcatttaatgtaacatgtctgttgtaactatgtttcttaaatattattttaaggttatgtgttctttaattatggtcaaatataatttggtcaccaaaaatgaaataatagtttaaaacaartagctgttactaagtgtgctaaaaatactcattttataattaattttagttttcttagtatattattataaattgtgccctaagtcaggtacaaatgtacacatcaaaatgcccatattgtatctatctgtagtcgtttaatgtgaattatatgtgaatttttttcaaaattttactaaccagaattctgttataggcacctaaccacgcagcatgaggaaaacggcacaacacaatcttgaggtgccttctgaatcatcagattaaattatgcttcatatgtttttgcttttactgtatttctttaaaaactctaaatctttattcatgtgtyactggattaatttatctgataatgtgtctcacaagaatctgttagatcgtttattcttcagttgtactttgaatggtggggtggaagtttcaggtgaacaatggataacaaaaagcaagttatggaagattgtgaagaggatggaaaaactgaatacaagataccaaaaatgaaaaaaagtgtcccatttttaataactatattctattattttataaatgtgtaataaaggggtccctctttattggttgttctccacttaatctttggtctttttcrgtaattttaagttttctgggattttttttggtttataaaacttgtgtttagactttatcttgctatggagttttcacacttctatagcacatatcctagtatctagtcatttctgttttaatatgaatttcagtaatttaattttaatctggtgacatattaatcgaaaataaggagtaatgtatacctccacatgtcctttctttttgtcttctcttaaattcacaatatccagtaggagtggttattcaatttcttcgtggttttaatcatcaaatgaagttagagaagtatactaatcccagcaactatgactcatctaggcatgttaagaccataaagtaattcaggaaactattttcctgatttttaaataacttttagtgttatgtaacatctatccttctgttttagacatgcatttcacatatagttgaattctagattctaagataattcattttgggtaatacttcagagtactggatctagaatcaggcttcctgaatttaaactcaggctccccatthactgtgtgtctgtgagcccagtttctcatctgtaaaatggggcaacagtggcactcatcttaaagggttggataataaaataatgcatgtaaggccctcagcatagtgcctggcacagaattactgctcaaatgttagctgtcgtattaatattgtcacttttgcacactgatgtacatttcctgttgaccaggctcattctttaagcattctccatgcttaaaccagttccataatccctaggcctgtactccagggattgagactgaaaggatcatttatgccatgtttctctaaaagcatcattgctggaagacttttgataagtctgatgtgtctcaagctattctcag

SEQ ID NO: 4750 - DNA, 1885 bp, Homo sapiens
ccaccccttccctcctccatttccatccattccgcgatcgcggcggaccccaccgtcatcgcgcgcccctagagatcctggcctacccctccgccaaagcgcgcactgagtgcaaaccccagagtcaatccctgtcccggctccgccccccgcgtccgaatcccgcccagccgggccctcaagcccagtcgggactcgagcctagggaggcgaggttcccgcaccggatagcatgtttttggcccagaggagcctctgctctcttagcggtagagcaaaattcctgaagacaatttcttcttccaaaatcctcggattctctacttctgctaaaatgtcactgaaattcacaaatgcaaaacggattgaaggacttgatagtaatgtgtggattgaatttaccaaattggctgcagacccttctgttgtgaatcttggccaaggctttccagatatatcccctcctacatatgtaaaagaagaattatcaaagattgcagcaatcgatagcctgaatcagtatacacgaggctttggccatccatcacttgtgaaagctctgtcctatctgtatgaaaagctttatcaaaagcaaattgattcaaataaagaaatccttgtgacagtaggagcatatggatctctttttaacaccattcaagcattaattgatgagggagatgaagtcatactaatagtgcctttctatgactgctatgagcccatggtgagaatggctggagcaacacctgtttttattcccctgagatctaaacctgtttatggaaaaagatggtctagttctgactggacattagatcctcaagaactggaaagtaaatttaatyccaaaaccaaagctattatactaaatactccacataacccacttggcaaggtgtataacagagaggaactgcaagtaattgctgacctttgcatcaaatatgacacactctgcatcagygatgaggtttatgaatggcttgtatattctggaaataagcacttaaaaatagctacttttccaggtatgtgggagagaacaataacaataggaagtgctggaaagactttcagtgtaactggctggaagcttggctggtccattggtccaaatcatttgataaaacatttacagacagttcaacaaaacacgatttatacttgtgcaactcctttacaggaagccttggctcaagctttctggattgacatcaagcgcatggatgacccagaatgttactttaattctttgccaaaagagttagaagtaaaaagagatcggatggtacgtttacttgaaagtgttggcctaaaacccatagttcctgatggaggatacttcatcatcgctgatgtgtctttgctagatccagacctctctgatatgaagaataatgagccttatgactataagtttgtgaaatggatgactaaacataagaaactatcagccatccccgtttcagcattctgtaactcagagactaaatcacagtttgagaagtttgtgcgtttttgcttcattaaaaaagacagcacactggatgctgctgaagaaatcatcaaggcatggagtgtacagaagtcttgatttgtgcagaatggattaatgtttctgttagatgacctagtatggaattgttacttagtgctgccacctgctggatgttaaaagaatgtagaagcgaggcctggaggtgaagcagccatcttccattcatgccacagctagcatgagggtgaatgtctatataataaggatggcagagcagaaagatgaaaagagactggaactctggaagcagtttgaagccactgtacctacccctaccttgtaatggatgagacaaataaacccctatttgtttaagccactgta

SEQ ID NO: 4751 - DNA, 4748 bp, Homo sapiens
ccaccccttccctcctccatttccatccattccgcgatcgcggcggaccccaccgtcatcgcgcgcccctagagatcctggcctacccctccgccaaagcgcgcactgagtgcaaaccccagagtcaatccctgtcccggctccgccccccgcgtccgaatcccgcccagccgggccctcaagcccagtcgggactcgagcctagggaggcgaggttcccgcaccggatagcatgtttttggcccagaggagcctctgctctcttagcggtagagcaaaattcctgaagacaatttcttcttccaaaatcctcggattctctacttctgctgaacattctgttgttttcctctgccatctagtggcaaaagaaagtaattttcctggttttttgaatggatagccataccttaaaaagcatccarattgcgcagtagtgctagcggcttcgcggttcagtcctcctaactgacagccgccactggtgctgagctgctaggaagcccctgtcggcgagcttgttggagcttgaacccactgtcacccctccgactcaccggcaaaaaaaaaaatggttgaagcagatcgcccaggaaagctcttcattggtgggcttaatacggaaacaaatgagaaagctcttgaarcagtatttggcaaatatggacgaatagtggaagtactcttgataaaagaccgtgaaaccaacaaatcaagaggatttgcttttgtcacctttgaaagcccagcagacgctaaggatgcagccagagacatgaatggaaagtcattagatggaaaagccatcaaggtggaacaagccaccaaaccatcatttgaaagaggtagacatggaccgcccccacctccaagaagtagaggtcctccaagaggttttggagctggaagaggaggaagtggaggaaccaggggacctccttcacgaggaggacacatggatgatggtggatattccatgaattttaacatgagttcttccaggggaccactcccagtaaaaagaggaccaccaccaagaagtgggggtccttctcctaagagatctgcaccttcaggactagttcgcagcagcagtggaatgggaggaagagctcctctatcacgtggaagagatagttatggaggtccacctcgaagggaaccgctcccctctcgtagagatgtttatttgtccccaagagatgatgggtattctactaaagacagctattcaagcagagattacccaagttctcgtgatacaagagattatgcaccaccaccacgagattatacttaccgtgattatggtcattccagttcacgtgatgactatccatcaagaggctatggcgatagagatggatatggtcgtgatcgtgactattcagatcatccaagtggaggttcctacagagattcatatgagagttatggtaactcacgtagtgctccacttacacgagggcccccgccatcttatggtggaagcagtcgctatgatgattatagcagctcacgtgatggatatggtggaagtcgagacagttactcaagcagccgaagtgatctctactcaagttgtgacagggttggcagacaagaaagagggcttcccccttctgtagaaagggggtacccttcttcacgtgattcctacagcagttcaagccgcggagcaccaagaggtgctggccctggaggaagccgatctgatagagggggaggcagaagcagatactagaaacaaacaaaactttggaccaaaatcccagttcaaagaaacaaaaaaaagagtggaaactattctatcataactacccaaggactactaaaaggaaaaattgtgttaccttttttaaattccctgttaagtcccttccgtaatttttatgttyttgtgaggaaaaaagtaaaacatgtttaattttatttgactttatgacattgcttttcaacaagcaaatgttaaatgtgttaagccttgtagtactagtgttgtaactttccaagtaaaggtgtccctaaagaccacttcctatctggtttttcccagtaaatgaggcaagcaattctaagatcttccacaaaacatctagccatctaaaatggagagatgaatcattctgcctatacaaacaagctagctattagagggtggttggagtatgctactcataagatttcagggtgttttctaactgaaatctcactgttctcagtatgcaaaacctgaaatcagatgcctatgtaaggaaagtgctattcacccagtaaacccaaaaaaagcaaatggataatgctggccattttgcctttctgacatttccttgggaatctgcaagaacctcccctttcccctcccacaataagaccatttaagtgtgtgctaaacaactacggaatactaaataaaaagtttggccaaaaccaaccatgaagctgcaaaggtgcttgctcttactctttcaaatttttgcaactctaatgtctcacttttaaaggaacagcttgattgcaaaggagaaaatagataagcaatgaatttatctccaacttcctaaaggcttatgacttctaaaaagtgaatctatcagcattccacatcagatttaaagcatcaaatgcctgtgaaacagcaaagatggttgaagattgtgctcattatgtttgtggagtgctgattgattcacagtagataacgctggcagtaagagaaatcaaatgctaagagttgttgaagcagaaggcggctgattgttggtaagtcagtgcagttgcataagcagtgctgtcagaattggtttggtgcaggcaatagattttgccttcaagggttcctgtggatctcaggaaggcatcagtgttgattaacactcataactagggagtgagtggtagttacttaagtaattgaccaaatggaaaaggggaagtaattaaggaaattggtaagtggaggtagtcaggaggttctcgtggtcctttacacagattttacagctttgggtttcattttgtttagctaaagtcatggggacaactcttcaatttagaacttaagatgaattataaaaatgatggatataagtggtagctctatctggtgaagtgtcttgtcagtaagtgaaacatttttttgtggtggcttatccacaaacagtttagttgtagaataaaacttatgagtgacatctggaaagtaacaaccatgctaagatggcaaacacactggaaacaattgggccacttggctttcttttgctgtattgttttataagcctgctttacctccccgtcttggaaacaagttttagtttattgctttggagactagagccaatagtgtaatgttctcaaaggaaacagacttgagttgttggattagaggaactaactcaacttctaattttttttgttgtaattatggcactgtcatgttttaacatttgcaactagggatagtaagtacaacatttttaactctcatttggcagactactactaatcacagaccacaagggtaatgaccaaatttatgtggttgttacacttccatagttgtcttagccgaatccttccatattcttatgattacttgggttaaagcttctgtgaggaccttttggctcttaagatatcctaaatatttaaaatatttagatatcctaaatataggatatagagtttgtaccaaatatgaatgaatattgttcaaagcaaggagtatgttaaaatgaccagacacctgtttgataaatagtttactgaactagcagacgtgtggaaaaagaatcagatcttgattcttctgggtttatactggttgtaaaacagaatgatattagaaaatgttttccttgtttaastggtagttgaacatagaacttgggtattatagatcacttttcactttttggaatgttttgtattgaaacttaatacaactttaacatggcaaaaaaaaaaaaaatccaaaatctatgagataattttgttaaagttggcttgcttgggcgggtgcttggtccagagggagaaaagaaggcatgatttcagaatactctggcagctttttaaattcagctttatcaagttacagtaaactgtatctgtttagaattacaactcaatggttattttgacagatgtatatgccatgaagccactgtcaccatcaacatgcagaacacttccatcgcccccaaaagattcctcaagttcctttgcagtccatccctcacgctgctgatttgtctttgtcaccatatattagtttgctttgtggtggtgtttagtattttatataaatgggattgtgtagcatgtacttttttgtttatggtttctttcacacacaatgactttgaaattcaccaggttgcagtgtatcagtagcttattccttttattgctgagtagtgtcccattatgtgaatatgccattatttgtttttctactcacctgttgatggaccttgggattgtttccagtttggggctactgtgaataaaactgttaggaacatttgtgtacaagccactgtgtagacataggttttcctttctcttgggtaaatacctaccagtaaaatggttgggttgcatggcagatttatgtttaataaagtaactgccaaactgtttgttttccaaaggggctatacccttttatattcccaccagggttgtatagagttccaactgccaacactcagttttcagccattctgatgggaatctagtgg

SEQ ID NO: 4752 - DNA, 1909 bp, Homo sapiens
ccaccccttccctcctccatttccatccattccgcgatcgcggcggaccccaccgtcatcgcgcgcccctagagatcctggcctacccctccgccaaagcgcgcactgagtgcaaaccccagagtcaatccctgtcccggctccgccccccgcgtccgaatcccgcccagccgggccctcaagcccagtcgggactcgagcctagggaggcgaggttcccgcaccggatagcatgtttttggcccagaggagcctctgctctcttagcggtagagcaaaattcctgaagacaatttcttcttccaaaatcctcggattctctacttctgctaaaatgtcactgaaattcacaaatgcaaaacggattgaaggacttgatagtaatgtgtggattgaatttaccaaattggctgcagacccttctgttgtgaatcttggccaaggctttccagatatatcccctcctacatatgtaaaagaagaattatcaaagattgcagcaatcgatagcctgaatcagtatacacgaggctttggccatccatcacttgtgaaagctctgtcctatctgtatgaaaagctttatcaaaagcaaattgattcaaataaagaaatccttgtgacagtaggagcatatggatctctttttaacaccattcaagcattaattgatgagggagatgaagtcatactaatagtgcctttctatgactgctatgagcccatggtgagaatggctggagcaacacctgtttttattcccctgagatctaaacctgtttatggaaaaagatggtctagttctgactggacattagatcctcaagaactggaaagtaaatttaatyccaaaaccaaagctattatactaaatactccacataacccacttggcaaggtgtataacagagaggaactgcaagtaattgctgacctttgcatcaaatatgacacactctgcatcagygatgaggtttatgaatggcttgtatattctggaaataagcacttaaaaatagctacttttccaggtatgtgggagagaacaataacaataggaagtgctggaaagactttcagtgtaactggctggaagcttggctggtccattggtccaaatcatttgataaaacatttacagacagttcaacaaaacacgatttatacttgtgcaactcctttacaggaagccttggctcaagctttctggattgacatcaagcgcatggatgacccagaatgttactttaattctttgccaaaagagttagaagtaaaaagagatcggatggtacgtttacttgaaagtgttggcctaaaacccatagttcctgatggaggatacttcatcatcgctgatgtgtctttgctagatccagacctctctgatatgaagaataatgagccttatgactataagtttgtgaaatggatgactaaacataagaaactatcagccatccccgtttcagcattctgtaactcagagactaaatcacagtttgagaagtttgtgcgtttttgcttcattaaagtaagttccctgctaaagacagcacactggatgctgctgaagaaatcatcaaggcatggagtgtacagaagtcttgatttgtgcagaatggattaatgtttctgttagatgacctagtatggaattgttacttagtgctgccacctgctggatgttaaaaggtatttcagtacaactggaatttaaatatttccattgtttttccaaagcagttaacccaactcctaacaacattttcgggggatctgaccttttttttccagttgaaatgtattaacacaccttccacaatcattttataagagtcagcataacatagtggataagaamtgtgagatgtttaacctctcagtaactcggttctctcattataaa

SEQ ID NO: 4753 - DNA, 4417 bp, Homo sapiens
gaacattctgttgttttcctctgccatctagtggcaaaagaaagtaattttcctggttttttgaatggatagccataccttaaaaagcatccarattgcgcagtagtgctagcggcttcgcggttcagtcctcctaactgacagccgccactggtgctgagctgctaggaagcccctgtcggcgagcttgttggagcttgaacccactgtcacccctccgactcaccggcaaaaaaaaaaatggttgaagcagatcgcccaggaaagctcttcattggtgggcttaatacggaaacaaatgagaaagctcttgaarcagtatttggcaaatatggacgaatagtggaagtactcttgataaaagaccgtgaaaccaacaaatcaagaggatttgcttttgtcacctttgaaagcccagcagacgctaaggatgcagccagagacatgaatggaaagtcattagatggaaaagccatcaaggtggaacaagccaccaaaccatcatttgaaagaggtagacatggaccgcccccacctccaagaagtagaggtcctccaagaggttttggagctggaagaggaggaagtggaggaaccaggggacctccttcacgaggaggacacatggatgatggtggatattccatgaattttaacatgagttcttccaggggaccactcccagtaaaaagaggaccaccaccaagaagtgggggtccttctcctaagagatctgcaccttcaggactagttcgcagcagcagtggaatgggaggaagagctcctctatcacgtggaagagatagttatggaggtccacctcgaagggaaccgctcccctctcgtagagatgtttatttgtccccaagagatgatgggtattctactaaagacagctattcaagcagagattacccaagttctcgtgatacaagagattatgcaccaccaccacgagattatacttaccgtgattatggtcattccagttcacgtgatgactatccatcaagaggctatggcgatagagatggatatggtcgtgatcgtgactattcagatcatccaagtggaggttcctacagagattcatatgagagttatggtaactcacgtagtgctccacttacacgagggcccccgccatcttatggtggaagcagtcgctatgatgattatagcagctcacgtgatggatatggtggaagtcgagacagttactcaagcagccgaagtgatctctactcaagttgtgacagggttggcagacaagaaagagggcttcccccttctgtagaaagggggtacccttcttcacgtgattcctacagcagttcaagccgcggagcaccaagaggtgctggccctggaggaagccgatctgatagagggggaggcagaagcagatactagaaacaaacaaaactttggaccaaaatcccagttcaaagaaacaaaaaaaagagtggaaactattctatcataactacccaaggactactaaaaggaaaaattgtgttaccttttttaaattccctgttaagtcccttccgtaatttttatgttyttgtgaggaaaaaagtaaaacatgtttaattttatttgactttatgacattgcttttcaacaagcaaatgttaaatgtgttaagccttgtagtactagtgttgtaactttccaagtaaaggtgtccctaaagaccacttcctatctggtttttcccagtaaatgaggcaagcaattctaagatcttccacaaaacatctagccatctaaaatggagagatgaatcattctgcctatacaaacaagctagctattagagggtggttggagtatgctactcataagatttcagggtgttttctaactgaaatctcactgttctcagtatgcaaaacctgaaatcagatgcctatgtaaggaaagtgctattcacccagtaaacccaaaaaaagcaaatggataatgctggccattttgcctttctgacatttccttgggaatctgcaagaacctcccctttcccctcccacaataagaccatttaagtgtgtgctaaacaactacggaatactaaataaaaagtttggccaaaaccaaccatgaagctgcaaaggtgcttgctcttactctttcaaatttttgcaactctaatgtctcacttttaaaggaacagcttgattgcaaaggagaaaatagataagcaatgaatttatctccaacttcctaaaggcttatgacttctaaaaagtgaatctatcagcattccacatcagatttaaagcatcaaatgcctgtgaaacagcaaagatggttgaagattgtgctcattatgtttgtggagtgctgattgattcacagtagataacgctggcagtaagagaaatcaaatgctaagagttgttgaagcagaaggcggctgattgttggtaagtcagtgcagttgcataagcagtgctgtcagaattggtttggtgcaggcaatagattttgccttcaagggttcctgtggatctcaggaaggcatcagtgttgattaacactcataactagggagtgagtggtagttacttaagtaattgaccaaatggaaaaggggaagtaattaaggaaattggtaagtggaggtagtcaggaggttctcgtggtcctttacacagattttacagctttgggtttcattttgtttagctaaagtcatggggacaactcttcaatttagaacttaagatgaattataaaaatgatggatataagtggtagctctatctggtgaagtgtcttgtcagtaagtgaaacatttttttgtggtggcttatccacaaacagtttagttgtagaataaaacttatgagtgacatctggaaagtaacaaccatgctaagatggcaaacacactggaaacaattgggccacttggctttcttttgctgtattgttttataagcctgctttacctccccgtcttggaaacaagttttagtttattgctttggagactagagccaatagtgtaatgttctcaaaggaaacagacttgagttgttggattagaggaactaactcaacttctaattttttttgttgtaattatggcactgtcatgttttaacatttgcaactagggatagtaagtacaacatttttaactctcatttggcagactactactaatcacagaccacaagggtaatgaccaaatttatgtggttgttacacttccatagttgtcttagccgaatccttccatattcttatgattacttgggttaaagcttctgtgaggaccttttggctcttaagatatcctaaatatttaaaatatttagatatcctaaatataggatatagagtttgtaccaaatatgaatgaatattgttcaaagcaaggagtatgttaaaatgaccagacacctgtttgataaatagtttactgaactagcagacgtgtggaaaaagaatcagatcttgattcttctgggtttatactggttgtaaaacagaatgatattagaaaatgttttccttgtttaastggtagttgaacatagaacttgggtattatagatcacttttcactttttggaatgttttgtattgaaacttaatacaactttaacatggcaaaaaaaaaaaaaatccaaaatctatgagataattttgttaaagttggcttgcttgggcgggtgcttggtccagagggagaaaagaaggcatgatttcagaatactctggcagctttttaaattcagctttatcaagttacagtaaactgtatctgtttagaattacaactcaatggttattttgacagatgtatatgccatgaagccactgtcaccatcaacatgcagaacacttccatcgcccccaaaagattcctcaagttcctttgcagtccatccctcacgctgctgatttgtctttgtcaccatatattagtttgctttgtggtggtgtttagtattttatataaatgggattgtgtagcatgtacttttttgtttatggtttctttcacacacaatgactttgaaattcaccaggttgcagtgtatcagtagcttattccttttattgctgagtagtgtcccattatgtgaatatgccattatttgtttttctactcacctgttgatggaccttgggattgtttccagtttggggctactgtgaataaaactgttaggaacatttgtgtacaagccactgtgtagacataggttttcctttctcttgggtaaatacctaccagtaaaatggttgggttgcatggcagatttatgtttaataaagtaactgccaaactgtttgttttccaaaggggctatacccttttatattcccaccagggttgtatagagttccaactgccaacactcagttttcagccattctgatgggaatctagtgg

SEQ ID NO: 4754 - DNA, 1696 bp, Homo sapiens
ccaccccttccctcctccatttccatccattccgcgatcgcggcggaccccaccgtcatcgcgcgcccctagagatcctggcctacccctccgccaaagcgcgcactgagtgcaaaccccagagtcaatccctgtcccggctccgccccccgcgtccgaatcccgcccagccgggccctcaagcccagtcgggactcgagcctagggaggcgaggttcccgcaccggatagcatgtttttggcccagaggagcctctgctctcttagcggtagagcaaaattcctgaagacaatttcttcttccaaaatcctcggattctctacttctgctaaaatgtcactgaaattcacaaatgcaaaacggattgaaggacttgatagtaatgtgtggattgaatttaccaaattggctgcagacccttctgttgtgaatcttggccaaggctttccagatatatcccctcctacatatgtaaaagaagaattatcaaagattgcagcaatcgatatgcctttctatgactgctatgagcccatggtgagaatggctggagcaacacctgtttttattcccctgagatctaaacctgtttatggaaaaagatggtctagttctgactggacattagatcctcaagaactggaaagtaaatttaatyccaaaaccaaagctattatactaaatactccacataacccacttggcaaggtgtataacagagaggaactgcaagtaattgctgacctttgcatcaaatatgacacactctgcatcagygatgaggtttatgaatggcttgtatattctggaaataagcacttaaaaatagctacttttccaggtatgtgggagagaacaataacaataggaagtgctggaaagactttcagtgtaactggctggaagcttggctggtccattggtccaaatcatttgataaaacatttacagacagttcaacaaaacacgatttatacttgtgcaactcctttacaggaagccttggctcaagctttctggattgacatcaagcgcatggatgacccagaatgttactttaattctttgccaaaagagttagaagtaaaaagagatcggatggtacgtttacttgaaagtgttggcctaaaacccatagttcctgatggaggatacttcatcatcgctgatgtgtctttgctagatccagacctctctgatatgaagaataatgagccttatgactataagtttgtgaaatggatgactaaacataagaaactatcagccatccccgtttcagcattctgtaactcagagactaaatcacagtttgagaagtttgtgcgtttttgcttcattaaaaaagacagcacactggatgctgctgaagaaatcatcaaggcatggagtgtacagaagtcttgatttgtgcagaatggattaatgtttctgttagatgacctagtatggaattgttacttagtgctgccacctgctggatgttaaaagaatgtagaagcgaggcctggaggtgaagcagccatcttccattcatgccacagctagcatgagggtgaatgtctatataataaggatggcagagcagaaagatgaaaagagactggaactctggaagcagtttgaagccactgtacctacccctaccttgtaatggatgagacaaataaacccctatttgtttaagccactgta

SEQ ID NO: 4755 - DNA, 4608 bp, Homo sapiens
aaacacccctcatccagtctcttccagcctagagatcctggcctacccctccgccaaagcgcgcactgagtgcaaaccccagagtcaatccctgtcccggctccgccccccgcgtccgaatcccgcccagccgggccctcaagcccagtcgggactcgagcctagggaggcgaggttcccgcaccggataggaacattctgttgttttcctctgccatctagtggcaaaagaaagtaattttcctggttttttgaatggatagccataccttaaaaagcatccarattgcgcagtagtgctagcggcttcgcggttcagtcctcctaactgacagccgccactggtgctgagctgctaggaagcccctgtcggcgagcttgttggagcttgaacccactgtcacccctccgactcaccggcaaaaaaaaaaatggttgaagcagatcgcccaggaaagctcttcattggtgggcttaatacggaaacaaatgagaaagctcttgaarcagtatttggcaaatatggacgaatagtggaagtactcttgataaaagaccgtgaaaccaacaaatcaagaggatttgcttttgtcacctttgaaagcccagcagacgctaaggatgcagccagagacatgaatggaaagtcattagatggaaaagccatcaaggtggaacaagccaccaaaccatcatttgaaagaggtagacatggaccgcccccacctccaagaagtagaggtcctccaagaggttttggagctggaagaggaggaagtggaggaaccaggggacctccttcacgaggaggacacatggatgatggtggatattccatgaattttaacatgagttcttccaggggaccactcccagtaaaaagaggaccaccaccaagaagtgggggtccttctcctaagagatctgcaccttcaggactagttcgcagcagcagtggaatgggaggaagagctcctctatcacgtggaagagatagttatggaggtccacctcgaagggaaccgctcccctctcgtagagatgtttatttgtccccaagagatgatgggtattctactaaagacagctattcaagcagagattacccaagttctcgtgatacaagagattatgcaccaccaccacgagattatacttaccgtgattatggtcattccagttcacgtgatgactatccatcaagaggctatggcgatagagatggatatggtcgtgatcgtgactattcagatcatccaagtggaggttcctacagagattcatatgagagttatggtaactcacgtagtgctccacttacacgagggcccccgccatcttatggtggaagcagtcgctatgatgattatagcagctcacgtgatggatatggtggaagtcgagacagttactcaagcagccgaagtgatctctactcaagttgtgacagggttggcagacaagaaagagggcttcccccttctgtagaaagggggtacccttcttcacgtgattcctacagcagttcaagccgcggagcaccaagaggtgctggccctggaggaagccgatctgatagagggggaggcagaagcagatactagaaacaaacaaaactttggaccaaaatcccagttcaaagaaacaaaaaaaagagtggaaactattctatcataactacccaaggactactaaaaggaaaaattgtgttaccttttttaaattccctgttaagtcccttccgtaatttttatgttyttgtgaggaaaaaagtaaaacatgtttaattttatttgactttatgacattgcttttcaacaagcaaatgttaaatgtgttaagccttgtagtactagtgttgtaactttccaagtaaaggtgtccctaaagaccacttcctatctggtttttcccagtaaatgaggcaagcaattctaagatcttccacaaaacatctagccatctaaaatggagagatgaatcattctgcctatacaaacaagctagctattagagggtggttggagtatgctactcataagatttcagggtgttttctaactgaaatctcactgttctcagtatgcaaaacctgaaatcagatgcctatgtaaggaaagtgctattcacccagtaaacccaaaaaaagcaaatggataatgctggccattttgcctttctgacatttccttgggaatctgcaagaacctcccctttcccctcccacaataagaccatttaagtgtgtgctaaacaactacggaatactaaataaaaagtttggccaaaaccaaccatgaagctgcaaaggtgcttgctcttactctttcaaatttttgcaactctaatgtctcacttttaaaggaacagcttgattgcaaaggagaaaatagataagcaatgaatttatctccaacttcctaaaggcttatgacttctaaaaagtgaatctatcagcattccacatcagatttaaagcatcaaatgcctgtgaaacagcaaagatggttgaagattgtgctcattatgtttgtggagtgctgattgattcacagtagataacgctggcagtaagagaaatcaaatgctaagagttgttgaagcagaaggcggctgattgttggtaagtcagtgcagttgcataagcagtgctgtcagaattggtttggtgcaggcaatagattttgccttcaagggttcctgtggatctcaggaaggcatcagtgttgattaacactcataactagggagtgagtggtagttacttaagtaattgaccaaatggaaaaggggaagtaattaaggaaattggtaagtggaggtagtcaggaggttctcgtggtcctttacacagattttacagctttgggtttcattttgtttagctaaagtcatggggacaactcttcaatttagaacttaagatgaattataaaaatgatggatataagtggtagctctatctggtgaagtgtcttgtcagtaagtgaaacatttttttgtggtggcttatccacaaacagtttagttgtagaataaaacttatgagtgacatctggaaagtaacaaccatgctaagatggcaaacacactggaaacaattgggccacttggctttcttttgctgtattgttttataagcctgctttacctccccgtcttggaaacaagttttagtttattgctttggagactagagccaatagtgtaatgttctcaaaggaaacagacttgagttgttggattagaggaactaactcaacttctaattttttttgttgtaattatggcactgtcatgttttaacatttgcaactagggatagtaagtacaacatttttaactctcatttggcagactactactaatcacagaccacaagggtaatgaccaaatttatgtggttgttacacttccatagttgtcttagccgaatccttccatattcttatgattacttgggttaaagcttctgtgaggaccttttggctcttaagatatcctaaatatttaaaatatttagatatcctaaatataggatatagagtttgtaccaaatatgaatgaatattgttcaaagcaaggagtatgttaaaatgaccagacacctgtttgataaatagtttactgaactagcagacgtgtggaaaaagaatcagatcttgattcttctgggtttatactggttgtaaaacagaatgatattagaaaatgttttccttgtttaastggtagttgaacatagaacttgggtattatagatcacttttcactttttggaatgttttgtattgaaacttaatacaactttaacatggcaaaaaaaaaaaaaatccaaaatctatgagataattttgttaaagttggcttgcttgggcgggtgcttggtccagagggagaaaagaaggcatgatttcagaatactctggcagctttttaaattcagctttatcaagttacagtaaactgtatctgtttagaattacaactcaatggttattttgacagatgtatatgccatgaagccactgtcaccatcaacatgcagaacacttccatcgcccccaaaagattcctcaagttcctttgcagtccatccctcacgctgctgatttgtctttgtcaccatatattagtttgctttgtggtggtgtttagtattttatataaatgggattgtgtagcatgtacttttttgtttatggtttctttcacacacaatgactttgaaattcaccaggttgcagtgtatcagtagcttattccttttattgctgagtagtgtcccattatgtgaatatgccattatttgtttttctactcacctgttgatggaccttgggattgtttccagtttggggctactgtgaataaaactgttaggaacatttgtgtacaagccactgtgtagacataggttttcctttctcttgggtaaatacctaccagtaaaatggttgggttgcatggcagatttatgtttaataaagtaactgccaaactgtttgttttccaaaggggctatacccttttatattcccaccagggttgtatagagttccaactgccaacactcagttttcagccattctgatgggaatctagtgg

SEQ ID NO: 4756 - DNA, 2003 bp, Homo sapiens
gggtggttagaatttctatattttggggtccctccctccgtatggggctggagtgcaatggcgcgatctcagctcactgcagcctccgcctcccgggttcaagcgattcttctgcctcagcctcccgacagattatgagcttacagaaagcctggcctacattttactctttttggatttcttcctcatcaagagactgctgcrgtgcctgtcatgtgacagcggcatggacatatgcccyaggctttcctgctggggtccatccatgagcctgcagktgccctcatggagccccagcccwgccctggaagcttggctgagagcttcctggaggaggagcttcggctcaatgctgagctgagccagctgcagttttcggagcctgtgggcatcatctacaatcccgtggagtatgcatgggagccacatcgcaactacgtgactcgctactgccagggccccaaggaagtactcttcctgggcatgaaccctggaccttttggcatggcccagactggggtgccctttggggaagtaagcatggtccgggactggttgggcattgtggggcctgtgctgacccctccccaagagcatcctaaacgaccagtgctgggactggagtgcccacagtcagaagtgagtggtgcccgattctggggctttttccggaacctctgtggacagcctgaggtcttcttccatcactgtttygtccacaatctatgccctctgcttttcctggctcccagcgggcgcaaccttactcctgctgagctgcctgccaagcagcgagaacagcttcttgggatctgtgatgcagccctctgccggcaggtgcagctgctgggggtgcggctggtggtgggagttgggcgactggcagagcagcgggcacgacgggctctggcaggcctgatgccagaggtccaggtggaagggctcctgcatccctctccccgtawcccacaggccaacaagggctgggaggcagtggccaaggaaagattgaatgagctggggctgctgccactgctgttgaaatgagtgcccttggggccttgcatgggacacattcaagacctcgaagtcattcttggccaagcagatgacaacacatctcctgkactggagcaaaaggtccttctgtgcaccctggtcgctgggaaacgtattctttgatctgttgaactgtcttccaacctgccatggcagttttgacactactcctgtttgccctcctgattcctgctttctttaccttttaacattgcccctttcaggggaccccactttgtagggaatcygcagaaggtgtgcttttgcacttgcagactgctctacctcagtgtttccttgggagactttattcagctgagartgccctagacagtaacttctaaggtcacgtttactatttcagaggaaatatcttgccaggatacctacccatccttatagaacagttrcctttagctgacccctttcctcacagggaccaagacaaagcatgggacatgaaattaagagtgaacttcttatgggaggctgcagctggatcagaggaaaaatccagtgtgacagagtgcaagtcagaagacctggcttttcatcccagctttgaaacttggaactttttgattgacaaattaataaacctctctatgcctcaggctcctcatctgtaaaacagggatgcctaccttatggggttggtgtgaggattaactgagatcacacttgaaagtgccttgcatgggcttggcatgtgggtgctcattacatagtcttcttgttttcttgcctctgggttgaggattcacagcactgcactacaagggtagcccctctccattctggataccttgctaggagagagtctgggcttccacctgcggccagggtgaagggaaaattcttgccatgtcagagatggatcaatgactatgaaaaaactagcctgtgattttttttcactctaagcattaagagctcctaaagcc

SEQ ID NO: 4757 - DNA, 2168 bp, Homo sapiens
gggaatccgggactgtgggggcaagttgacggctcccagggtcgtcggggctgagccgagagggtggttagaatttctatattttggggtccctccctccgtatggggtaagactcagtgcagggagagcccagcctatgaaaccgcctgggaggtctgcaggatcaaggctttccagtcggccggagccagcgggcgcccccggaggctggagtgcaatggcgcgatctcagctcactgcagcctccgcctcccgggttcaagcgattcttctgcctcagcctcccgagtagcagattatgagcttacagaaagcctggcctacattttactctttttggatttcttcctcatcaagagactgctgcrgtgcctgtcatgtgacagcggcatggacatatgcccyaggctttcctgctggggtccatccatgagcctgcagktgccctcatggagccccagcccwgccctggaagcttggctgagagcttcctggaggaggagcttcggctcaatgctgagctgagccagctgcagttttcggagcctgtgggcatcatctacaatcccgtggagtatgcatgggagccacatcgcaactacgtgactcgctactgccagggccccaaggaagtactcttcctgggcatgaaccctggaccttttggcatggcccagactggggtgccctttggggaagtaagcatggtccgggactggttgggcattgtggggcctgtgctgacccctccccaagagcatcctaaacgaccagtgctgggactggagtgcccacagtcagaagtgagtggtgcccgattctggggctttttccggaacctctgtggacagcctgaggtcttcttccatcactgtttygtccacaatctatgccctctgcttttcctggctcccagcgggcgcaaccttactcctgctgagctgcctgccaagcagcgagaacagcttcttgggatctgtgatgcagccctctgccggcaggtgcagctgctgggggtgcggctggtggtgggagttgggcgactggcagagcagcgggcacgacgggctctggcaggcctgatgccagaggtccaggtggaagggctcctgcatccctctccccgtawcccacaggccaacaagggctgggaggcagtggccaaggaaagattgaatgagctggggctgctgccactgctgttgaaatgagtgcccttggggccttgcatgggacacattcaagacctcgaagtcattcttggccaagcagatgacaacacatctcctgkactggagcaaaaggtccttctgtgcaccctggtcgctgggaaacgtattctttgatctgttgaactgtcttccaacctgccatggcagttttgacactactcctgtttgccctcctgattcctgctttctttaccttttaacattgcccctttcaggggaccccactttgtagggaatcygcagaaggtgtgcttttgcacttgcagactgctctacctcagtgtttccttgggagactttattcagctgagartgccctagacagtaacttctaaggtcacgtttactatttcagaggaaatatcttgccaggatacctacccatccttatagaacagttrcctttagctgacccctttcctcacagggaccaagacaaagcatgggacatgaaattaagagtgaacttcttatgggaggctgcagctggatcagaggaaaaatccagtgtgacagagtgcaagtcagaagacctggcttttcatcccagctttgaaacttggaactttttgattgacaaattaataaacctctctatgcctcaggctcctcatctgtaaaacagggatgcctaccttatggggttggtgtgaggattaactgagatcacacttgaaagtgccttgcatgggcttggcatgtgggtgctcattacatagtcttcttgttttcttgcctctgggttgaggattcacagcactgcactacaagggtagcccctctccattctggataccttgctaggagagagtctgggcttccacctgcggccagggtgaagggaaaattcttgccatgtcagagatggatcaatgactatgaaaaaactagcctgtgattttttttcactctaagcattaagagctcctaaagcc

SEQ ID NO: 4758 - DNA, 1875 bp, Homo sapiens
cagattatgagcttacagaaagcctggcctacattttactctttttggatttcttcctcatcaagagactgctgcrgtgcctgtcatgtgacagcggcatggacatatgcccyaggctttcctgctggggtccatccatgagcctgcagktgccctcatggagccccagcccwgccctggaagcttggctgagagcttcctggaggaggagcttcggctcaatgctgagctgagccagctgcagttttcggagcctgtgggcatcatctacaatcccgtggagtatgcatgggagccacatcgcaactacgtgactcgctactgccagggccccaaggaagtactcttcctgggcatgaaccctggaccttttggcatggcccagactggggtgccctttggggaagtaagcatggtccgggactggttgggcattgtggggcctgtgctgacccctccccaagagcatcctaaacgaccagtgctgggactggagtgcccacagtcagaagtgagtggtgcccgattctggggctttttccggaacctctgtggacagcctgaggtcttcttccatcactgtttygtccacaatctatgccctctgcttttcctggctcccagcgggcgcaaccttactcctgctgagctgcctgccaagcagcgagaacagcttcttgggatctgtgatgcagccctctgccggcaggtgcagctgctgggggtgcggctggtggtgggagttgggcgactggcagagcagcgggcacgacgggctctggcaggcctgatgccagaggtccaggtggaagggctcctgcatccctctccccgtawcccacaggccaacaagggctgggaggcagtggccaaggaaagattgaatgagctggggctgctgccactgctgttgaaatgagtgcccttggggccttgcatgggacacattcaagacctcgaagtcattcttggccaagcagatgacaacacatctcctgkactggagcaaaaggtccttctgtgcaccctggtcgctgggaaacgtattctttgatctgttgaactgtcttccaacctgccatggcagttttgacactactcctgtttgccctcctgattcctgctttctttaccttttaacattgcccctttcaggggaccccactttgtagggaatcygcagaaggtgtgcttttgcacttgcagactgctctacctcagtgtttccttgggagactttattcagctgagartgccctagacagtaacttctaaggtcacgtttactatttcagaggaaatatcttgccaggatacctacccatccttatagaacagttrcctttagctgacccctttcctcacagggaccaagacaaagcatgggacatgaaattaagagtgaacttcttatgggaggctgcagctggatcagaggaaaaatccagtgtgacagagtgcaagtcagaagacctggcttttcatcccagctttgaaacttggaactttttgattgacaaattaataaacctctctatgcctcaggctcctcatctgtaaaacagggatgcctaccttatggggttggtgtgaggattaactgagatcacacttgaaagtgccttgcatgggcttggcatgtgggtgctcattacatagtcttcttgttttcttgcctctgggttgaggattcacagcactgcactacaagggtagcccctctccattctggataccttgctaggagagagtctgggcttccacctgcggccagggtgaagggaaaattcttgccatgtcagagatggatcaatgactatgaaaaaactagcctgtgattttttttcactctaagcattaagagctcctaaagcc

SEQ ID NO: 4759 - DNA, 2244 bp, Homo sapiens
gggactgtgggggcaagttgacggctcccagggtcgtcggggctgagccgagagggtggttagaatttctatattttggggtccctccctccgtatggggtaagactcagtgcagggagagcccagcctatgaaaccgcctgggaggtctgcaggatcaaggctttccagtcggccggagccagcgggcgcccccggaggttttcagattatgagcttacagaaagcctggcctacattttactctttttggatttcttcctcatcaagagactgctgcrgtgcctgtcatatggggtctcattatgtcagccaggctggtcttgaactcctggcctcaagcaattcttctgccttggcctctcaaagtgctgggattacaggcatgagccactgtgcccagcacagaaggtagttttaaacaaaagtgaaaaagaagatggacattgctgagcaggtgacagcggcatggacatatgcccyaggctttcctgctggggtccatccatgagcctgcagktgccctcatggagccccagcccwgccctggaagcttggctgagagcttcctggaggaggagcttcggctcaatgctgagctgagccagctgcagttttcggagcctgtgggcatcatctacaatcccgtggagtatgcatgggagccacatcgcaactacgtgactcgctactgccagggccccaaggaagtactcttcctgggcatgaaccctggaccttttggcatggcccagactggggtgccctttggggaagtaagcatggtccgggactggttgggcattgtggggcctgtgctgacccctccccaagagcatcctaaacgaccagtgctgggactggagtgcccacagtcagaagtgagtggtgcccgattctggggctttttccggaacctctgtggacagcctgaggtcttcttccatcactgtttygtccacaatctatgccctctgcttttcctggctcccagcgggcgcaaccttactcctgctgagctgcctgccaagcagcgagaacagcttcttgggatctgtgatgcagccctctgccggcaggtgcagctgctgggggtgcggctggtggtgggagttgggcgactggcagagcagcgggcacgacgggctctggcaggcctgatgccagaggtccaggtggaagggctcctgcatccctctccccgtawcccacaggccaacaagggctgggaggcagtggccaaggaaagattgaatgagctggggctgctgccactgctgttgaaatgagtgcccttggggccttgcatgggacacattcaagacctcgaagtcattcttggccaagcagatgacaacacatctcctgkactggagcaaaaggtccttctgtgcaccctggtcgctgggaaacgtattctttgatctgttgaactgtcttccaacctgccatggcagttttgacactactcctgtttgccctcctgattcctgctttctttaccttttaacattgcccctttcaggggaccccactttgtagggaatcygcagaaggtgtgcttttgcacttgcagactgctctacctcagtgtttccttgggagactttattcagctgagartgccctagacagtaacttctaaggtcacgtttactatttcagaggaaatatcttgccaggatacctacccatccttatagaacagttrcctttagctgacccctttcctcacagggaccaagacaaagcatgggacatgaaattaagagtgaacttcttatgggaggctgcagctggatcagaggaaaaatccagtgtgacagagtgcaagtcagaagacctggcttttcatcccagctttgaaacttggaactttttgattgacaaattaataaacctctctatgcctcaggctcctcatctgtaaaacagggatgcctaccttatggggttggtgtgaggattaactgagatcacacttgaaagtgccttgcatgggcttggcatgtgggtgctcattacatagtcttcttgttttcttgcctctgggttgaggattcacagcactgcactacaagggtagcccctctccattctggataccttgctaggagagagtctgggcttccacctgcggccagggtgaagggaaaattcttgccatgtcagagatggatcaatgactatgaaaaaactagcctgtgattttttttcactctaagcattaagagctcctaaagcc

SEQ ID NO: 4760 - DNA, 2198 bp, Homo sapiens
gggactgtgggggcaagttgacggctcccagggtcgtcggggctgagccgagagggtggttagaatttctatattttggggtccctccctccgtatggggtaagactcagtgcagggagagcccagcctatgaaaccgcctgggaggtctgcaggatcaaggctttccagtcggccggagccagcgggcgcccccggaggttttcagattatgagcttacagaaagcctggcctacattttactctttttggatttcttcctcatcaagagactgctgcrgtgcctgtcatatggggtctcattatgtcagccaggctggtcttgaactcctggcctcaagcaattcttctgccttggcctctcaaagtgctgggattacaggcatgagccactgtgcccagcacagaaggtgacagcggcatggacatatgcccyaggctttcctgctggggtccatccatgagcctgcagktgccctcatggagccccagcccwgccctggaagcttggctgagagcttcctggaggaggagcttcggctcaatgctgagctgagccagctgcagttttcggagcctgtgggcatcatctacaatcccgtggagtatgcatgggagccacatcgcaactacgtgactcgctactgccagggccccaaggaagtactcttcctgggcatgaaccctggaccttttggcatggcccagactggggtgccctttggggaagtaagcatggtccgggactggttgggcattgtggggcctgtgctgacccctccccaagagcatcctaaacgaccagtgctgggactggagtgcccacagtcagaagtgagtggtgcccgattctggggctttttccggaacctctgtggacagcctgaggtcttcttccatcactgtttygtccacaatctatgccctctgcttttcctggctcccagcgggcgcaaccttactcctgctgagctgcctgccaagcagcgagaacagcttcttgggatctgtgatgcagccctctgccggcaggtgcagctgctgggggtgcggctggtggtgggagttgggcgactggcagagcagcgggcacgacgggctctggcaggcctgatgccagaggtccaggtggaagggctcctgcatccctctccccgtawcccacaggccaacaagggctgggaggcagtggccaaggaaagattgaatgagctggggctgctgccactgctgttgaaatgagtgcccttggggccttgcatgggacacattcaagacctcgaagtcattcttggccaagcagatgacaacacatctcctgkactggagcaaaaggtccttctgtgcaccctggtcgctgggaaacgtattctttgatctgttgaactgtcttccaacctgccatggcagttttgacactactcctgtttgccctcctgattcctgctttctttaccttttaacattgcccctttcaggggaccccactttgtagggaatcygcagaaggtgtgcttttgcacttgcagactgctctacctcagtgtttccttgggagactttattcagctgagartgccctagacagtaacttctaaggtcacgtttactatttcagaggaaatatcttgccaggatacctacccatccttatagaacagttrcctttagctgacccctttcctcacagggaccaagacaaagcatgggacatgaaattaagagtgaacttcttatgggaggctgcagctggatcagaggaaaaatccagtgtgacagagtgcaagtcagaagacctggcttttcatcccagctttgaaacttggaactttttgattgacaaattaataaacctctctatgcctcaggctcctcatctgtaaaacagggatgcctaccttatggggttggtgtgaggattaactgagatcacacttgaaagtgccttgcatgggcttggcatgtgggtgctcattacatagtcttcttgttttcttgcctctgggttgaggattcacagcactgcactacaagggtagcccctctccattctggataccttgctaggagagagtctgggcttccacctgcggccagggtgaagggaaaattcttgccatgtcagagatggatcaatgactatgaaaaaactagcctgtgattttttttcactctaagcattaagagctcctaaagcc

SEQ ID NO: 4761 - DNA, 1247 bp, Homo sapiens
tagcgccgggggttgggtttggggtgggggaaaggaaccggaaacgggatggggagctggaccaggctagggtgagaaaayaggtttatcgagctgttgtgtcaaccttgagttcttatcttggagaagtcactcctgacccaggcagaaagttgagaggaaggaatgacaatggtccttgtcgcatgggaggcacacatatgatgggyacagacccagagtctggaaaacaagcagagtgcaaagtgggcagctaagccttgagtgaactcaggatatagaagtggagaaggatccatcaggagtgcctccttggtgacagcggcatggacatatgcccyaggctttcctgctggggtccatccatgagcctgcagktgccctcatggagccccagcccwgccctggaagcttggctgagagcttcctggaggaggagcttcggctcaatgctgagctgagccagctgcagttttcggagcctgtgggcatcatctacaatcccgtggagtatgcatgggagccacatcgcaactacgtgactcgctactgccagggccccaaggaagtactcttcctgggcatgaaccctggaccttttggcatggcccagactggggtgccctttggggaagtaagcatggtccgggactggttgggcattgtggggcctgtgctgacccctccccaagagcatcctaaacgaccagtgctgggactggagtgcccacagtcagaaggaccaagacaaagcatgggacatgaaattaagagtgaacttcttatgggaggctgcagctggatcagaggaaaaatccagtgtgacagagtgcaagtcagaagacctggcttttcatcccagctttgaaacttggaactttttgattgacaaattaataaacctctctatgcctcaggctcctcatctgtaaaacagggatgcctaccttatggggttggtgtgaggattaactgagatcacacttgaaagtgccttgcatgggcttggcatgtgggtgctcattacatagtcttcttgttttcttgcctctgggttgaggattcacagcactgcactacaagggtagcccctctccattctggataccttgctaggagagagtctgggcttccacctgcggccagggtgaagggaaaattcttgccatgtcagagatggatcaatgactatgaaaaaactagcctgtgattttttttcactctaagcattaagagctcctaaagcc

SEQ ID NO: 4762 - DNA, 2079 bp, Homo sapiens
gggaatccgggactgtgggggcaagttgacggctcccagggtcgtcggggctgagccgagagggtggttagaatttctatattttggggtccctccctccgtatggggtaagactcagtgcagggagagcccagcctatgaaaccgcctgggaggtctgcaggatcaaggctttccagtcggccggagccagcgggcgcccccggagattatgagcttacagaaagcctggcctacattttactctttttggatttcttcctcatcaagagactgctgcrgtgcctgtcatgtgacagcggcatggacatatgcccyaggctttcctgctggggtccatccatgagcctgcagktgccctcatggagccccagcccwgccctggaagcttggctgagagcttcctggaggaggagcttcggctcaatgctgagctgagccagctgcagttttcggagcctgtgggcatcatctacaatcccgtggagtatgcatgggagccacatcgcaactacgtgactcgctactgccagggccccaaggaagtactcttcctgggcatgaaccctggaccttttggcatggcccagactggggtgccctttggggaagtaagcatggtccgggactggttgggcattgtggggcctgtgctgacccctccccaagagcatcctaaacgaccagtgctgggactggagtgcccacagtcagaagtgagtggtgcccgattctggggctttttccggaacctctgtggacagcctgaggtcttcttccatcactgtttygtccacaatctatgccctctgcttttcctggctcccagcgggcgcaaccttactcctgctgagctgcctgccaagcagcgagaacagcttcttgggatctgtgatgcagccctctgccggcaggtgcagctgctgggggtgcggctggtggtgggagttgggcgactggcagagcagcgggcacgacgggctctggcaggcctgatgccagaggtccaggtggaagggctcctgcatccctctccccgtawcccacaggccaacaagggctgggaggcagtggccaaggaaagattgaatgagctggggctgctgccactgctgttgaaatgagtgcccttggggccttgcatgggacacattcaagacctcgaagtcattcttggccaagcagatgacaacacatctcctgkactggagcaaaaggtccttctgtgcaccctggtcgctgggaaacgtattctttgatctgttgaactgtcttccaacctgccatggcagttttgacactactcctgtttgccctcctgattcctgctttctttaccttttaacattgcccctttcaggggaccccactttgtagggaatcygcagaaggtgtgcttttgcacttgcagactgctctacctcagtgtttccttgggagactttattcagctgagartgccctagacagtaacttctaaggtcacgtttactatttcagaggaaatatcttgccaggatacctacccatccttatagaacagttrcctttagctgacccctttcctcacagggaccaagacaaagcatgggacatgaaattaagagtgaacttcttatgggaggctgcagctggatcagaggaaaaatccagtgtgacagagtgcaagtcagaagacctggcttttcatcccagctttgaaacttggaactttttgattgacaaattaataaacctctctatgcctcaggctcctcatctgtaaaacagggatgcctaccttatggggttggtgtgaggattaactgagatcacacttgaaagtgccttgcatgggcttggcatgtgggtgctcattacatagtcttcttgttttcttgcctctgggttgaggattcacagcactgcactacaagggtagcccctctccattctggataccttgctaggagagagtctgggcttccacctgcggccagggtgaagggaaaattcttgccatgtcagagatggatcaatgactatgaaaaaactagcctgtgattttttttcactctaagcattaagagctcctaaagcc

SEQ ID NO: 4763 - DNA, 1043 bp, Homo sapiens
gggtcggcgctcctgcctccctgcagggagctgcttatgggacaccrmttcctgcgcggcctcttaacgctgctgctgccgccgccacccctgtatacccggcaccgcatgctcggtccagagtccgtcccgcccccaaaacgatcccgcagcaaactcatggcaccgccccgaatcgggacgcacaatggcaccttccactgcgacgaggcactggcatgcgcactgcttcgcctcctgccggagtaccgggatgcagagattgtgcggacccgggatcccgaaaaactcgcttcctgtgacatcgtggtggacgtggggggcgagtacgaccctcggagacaccgatatgaccatcaccagaggtctttcacagagaccatgagctccctgtcccctgggaagccgtggcagaccaagctgagcagtgcgggactcatctatctgcacttcgggcacaagctgctggcccagttgctgggcactagtgaagaggacagcatggtgggcaccctctatgacaaggcagggttcaagcgtgcaatggatctggttcaagaggagtttctgcagagattagatttctaccaacacagctggctgccagcccgggccttggtggaagaggcccttgcccagcgattccaggtggacccaagtggagagattgtggaactggcgaaaggtgcatgtccctggaaggagcatctctaccacctggaatctgggctgtcccctccagtggccatcttctttgttatctacactgaccaggctggamagtggcgaatacagtgtgtgcccaaggagccccactcattccaaagccggctgcccctgccagagccatggcggggtcttcgggacgaggccctggaccaggtcagtgggatccctggctgcatcttcgtccatgcaagcggcttcaytggcggtcamcvcacccgagagggtgccttgagcatggcccgtgccaccttggcccagcgctcatacctcccacaaatctcctagtctaataaaaccttccatctcatactgac

SEQ ID NO: 4764 - DNA, 1196 bp, Homo sapiens
gggtcggcgctcctgcctccctgcagggagctgcttatgggacaccrmttcctgcgcggcctcttaacgctgctgctgccgccgccacccctgtatacccggcaccgcatgctcggtccagagtccgtcccgcccccaaaacgatcccgcagcaaactcatggcaccgccccgaatcgggacgcacaatggcaccttccactgcgacgaggcactggcatgcgcactgcttcgcctcctgccggagtaccgggatgcagagattgtgcggacccgggatcccgaaaaactcgcttcctgtgacatcgtggtggacgtggggggcgagtacgaccctcggagacaccgatatgaccatcaccagaggtctttcacagagaccatgagctccctgtcccctgggaagccgtggcagaccaagctgagcagtgcgggactcatctatctgcacttcgggcacaagctgctggcccagttgctgggcactagtgaagaggacagcatggtgggcaccctctatgacaagatgtatgagaactttgtggaggaggtggatgctgtggacaatgggatctcccagtgggcagagggggagcctcgatatgcactgaccactaccctgagtgcacgagttgctcgacttaatcctacctggaaccaccccgaccaagacactgaggcagggttcaagcgtgcaatggatctggttcaagaggagtttctgcagagattagatttctaccaacacagctggctgccagcccgggccttggtggaagaggcccttgcccagcgattccaggtggacccaagtggagagattgtggaactggcgaaaggtgcatgtccctggaaggagcatctctaccacctggaatctgggctgtcccctccagtggccatcttctttgttatctacactgaccaggctggamagtggcgaatacagtgtgtgcccaaggagccccactcattccaaagccggctgcccctgccagagccatggcggggtcttcgggacgaggccctggaccaggtcagtgggatccctggctgcatcttcgtccatgcaagcggcttcaytggcggtcamcvcacccgagagggtgccttgagcatggcccgtgccaccttggcccagcgctcatacctcccacaaatctcctagtctaataaaaccttccatctcatactgac

SEQ ID NO: 4765 - DNA, 2822 bp, Homo sapiens
ggagcccgggggttggcgaccgaagtctaggttttcgagaaagccagggtgggaaccctaactggactcttcgggacccccaggaaggatctgaggcctgagccatcctcctttctaccctgtctgccccccaggactgggcagttgcaggaggccctgggggggggcccaggactgtggttgtgccccccccccaaaggccggacaggatgggaccaagttagtctgtccagtctcacccagcacctcccaggcccagagagaacccccggggctctgaaagcttgccctgccgcctgaccgccatggagacgaagctgccccctgcaagcacccccactagcccctcctcccccgggctgtcgcctgtgcccccacccgacaaggtggacggcttctcccgccgttccctccgcagagcccggccccgccgctcccacagctcctctcagttccgctatcagagcaaccagcaagagctcacaccgctgcccctgctcaaagatgtgccggcttccgagctgcacgagctgctgagccggaagctggcccagtgtggggtgatgtttgacttcttggactgtgtggccgacctcaaggggaaggaggtgaagcgggcagccctcaacgagctggtggagtgtgtggggagcacccggggtgtcctcatcgagcccgtctacccagacatcatccgcatgatctcagtgaatatcttccggactctgccgcccagtgagaaccctgaatttgaccctgaagaggatgagcccaatcttgagccttcgtggccacacctgcagctggtatatgagtttttcctgcgtttcttggagagcccagacttccagccctccgtggccaagagatatgtggatcaaaagtttgtcctgatgctcctggagctatttgatagtgaggatccccgggagcgtgagtacctcaagaccatcctgcaccgggtctatggcaagttcctgggtctccgggcctacatccgcaaacagtgcaaccacatcttcctccggttcatctatgaattcgagcacttcaatggtgtggctgagctgctggagatcctaggaagcatcatcaatggctttgcgctgcccctgaagacggagcacaagcagttcctggttcgcgtcctgatccccctgcactctgtcaagtcgctgtctgtcttccatgcccagctggcatactgtgtggtgcagttcctggagaaggatgccactctgacagagcacgtgatccgggggctgctcaaatactggccaaaaacctgcacccagaaggaggtgatgtttctgggggagatggaagagattcttgatgtcatcgagccctcccagtttgtgaagatccaggagcccctttttaagcaggtggctcgctgtgtttccagcccccatttccaggttgcagagcgggctctgtatttctggaacaatgagtatatcctaagcctcattgaggacaactgccacactgtgctgcctgctgtgtttgggaccctctaccaagtctccaaggagcactggaaccaaaccatcgtatcactgatctacaatgtgctcaagaccttcatggagatgaatgggaagctgtttgatgagctcacagcctcctacaagctggaaaagcagcaggagcagcagaaggcccaggagcgtcaggagttatggcaaggtctggaggagctgcggctacgccggctacaggggacccagggggccaaggaggcccccctccagcggcttacaccccaggtggccgccagtgggggtcagagctagacagcacctcagaaggggaaaagctaaacccagagctgtcagtccctctatcccttctcctgtccaggggcccagagagaaacacacctacccctggccttgccagagtggcttctgaggactccctgcccagcccagctttcactggggggagacgaggagaggcaatggtggtcttggcaacagaatgctcagcccctcgtggcaggacttgacaagggcaagcttgaccaggaagctgccatcagggatcttcccctgccccgcaaagctaggctccagctgcaggcgggctcccaccctctgctcctggccttgggcaagggcactcagcgcctcgcctgcccctgccttggccaatgcgaggtccttccttatccccaccatggggtccatggtctatttattctcgcccagctcaccctctacacagacactgtcctgggtgcacactcctcccttccctcgctgtgtacttccttgtcccctttttatttattgggcagggggagggggagggcacaggcaagaagagattcacagtgtcctggggtaagggggggttcacagtaatcatggtctactcctctttccgtggctgggggtagacttaataaagagagaaattcaagaactgcttgctttatttaggggtaagggcaaagagggaagtaaaatgatgaaagattggtttaraagggccaggcagaggcagggaaraagcaraaactcccctcttctcaggtgacagtcacaaaatcttacaaaggatcaaagctggaacaaccctccccttatttaaaaaaattccatagcaagtaaccatcagggctggagctccttccagtttttgaatcttgaacacaggtttcccccamcagaaygtcaagccctgtgacccaggggaggaaggaggggagaggatgggctagtagcgagagaggcgacacatgtcacactggcaggccctggccgtgaagatctcgagctcctccctccggctccccacacactgcagctgta

SEQ ID NO: 4766 - DNA, 3024 bp, Homo sapiens
gtaaactcagtgcgcgatcttaagcgcgcatctgtggaaacaattaaaaaaagtttgccaaccgctgctctgtagggggcagccacacaaaacctcttacatcatgggcgacttcaggaacagccatagggtctctgtcacccaggctggaatgcgacagcacaatcacagcttactgcagcctctaactcctgggcttatgtgatcttcccacctcagcctcccaaagtattgagattacagagccagggtgggaaccctaactggactcttcgggacccccaggaaggatctgaggcctgagccatcctcctttctaccctgtctgccccccaggactgggcagttgcaggaggccctgggggggggcccaggactgtggttgtgccccccccccaaaggccggacaggatgggaccaagttagtctgtccagtctcacccagcacctcccaggcccagagagaacccccggggctctgaaagcttgccctgccgcctgaccgccatggagacgaagctgccccctgcaagcacccccactagcccctcctcccccgggctgtcgcctgtgcccccacccgacaaggtggacggcttctcccgccgttccctccgcagagcccggccccgccgctcccacagctcctctcagttccgctatcagagcaaccagcaagagctcacaccgctgcccctgctcaaagatgtgccggcttccgagctgcacgagctgctgagccggaagctggcccagtgtggggtgatgtttgacttcttggactgtgtggccgacctcaaggggaaggaggtgaagcgggcagccctcaacgagctggtggagtgtgtggggagcacccggggtgtcctcatcgagcccgtctacccagacatcatccgcatgatctcagtgaatatcttccggactctgccgcccagtgagaaccctgaatttgaccctgaagaggatgagcccaatcttgagccttcgtggccacacctgcagctggtatatgagtttttcctgcgtttcttggagagcccagacttccagccctccgtggccaagagatatgtggatcaaaagtttgtcctgatgctcctggagctatttgatagtgaggatccccgggagcgtgagtacctcaagaccatcctgcaccgggtctatggcaagttcctgggtctccgggcctacatccgcaaacagtgcaaccacatcttcctccggttcatctatgaattcgagcacttcaatggtgtggctgagctgctggagatcctaggaagcatcatcaatggctttgcgctgcccctgaagacggagcacaagcagttcctggttcgcgtcctgatccccctgcactctgtcaagtcgctgtctgtcttccatgcccagctggcatactgtgtggtgcagttcctggagaaggatgccactctgacagagcacgtgatccgggggctgctcaaatactggccaaaaacctgcacccagaaggaggtgatgtttctgggggagatggaagagattcttgatgtcatcgagccctcccagtttgtgaagatccaggagcccctttttaagcaggtggctcgctgtgtttccagcccccatttccaggttgcagagcgggctctgtatttctggaacaatgagtatatcctaagcctcattgaggacaactgccacactgtgctgcctgctgtgtttgggaccctctaccaagtctccaaggagcactggaaccaaaccatcgtatcactgatctacaatgtgctcaagaccttcatggagatgaatgggaagctgtttgatgagctcacagcctcctacaagctggaaaagcagcaggagcagcagaaggcccaggagcgtcaggagttatggcaaggtctggaggagctgcggctacgccggctacaggggacccagggggccaaggaggcccccctccagcggcttacaccccaggtggccgccagtgggggtcagagctagacagcacctcagaaggggaaaagctaaacccagagctgtcagtccctctatcccttctcctgtccaggggcccagagagaaacacacctacccctggccttgccagagtggcttctgaggactccctgcccagcccagctttcactggggggagacgaggagaggcaatggtggtcttggcaacagaatgctcagcccctcgtggcaggacttgacaagggcaagcttgaccaggaagctgccatcagggatcttcccctgccccgcaaagctaggctccagctgcaggcgggctcccaccctctgctcctggccttgggcaagggcactcagcgcctcgcctgcccctgccttggccaatgcgaggtccttccttatccccaccatggggtccatggtctatttattctcgcccagctcaccctctacacagacactgtcctgggtgcacactcctcccttccctcgctgtgtacttccttgtcccctttttatttattgggcagggggagggggagggcacaggcaagaagagattcacagtgtcctggggtaagggggggttcacagtaatcatggtctactcctctttccgtggctgggggtagacttaataaagagagaaattcaagaactgcttgctttatttaggggtaagggcaaagagggaagtaaaatgatgaaagattggtttaraagggccaggcagaggcagggaaraagcaraaactcccctcttctcaggtgacagtcacaaaatcttacaaaggatcaaagctggaacaaccctccccttatttaaaaaaattccatagcaagtaaccatcagggctggagctccttccagtttttgaatcttgaacacaggtttcccccamcagaaygtcaagccctgtgacccaggggaggaaggaggggagaggatgggctagtagcgagagaggcgacacatgtcacactggcaggccctggccgtgaagatctcgagctcctccctccggctccccacacactgcagctgta

SEQ ID NO: 4767 - DNA, 1543 bp, Homo sapiens
gcggccacccgcagaacagagcttccgggacccacgcctcgtttgcactgggtgctggacagccgacgcaactacaaatggggcggagctttcggcactggagcagctaatttgcatataggaatgaggtgcggctcggcttccatgggcctaatttacagatagggcggtatttctgccccttaaccgaaagtgggatacagaggacgacggtgttaggcgcctgtgtaggagtaaaatgtgtttattttgcattcaacragagctcctgcattgcagctattttgcatatgatttgcatcttacgaagaatttgtggcaaaaaaaagctgggcgtgcgccgtaggaacctcctgctgagacgcttccggtagcggcgcgtgacccgacaggtctttcacctacctacckcagctcccacaaacacgagaagttccagcaagttcgccacttccggttctcctggctatccaatagcatcgagwggagcatcccsggaagtkaggcagcggaggacgacctttttccggttccggcctggcgagagtttgtkcggcgacatgaaactgcttacccacaatctgctgagctcgcatgtgcggggggtggggtcccgtggcttccccctgcgcctccaggccaccgaggtccgtatctgccctgtggaattcaaccccaacttcgtggcgcgtatgatacctaaagtggagtggtcggcgttcctggaggcggccgataacttgcgtctgatccaggtgccgaaagggccggttgagggatatgaggagaatgaggagtttctgaggaccatgcaccacctgctgctggaggtggaagtgatagagggcaccctgcagtgcccggaatctggacgtatgttccccatcagccgcgggatccccaacatgctgctgagtgaagaggaaactgagagttgattgtgccaggcgccagtttttcttgttatgactgtgtatttttgttgatctataccctgtttccgaattctgccgtgtgtatccccaacccttgacccaatgacaccaaacacagtgtttttgagctcggtattatatatttttttctcattaaaggtttaaaaccaaaagcggtttctctttgcagcaaatatacattaaaatagagtctctgtacagycaagggctctgggccctggcttgccccatgtccctgcgcctccctggccaaacccaaaaataaatatagtgttattgctctgcagggcataraggcagtgctctcctaccccctgaggaggctcgttgggagctgatggggaagccctggccaccccaggggtccaggggctggagtctgcttggagttattgcttcaaggggggacactaatgcccaatgcaaatgatgagaggaggagcgaagggggtaggattaagcagcagcaaaagcatcacccactgggagactctggcctccatccccttccctccctgagataggtttctgcctcccacgcatcccgtgcagccccctatggcttccgcaaggccccctacactctg

SEQ ID NO: 4768 - DNA, 1722 bp, Homo sapiens
gcggccacccgcagaacagagcttccgggacccacgcctcgtttgcactgggtgctggacagccgacgcaactacaaatggggcggagctttcggcactggagcagctaatttgcatataggaatgaggtgcggctcggcttccatgggcctaatttacagatagggcggtatttctgccccttaaccgaaagtgggatacagaggacgacggtgttaggcgcctgtgtaggagtaaaatgtgtttattttgcattcaacragagctcctgcattgcagctattttgcatatgatttgcatcttacgaagaatttgtggcaaaaaaaagctgggcgtgcgccgtaggaacctcctgctgagacgcttccggtagcggcgcgtgacccgacaggtctttcacctacctacckcagctcccacaaacacgagaagttccagcaagttcgccacttccggttctcctggctatccaatagcatcgagwggagcatcccsggaagtkaggcagcggaggacgacctttttccggttccggcctggcgagagtttgtkcggcgacatgaaactgcttacccacaatctgctgagctcgcatgtgcggggggtggggtcccgtggcttccccctgcgcctccaggccaccgaggtccgtatctgccctgtggaattcaaccccttgcgtctgatccaggtgccgaaagggccggttgagggatatgaggagaatgaggagtttctgaggaccatgcaccacctgctgctggaggtggaagtgatagagggcaccctgcagtgcccggaatctggacgtatgttccccatcagccgcgggatccccaacatgctgctgagtgaagaggaaactgagagttgattgtgccaggcgccagtttttcttgttatgactgtgtatttttgttgatctataccctgtttccgaattctgccgtgtgtatccccaacccttgacccaatgacaccaaacacagtgtttttgagctcggtattatatatttttttctcattaaaggtttaaaaccaaaagcggtttctctttgcagcaaatatacattaaaatagagtctctgtacagycaagggctctgggccctggcttgccccatgtccctgcgcctccctggccaaacccaaaaataaatatagtgttattgctctgcagggcataraggcagtgctctcctaccccctgaggaggctcgttgggagctgatggggaagccctggccaccccaggggtccaggggctggagtctgcttggagttattgcttcaaggggggacactaatgcccaatgcaaatgatgagaggaggagcgaagggggcatgggcctttgctctccaagtcccactctgctttgaagagggggtaggattaagcagcagcaaaagcatcacccactgggagactctggcctccatccccttccctccctgagataggtttctgcctcccacgcatcccgtgcagccccctatggcttccgcaaggccccctacactctgggggcacgttatggcttgcaaggggcagcactgtgcccagagcctggacacacgttcccagcttctgacaccccctaggagggggaggagagggcgtggggcctgttcccaggggctgatggcattgccctggccctgccagcaggctgtggcactgcccagaccccagctccgccccagccmttggggctgacccc

SEQ ID NO: 4769 - DNA, 1785 bp, Homo sapiens
gcggccacccgcagaacagagcttccgggacccacgcctcgtttgcactgggtgctggacagccgacgcaactacaaatggggcggagctttcggcactggagcagctaatttgcatataggaatgaggtgcggctcggcttccatgggcctaatttacagatagggcggtatttctgccccttaaccgaaagtgggatacagaggacgacggtgttaggcgcctgtgtaggagtaaaatgtgtttattttgcattcaacragagctcctgcattgcagctattttgcatatgatttgcatcttacgaagaatttgtggcaaaaaaaagctgggcgtgcgccgtaggaacctcctgctgagacgcttccggtagcggcgcgtgacccgacaggtctttcacctacctacckcagctcccacaaacacgagaagttccagcaagttcgccacttccggttctcctggctatccaatagcatcgagwggagcatcccsggaagtkaggcagcggaggacgacctttttccggttccggcctggcgagagtttgtkcggcgacatgaaactgcttacccacaatctgctgagctcgcatgtgcggggggtggggtcccgtggcttccccctgcgcctccaggccaccgaggtccgtatctgccctgtggaattcaaccccaacttcgtggcgcgtatgatacctaaagtggagtggtcggcgttcctggaggcggccgataacttgcgtctgatccaggtgccgaaagggccggttgagggatatgaggagaatgaggagtttctgaggaccatgcaccacctgctgctggaggtggaagtgatagagggcaccctgcagtgcccggaatctggacgtatgttccccatcagccgcgggatccccaacatgctgctgagtgaagaggaaactgagagttgattgtgccaggcgccagtttttcttgttatgactgtgtatttttgttgatctataccctgtttccgaattctgccgtgtgtatccccaacccttgacccaatgacaccaaacacagtgtttttgagctcggtattatatatttttttctcattaaaggtttaaaaccaaaagcggtttctctttgcagcaaatatacattaaaatagagtctctgtacagycaagggctctgggccctggcttgccccatgtccctgcgcctccctggccaaacccaaaaataaatatagtgttattgctctgcagggcataraggcagtgctctcctaccccctgaggaggctcgttgggagctgatggggaagccctggccaccccaggggtccaggggctggagtctgcttggagttattgcttcaaggggggacactaatgcccaatgcaaatgatgagaggaggagcgaagggggcatgggcctttgctctccaagtcccactctgctttgaagagggggtaggattaagcagcagcaaaagcatcacccactgggagactctggcctccatccccttccctccctgagataggtttctgcctcccacgcatcccgtgcagccccctatggcttccgcaaggccccctacactctgggggcacgttatggcttgcaaggggcagcactgtgcccagagcctggacacacgttcccagcttctgacaccccctaggagggggaggagagggcgtggggcctgttcccaggggctgatggcattgccctggccctgccagcaggctgtggcactgcccagaccccagctccgccccagccmttggggctgacccc

SEQ ID NO: 4770 - DNA, 3606 bp, Homo sapiens
acttactgtcattaaaccagtatgatgatggagtggggaatgcctcagtttctcccaccgccgagggcctataggactacagttcccagggccccgtgctgcaggctagcggcctcccgccaatgctggccagtaacctgagcatccctctccaaaaggtcacttcagggctccttgagggacagcaacagggggagcctagagctgctcagcttcggtgggggtggagtgagggctgtggmcctgcctcacacaacctccctcacaccacccctgcaatgcagggtcgtgggcccctttctcaaagacatccagtggcctctgctagttgcacctcttccgtcaggggacactgacttggctcctgcaccacagcctgcagggggtcctggttccttttgccacaacacatggcctcccatcctggttcagccacygacagacagctccccaatccagcactctgcctgctccttcttgtatccaaccctccaaaaggcagggacaagggacagaagaccatgtgcaaggcctggaggaagtgggtcagcacaggcctgtgaacaagccaggccagtcttggcggcccaagtggagctcacctctccctcccctctcctctcctccccttgccctcaaaatagctccctgagctgccaggccaagaccctcccattgcaggggaggcggggcgtgctgcccagagccaggctttaaatccccttgaggctggggagctccactccttggctggaggcagtgctgaggccgccgtcccctctaccatcagtccagtccggcccgccctcctgcagccatgtcccggcccctgtcagaccaagagaaaagaaagcaaatcagtgtgcgtggcctggccggcgtggagaacgtgactgagctgaaaaagaacttcaaccggcacctgcatttcacactcgtaaaggaccgcaatgtggccaccccaygagactactastttgctctggcccataccgtgcgcgaccacctcgtggggcgctggatccgcacgcagcagcactactatgagaaggaccccaagaggatctactacctgtctttagagttctatatgggacggacgctacagaacaccatggtgaacctggccttagagaatgcctgtgacgaggccacctaccagcygggcctggacatggaggagctggaggaaattgaggaggatgcggggctgggcaacgggggcctgggccggctggcagcctgctttcttgactccatggcaacactgggcctggccgcctatggctacgggattcgctatgagtttgggatttttaaccagaagatctccgggggctggcagatggaggaggccgatgactggcttcgctacggcaamccctgggagaaggccyggcccgagttcacgctacctgtgcacttctacrgccatgtggagcacaccagccagggtgccaagtgggtggacacacaggtggtactggccatgccctacgatacgcccgtgcctggctatcgcaacaatgttgtcaacaccatgcgcctctggtctgccaaggctcccaatgacttcaacctcaaggacttcaatgtcggtggctacatccaggctgtgttggaccgaaacctggcggagaacatctctcgtgtcctgtaccccaatgataatttcttcgaagggaaggagcygcggctgaagcaggagtatttcgtggtggctgccaccctccaggacatcatccgtcgcttcaagtcttccaagttcggctgccgtgatcccgtgcgcacgaacttcgatgccttcccagataaggtggccatccagctcaatgacacccacccctccctggccatccccragctgatgaggatcctggtggacctggaacggatggactrggacaaggcgtgggatgtgacagtgaggacctgtgcctacaccaaccacacggtgctgcccgaggccctggagcgctggccggtgcacctcttggagacgctgcygccgcggcacctccagatcatctacgagatcaaccagcgcttcctcaaccgggtggcggccgcattcccaggggacgtagaccggctgcggcgcatgtygctggtggaggagggcgcagtgaagcgcatcaacatggcacacctgtgcatcgcggggtcgcacgccgtcaacggcgtggcgcgcatccactccgagatcctcaagaagaccatcttcaaagacttctatgagctggagcctcataagttccagaataagaccaacggcatcamccctcggcgctggctggttctgtgtaacccygggctggcagaggtcattgctgagcgcatcggggaggacttcatctctgacctggaccagctgcgcaaactgctctcctttgtggatgatgaagctttcattcgggatgtggccaaagtgaagcagkaaaacamgttgaagtttgctgcctacctagagagggaatacaaagtccacatcaaccccaactcactcttcgacatccaggtgaagcggattcacgaatataaaygacagctcctcaactgcctccatgtcatcaccctgtacaaccgcatcaagagggagcccaataagttttttgtgcctcggactgtgatgattggagggaaggctgcacctgggtaccacatggccaagatgatcatcagactcgtcacagccatcggggatgtggtcaaccatgacccggcagtgggtgaccgcctccgtgtcatcttcctggagaactaccgagtctcastggccragaaagtgatcccagmtgcagacctctctgagcagatctccactgcgggcactgaagcctcaggcaccggcaacatgaagttcatgctcwacvggsctctgaccattggcaccatggacggggccaatgtggagatggcagaagaggyrggagaggaaaacttcttcatctttggcatgcgggtggaggatgtggataagcttgaccaaagagggtacaatgcccaggagtactacgatcgcattcctgagcttcggcaggtcattgagcagctgagcagtggcttcttctcccccaaayagcccgacctgttcaaggacattgtcaatatgctcatgcaccatgaccggtttaaagtcttcgcagattatgaagactacattaaatgccaggagaaagtcagcgccttgtacaagaacccaagagagyggacgcggatggtgatccggaacatagccacctctggcaagttctccagtgaccgcaccattgcccagtatgcccgggagatctggggtgtggagccttcccgccagcgcctgccagccccggatgaggccatctgagcctccagaccagaccccaaaccagcccttgagtctgtcacactctcttgggccagccccagcacctcatgcagagggtggggtactggagttagatctctaagcccctcctggaaccctcattttccccactctcaatgtcccagtgtccagcgtgactaaggacacgggcccccttccgtcctcgggctcccggtcccctcctatttatggggtctgaccaactgcacccactccctaataaattcattctccttggg

SEQ ID NO: 4771 - DNA, 1320 bp, Homo sapiens
atgcctatggcgtcccctcaaaccctggtcctctatctgctggtcctggcagtcactgaagcctggggccaggaggcagtcatcccaggctgccacttgcaccccttcaatgtgacagtgcgaagtgaccgccaaggcacctgccagggctcccacgtggcacaggcctgtgtgggccactgtgagtccagcgccttcccttctcggtactctgtgctggtggccagtggttaccgacacaacatcacctccgtctctcagtgctgcaccatcagtggcctgaagaaggtcaaagtacagctgcagtgtgtggggagccggagggaggagctcgagatcttcacggccagggcctgccagtgtgacatgtgtcgcctctctcgctactagcccatcctctcccctccttcctcccctgggtcacagggcttgacrttctgktgggggaaacctgtgttcaagattcaaaaactggaaggagctccagccctgatggttacttgctatggaatttttttaaataaggggagggttgttccagctttgatcctttgtaagattttgtgactgtcacctgagaagaggggagtttytgcttyttccctgcctctgcctggcccttytaaaccaatctttcatcattttacttccctctttgcccttacccctaaataaagcaagcagttcttgaatttctctctttattaagtctacccccagccacggaaagaggagtagaccatgattactgtgaacccccccttaccccaggacactgtgaatctcttcttgcctgtgccctccccctccccctgcccaataaataaaaaggggacaaggaagtacacagcgagggaagggaggagtgtgcacccaggacagtgtctgtgtagagggtgagctgggcgagaataaatagaccatggaccccatggtggggataaggaaggacctcgcattggccaaggcaggggcaggcgaggcgctgagtgcccttgcccaaggccaggagcagagggtgggagcccgcctgcagctggagcctagctttgcggggcaggggaagatccctgatggcagcttcctggtcaagcttgcccttgtcaagtcctgccacgaggggctgagcattctgttgccaagaccaccattgcctctcctcgtctccccccagtgaaagctgggctgggcagggagtcctcagaagccactctggcaaggccaggggtaggtgtgtttctctctgggcccctggacaggagaagggatagagggactgacagctctgggtttagcttttccccttctgaggtgctgtct

SEQ ID NO: 4772 - DNA, 1377 bp, Homo sapiens
gaccagcaggaggcacaggaaaactgcaagccgctctgttcctgggcctcggaagtgatgcctatggcgtcccctcaaaccctggtcctctatctgctggtcctggcagtcactgaagcctggggccaggaggcagtcatcccaggctgccacttgcaccccttcaatgtgacagtgcgaagtgaccgccaaggcacctgccagggctcccacgtggcacaggcctgtgtgggccactgtgagtccagcgccttcccttctcggtactctgtgctggtggccagtggttaccgacacaacatcacctccgtctctcagtgctgcaccatcagtggcctgaagaaggtcaaagtacagctgcagtgtgtggggagccggagggaggagctcgagatcttcacggccagggcctgccagtgtgacatgtgtcgcctrtctcgktactagcccatcctctcccctccttcctcccctgggtcacagggcttgacgttctggtgggggaaacctgtgttcaagattcaaaaactggaaggagctccagccctgatggttacttgctatggaatttttttaaataaggggagggttgytccagytttgatcctttgtaagattttgtyactgtcacctgagaagaggggagtttctgcttcttccctgcctctgcctggcccttctaaaccaatctttcatcattttacttccctctttgcccttacccctaaataaagcaagcagttcttgaatttctctctttattaagtctacccccagccacggaaagaggagtagaccatgattactgtgaacccccccttaccccaggacactgtgaatctcttcttgcctgtgccctccccctccccctgcccaataaataaaaaggggacaaggaagtacacagcgagggaagggaggagtgtgcacccaggacagtgtctgtgtagagggtgagctgggcgagaataaatagaccatggaccccatggtggggataaggaaggacctcgcattggccaaggcaggggcaggcgaggcgctgagtgcccttgcccaaggccaggagcagagggtgggagcccgcctgcagctggagcctagctttgcggggcaggggaagatccctgatggcagcttcctggtcaagcttgcccttgtcaagtcctgccacgaggggctgagcattctgttgccaagaccaccattgcctctcctcgtctccccccagtgaaagctgggctgggcagggagtcctcagaagccactctggcaaggccaggggtaggtgtgtttctctctgggcccctggacaggagaagggatagagggactgacagctctgggtttagcttttccccttctgaggtgctgtct

SEQ ID NO: 4773 - DNA, 1070 bp, Homo sapiens
gaccagcaggaggcacaggaaaactgcaagccgctctgttcctgggcctcggaagtgatgcctatggcgtcccctcaaaccctggtcctctatctgctggtcctggcagtcactgaagcctggggccaggaggcagtcatcccaggctgccacttgcaccccttcaatgtgacagtgcgaagtgaccgccaaggcacctgccagggctcccacgtggcacaggcctgtgtgggccactgtgagtccagcgccttcccttctcggtactctgtgctggtggccagtggttaccgacacaacatcacctccgtctctcagtgctgcaccatcagtggcctgaagaaggtcaaagtacagctgcagtgtgtggggagccggagggaggagctcgagatcttcacggccagggcctgccagtgtgacatgtgtcgcctrtctcgktactagcccatcctctcccctccttcctcccctgggtcacagggcttgacgttctggtgggggaaacctgtgttcaagattcaaaaactggaaggagctccagccctgatggttacttgctatggaatttttttaaataaggggagggttgytccagytttgatcctttgtaagattttgtyactgtcacctgagaagaggggagtttctgcttcttccctgcctctgcctggcccttctaaaccaatctttcatcattttacttccctctttgcccttacccctaaataaagcaagcagttcttgaatttctctctttattaagtctacccccagccacggaaagaggagtagaccatgattactgtgaacccccccttaccccaggacactgtgaatctcttcttgcctgtgccctccccctccccctgcccaataaataaaaaggggacaaggcgacagcccgggggaggaggggctagtgggggtgcttgcagggggcagcttcgtctccatggcggtcaggcggcagggcaagctttcagagccccgggggttctctctgggcctgggaggtgctgggtgagactggacagactaacttggtcccatcctgtccggcctttggg

SEQ ID NO: 4774 - DNA, 7450 bp, Homo sapiens
ctcacytctgacagccagacaagggctgtgctcaggggcagctcggctgggcacacagtaggtgctttagcggacagcactgaggcccccagcaagaagcccatgagctcctccccctcccgcagtgccgccgacatctacatccgggagtatttccacagccacgtcagcggcggccaccccgaggccactcctctccgtgtgatgtacacggaccggccgctgagccagacggacccagtcacgctgcagtactgttgcctgaccgacgaccgccaggctttccrcccgcccacacgggcagagctggcgcggcaccgcgtggtggtcaccaccacctcccaggcccgtgagctcagggtgccggtcggcttcttctcccacattctcatygatgaggcggcccagatgctggagtgygaggccctcaccccgctggcctaygcctcgcacggcacccgcctcgtgctggcgggcgaccacatgcaggtcacaccccggctgttcagtgtggccagggccygggcggccgagcacacgctgctgcaccgcctcttcctgtgctaccagcaggagactcacgaggtggcgcggcagagccgcctggtcttccacgagaactaccgctgcacggacgccattgtcagcttcatctcgcggcacttctacgtggccaagggcaaccccatccacgccaggggcaaggttccsccccacccccggcactacccgctcatgttctgccacgtggcgggcarcccagaccgggacatgtccatggcgtcctggctgaatctggctgagattgcgcaggtcgtcgagaaggtgcaggaggcctacaacacctggcccagctgctggggcggccgygagcagaggtgcatctgtgtcgtttcccacggtgcccaggtcagtgcactgaggcaggagctgaggaggcgggacctaggccaggtgtctgtcggcagttttgagatcctgccagggcggcagttccgggtygtggtgctcagcactgtgcacacctgccagagcctgctcagccctggggcactggcccctgagttcttcaccgacgcccgcgtgctcaacaccgtcctgacccgcgcccagtcccagctggtggtagtgggggacgccgtggccctctgctccttcggggcctgcggcaagctctgggagagcttcatccgtgagtgygtggagcggcacagtgtctgccccgagggcctgtccatggagcaggtcgagcagggtgtggcgcagagacggcgctggcctccccgaggcacacaggctggggcagcggggaactgggaggctgccccagagccagtaggggacctggccgaggagcaggcggctgtggtgacggccatggtgaaggcagagccgggagatgaggctctgagcccagcatcccgtgacatcacggcaaccacagcgcagacggaggctgcggcagcaccagcaggagacgcagtgaaggaagacgtggtgcccggggcctgtgcggcaggagcggctgctgcagcgggcgtggagtccacggaggctgaggatgcagaggctgacttctggccgtgggacggggagctcaacgctgacgacgccatcctacgggagcttctggacgagagccagaaggtgatggtgaccgtcggggaggacgggctgctggacacygtcgccaggcccgagtccctgcagcaggcccggctgtacgagaacctgcccccggctgcgctacggaagctgctgcrcgcggagcccgagcggtaccgccactgctctttcgtgccagagaccttcgagcgggcgtcagccatcccgctggacgatgcctcctygggccccatccaggtcaggggccgcctggactgtgggatggccttcgccggggatgaggtgctggtgcagctcctttcgggagacaaggcgcccgaggggcggcttcggggccgcgtgctgggcgtgctgaagaggaagaggcacgagctggcgtttgtgtgccgcatggacacgtgggacccgcgcatcatggtccccatcaatggctccgtgaccaagatcttcgtggccgagctgaaggacccatcgcaggtccccatctacagcctccggaagggccggctgcagcgtgtggggcttgagaggctcaccgccgaggcccggcacagccggctcttctgggtccaaattgtcctgtggcggcaaggsttctactacccgctgggcatcgtccgggaggtgctgcctgaggccagcacctgggagcagggcctccgcatcctcggcctggagtacagcttgaggktgcccccgtcggaccaggccaccatcaccaaggtgctgcagaaataccacacggagcttggccgggttgcsggccgccgagaggactgccgcgccttcttgaccttcactgtggacccccagggcgcctgcaacctcgatgatgccctcagtgtccgagacctgggtcccaggtgcgaggtggctgtgcacatcactgatgtggccagcttcgtgcccarggacggggtgctggacgtggaggcgcgaaggcagggcgctgcgttctatgcccccggcagggagccagtgcccatgctgccggccagcctctgccaggaygtcctcagcctcctgcctggccrggaccgcctggccatctccctgttcctcaccatggagaaggccagtggccagctgaagagcctgcgctttgcaccctccgtggtccagtctgaccgccagctgtcctacgaggaggcggaggaggtgatcaggcagcacccgggtgccggccgtgagctgccggcccgcctggactccgtggaygcctgcrtcgtggccgcgtgctacttctctcggctgctgcgccggcaccgcctrcggtccgactgcttctatgagcagccggacgaggacggcaccctgggcttccgcgcggcccacatcatggtgaaggagtacatgattcagtttaataggctcgtggctgagttcctggtgggcagcgagtgcacgcggacggtcacgcctctgcggtggcagccagcaccccgcagccagcagctcaaggccctgtgtgagaagcatggggaccgggtgcccctgtcactgcacctcggccaccacctgcacggcggcgggggcagtccccccgacacgcggctgcacctcctggcctccctctggaagcaggtccagtttgctgcccgcacccaggactacgaacagatggtggacttggtcaccacggacgacatgcacccattcctggctcctgcaggccgcgacctccgcaaggccctggagcgctcggcgttcggccgctgcgcccrgggccaccagcagcagggcggccactactcgctgcaggtggactggtacacgtgggccacctcgcccatccgcaggtacctggacgtggtgttgcagcggcagatcctgctggcgctgggccatgggggctcygcctactctgccagggacatcgatgggctctgccaggccttcagcctccagcacgcacttgcccagagctatcagcggcgggcgcgcagcctgcacctggccgtgcagctcaaggcccagcctctggacaagctgggcttcgtggtggacgtggaggcgggctcccgctgcttccggctgctcttccccagcaaccgggagacgctgcctgacccctgccccgtcccctacggctccctgcagctggccgagcacccccacgccctggyaggccggccgggcctgcggctcctgtggcggcgccgtgtctactcagcgcagggatccagcccgcccctgccactgcctggcactgtgccggacccacacaccckggccgtggagacggccctgtggaagcagctgctggagctggtggagctgcagcgctggccggaggcggctgctctcatccaggagaagggcgaggcgtcccagcggcgggagctggtgcaggtgcagcggagccactgtggccatttcctggaggtggcccgggagctgggcagtggggacaccytgcaggtgcagctcggcrccagcctgcagcacggcttcctggtaccgagccctcagctctggacggtggcaccgggcttcagcctctgcctggagcacgtggagcggcccggagactgcttctcaggccgtgtgtaccgggccccgagggaccggtaccgcgacgtggatgagtacgcctgcgtgtgggaaccattctgcgccctggagtcggccaccggcgcggttgccgagaatgactccgtcacacttcagcacctgagtgtctcctgggaggcgtcacggacgccrcaggggcagctgcagggcgccttccgcctggaggccgccttcctcgaggagaactgtgccgacatcaacttcagctgctgctacctctgcatccggctcgaggggctgcyggctcccacggccagcccacrcccygggcccagcagcctcggccctggcctgaatgttgaccccggcacgtatacctgggtggcccacgggcagacgsaggactgggaccaggagcgccgggcagaccggcaggaggctcccagacgggtgcacctcttcgtccaccacatgggcatggagaaggttccggaagaggtgctgaggccgggcaccctgttcaccgttgagctgctgcccaagcagcttcctgatctccgcaaggaggaagccgtgcgtggactagaggaggcgtccccgctggtcaccagcatcgcactgggccggcctgtcccgcagcccctctgcagagtgatccccagcaggttcctggagcggcagacctacaacatccccggaggccgccacaagctgaaccccagccagaacgtggcggtcagggaggctctggagaagcctttcayggtcattcagggcccaccaggtacagggaagacgatcgtgggcctccacatcgtattctggtttcataaatcaaaccaggagcaggtgcagcccggaggccscccccgtggggagaagcggctggggggtccctgcatcttgtactgcggcccctccaacaagtcggtggatgtcctggcaggactgctcctgagaaggatggagctgaagcccctccgtgtgtacagtgagcaggctgaggccagcgagttcccagtgccrcgtgtgggcagcaggaagctgctcaggaagagcccccgggaggggaggccgaaccagagcctcaggagcatcaccctgcaccaccggatccggcaggcccccaacccttactcgtcggaaatcaaggcctttgacacccggctgcagagaggggagctcttctccagggaggacctggtctggtacaagaaggtcttgtgggaggctcggaagttcgagctggaccggcatgaggtcatcctctgcacctgctcctgtgcagcctctgccagcctcaaaatcctggacgtgaggcagatccttgttgacgaggcaggcatggccacggaacctgaaaccctcatccccctggtgcagttcccacaggccgagaaggtggttcttctcggagaccacaagcagctgcggcctgtrgtcaagaatgagcggctgcaaaacctgggtctggaccggtctctgttcgagcggtaccacgaggacgcacatatgctggacactcagtaccgcatgcatgagggcatctgtgccttcccctctgtggcgttctacaagagcaagctgaagacgtggcagggcctgaggaggccgcccagtgtcctgggccacgctggcaaggagagctgycctgtcatctttggccacgtgcagggccaygagcggagcctgctggtgtccacggacgaagggaatgagaactccaaggccaacctggaggaggtggctgaggtggtccgtatcaccaagcagctgaccctggggaggaccgtagagccccaggacatcgccgtcctcacgccctacaacgcgcaggcctctgagatcagcaaggcccttcggcgagagggcatcgcyggggtggccgtgtcctccatcaccaagagccaggggagcgagtggcgctatgtgctggtgagcaccgtccgcacctgtgccaagagcgacctggaccagcggcccaccaagagctggctcaagaagtttctgggcttcgttgtggaccccaaccaagtgaaygtggctgtcacgcgggcccaggaggggctctgcctgatcggagaccacctccttctgcgctgctgccccctctggcgtagcctcctggacttctgcgaggctcagcagaccctcgtgcctgccggccaggtgcgcgtctgcaggaggccaactatgccttcctgaagagccctctccacctgcaaggtgccaggactgggagggaaagtccagggcccccccaccctccccaccaccctccgccatcagcctgcctgggccagcctgcctcctggcctcaggatctccctggggcaggaagtgggtggacttggaggaggaacggcaagggccggtccccacactcttgctyctcctgggcrtctggggacaggaacacctctcagggtggccaagaggggcttccttgggaccagtgyaaggaagttctgctgtccctgggaagtctcagaaccaggaaggaaaccctgtggaggctgccctttgacctttggacgccacctgtaatcactctggatggtgtctgtggagttcaggtttattttctatttaaatgaactaaaagccagcatcctgccgggcgtggtggctcacgcccataatccagcactttgggaagccgaggcgggcagatcacctgaggtcaggagttcgagaccatcctggccaacatggtgaaaccccgtctccactaaaaatacaaaattagctgggcgtggtggcgggcgcctgtaatcccagctacttgggaggctgaggcaggagaatcgcttgactccaggaggcgcaggctgcagtgagctctgatggtaccactgcactccagcctgggtgacagagcgagaccctgtcttaaaaaaaaaaacaaaacaaaaccagcatctgttactggaacagagacctcagcccaagctcaggacaaggaggcctccctgggagagggggcctttctcccaccatcaccgcctgtgtccttcaggggctgctggagggcagcccaaagccaggggcccaccccgccccaccccaccccaccccaccctctgaaatgtgaaaagcctgcactcttcctgtgggctgcgcagtgggctcgggggttggggggtgccggggcgatgcttccaccctggactgagtgttcggggcagcctgctcggctgtatgtttctcgcacgctcacccgcttcagtgcggctctgtccctgctgccgcctccagtcctgagggaggggcttgccccaccttctacattccaatttttatatctttg

SEQ ID NO: 4775 - DNA, 9630 bp, Homo sapiens
ggccagaatcgaaactgagagctcctgggcaggctcggcagggcaggcagctccaggagggcttcgaaccgtggccaacagttccagtggactgcgtggacccgtgagctcaggagcctcagacgcctccctggagagccaagctggtgttcgaggtggcgcctccagggtccaccctgctgcccaacagccccgcggccaccagagggccgtccctggcccggctgtgtgccctggtggacctgtgtctgggctgctcccgctgcacccagcggctcaatgaaagcacctacgtcctccgtagggtggagcatgactgctcccgcgagatcctgctggcccgctttaagcaggccaccaagagcaaggtctggcgcgtggtgggctgccggcccaccttcccaaggcccctgtgctaccaagtctgccactactacagccctgggctcggctgccggcgccaccgaaaccggtgcacctttgcccgcagtcgcgaggaggccctggtctggaccttcgagcgtcagcacaacctccagcgcctatggctgaaggcggaggtgcagggcagcggggcccagggaggggcaggccgggcggccgacgccatccttacggagtttggcggccgcttcgagctgctttgctccctctgcttcaggcgctgtcccccaygcatctgtcgcgtggacccccaggggcagtgccctgagcacggagcctgcccctccctcctggcccacgtgagcgccgagggccgccgcaagcaacagtttgtggtggtgaggccgcggccccgggccggccagcctcctgcctactgcaggtttgtggggcgtgggcagccgtgctggcgtggggagtcccgctgccagtttgcacacagygccgtggagatggctgtgtgggaggccgagcagctgggtggcctccagcggggggacctgctcacaccccctgcccctgatggcgacgggygcacggccccccttggccagccccctggggcccagctgtactgcccggcctgcttggtcacctgccactctcaggaggccttcgagaaccactgcgcatcctcggagcacgcacagatggtggccttcgaccaggccctgccctgggagcaccgttccccacccccgggactctccaagttcgagctctgcccaaagcctgacctctgtgagtatggggacgcctgcaccaaggcacactcagcacaggagctgcaggagtgggtccggcgcacgcaggctgtggagctgcgggggcaggcggcctggcaggacgggctggtgccctaccaggagcggctgctggccgagtaccagcgcagcagcagtgaggtccttgtgctggcagagacccttgatggagtgcgtgtcacctgcaaccagcccctgatgtaccaggcccaggagaggaagacccagtayagctggacgtttgccgtccactctgaggagcccctgctrcacgtggccctgctgaagcaggagccaggagccgacttctctctggtggctcccggcctcccgccaggccggctctaygcacggggtgagcgcttccgtgtgcccagctccactgccgacttccaggtgggagtgygtgtgcaggcygcctcgttcggcacctttgagcaatgggtggtcttcgactttggccgccggccggtgctgctacaaaagctggggctgcagctgggccaggggcgtcgcccaggaccctgcaggaatctggygctcggccaccctgaggagatggagcgctggcacactggcaaccgccacgtggtgcctggcgtggagcggacggccgagcagacggccctgatggccaagtacaagggccctgccctggccctggagttcaaccgcagcagcgtggcctcgggccccatctyrccaaccaactatcggcagaggatgcaccagtttctctatgaggaggaggcggctcagcagcagctggtggccaagctgaccctgcggggccaggtgttcctgaagacggcattgcagacgccagcgctgaacatgctcttcgcgcctccgggagcactgtacgcagaggtccccgtcccctcctccctgatgccagacacagaccagggcttcctgctgggccgggcggtcagcacagccctggtggcccctgtacctgcacccgacaatacggtgttcgaggtgcggctggagaggcgggccagctcagagcaggcgctgtggctgctgcttccggcccgctgctgcttggccctggggctgcagcctgaggcccgcctggtcctggaggtgcagttccagattgacccgatgaccttccgcctctggcaccaggcagtggacacactgcctgaggagcagctggtggtgcccgacttgcccacctgcrccctgcccagaccttggtctgtcccacccttgcggcgtggcaaccgcaagcaggagctggccgtggcgctcatcgcgggctggggccctggggatgggaggcgtgtccccccgctactcatctatggcccctttggcaccggcaagacctacacgctggccatggcctccctggaggtcatccggaggcctgaaaccaaggtgctcatctgcacacacaccaacagtgccgccgacatctacatccgggagtatttccacagccacgtcagcggcggccaccccgaggccactcctctccgtgtgatgtacacggaccggccgctgagccagacggacccagtcacgctgcagtactgttgcctgaccgacgaccgccaggctttccrcccgcccacacgggcagagctggcgcggcaccgcgtggtggtcaccaccacctcccaggcccgtgagctcagggtgccggtcggcttcttctcccacattctcatygatgaggcggcccagatgctggagtgygaggccctcaccccgctggcctaygcctcgcacggcacccgcctcgtgctggcgggcgaccacatgcaggtcacaccccggctgttcagtgtggccagggccygggcggccgagcacacgctgctgcaccgcctcttcctgtgctaccagcaggagactcacgaggtggcgcggcagagccgcctggtcttccacgagaactaccgctgcacggacgccattgtcagcttcatctcgcggcacttctacgtggccaagggcaaccccatccacgccaggggcaaggttccsccccacccccggcactacccgctcatgttctgccacgtggcgggcarcccagaccgggacatgtccatggcgtcctggctgaatctggctgagattgcgcaggtcgtcgagaaggtgcaggaggcctacaacacctggcccagctgctggggcggccgygagcagaggtgcatctgtgtcgtttcccacggtgcccagttccgggtygtggtgctcagcactgtgcacacctgccagagcctgctcagccctggggcactggcccctgagttcttcaccgacgcccgcgtgctcaacaccgtcctgacccgcgcccagtcccagctggtggtagtgggggacgccgtggccctctgctccttcggggcctgcggcaagctctgggagagcttcatccgtgagtgygtggagcggcacagtgtctgccccgagggcctgtccatggagcaggtcgagcagggtgtggcgcagagacggcgctggcctccccgaggcacacaggctggggcagcggggaactgggaggctgccccagagccagtaggggacctggccgaggagcaggcggctgtggtgacggccatggtgaaggcagagccgggagatgaggctctgagcccagcatcccgtgacatcacggcaaccacagcgcagacggaggctgcggcagcaccagcaggagacgcagtgaaggaagacgtggtgcccggggcctgtgcggcaggagcggctgctgcagcgggcgtggagtccacggaggctgaggatgcagaggctgacttctggccgtgggacggggagctcaacgctgacgacgccatcctacgggagcttctggacgagagccagaaggtgatggtgaccgtcggggaggacgggctgctggacacygtcgccaggcccgagtccctgcagcaggcccggctgtacgagaacctgcccccggctgcgctacggaagctgctgcrcgcggagcccgagcggtaccgccactgctctttcgtgccagagaccttcgagcgggcgtcagccatcccgctggacgatgcctcctygggccccatccaggtcaggggccgcctggactgtgggatggccttcgccggggatgaggtgctggtgcagctcctttcgggagacaaggcgcccgaggggcggcttcggggccgcgtgctgggcgtgctgaagaggaagaggcacgagctggcgtttgtgtgccgcatggacacgtgggacccgcgcatcatggtccccatcaatggctccgtgaccaagatcttcgtggccgagctgaaggacccatcgcaggtccccatctacagcctccggaagggccggctgcagcgtgtggggcttgagaggctcaccgccgaggcccggcacagccggctcttctgggtccaaattgtcctgtggcggcaaggsttctactacccgctgggcatcgtccgggaggtgctgcctgaggccagcacctgggagcagggcctccgcatcctcggcctggagtacagcttgaggktgcccccgtcggaccaggccaccatcaccaaggtgctgcagaaataccacacggagcttggccgggttgcsggccgccgagaggactgccgcgccttcttgaccttcactgtggacccccagggcgcctgcaacctcgatgatgccctcagtgtccgagacctgggtcccaggtgcgaggtggctgtgcacatcactgatgtggccagcttcgtgcccarggacggggtgctggacgtggaggcgcgaaggcagggcgctgcgttctatgcccccggcagggagccagtgcccatgctgccggccagcctctgccaggaygtcctcagcctcctgcctggccrggaccgcctggccatctccctgttcctcaccatggagaaggccagtggccagctgaagagcctgcgctttgcaccctccgtggtccagtctgaccgccagctgtcctacgaggaggcggaggaggtgatcaggcagcacccgggtgccggccgtgagctgccggcccgcctggactccgtggaygcctgcrtcgtggccgcgtgctacttctctcggctgctgcgccggcaccgcctrcggtccgactgcttctatgagcagccggacgaggacggcaccctgggcttccgcgcggcccacatcatggtgaaggagtacatgattcagtttaataggctcgtggctgagttcctggtgggcagcgagtgcacgcggacggtcacgcctctgcggtggcagccagcaccccgcagccagcagctcaaggccctgtgtgagaagcatggggaccgggtgcccctgtcactgcacctcggccaccacctgcacggcggcgggggcagtccccccgacacgcggctgcacctcctggcctccctctggaagcaggtccagtttgctgcccgcacccaggactacgaacagatggtggacttggtcaccacggacgacatgcacccattcctggctcctgcaggccgcgacctccgcaaggccctggagcgctcggcgttcggccgctgcgcccrgggccaccagcagcagggcggccactactcgctgcaggtggactggtacacgtgggccacctcgcccatccgcaggtacctggacgtggtgttgcagcggcagatcctgctggcgctgggccatgggggctcygcctactctgccagggacatcgatgggctctgccaggccttcagcctccagcacgcacttgcccagagctatcagcggcgggcgcgcagcctgcacctggccgtgcagctcaaggcccagcctctggacaagctgggcttcgtggtggacgtggaggcgggctcccgctgcttccggctgctcttccccagcaaccgggagacgctgcctgacccctgccccgtcccctacggctccctgcagctggccgagcacccccacgccctggyaggccggccgggcctgcggctcctgtggcggcgccgtgtctactcagcgcagggatccagcccgcccctgccactgcctggcactgtgccggacccacacaccckggccgtggagacggccctgtggaagcagctgctggagctggtggagctgcagcgctggccggaggcggctgctctcatccaggagaagggcgaggcgtcccagcggcgggagctggtgcaggtgcagcggagccactgtggccatttcctggaggtggcccgggagctgggcagtggggacaccytgcaggtgcagctcggcrccagcctgcagcacggcttcctggtaccgagccctcagctctggacggtggcaccgggcttcagcctctgcctggagcacgtggagcggcccggagactgcttctcaggccgtgtgtaccgggccccgagggaccggtaccgcgacgtggatgagtacgcctgcgtgtgggaaccattctgcgccctggagtcggccaccggcgcggttgccgagaatgactccgtcacacttcagcacctgagtgtctcctgggaggcgtcacggacgccrcaggggcagctgcagggcgccttccgcctggaggccgccttcctcgaggagaactgtgccgacatcaacttcagctgctgctacctctgcatccggctcgaggggctgcyggctcccacggccagcccacrcccygggcccagcagcctcggccctggcctgaatgttgaccccggcacgtatacctgggtggcccacgggcagacgsaggactgggaccaggagcgccgggcagaccggcaggaggctcccagacgggtgcacctcttcgtccaccacatgggcatggagaaggttccggaagaggtgctgaggccgggcaccctgttcaccgttgagctgctgcccaagcagcttcctgatctccgcaaggaggaagccgtgcgtggactagaggaggcgtccccgctggtcaccagcatcgcactgggccggcctgtcccgcagcccctctgcagagggaagacgatcgtgggcctccacatcgtattctggtttcataaatcaaaccaggagcaggtgcagcccggaggccscccccgtggggagaagcggctggggggtccctgcatcttgtactgcggcccctccaacaagtcggtggatgtcctggcaggactgctcctgagaaggatggagctgaagcccctccgtgtgtacagtgagcaggctgaggccagcgagttcccagtgccrcgtgtgggcagcaggaagctgctcaggaagagcccccgggaggggaggccgaaccagagcctcaggagcatcaccctgcaccaccggatccggcaggcccccaacccttactcgtcggaaatcaaggcctttgacacccggctgcagagaggggagctcttctccagggaggacctggtctggtacaagaaggtcttgtgggaggctcggaagttcgagctggaccggcatgaggtcatcctctgcacctgctcctgtgcagcctctgccagcctcaaaatcctggacgtgaggcagatccttgttgacgaggcaggcatggccacggaacctgaaaccctcatccccctggtgcagttcccacaggccgagaaggtggttcttctcggagaccacaagcagctgcggcctgtrgtcaagaatgagcggctgcaaaacctgggtctggaccggtctctgttcgagcggtaccacgaggacgcacatatgctggacactcagtaccgcatgcatgagggcatctgtgccttcccctctgtggcgttctacaagagcaagctgaagacgtggcagggcctgaggaggccgcccagtgtcctgggccacgctggcaaggagagctgycctgtcatctttggccacgtgcagggccaygagcggagcctgctggtgtccacggacgaagggaatgagaactccaaggccaacctggaggaggtggctgaggtggcccttcggcgagagggcatcgcyggggtggccgtgtcctccatcaccaagagccaggggagcgagtggcgctatgtgctggtgagcaccgtccgcacctgtgccaagagcgacctggaccagcggcccaccaagagctggctcaagaagtttctgggcttcgttgtggaccccaaccaagtgaaygtggctgtcacgcgggcccaggaggggctctgcctgatcggagaccacctccttctgcgctgctgccccctctggcgtagcctcctggacttctgcgaggctcagcagaccctcgtgcctgccggccaggtgcgcgtctgcaggaggccaactatgccttcctgaagagccctctccacctgcaaggtgccaggactgggagggaaagtccagggcccccccaccctccccaccaccctccgccatcagcctgcctgggccagcctgcctcctggcctcaggatctccctggggcaggaagtgggtggacttggaggaggaacggcaagggccggtccccacactcttgctyctcctgggcrtctggggacaggaacacctctcagggtggccaagaggggcttccttgggaccagtgyaaggaagttctgctgtccctgggaagtctcagaaccaggaaggaaaccctgtggaggctgccctttgacctttggacgccacctgtaatcactctggatggtgtctgtggagttcaggtttattttctatttaaatgaactaaaagccagcatcctgccgggcgtggtggctcacgcccataatccagcactttgggaagccgaggcgggcagatcacctgaggtcaggagttcgagaccatcctggccaacatggtgaaaccccgtctccactaaaaatacaaaattagctgggcgtggtggcgggcgcctgtaatcccagctacttgggaggctgaggcaggagaatcgcttgactccaggaggcgcaggctgcagtgagctctgatggtaccactgcactccagcctgggtgacagagcgagaccctgtcttaaaaaaaaaaacaaaacaaaaccagcatctgttactggaacagagacctcagcccaagctcaggacaaggaggcctccctgggagagggggcctttctcccaccatcaccgcctgtgtccttcaggggctgctggagggcagcccaaagccaggggcccaccccgccccaccccaccccaccccaccctctgaaatgtgaaaagcctgcactcttcctgtgggctgcgcagtgggctcgggggttggggggtgccggggcgatgcttccaccctggactgagtgttcggggcagcctgctcggctgtatgtttctcgcacgctcacccgcttcagtgcggctctgtccctgctgccgcctccagtcctgagggaggggcttgccccaccttctacattccaatttttatatctttg

SEQ ID NO: 4776 - DNA, 2680 bp, Homo sapiens
gcggccgcccgcacttcccgcctctggctcgcccgaggacgcgctggcacgcctcccaccccctcactctgactccagctggcgtgcatggtctgcctcgcatcctcacgactcagctccctccctctctcgtgtttttttcctccgccgccccctcattcatccccactgggctccctttccctcaaatgctctggggctctccgcgctttcctgagtccgggctccgaggacccttaggtagtcccggtctcttttaargctccccggcttccaaagggttgccacgtccctaaaccctgtctccagctcgcatacacacacgcacagacacgcacgttttctgttcctgcgtgacacccgccctcgccgctcggccccgccggtccccgcgcggtgccctcctcccgccacacgrgcacgcacgcgcgcgcagggccaagcccgaggcagctcgcccgcagctcgcactcgcaggcgacctgctccagtctccaaagccgatggcatctccgggctctggcttttggtctttcgggtcggaagatggctctggggattccgagaatcccggcacagcgcgagcctggtgccaagtggctcagaagttcacgggcggcatcggaaacaaactgtgcgccctgctctacggagacgccgagaagccggcggagagcggcgggagccaacccccgcgggccgccgcccggaaggccgcctgcgcctgcgaccagaagccctgcagctgctccaaagtggatgtcaactacgcgtttctccatgcaacagacctgctgccggcgtgtgatggagaaaggcccactttggcgtttctgcaagatgttatgaacattttacttcagtatgtggtgaaaagtttcgatagatcaaccaaagtgattgatttccattatcctaatgagcttctccaagaatataattgggaattggcagaccaacmacaaaatttggaggaaattttgatgcattgccaaacaactctaaaatatgcaattaaaacagggcatcctagatacttcaatcaactttctactggtttggatatggttggattagcagcagactggctgacatcaacagcaaatactaacatrttcacctatgaaattgctccagtatttgtgcttttggaatatgtcacactaaagaaaatgagagaaatcattggctggccagrgggctctggcgatgggatattttctcccggtggcgccatatctaacatgtatgccatgatgatcgcacgctttaagatgttcccagaagtcaaggagaaaggaatggctrctcttcccaggctcattgccttcacgtctgaacatagtcatttttctctcaagaagggagctgcagccttagggattggaacagacagcgtgattctgattaaatgtgatgagagagggaaaatgattccatctgatcttgaaagaaggattcttgaagccaaacagaaagsstttgttcctttcctcgtgagtgccacagctggaaccacygtgtacggagcatttgaccccctcttagctgtcgctgacatttgcaaaaagtataagatctggatgcatgtggatggattgatgcagaattgcaaccaaatgcatgcctcctacctctttcagcaagataaacattatgacctgtcctatgacactggagacaaggccttacagtgcggacgccacgttgatgtttttaaactatggctgatgtggagggcaaaggggactaccgggtttgaagcgcatgttgataaatgtttggagttggcagagtatttatacaacatcataaaaaaccgagaaggatatgagatggtgtttgatgggaagcctcagcacacaaatgtctgcttctggtacattcctccaagcttgcgtactctggaagacaatgaagagagaatgagtcgcctctcgaaggtggctccagtgattaaagccagaatgatggagtatggaaccacaatggtcagctaccaacccttgggagacaaggtcaatttcttccgcatggtcatctcaaacccagcggcaactcaccaagacattgacttcctgattgaagaaatagaacgccttggacaagatttataataaccttgctcaccaagctgttccacttctctagagaacatgccctcagctaagccccctactgagaaacttcctttgagaattgtgcgacttcacaaaatgcaaggtgaacaccactttgtctctgagaacagacgttaccaattatggagtgtcaccagctgccaaaatcgtaggtgttggctctgctggtcactggagtagttgctactcttcagaatatggacaaagaaggcacaggtgtaaatatagtagcaggatgaggaacctcaaactgggtatcattttgcacgtgctcttctgttctcaaatgctaaatgcaaacactgtgtatttattagttaggtgtgccaaactaccgttcccaaattggtgtttctgaatgacatcaacattcccccaacattactccattactaaagacagaaaaaaataaaaacataaaatatacaaacatgtggcaacctgttcttcctaccaaatataaacttgtgtatgatccaagtattttatctgtgttgtctctctaaacccaaataaatgtgtaaatgtggacacatctc

SEQ ID NO: 4777 - DNA, 737 bp, Homo sapiens
gcggccgcccgcacttcccgcctctggctcgcccgaggacgcgctggcacgcctcccaccccctcactctgactccagctggcgtgcatggtctgcctcgcatcctcacgactcagctccctccctctctcgtgtttttttcctccgccgccccctcattcatccccactgggctccctttccctcaaatgctctggggctctccgcgctttcctgagtccgggctccgaggacccttaggtagtcccggtctcttttaargctccccggcttccaaagggttgccacgtccctaaaccctgtctccagctcgcatacacacacgcacagacacgcacgttttctgttcctgcgtgacacccgccctcgccgctcggccccgccggtccccgcgcggtgccctcctcccgccacacgrgcacgcacgcgcgcgcagggccaagcccgaggcagctcgcccgcagctcgcactcgcaggcgacctgctccagtctccaaagccgatggcatctccgggctctggcttttggtctttcgggtcggaagatggctctggggattccgagaatcccggcacagcgcgagcctggtgccaagtggctcagaagttcacgggcggcatcggaaacaaactgtgcgacctgctgccggcgtgtgatggagaaaggcccactttggcgtttctgcaagatgttatgaacattttacttcagtatgtggtgaaaagtttcgataga

SEQ ID NO: 4778 - DNA, 2824 bp, Homo sapiens
gcggccgcccgcacttcccgcctctggctcgcccgaggacgcgctggcacgcctcccaccccctcactctgactccagctggcgtgcatggtctgcctcgcatcctcacgactcagctccctccctctctcgtgtttttttcctccgccgccccctcattcatccccactgggctccctttccctcaaatgctctggggctctccgcgctttcctgagtccgggctccgaggacccttaggtagtcccggtctcttttaargctccccggcttccaaagggttgccacgtccctaaaccctgtctccagctcgcatacacacacgcacagacacgcacgttttctgttcctgcgtgacacccgccctcgccgctcggccccgccggtccccgcgcggtgccctcctcccgccacacgrgcacgcacgcgcgcgcagggccaagcccgaggcagctcgcccgcagctcgcactcgcaggcgacctgctccagtctccaaagccgatggcatctccgggctctggcttttggtctttcgggtcggaagatggctctggggattccgagaatcccggcacagcgcgagcctggtgccaagtggctcagaagttcacgggcggcatcggaaacaaactgtgcgccctgctctacggagacgccgagaagccggcggagagcggcgggagccaacccccgcgggccgccgcccggaaggccgcctgcgcctgcgaccagaagccctgcagctgctccaaagtggatgtcaactacgcgtttctccatgcaacagacctgctgccggcgtgtgatggagaaaggcccactttggcgtttctgcaagatgttatgaacattttacttcagtatgtggtgaaaagtttcgatagatcaaccaaagtgattgatttccattatcctaatgagcttctccaagaatataattgggaattggcagaccaacmacaaaatttggaggaaattttgatgcattgccaaacaactctaaaatatgcaattaaaacagggcatcctagatacttcaatcaactttctactggtttggatatggttggattagcagcagactggctgacatcaacagcaaatactaacatrttcacctatgaaattgctccagtatttgtgcttttggaatatgtcacactaaagaaaatgagagaaatcattggctggccagrgggctctggcgatgggatattttctcccggtggcgccatatctaacatgtatgccatgatgatcgcacgctttaagatgttcccagaagtcaaggagaaaggaatggctrctcttcccaggctcattgccttcacgtctgaacatagtcatttttctctcaagaagggagctgcagccttagggattggaacagacagcgtgattctgattaaatgtgatgagagagggaaaatgattccatctgatcttgaaagaaggattcttgaagccaaacagaaagsstttgttcctttcctcgtgagtgccacagctggaaccacygtgtacggagcatttgaccccctcttagctgtcgctgacatttgcaaaaagtataagatctggatgcatgtggatgcagcttggggtgggggattactgatgtcccgaaaacacaagtggaaactgagtggcgtggagagggccaactctgtgacgtggaatccacacaagatgatgggagtccctttgcagtgctctgctctcctggttagagaagagggattgatgcagaattgcaaccaaatgcatgcctcctacctctttcagcaagataaacattatgacctgtcctatgacactggagacaaggccttacagtgcggacgccacgttgatgtttttaaactatggctgatgtggagggcaaaggggactaccgggtttgaagcgcatgttgataaatgtttggagttggcagagtatttatacaacatcataaaaaaccgagaaggatatgagatggtgtttgatgggaagcctcagcacacaaatgtctgcttctggtacattcctccaagcttgcgtactctggaagacaatgaagagagaatgagtcgcctctcgaaggtggctccagtgattaaagccagaatgatggagtatggaaccacaatggtcagctaccaacccttgggagacaaggtcaatttcttccgcatggtcatctcaaacccagcggcaactcaccaagacattgacttcctgattgaagaaatagaacgccttggacaagatttataataaccttgctcaccaagctgttccacttctctagagaacatgccctcagctaagccccctactgagaaacttcctttgagaattgtgcgacttcacaaaatgcaaggtgaacaccactttgtctctgagaacagacgttaccaattatggagtgtcaccagctgccaaaatcgtaggtgttggctctgctggtcactggagtagttgctactcttcagaatatggacaaagaaggcacaggtgtaaatatagtagcaggatgaggaacctcaaactgggtatcattttgcacgtgctcttctgttctcaaatgctaaatgcaaacactgtgtatttattagttaggtgtgccaaactaccgttcccaaattggtgtttctgaatgacatcaacattcccccaacattactccattactaaagacagaaaaaaataaaaacataaaatatacaaacatgtggcaacctgttcttcctaccaaatataaacttgtgtatgatccaagtattttatctgtgttgtctctctaaacccaaataaatgtgtaaatgtggacacatctc

SEQ ID NO: 4779 - DNA, 2123 bp, Homo sapiens
atgagtgattttgaagaatggatttctgggacatatagaaaaatggaagaaggtcctctccctctgttgacttttgctacagctccctaccacgatcagaaaccaggaacaagtggattacggaagaaaacctattattttgaggaaaagccatgctatctggagaatttcatccagagtatattcttttccatagacctaaaagatcgccagggatcatcactggtggttggtggagatgggcggtactttaataaatcagcaatagaaacaatagtgcagatggcagctgccaatgggatcggtcgcttggttrtcggacagaatggaatcctctccacccctgctgtatcctgcatcattagaaaaatcaaagccattggtgggatcattctgacagccagtcacaacccagggggccccaatggagattttggaatcaaattcaatatytctaatggaggtcctgctccagaagcaataactgataaaattttccaaatcagcaagacaattgaagaatatgcagtttgccctgacctgaaagtagaccttggtgttctgggaaagcagcagtttgacttggaaaataagttcaaacccttcacagtggaaattgtggattcggtagaagcttatgctacaatgctgagaagcatctttgatttcagtgcactgaaagaactactttctgggccaaaccgactgaagatcygtattgatgctatgcatggagttgtgggaccgtatgtaaagaagatcctctgtgaagaactcggtgcccctgcgaactcggcagttaactgcgttcctctggaggactttggaggccaccaccctgaccccaacctcacctatgcagctgacctggtggagaccatgaagtcaggagagcatgattttggggctgcctttgatggagatggggatcgaaacatgattctgggcaagcatgggttctttgtgaacccttcagactctgtggctgtcattgctgccaacatcttcagcattccgtatttccagcagactggggtccgcggctttgcacggagcatgcccacgagtggtgctctggaccgggtggctagtgctacaaagattgctttgtatgagaccccaactggctggaagttttttgggaatttgatggacgcgagcaaactgtccctttgtggggaggagagcttcgggaccggttctgaccacatccgtgagaaagatggactgtgggctgtccttgcctggctctccatcctagccacccgcaagcagagtgtggaggacattctcaaagatcattggcaaaagyatggccggaatttcttcaccaggtatgattacgaggaggtggaagctgagggcgcaaacaaaatgatgaaggacttggaggccctgatgtttgatcgctcctttgtggggaagcagttctcagcaaatgacaaagtttacactgtggagaaggccgataactttgaatacagcgacccagtggatggaagcatttcaagaaatcagggcttgcgcctcattttcacagatggttctcgaatyrtcttccgactgagcggcactgggagtgccggggccaccattcggctgtacatcgatagctatgagaaggacgttgccaagattaaccaggacccccaggtcatgttggccccccttatttccattgctctgaaagtgtcccagctgcaggagaggacgggacgcactgcacccactgtcatcacctaagaagacaggcctgatgtggtaygtccctccacccccrgacycatccaagtcatctgattgaagagcatgacagaaacaaaatcagtgcatttacaaggcactgccaaacaagatgcccttgggagctgtgagggaaagaggacctgygggcttagatcaatctcaattccttttcatgccctcctgcattgctgctgcgtgggtatttgtctccttagccatcaggtacagtttacactacaatgtaagctataggtggagcatcagcagtgagtgaggccattcttcatccttaggatgtggcaatgaaatgatggtgcaagttcctttctcttttgtgaawctttccccccatttcctgtttacatgtaacccaacaa

SEQ ID NO: 4780 - DNA, 2530 bp, Homo sapiens
gggagagtaaatcagtaaggctccacccatttcacaggaggcctagagaccggcgctcccctttcccctcccgccggacctgccaggaggtgggctggcgcggagggagggccctgtcccctgtccctttaaggaggagggccaaacgccggcctagagtgcggcgtagcccccacccgccgtgccctcaccccagagcagctgcagcctcagccggccgcccctccgccagccaagtccgccgctctgacccccggcagcaagtcgccaccatggtgaagatcgtgacagttaagacccaggcgtaccaggaccagaagccgggcacgagcgggctgcggaagcgggtgaaggtgttccagagcagcgccaactacgcggagaacttcatccagagtatcatctccaccgtggagccggcgcagcggcaggaggccacgctggtggtgggcggggacggccggttctacatgaaggaggccatccagctcatcgctcgcatcgctgccgccaacgggatcggtcgcttggttrtcggacagaatggaatcctctccacccctgctgtatcctgcatcattagaaaaatcaaagccattggtgggatcattctgacagccagtcacaacccagggggccccaatggagattttggaatcaaattcaatatytctaatggaggtcctgctccagaagcaataactgataaaattttccaaatcagcaagacaattgaagaatatgcagtttgccctgacctgaaagtagaccttggtgttctgggaaagcagcagtttgacttggaaaataagttcaaacccttcacagtggaaattgtggattcggtagaagcttatgctacaatgctgagaagcatctttgatttcagtgcactgaaagaactactttctgggccaaaccgactgaagatcygtattgatgctatgcatggagttgtgggaccgtatgtaaagaagatcctctgtgaagaactcggtgcccctgcgaactcggcagttaactgcgttcctctggaggactttggaggccaccaccctgaccccaacctcacctatgcagctgacctggtggagaccatgaagtcaggagagcatgattttggggctgcctttgatggagatggggatcgaaacatgattctgggcaagcatgggttctttgtgaacccttcagactctgtggctgtcattgctgccaacatcttcagcattccgtatttccagcagactggggtccgcggctttgcacggagcatgcccacgagtggtgctctggaccgggtggctagtgctacaaagattgctttgtatgagaccccaactggctggaagttttttgggaatttgatggacgcgagcaaactgtccctttgtggggaggagagcttcgggaccggttctgaccacatccgtgagaaagatggactgtgggctgtccttgcctggctctccatcctagccacccgcaagcagagtgtggaggacattctcaaagatcattggcaaaagyatggccggaatttcttcaccaggtatgattacgaggaggtggaagctgagggcgcaaacaaaatgatgaaggacttggaggccctgatgtttgatcgctcctttgtggggaagcagttctcagcaaatgacaaagtttacactgtggagaaggccgataactttgaatacagcgacccagtggatggaagcatttcaagaaatcagggcttgcgcctcattttcacagatggttctcgaatyrtcttccgactgagcggcactgggagtgccggggccaccattcggctgtacatcgatagctatgagaaggacgttgccaagattaaccaggacccccaggtcatgttggccccccttatttccattgctctgaaagtgtcccagctgcaggagaggacgggacgcactgcacccactgtcatcacctaagaagacaggcctgatgtggtaygtccctccacccccrgacycatccaagtcatctgattgaagagcatgacagaaacaaaatgtattcaccamgcattttaggatttgactttttcactaaccagttgaygagcagtgcatttacaaggcactgccaaacaagatgcccttgggagctgtgagggaaagaggacctgygggcttagatcaatctcaattccttttcatgccctcctgcattgctgctgcgtgggtatttgtctccttagccatcaggtacagtttacactacaatgtaagctataggtggagcatcagcagtgagtgaggccattcttcatccttaggatgtggcaatgaaatgatggtgcaagttcctttctcttttgtgaawctttccccccatttcctgtttacatgtaacccaacaaaatgcaatttctagtgccttctgtmcaaycagttctttcctctgagtgagacgtacttggctacagatttctgccttgttttgcgacattgtcccattcacacagatattttgggataataaaggaaaataagctaca

SEQ ID NO: 4781 - DNA, 3848 bp, Homo sapiens
gtaaccgcgacccggctgccattcgagcctgcccagccataaaacccaggctgcgagtcgcgcgggggcagggtcgcgtgttgatggggtgggtggcggcggggtgggctcaatgtcacgctctggcgctcgtcgcccgtgctcccccttccagccggtttccgcagaatgccagagtttgtcctctcacttctggagaagatgcagacacaggagatcctgaggatactgcgactgcctgagctaggtgacttgggacagtttttccgcagcctctcggccaccaccctcgtgagtatgggtgccctggctgccatccttgcctactggttcactcaccggccaaaggccttgcagccgccatgcaacctcctgatgcagtcagaagaagtagaggacagtggcggggcacggcgatctgtgattgggtctggccctcagctacttacccactactatgatgatgcccggaccatgtaccaggtgttccgccgtgggcttagcatctcagggaatgggccctgtcttggtttcaggaagcctaagcagccttaccagtggctgtcctaccaggagrtggccgacagggctgaatttctggggtccggacttctccagcacaattgtaaagcatgcactgatcagtttattggtgtttttgcacaaaatcggccagagtggatcattgtggagctggcctgctacacatattccatggtggtggtcccgctctatgacaccctgggccctggggctatccgctacatcatcaatacagcggacatcagcaccgtgattgtggacaaacctcagaaggctgtgcttctgctagagcatgtggagaggaaggagactccaggcctcaagctgatcatcctcatggacccattcgaagaagccctgaaagagagagggcagaagtgcggggtggtcattaagtccatgcaggccgtggaggactgtggccaagagaatcaccaggcycctgtgcccccgcagcctgatgacctctccattgtgtgtttcacaagcggcacgacagggaacccaaaaggtgcgatgctcacccatgggaacgtggtggctgatttctcaggctttctgaaagtgacagagagtcagtgggctcccacttgtgcggatgtgcacatttcctatttgcctttagcacacatgtttgagcgaatggtgcagtctgtcgtctattgccacggagggcgtgttggcttcttccagggagatatccgccttctctcagatgacatgaaggctctatgccccaccatcttccctgtggtcccacgactgctgaaccggatgtacgacaagatcttcagccaggcaaacacaccattaaagcgctggctcctggagtttgcagcaaagcgtaagcaagccgaggtccggagtggaatcatcaggaatgatagtatctgggatgaactcttctttaataagattcaggccagtcttggtgggtgtgtgcggatgattgttactggagcagccccagcatcaccaacagttctgggatttctccgggcagctctagggtgccaggtttatgaaggttatggccaaactgagtgcacagctggatgtaccttcaccactcctggcgactggacctcagggcacgtaggggcgccacttccctgcaatcatatcaagctcgttgatgttgaggaactgaactactgggcctgcaaaggagagggagagatatgtgtgagaggaccaaatgtgttcaaaggctacttgaaagatccagacaggacgaaggaggccctggacagcgatggctggcttcacactggagacatyggaaaatggctgccggtgtgaactcttaaaattattgatcggaaaaagcatatatttaaacttgctcagggagaatatgttgcacccgagaagattgagaacatctacatccggagccaacctgtggcgcaaatctatgtccatggggacagcttaaaggcctttttggtaggcattgttgtgcctgaccctgaagttatgccctcctgggcccagaagagaggaattgaaggaacatatgcagatctctgcacaaataaggatctgaagaaagccattttggaagatatggtgaggttaggaaaagaaagtggactccattcttttgagcaggttaaagccattcacatccattctgacatgttctcagttcaaaatggcttgctgacaccaacactaaaagctaagagacctgagctgagagagtacttcaaaaaacaaatagaagagctttactcaatctccatgtgaagttcaaggaaagttcttctcagtgtaatgaactgtctagcaatattatagttattcttgaaagtaatgagtcaaaatgacacagctgaaaatgaataagcatctgattttatgactgagccttttcctgtcccaagaggtctttaacaatattttctctatcatcaatgagtatattttatttttattataaaaatgatattgtggtggactgctaaaaatatcacaaatggcaatgtaaaaatcaagacattttctcaagaactgtgtaccactaaaagtaatatattgtcaatgttcacagaactattaaacataaaggaaaaacataagtgatatattctacttaattatttgtgaatcagtaaccagatgcagcaaatatctaggcaatgtggactacctcattcagtaactgattgtcaaaatcacaattaaatcagacttcaaaaattaaagctaggtgtatagaatcatgctaaaagaaaacatgataactcatagtctacgtaacttcagagtctttaaacatgacaatccacattgtcatatgtgaaaattttctctctgatttttactttcattcatgaaaaatgaaaattcagaaattctttttttcctttttgttttgagacagggtctgctctgtcacctaggctggagtgcagtggcttaatcatggctcattgcagtctccatctcctgggctcgagtgatcctcctgtctcacctcccaagtagctgagactacagtacaggcacatgccaccacacctggctaatagaaattttttttttagagattttgctcaggctggtctcaaactcctgagctcaagggatcctcccgccttggcctccctaagtgctaggattacaggcatgagccattgttcccagccaaattcagatattattaaaacacatgtcatatttatatagtaacttacaaagacctttcaatacattttctcatttattaagctcattaaagtattcaggaactacctagaaaaaatataatgtaaaactattcaaggatagtgtgtgtatgttcatggacttcttattataatgaattctaaaagacatctgttgactctacaatgaatggatccttgaggaatacttgggagaagaaactcagagttatttctcagggtaggcagcaattaatgtacctacattccttgctggggtcttctagtcttccattcccaatgtgcccatgctatgcctggaaaccctatatggttgtaattctgaacaatttcactttttttccagtaagaatatcaaggcagaaggtgggaaggaggggacattatttccagggaaaatagtttttcaacaatataactttgataaacctctttaaaatgccccaagaaaactttttaagtccatagacaaagaaatactgcctaatggcataattacattcctaaaatctttaagygtgccgaagtttaaccactaaaacctcctttcttgcattatgtatttagatgcaccctgtattggggtgtcaacaatttcttataattaaaggc

SEQ ID NO: 4782 - DNA, 1122 bp, Homo sapiens
gtaaccgcgacccggctgccattcgagcctgcccagccataaaacccaggctgcgagtcgcgcgggggcagggtcgcgtgttgatggggtgggtggcggcggggtgggctcaatgtcacgctctggcgctcgtcgcccgtgctcccccttccagccggtttccgcagaatgccagagtttgtcctctcacttctggagaagatgcagacacaggagatcctgaggatactgcgactgcctgagctaggtgacttgggacagtttttccgcagcctctcggccaccaccctcgtgagtatgggtgccctggctgccatccttgcctactggttcactcaccggccaaaggccttgcagccgccatgcaacctcctgatgcagtcagaagaagtagaggacagtggcggggcacggcgatctgtgattgggtctggccctcagctacttacccactactatgatgatgcccggaccatgtaccaggtgttccgccgtgggcttagcatctcagggaatgggccctgtcttggtttcaggaagcctaagcagccttaccagtggctgtcctaccaggagrtggccgacagggctgaatttctggggtccggacttctccagcacaattgtaaagcatgcactgatcagtttattggtgtttttgcacaaaatcggccagagtggatcattgtggagctggcctgctacacatattccatggtggtggtcccgctctatgacaccctgggccctggggctatccgctacatcatcaatacagcggacatcagcaccgtgattgtggacaaacctcagaaggctgtgcttctgctagagcatgtggagaggaaggagactccaggcctcaagctgatcatcctcatggacccattcgaagaagccctgaaagagagagggcagaagtgcggggtggtcattaagtccatgcaggccgtggaggactgtggccaagagaatcaccaggcycctgtgcccccgcagcctgatgacctctccattgtgtgtttcacaagcggcacgacaggtaagcagaggcacgcagatccccagccatggctacctgcacccttccctggtggcctagcaggtgactgctggagtctt

SEQ ID NO: 4783 - DNA, 2202 bp, Homo sapiens
gtaaccgcgacccggctgccattcgagcctgcccagccataaaacccaggctgcgagtcgcgcgggggcagggtcgcgtgttgatggggtgggtggcggcggggtgggctcaatgtcacgctctggcgctcgtcgcccgtgctcccccttccagccggtttccgcagaatgccagagtttgtcctctcacttctggagaagatgcagacacaggagatcctgaggatactgcgactgcctgagctaggtgacttgggacagtttttccgcagcctctcggccaccaccctcgtgagtatgggtgccctggctgccatccttgcctactggttcactcaccggccaaaggccttgcagccgccatgcaacctcctgatgcagtcagaagaagtagaggacagtggcggggcacggcgatctgtgattgggtctggccctcagctacttacccactactatgatgatgcccggaccatgtaccaggtgttccgccgtgggcttagcatctcagggaatgggccctgtcttggtttcaggaagcctaagcagccttaccagtggctgtcctaccaggagrtggccgacagggctgaatttctggggtccggacttctccagcacaattgtaaagcatgcactgatcagtttattggtgtttttgcacaaaatcggccagagtggatcattgtggagctggcctgctacacatattccatggtggtggtcccgctctatgacaccctgggccctggggctatccgctacatcatcaatacagcggacatcagcaccgtgattgtggacaaacctcagaaggctgtgcttctgctagagcatgtggagaggaaggagactccaggcctcaagctgatcatcctcatggacccattcgaagaagccctgaaagagagagggcagaagtgcggggtggtcattaagtccatgcaggccgtggaggactgtggccaagagaatcaccaggcycctgtgcccccgcagcctgatgacctctccattgtgtgtttcacaagcggcacgacagggaacccaaaaggtgcgatgctcacccatgggaacgtggtggctgatttctcaggctttctgaaagtgacagagagtcagtgggctcccacttgtgcggatgtgcacatttcctatttgcctttagcacacatgtttgagcgaatggtgcagtctgtcgtctattgccacggagggcgtgttggcttcttccagggagatatccgccttctctcagatgacatgaaggctctatgccccaccatcttccctgtggtcccacgactgctgaaccggatgtacgacaagatcttcagccaggcaaacacaccattaaagcgctggctcctggagtttgcagcaaagcgtaagcaagccgaggtccggagtggaatcatcaggaatgatagtatctgggatgaactcttctttaataagattcaggccagtcttggtgggtgtgtgcggatgattgttactggagcagccccagcatcaccaacagttctgggatttctccgggcagctctagggtgccaggtttatgaaggttatggccaaactgagtgcacagctggatgtaccttcaccactcctggcgactggacctcagggcacgtaggggcgccacttccctgcaatcatatcaagctcgttgatgttgaggaactgaactactgggcctgcaaaggagagggagagatatgtgtgagaggaccaaatgtgttcaaaggctacttgaaagatccagacaggacgaaggaggccctggacagcgatggctggcttcacactggagacatyggaaaatggctgccggtgtgaactcttaaaattattgatcggaaaaagcatatatttaaacttgctcagggagaatatgttgcacccgagaagattgagaacatctacatccggagccaacctgtggcgcaaatctatgtccatggggacagcttaaaggcctttttggtaggcattgttgtgcctgaccctgaagttatgccctcctgggcccagaagagaggaattgaaggaacatatgcagatctctgcacaaataaggatctgaagaaagccattttggaagatatggtgaggttaggaaaagaaagtggactccattcttttgagcaggacctaccacagtgcttaatacagattaaggtgttcagtaaatat

SEQ ID NO: 4784 - DNA, 3834 bp, Homo sapiens
acccggcagcggcggcggcggcgcggctactgctggggctgctgggctgcggggctgcggggctgcgggtcggggaggccgggccgggccgggccgggccccgctgaccgccatgctgaccttcttcctcgtgtcggggggctccctctggctattcgtagagtttgtcctctcacttctggagaagatgcagacacaggagatcctgaggatactgcgactgcctgagctaggtgacttgggacagtttttccgcagcctctcggccaccaccctcgtgagtatgggtgccctggctgccatccttgcctactggttcactcaccggccaaaggccttgcagccgccatgcaacctcctgatgcagtcagaagaagtagaggacagtggcggggcacggcgatctgtgattgggtctggccctcagctacttacccactactatgatgatgcccggaccatgtaccaggtgttccgccgtgggcttagcatctcagggaatgggccctgtcttggtttcaggaagcctaagcagccttaccagtggctgtcctaccaggagrtggccgacagggctgaatttctggggtccggacttctccagcacaattgtaaagcatgcactgatcagtttattggtgtttttgcacaaaatcggccagagtggatcattgtggagctggcctgctacacatattccatggtggtggtcccgctctatgacaccctgggccctggggctatccgctacatcatcaatacagcggacatcagcaccgtgattgtggacaaacctcagaaggctgtgcttctgctagagcatgtggagaggaaggagactccaggcctcaagctgatcatcctcatggacccattcgaagaagccctgaaagagagagggcagaagtgcggggtggtcattaagtccatgcaggccgtggaggactgtggccaagagaatcaccaggcycctgtgcccccgcagcctgatgacctctccattgtgtgtttcacaagcggcacgacagggaacccaaaaggtgcgatgctcacccatgggaacgtggtggctgatttctcaggctttctgaaagtgacagagaaagtgatctttccgagacaggacgatgtgctcatctccttcctgcctctggctcacatgtttgagagagtaatccagtctgtcgtctattgccacggagggcgtgttggcttcttccagggagatatccgccttctctcagatgacatgaaggctctatgccccaccatcttccctgtggtcccacgactgctgaaccggatgtacgacaagatcttcagccaggcaaacacaccattaaagcgctggctcctggagtttgcagcaaagcgtaagcaagccgaggtccggagtggaatcatcaggaatgatagtatctgggatgaactcttctttaataagattcaggccagtcttggtgggtgtgtgcggatgattgttactggagcagccccagcatcaccaacagttctgggatttctccgggcagctctagggtgccaggtttatgaaggttatggccaaactgagtgcacagctggatgtaccttcaccactcctggcgactggacctcagggcacgtaggggcgccacttccctgcaatcatatcaagctcgttgatgttgaggaactgaactactgggcctgcaaaggagagggagagatatgtgtgagaggaccaaatgtgttcaaaggctacttgaaagatccagacaggacgaaggaggccctggacagcgatggctggcttcacactggagacatyggaaaatggctgccggtgtgaactcttaaaattattgatcggaaaaagcatatatttaaacttgctcagggagaatatgttgcacccgagaagattgagaacatctacatccggagccaacctgtggcgcaaatctatgtccatggggacagcttaaaggcctttttggtaggcattgttgtgcctgaccctgaagttatgccctcctgggcccagaagagaggaattgaaggaacatatgcagatctctgcacaaataaggatctgaagaaagccattttggaagatatggtgaggttaggaaaagaaagtggactccattcttttgagcaggttaaagccattcacatccattctgacatgttctcagttcaaaatggcttgctgacaccaacactaaaagctaagagacctgagctgagagagtacttcaaaaaacaaatagaagagctttactcaatctccatgtgaagttcaaggaaagttcttctcagtgtaatgaactgtctagcaatattatagttattcttgaaagtaatgagtcaaaatgacacagctgaaaatgaataagcatctgattttatgactgagccttttcctgtcccaagaggtctttaacaatattttctctatcatcaatgagtatattttatttttattataaaaatgatattgtggtggactgctaaaaatatcacaaatggcaatgtaaaaatcaagacattttctcaagaactgtgtaccactaaaagtaatatattgtcaatgttcacagaactattaaacataaaggaaaaacataagtgatatattctacttaattatttgtgaatcagtaaccagatgcagcaaatatctaggcaatgtggactacctcattcagtaactgattgtcaaaatcacaattaaatcagacttcaaaaattaaagctaggtgtatagaatcatgctaaaagaaaacatgataactcatagtctacgtaacttcagagtctttaaacatgacaatccacattgtcatatgtgaaaattttctctctgatttttactttcattcatgaaaaatgaaaattcagaaattctttttttcctttttgttttgagacagggtctgctctgtcacctaggctggagtgcagtggcttaatcatggctcattgcagtctccatctcctgggctcgagtgatcctcctgtctcacctcccaagtagctgagactacagtacaggcacatgccaccacacctggctaatagaaattttttttttagagattttgctcaggctggtctcaaactcctgagctcaagggatcctcccgccttggcctccctaagtgctaggattacaggcatgagccattgttcccagccaaattcagatattattaaaacacatgtcatatttatatagtaacttacaaagacctttcaatacattttctcatttattaagctcattaaagtattcaggaactacctagaaaaaatataatgtaaaactattcaaggatagtgtgtgtatgttcatggacttcttattataatgaattctaaaagacatctgttgactctacaatgaatggatccttgaggaatacttgggagaagaaactcagagttatttctcagggtaggcagcaattaatgtacctacattccttgctggggtcttctagtcttccattcccaatgtgcccatgctatgcctggaaaccctatatggttgtaattctgaacaatttcactttttttccagtaagaatatcaaggcagaaggtgggaaggaggggacattatttccagggaaaatagtttttcaacaatataactttgataaacctctttaaaatgccccaagaaaactttttaagtccatagacaaagaaatactgcctaatggcataattacattcctaaaatctttaagygtgccgaagtttaaccactaaaacctcctttcttgcattatgtatttagatgcaccctgtattggggtgtcaacaatttcttataattaaaggc

SEQ ID NO: 4785 - DNA, 3848 bp, Homo sapiens
gtaaccgcgacccggctgccattcgagcctgcccagccataaaacccaggctgcgagtcgcgcgggggcagggtcgcgtgttgatggggtgggtggcggcggggtgggctcaatgtcacgctctggcgctcgtcgcccgtgctcccccttccagccggtttccgcagaatgccagagtttgtcctctcacttctggagaagatgcagacacaggagatcctgaggatactgcgactgcctgagctaggtgacttgggacagtttttccgcagcctctcggccaccaccctcgtgagtatgggtgccctggctgccatccttgcctactggttcactcaccggccaaaggccttgcagccgccatgcaacctcctgatgcagtcagaagaagtagaggacagtggcggggcacggcgatctgtgattgggtctggccctcagctacttacccactactatgatgatgcccggaccatgtaccaggtgttccgccgtgggcttagcatctcagggaatgggccctgtcttggtttcaggaagcctaagcagccttaccagtggctgtcctaccaggagrtggccgacagggctgaatttctggggtccggacttctccagcacaattgtaaagcatgcactgatcagtttattggtgtttttgcacaaaatcggccagagtggatcattgtggagctggcctgctacacatattccatggtggtggtcccgctctatgacaccctgggccctggggctatccgctacatcatcaatacagcggacatcagcaccgtgattgtggacaaacctcagaaggctgtgcttctgctagagcatgtggagaggaaggagactccaggcctcaagctgatcatcctcatggacccattcgaagaagccctgaaagagagagggcagaagtgcggggtggtcattaagtccatgcaggccgtggaggactgtggccaagagaatcaccaggcycctgtgcccccgcagcctgatgacctctccattgtgtgtttcacaagcggcacgacagggaacccaaaaggtgcgatgctcacccatgggaacgtggtggctgatttctcaggctttctgaaagtgacagagagtcagtgggctcccacttgtgcggatgtgcacatttcctatttgcctttagcacacatgtttgagcgaatggtgcagtctgtcgtctattgccacggagggcgtgttggcttcttccagggagatatccgccttctctcagatgacatgaaggctctatgccccaccatcttccctgtggtcccacgactgctgaaccggatgtacgacaagatcttcagccaggcaaacacaccattaaagcgctggctcctggagtttgcagcaaagcgtaagcaagccgaggtccggagtggaatcatcaggaatgatagtatctgggatgaactcttctttaataagattcaggccagtcttggtgggtgtgtgcggatgattgttactggagcagccccagcatcaccaacagttctgggatttctccgggcagctctagggtgccaggtttatgaaggttatggccaaactgagtgcacagctggatgtaccttcaccactcctggcgactggacctcagggcacgtaggggcgccacttccctgcaatcatatcaagctcgttgatgttgaggaactgaactactgggcctgcaaaggagagggagagatatgtgtgagaggaccaaatgtgttcaaaggctacttgaaagatccagacaggacgaaggaggccctggacagcgatggctggcttcacactggagacatyggaaaatggctgccggcaggaactcttaaaattattgatcggaaaaagcatatatttaaacttgctcagggagaatatgttgcacccgagaagattgagaacatctacatccggagccaacctgtggcgcaaatctatgtccatggggacagcttaaaggcctttttggtaggcattgttgtgcctgaccctgaagttatgccctcctgggcccagaagagaggaattgaaggaacatatgcagatctctgcacaaataaggatctgaagaaagccattttggaagatatggtgaggttaggaaaagaaagtggactccattcttttgagcaggttaaagccattcacatccattctgacatgttctcagttcaaaatggcttgctgacaccaacactaaaagctaagagacctgagctgagagagtacttcaaaaaacaaatagaagagctttactcaatctccatgtgaagttcaaggaaagttcttctcagtgtaatgaactgtctagcaatattatagttattcttgaaagtaatgagtcaaaatgacacagctgaaaatgaataagcatctgattttatgactgagccttttcctgtcccaagaggtctttaacaatattttctctatcatcaatgagtatattttatttttattataaaaatgatattgtggtggactgctaaaaatatcacaaatggcaatgtaaaaatcaagacattttctcaagaactgtgtaccactaaaagtaatatattgtcaatgttcacagaactattaaacataaaggaaaaacataagtgatatattctacttaattatttgtgaatcagtaaccagatgcagcaaatatctaggcaatgtggactacctcattcagtaactgattgtcaaaatcacaattaaatcagacttcaaaaattaaagctaggtgtatagaatcatgctaaaagaaaacatgataactcatagtctacgtaacttcagagtctttaaacatgacaatccacattgtcatatgtgaaaattttctctctgatttttactttcattcatgaaaaatgaaaattcagaaattctttttttcctttttgttttgagacagggtctgctctgtcacctaggctggagtgcagtggcttaatcatggctcattgcagtctccatctcctgggctcgagtgatcctcctgtctcacctcccaagtagctgagactacagtacaggcacatgccaccacacctggctaatagaaattttttttttagagattttgctcaggctggtctcaaactcctgagctcaagggatcctcccgccttggcctccctaagtgctaggattacaggcatgagccattgttcccagccaaattcagatattattaaaacacatgtcatatttatatagtaacttacaaagacctttcaatacattttctcatttattaagctcattaaagtattcaggaactacctagaaaaaatataatgtaaaactattcaaggatagtgtgtgtatgttcatggacttcttattataatgaattctaaaagacatctgttgactctacaatgaatggatccttgaggaatacttgggagaagaaactcagagttatttctcagggtaggcagcaattaatgtacctacattccttgctggggtcttctagtcttccattcccaatgtgcccatgctatgcctggaaaccctatatggttgtaattctgaacaatttcactttttttccagtaagaatatcaaggcagaaggtgggaaggaggggacattatttccagggaaaatagtttttcaacaatataactttgataaacctctttaaaatgccccaagaaaactttttaagtccatagacaaagaaatactgcctaatggcataattacattcctaaaatctttaagygtgccgaagtttaaccactaaaacctcctttcttgcattatgtatttagatgcaccctgtattggggtgtcaacaatttcttataattaaaggc

SEQ ID NO: 4786 - DNA, 4680 bp, Homo sapiens
acccggcagcggcggcggcggcgcggctactgctggggctgctgggctgcggggctgcggggctgcgggtcggggaggccgggccgggccgggccgggccccgctgaccgccatgctgaccttcttcctcgtgtcggggggctccctctggctattcgtagagtttgtcctctcacttctggagaagatgcagacacaggagatcctgaggatactgcgactgcctgagctaggtgacttgggacagtttttccgcagcctctcggccaccaccctcgtgagtatgggtgccctggctgccatccttgcctactggttcactcaccggccaaaggccttgcagccgccatgcaacctcctgatgcagtcagaagaagtagagacctgctgttccaagaggtggcaggctctggcccagcccagsgtagctcaaatagtgcttgaagaagaggtggagctgtgatactggagagtttgggtttgggcaccctggggaagggtgacagggtagaaggggaggaggcaggagaaggctggctcctcrccctactcaccagcacagaggggtttgccaccttcccactctgcacccgtgccactttgggcccaggaacttgctgcctgcctctcctcccccattgcacatgaacataattcagcctgtcctccctccctagcctcctaggcttctgtgcctgggacagaaccttcagcacagtcctctaactcacwtcattatgtgaatgatgggtggcagccttcttagctaacaccacacccaactgatccttaactcaggggcatagcagtagatgatgggatgggagataccttggcaggttgttcctgaatccagccaatactccccactgtgttgtatgaatgagacatgggtgtgtacgaacattaactgaaaactctggacattctgcatatgctgacctgctgtgtgaatgctgtatgtgtgtgtggagtttgtatgtggggacactggtatacccggcctttatgcatgagccaactatgtcggagtgtggctacatgcaggttgagtgtatacagtccaggtgtgtgtagtccatgtgtacgcgggcacacagatgccacggtgctaactgcatgcacgggttgtacatccgagctgggtacagccttgtgcatgctgcggccctctcctggcacccctacctgcctcagccaacttctctggccggtgcttggcttgtaggacagtggcggggcacggcgatctgtgattgggtctggccctcagctacttacccactactatgatgatgcccggaccatgtaccaggtgttccgccgtgggcttagcatctcagggaatgggccctgtcttggtttcaggaagcctaagcagccttaccagtggctgtcctaccaggagrtggccgacagggctgaatttctggggtccggacttctccagcacaattgtaaagcatgcactgatcagtttattggtgtttttgcacaaaatcggccagagtggatcattgtggagctggcctgctacacatattccatggtggtggtcccgctctatgacaccctgggccctggggctatccgctacatcatcaatacagcggacatcagcaccgtgattgtggacaaacctcagaaggctgtgcttctgctagagcatgtggagaggaaggagactccaggcctcaagctgatcatcctcatggacccattcgaagaagccctgaaagagagagggcagaagtgcggggtggtcattaagtccatgcaggccgtggaggactgtggccaagagaatcaccaggcycctgtgcccccgcagcctgatgacctctccattgtgtgtttcacaagcggcacgacagggaacccaaaaggtgcgatgctcacccatgggaacgtggtggctgatttctcaggctttctgaaagtgacagagaaagtgatctttccgagacaggacgatgtgctcatctccttcctgcctctggctcacatgtttgagagagtaatccagtctgtcgtctattgccacggagggcgtgttggcttcttccagggagatatccgccttctctcagatgacatgaaggctctatgccccaccatcttccctgtggtcccacgactgctgaaccggatgtacgacaagatcttcagccaggcaaacacaccattaaagcgctggctcctggagtttgcagcaaagcgtaagcaagccgaggtccggagtggaatcatcaggaatgatagtatctgggatgaactcttctttaataagattcaggccagtcttggtgggtgtgtgcggatgattgttactggagcagccccagcatcaccaacagttctgggatttctccgggcagctctagggtgccaggtttatgaaggttatggccaaactgagtgcacagctggatgtaccttcaccactcctggcgactggacctcagggcacgtaggggcgccacttccctgcaatcatatcaagctcgttgatgttgaggaactgaactactgggcctgcaaaggagagggagagatatgtgtgagaggaccaaatgtgttcaaaggctacttgaaagatccagacaggacgaaggaggccctggacagcgatggctggcttcacactggagacatyggaaaatggctgccggcaggaactcttaaaattattgatcggaaaaagcatatatttaaacttgctcagggagaatatgttgcacccgagaagattgagaacatctacatccggagccaacctgtggcgcaaatctatgtccatggggacagcttaaaggcctttttggtaggcattgttgtgcctgaccctgaagttatgccctcctgggcccagaagagaggaattgaaggaacatatgcagatctctgcacaaataaggatctgaagaaagccattttggaagatatggtgaggttaggaaaagaaagtggactccattcttttgagcaggttaaagccattcacatccattctgacatgttctcagttcaaaatggcttgctgacaccaacactaaaagctaagagacctgagctgagagagtacttcaaaaaacaaatagaagagctttactcaatctccatgtgaagttcaaggaaagttcttctcagtgtaatgaactgtctagcaatattatagttattcttgaaagtaatgagtcaaaatgacacagctgaaaatgaataagcatctgattttatgactgagccttttcctgtcccaagaggtctttaacaatattttctctatcatcaatgagtatattttatttttattataaaaatgatattgtggtggactgctaaaaatatcacaaatggcaatgtaaaaatcaagacattttctcaagaactgtgtaccactaaaagtaatatattgtcaatgttcacagaactattaaacataaaggaaaaacataagtgatatattctacttaattatttgtgaatcagtaaccagatgcagcaaatatctaggcaatgtggactacctcattcagtaactgattgtcaaaatcacaattaaatcagacttcaaaaattaaagctaggtgtatagaatcatgctaaaagaaaacatgataactcatagtctacgtaacttcagagtctttaaacatgacaatccacattgtcatatgtgaaaattttctctctgatttttactttcattcatgaaaaatgaaaattcagaaattctttttttcctttttgttttgagacagggtctgctctgtcacctaggctggagtgcagtggcttaatcatggctcattgcagtctccatctcctgggctcgagtgatcctcctgtctcacctcccaagtagctgagactacagtacaggcacatgccaccacacctggctaatagaaattttttttttagagattttgctcaggctggtctcaaactcctgagctcaagggatcctcccgccttggcctccctaagtgctaggattacaggcatgagccattgttcccagccaaattcagatattattaaaacacatgtcatatttatatagtaacttacaaagacctttcaatacattttctcatttattaagctcattaaagtattcaggaactacctagaaaaaatataatgtaaaactattcaaggatagtgtgtgtatgttcatggacttcttattataatgaattctaaaagacatctgttgactctacaatgaatggatccttgaggaatacttgggagaagaaactcagagttatttctcagggtaggcagcaattaatgtacctacattccttgctggggtcttctagtcttccattcccaatgtgcccatgctatgcctggaaaccctatatggttgtaattctgaacaatttcactttttttccagtaagaatatcaaggcagaaggtgggaaggaggggacattatttccagggaaaatagtttttcaacaatataactttgataaacctctttaaaatgccccaagaaaactttttaagtccatagacaaagaaatactgcctaatggcataattacattcctaaaatctttaagygtgccgaagtttaaccactaaaacctcctttcttgcattatgtatttagatgcaccctgtattggggtgtcaacaatttcttataattaaaggc

SEQ ID NO: 4787 - DNA, 3673 bp, Homo sapiens
agtttgtcctctcacttctggagaagatgcagacacaggagatcctgaggatactgcgactgcctgagctaggtgacttgggacagtttttccgcagcctctcggccaccaccctcgtgagtatgggtgccctggctgccatccttgcctactggttcactcaccggccaaaggccttgcagccgccatgcaacctcctgatgcagtcagaagaagtagaggacagtggcggggcacggcgatctgtgattgggtctggccctcagctacttacccactactatgatgatgcccggaccatgtaccaggtgttccgccgtgggcttagcatctcagggaatgggccctgtcttggtttcaggaagcctaagcagccttaccagtggctgtcctaccaggagrtggccgacagggctgaatttctggggtccggacttctccagcacaattgtaaagcatgcactgatcagtttattggtgtttttgcacaaaatcggccagagtggatcattgtggagctggcctgctacacatattccatggtggtggtcccgctctatgacaccctgggccctggggctatccgctacatcatcaatacagcggacatcagcaccgtgattgtggacaaacctcagaaggctgtgcttctgctagagcatgtggagaggaaggagactccaggcctcaagctgatcatcctcatggacccattcgaagaagccctgaaagagagagggcagaagtgcggggtggtcattaagtccatgcaggccgtggaggactgtggccaagagaatcaccaggcycctgtgcccccgcagcctgatgacctctccattgtgtgtttcacaagcggcacgacagggaacccaaaaggtgcgatgctcacccatgggaacgtggtggctgatttctcaggctttctgaaagtgacagagagtcagtgggctcccacttgtgcggatgtgcacatttcctatttgcctttagcacacatgtttgagcgaatggtgcagtctgtcgtctattgccacggagggcgtgttggcttcttccagggagatatccgccttctctcagatgacatgaaggctctatgccccaccatcttccctgtggtcccacgactgctgaaccggatgtacgacaagatcttcagccaggcaaacacaccattaaagcgctggctcctggagtttgcagcaaagcgtaagcaagccgaggtccggagtggaatcatcaggaatgatagtatctgggatgaactcttctttaataagattcaggccagtcttggtgggtgtgtgcggatgattgttactggagcagccccagcatcaccaacagttctgggatttctccgggcagctctagggtgccaggtttatgaaggttatggccaaactgagtgcacagctggatgtaccttcaccactcctggcgactggacctcagggcacgtaggggcgccacttccctgcaatcatatcaagctcgttgatgttgaggaactgaactactgggcctgcaaaggagagggagagatatgtgtgagaggaccaaatgtgttcaaaggctacttgaaagatccagacaggacgaaggaggccctggacagcgatggctggcttcacactggagacatyggaaaatggctgccggcaggaactcttaaaattattgatcggaaaaagcatatatttaaacttgctcagggagaatatgttgcacccgagaagattgagaacatctacatccggagccaacctgtggcgcaaatctatgtccatggggacagcttaaaggcctttttggtaggcattgttgtgcctgaccctgaagttatgccctcctgggcccagaagagaggaattgaaggaacatatgcagatctctgcacaaataaggatctgaagaaagccattttggaagatatggtgaggttaggaaaagaaagtggactccattcttttgagcaggttaaagccattcacatccattctgacatgttctcagttcaaaatggcttgctgacaccaacactaaaagctaagagacctgagctgagagagtacttcaaaaaacaaatagaagagctttactcaatctccatgtgaagttcaaggaaagttcttctcagtgtaatgaactgtctagcaatattatagttattcttgaaagtaatgagtcaaaatgacacagctgaaaatgaataagcatctgattttatgactgagccttttcctgtcccaagaggtctttaacaatattttctctatcatcaatgagtatattttatttttattataaaaatgatattgtggtggactgctaaaaatatcacaaatggcaatgtaaaaatcaagacattttctcaagaactgtgtaccactaaaagtaatatattgtcaatgttcacagaactattaaacataaaggaaaaacataagtgatatattctacttaattatttgtgaatcagtaaccagatgcagcaaatatctaggcaatgtggactacctcattcagtaactgattgtcaaaatcacaattaaatcagacttcaaaaattaaagctaggtgtatagaatcatgctaaaagaaaacatgataactcatagtctacgtaacttcagagtctttaaacatgacaatccacattgtcatatgtgaaaattttctctctgatttttactttcattcatgaaaaatgaaaattcagaaattctttttttcctttttgttttgagacagggtctgctctgtcacctaggctggagtgcagtggcttaatcatggctcattgcagtctccatctcctgggctcgagtgatcctcctgtctcacctcccaagtagctgagactacagtacaggcacatgccaccacacctggctaatagaaattttttttttagagattttgctcaggctggtctcaaactcctgagctcaagggatcctcccgccttggcctccctaagtgctaggattacaggcatgagccattgttcccagccaaattcagatattattaaaacacatgtcatatttatatagtaacttacaaagacctttcaatacattttctcatttattaagctcattaaagtattcaggaactacctagaaaaaatataatgtaaaactattcaaggatagtgtgtgtatgttcatggacttcttattataatgaattctaaaagacatctgttgactctacaatgaatggatccttgaggaatacttgggagaagaaactcagagttatttctcagggtaggcagcaattaatgtacctacattccttgctggggtcttctagtcttccattcccaatgtgcccatgctatgcctggaaaccctatatggttgtaattctgaacaatttcactttttttccagtaagaatatcaaggcagaaggtgggaaggaggggacattatttccagggaaaatagtttttcaacaatataactttgataaacctctttaaaatgccccaagaaaactttttaagtccatagacaaagaaatactgcctaatggcataattacattcctaaaatctttaagygtgccgaagtttaaccactaaaacctcctttcttgcattatgtatttagatgcaccctgtattggggtgtcaacaatttcttataattaaaggc

SEQ ID NO: 4788 - DNA, 960 bp, Homo sapiens
acgcgcaagattaggtggggcgccagagccggggcacctgcgcaggcttggctgcgccctctcgcgccgcacgctctgcgggttcctcccttcttccgagcctctcctctggccgccgcgcgggagagaggccgagatggcagatgagattgccaaggctcaggtcgctcggcctggtggcgacacgatcttygggaagatcatccgcaaggaaataccagccaaaatcatttttgaggatgaccggtgccttgctttccatgacatttcycctcaagcaccaacacattttctggtgatacccaagaaacatatatcccagatttctgtggcagaagatgatgatgaaagtcttcttggacacttaatgattgttggcaagaaatgtgctgctgatctgggcctgaataagggttatcgaatggtggtgaatgaaggttcagatggtrgacagtctgtctatcacgttcatctccatgttcttggaggtcggcaaatgcattggcctcctggttaagcacgttttggggataattttctcttctttaggcaatgattaagttaggcaatttccagtatgttaagtaacacacttatttttgcctgtgtatggagagattcaagaaataattttaaaaccgcatacataataaaagacattgttgcatggcttatagtctctctgagtgttgcgtttgatttgttattttaaaaacatatttgttggaatatgtgaaggtgggtttataattttggatgtttcttgctttttcttcccaaggaggactcaacatatgaacatcgcattgttttaatggtgttactagtctttgaagacaaataatgagagtttataaatttagctttaacttcgaaatatctttccaggctaaaataggtccaacttagatttttaagctaattctcacattttctaagaacataggaaattgaccattt

SEQ ID NO: 4789 - DNA, 6274 bp, Homo sapiens
gttcctagaaaatggagctgtcttggcatgtagtctttattgccctgctaagtttttcatgctgggggtcagactgggagtctgatagaaatttcatttccaccgctggtcctctaaccaatgacttgctgcacaacctgagtggtctcctgggagaccagagttctaactttgtagcaggggacaaagacatgtatgtttgtcaccagccactgcccactttcctgccagaatacttcagcagtctccatgccagtcagatcacccattataaggtatttctgtcatgggcacagctcctcccagcaggargcacccagaatccagaygagaaaacagtgcagtgctaccggcgactcctcaaggccctcaagactgcacggcttcagcccatggtcatcctgcaccaccagaccctccctgccagcaccctccggagaaccgaagcctttgctgacctcttcgccgactatgccacattcgccttccactccttcggggacctagttgggatctggttcaccttcagtgacttggaggaagtgatcaaggagcttccccaccaggaatcaagagcgtyacaactccagacyctcagtgatgcccacagaaaagcctatgagatttaccacgaaagctatgcttttcagggcggaaaactctctrttgtcctgcgagctgaagatatcccggagctcctgctagaaccacccatatctgcgcttgcccaggacacggtsgatttcctctctcttgatttgtcttatgaatgccaaaatgaggcaagtctgcggcagaagctgagtaaattgcagaccattgagccaaaagtgaaagttttcatcttcaacctaaaactcccagactgcccctccaccatgaagaacccagccagtctgctcttcagcctttttgaagccataaataaagaccaagtgctcaccattgggtttgatattaatgagtttctgagttgttcatcaagttccaagaaaagcatgtcttgttctctgactggcagcctggcccttcagcctgaccagcagcaggaccacgagaccacggactcctctcctgcctctgcctatcagagartctgggaagcatttgccaatcagtccagggcggaaagggatgccttcctgcaggatactttccctgaaggcttcctctggggtgcctccacaggagcctttaacgtggaaggaggctgggccgagggtgggagaggggtgagcatctgggatccacgcaggcccctgaacaccactgagggccaagcgacgctggaggtggccagcgacagttaccacaaggtagcctctgacrtcgccctgctttgcggcctccgggctcaggtgtacaagttctccatctcctggtcccggatcttccccatggggcacgggagcagccccagcctcccaggmgttgcctactacaacaagctgattgacaggctacaggatgcgggcatcgagcccatggccacgctgttccactgggacctgcctcaggccctgcaggatcatggtggatggcagaatgagagcgtggtggatgccttcctggactatgcggccttctgcttctccacatttggggaccgtgtgaagctgtgggtgacyttccatgagccgtgggtgatgagctacgcaggstatggcaccggccagcaccctcccggcatctctgacccaggagtggcctcttttaaggtggctcacttggtcctcaaggctcatgccagaacttggcaccactacaacagccatcatcgcccacagcagcaggggcacgtgggcattgtgctgaactcagactgggcagaacccctgtctccagagaggcctgaggacctgagagcctctgagcgcttcttgcacttcatgctgggctggtttgcacaccccgtctttgtggatggagactacccagccaccctgaggacccagatccaacagatgaacagacagtgctcccatcctgtggctcaactccccgagttcacagaggcagagaagcagctcctgaaaggctctgctgattttctgggtctgtcgcattacacctcccgcctcatcagcaacgccccacaaaacacctgcatccctagctatgataccattggaggcttctcccaacacgtgaaccatgtgtggccccagacctcatcctcttggattcgtgtggtgccctgggggataaggaggctgttgcagtttgtatccctggaatacacaagaggaaaagttccaatataccttgccgggaatggcatgcccataggggaaagtgaaaatctctttgatgattccttaagagtagactacttcaatcaatatatcaatgaggtgctcaaggctatcaaggaagactctgtggatgttcgttcctacattgctcgttccctcattgatggcttcgaaggcccttctggttacagccagcggtttggcctgcaccacgtcaacttcagcgacagcagcaagtcaaggactcccaggaaatctgcctactttttcactagcatcatagaaaagaacggtttcctcaccaagggggcaaaaagactgctaccacctaatacagtaaacctcccctccaaagtcagagccttcacttttccatctgaggtgccctccaaggctaaagtcgtttgggaaaagttctccagccaacccaagttcgaaagagatttgttctaccacgggacgtttcgggatgactttctgtggggcgtgtcctcttccgcttatcagattgaaggcgcgtgggatgccgatggcaaaggccccagcatctgggataactttacccacacaccagggagcaatgtgaaagacaatgccactggagacatcgcctgtgacagctatcaccagctggatgccgatctgaatatgctccgagctttgaaggtgaaggcctaccgcttctctatctcctggtctcggattttcccaactgggagaaacagctctatcaacagtcatggggttgattattacaacaggctgatcaatggcttggtggcaagcaacatctttcccatggtgacattgttccattgggacctgccccaggccctccaggatatcggaggctgggagaatcctgccttgattgacttgtttgacagctacgcagacttttgtttccagacctttggtgatagagtcaagttttggatgacttttaatgagcccatgtacctggcatggctaggttatggctcaggggaatttcccccaggggtgaaggacccaggctgggcaccatataggatagcccacgccgtcatcaaagcccatgccagagtctatcacacgtacgatgagaaatacaggcaggagcagaagggggtcatctcgctgagcctcagtacacactgggcagagcccaagtcaccaggggtccccagagatgtggaagccgctgaccgaatgctgcagttctccctgggctggtttgctcaccccatttttagaaacggagactatcctgacaccatgaagtggaaagtggggaacaggagtgaactgcagcacttagccacctcccgcctgccaagcttcactgaggaagagaagaggttcatcagggcgacggccgacgtcttctgcctcaacacgtactactccagaatcgtgcagcacaaaacacccaggctaaacccaccctcctacgaagacgaccaggagatggctgaggaggaggacccttcgtggccttccacggcaatgaacagagctgcgccctgggggacgcgaaggctgctgaactggatcaaggaagagtatggtgacatccccatttacatcaccgaaaacggagtggggctgaccaatccgaacacggaggatactgataggatattttaccacaaaacctacatcaatgaggctttgaaagcctacaggctcgatggtatagaccttcgagggtatgtcgcctggtctctgatggacaactttgagtggctaaatggctacacggtcaagtttggactgtaccatgttgatttcaacaacacgaacaggcctcgcacagcaagagcctccgccaggtactacacagaggtcattaccaacaacggcatgccactggccagggaggatgagtttctgtacggacggtttcctgagggcttcatctggagtgcagcttctgctgcatatcagattgaaggtgcgtggagagcagatggcaaaggactcagcatttgggacacgttttctcacacaccactgagggttgagaacgatgccattggagacgtggcctgtgacagttatcacaagattgctgaggatctggtcaccctgcagaacctgggygtgtcccactaccgtttttccatctcctggtctcgcatcctccctgatggaaccaccaggtacatcaatgaagcgggcctgaactactacgtgaggctcatcgatacactgctggccgccagcatccagccccaggtgaccatttaccactgggacctaccacagacgctccaagatgtaggaggctgggagaatgagaccatcgtgcagcggtttaaggagtatgcagatgtgctcttccagaggctgggagacaaggtgaagttttggatcacgytgaatgagccctttgtcattgcttaccagggctatggctacggaacagcagctccaggagtctccaataggcctggcactgccccctacattgttggccacaatctaataaaggctcatgctgaggcctggcatctgtacaacgatgtgtaccgcgccagtcaaggtggcrtgatttccatcaccatcagcagtgactgggctgaacccagagatccctctaaccaggaggatgtggaggcagccaggagatatgttcagttcatgggaggctggtttgcacatcctattttcaagaatggagattacartgaggtgatgaagacgcggatccgtgacaggagcttggctgcaggcctcaacaagtctcggctgccagaatttacagagagtgagaagaggaggatcaacggcacctatgacttttttgggttcaatcactacaccactgtcctcgcctacaacctcaactatgccactgccatctcttcttttgatgcagacagaggagttgcttccatcgcagatcgctcgtggccagactctggctccttctggctgaagatgacgccttttggcttcaggaggatcctgaactggttaaaggaggaatacaatgaccctccaatttatgtcacagagaatggagtgtcccagcgggaagaaacagacctcaatgacactgcaaggatctactaccttcggacttacatcaatgaggccctcaaagctgtgcaggacaaggtggaccttcgaggatacacagtttggagtgcgatggacaattttgagtgggccacaggcttttcagagagatttggtctgcattttgtgaactacagtgacccttctctgccaaggatccccaaagcatcagcgaagttctacgcctctgtggtccgatgcaatggcttccctgaccccgctacagggcctcacgcttgtctccaccagccagatgcyggacccaccatcagccccgtgagacaggaggaggtgcagttcctggggctaatgctcggcaccacagaagcacagacagctttgtacgttctcttttctcttgtgcttcttggagtctgtggcttggcatttctgtcatacaagtactgcaagcgctctaagcaagggaaaacacaacgaagccaacaggaattgagcccggtgtcttcattctgatgagttaccacctcaagttctatgaagcaggcctagtttcttcatctatstttaccggccaccaaacaccttagggtcttagactctgctgatactggacttctccataaagtcctgctgcaccgttagagatgactttaatcttgaatgatttcgacttgctgagtaaaatggaaatatctccatcttgctccagtatcagagttcatttgggcatttgagaagcaagtagctcttgcggaaacgtgtagatactggtctagtgggtctgtgaaccacttaattgaacttaacagggctgttttaagtttcagagttgttaagggttgttaagggagcaaaaaccgtaaaaatccttcctataagaagaaatcaactccattgcatagactgcaatatcatctcctgcccttctgcaagctctccctagcttcacatcttgtgttttccagaaaataaaaacagcagactgtcctttc

SEQ ID NO: 4790 - DNA, 2005 bp, Homo sapiens
aggtgccacccagcgggttccagcttgtttgctgcatagattacaacggtgatggcgggcaagcggtccggctggagccgggcggctctcctccagctccttctcggcgtgaacctggtggtgatgccgcccacccrggcccggagtctgcgcttcgttaccttgctgtaccgccatggagaccgttcaccagtgaagacatatcccaaggacccctatcaggaagaagaatggccccaggggtttggtcagttaaccaaggaggggatgctacagcactgggaactgggccaggccctgcggcagcgctatcacggcttcctaaacacctcttatcaccggcaagaggtttatgtgcgaagcacagactttgaccggactctcatgagtgctgaggccaacctggctggactcttccctcccaacgggatgcagcgcttcaacccgaacatctcgtggcagcctattcctgtgcacactgtgcccatcactgaggacaggctgctgaagttcccgttgggcccatgtccccgttatgagcagctrcagaacgagacccggcagacaccagagtatcagaatgagagttctcggaatgcacaatttctggacatggtggccaacgagacagggcttacagacctgacactggagaccgtctggaatgtctatgacacactcttctgtgagcaaacgcacgggctgcgcctgccgccctgggcctcaccccaaaccatgcagcgtctcagccggctaaaggacttcagcttccgcttcctcttcggaatctaccagcaggcggagaaggcccggcttcaggggggagtcctgctggctcagataaggaagaacctgaccctaatggcgaccacctcccagctccccaagctgctggtttactctgcgcacgacactaccctggttgccctgcaaatggcactggatgtctacaatggtgaacaagccccctacgcctcctgccacatatttgaactgtaccaggaagattytgggaatttctcagtggagatgtactttcggaacgagagtgacaaggccccctggccgctcagcctgcctggctgccctcaccgctgcccactgcaggacttccttcgcctcacagagcccgtcgtgcccaaggattggcagcaggagtgccagctggcaagcggtcctgcagacacagaggtgattgtggccttggctgtatgtggctccatcctcttcctcctcatagtgctgctcctcaccgtcctcttccggatgcaggcccagcctcctggctaccgccacgtcgcagatggggaggaccacgcctgacaaccactcagcccccttccctccacctcctaggggaggtgggctgggccctcgctcctgactgttgctgctccccagcccatggacaggagatcctgggttgggcctccctctgatgaccccagccagatgagcgagtggggctcagcgtggcccatggtgcctgtcactcagcattcccatgcctgatgtttaccaagtgctgtgttggacactggctttctccaaacaggatttgcctcctccacgctccctacacacctgagatgtaaactggcagtcagtgttcactcaggacctaggattagaaaatggcagagttggtgctggatccaccttgcacttctatcaagccctgttctttttcctccagcctgaagtcttcggcaaatagctcagagggacayggtcttgcctctcagtgcttattttagtgggaaaaacaccagccagccacatttccctgtgtctggctagagccaccattagactcagacagaatgcttcaggaatcgttgtcaccccttcaactggagcaggacrgaaggttgtctgtacttgggagggagtrgggagtggtgggaagggagttgcttgtcacacgaatcaggaaactgctctccctcagctgggctggggtctccagggacctgagctacatgcaggttgtgagctggaaaag

SEQ ID NO: 4791 - DNA, 3255 bp, Homo sapiens
aggtgccacccagcgggttccagcttgtttgctgcatagattacaacggtgatggcgggcaagcggtccggctggagccgggcggctctcctccagctccttctcggcgtgaacctggtggtgatgccgcccacccrggcccggagtctgcgcttcgttaccttgctgtaccgccatggagaccgttcaccagtgaagacatatcccaaggacccctatcaggaagaagaatggccccaggggtttggtcagttaaccaaggaggggatgctacagcactgggaactgggccaggccctgcggcagcgctatcacggcttcctaaacacctcttatcaccggcaagaggtttatgtgcgaagcacagactttgaccggactctcatgagtgctgaggccaacctggctggactcttccctcccaacgggatgcagcgcttcaacccgaacatctcgtggcagcctattcctgtgcacactgtgcccatcactgaggacaggctgctgaagttcccgttgggcccatgtccccgttatgagcagctrcagaacgagacccggcagacaccagagtatcagaatgagagttctcggaatgcacaatttctggacatggtggccaacgagacagggcttacagacctgacactggagaccgtctggaatgtctatgacacactcttctgtgagcaaacgcacgggctgcgcctgccgccctgggcctcaccccaaaccatgcagcgtctcagccggctaaaggacttcagcttccgcttcctcttcggaatctaccagcaggcggagaaggcccggcttcaggggggagtcctgctggctcagataaggaagaacctgaccctaatggcgaccacctcccagctccccaagctgctggtttactctgcgcacgacactaccctggttgccctgcaaatggcactggatgtctacaatggtgaacaagccccctacgcctcctgccacatatttgaactgtaccaggaagattytgggaatttctcagtggagatgtactttcggaacgagagtgacaaggccccctggccgctcagcctgcctggctgccctcaccgctgcccactgcaggacttccttcgcctcacagagcccgtcgtgcccaaggattggcagcaggagtgccagctggcaagcggtcctgcagacacagaggtgattgtggccttggctgtatgtggctccatcctcttcctcctcatagtgctgctcctcaccgtcctcttccggatgcaggcccagcctcctggctaccgccacgtcgcagatggggaggaccacgcctgacaaccactcagcccccttccctccacctcctaggggaggtgggctgggccctcgctcctgactgttgctgctccccagcccatggacaggagatcctgggttgggcctccctctgatgaccccagccagatgagcgagtggggctcagcgtggcccatggtgcctgtcactcagcattcccatgcctgatgtttaccaagtgctgtgttggacactggctttctccaaacaggatttgcctcctccacgctccctacacacctgagatgtaaactggcagtcagtgttcactcaggacctaggattagaaaatggcagagttggtgctggatccaccttgcacttctatcaagccctgttctttttcctccagcctgaagtcttcggcaaatagctcagagggacayggtcttgcctctcagtgcttattttagtgggaaaaacagctaataccaggggtacaaacattggctcccaaggaactggatcacccaacagccagccagccacatttccctgtgtctggctagagccaccattagactcagacagaatgcttcaggaatcgttgtcaccccttcaactggagcaggacrgaaggttgtctgtacttgggagggagtrgggagtggtgggaagggagttgcttgtcacacgaatcaggaaactgctctccctcagctgggctggggtctccagggacctgagctacatgcaggttgtgagctggaaaagaaagttytagactgtggcccagaatagggctggggcagctcccagagaatgaatagtgctgtttcctattggactgatagtgctgtttcctgtgctttttcttcatttctgagacgcaagaagctctctgaccaggtcacttctggaagatccacgcagaagctcagtcggtatggttttattggccatatcaaaagtgagcacaaatcaaataactgcttgatccctctgctaccacccactgagaggagaaaagtcatttagttccaagataaccttggttccaggctagatacagaggggcccttgggacagctgtgtcaccaactctggagcagtctctggaggcaagtccagagcattaacataaaagtgtcccagtcccacagtgccccaggtcccagcacccctgctccaaccctaaccttggatacttttggccctttaacaaatcrccacctctgcttgcaggacttgatcccatgtgtgggctccaaggccttgtctggcccacaccttctttagtgtctctcacttccgtgtcctggcttcctcctggctccagatgagaatgtggtaacctaggaagagtgagaccagtctgacttacacyttctgttaccaatctctcagagcctggggctggcccgcaaacctacratttggtaaagaaatactaggaaggccgggcgcggtggctcaagtctgtaatcccagcactttgggaggctgaggtgggcggatcacgaggtcaggagaccgagaccatcctggctaacacggtgaaacsctgtctctactaaaaatacaaaaaattagctgggcgtggtagcgggcacctgtagtcctagctactcgagaggttgaggcaggagaatggcgtgaacccaggaggcggagcttgcattgagccaagatcacgccactgcactccagcccggggggacagagcgagactccgtctcaaaaaaaaaaaagaaatactaggaaactggacagtagccaggcattgcatgaccaagacaaagccagaggaatggagggccttggctatagagaccactgtctcccagccatcttcttcgtgggccactgccctggggtgaatgtggcagggcggggctgaggctggcccgcactgaaccttgggaagtaggatcggacttggcaagtcagagacattctcctcctactcac

SEQ ID NO: 4792 - DNA, 4979 bp, Homo sapiens
cggtggaaaagcgagtgaagagagcgcgacggcggcggcggcggcggcgcagctattgctggacggccagtgggagagcgaggcctgagcctctgcgtctaggatcaaaatggtttcaatcccagaatactatgaaggcaagaaygtcctcctcacaggagctaccggttttctagggaaggtgcttctggaaaagttgctgaggtcttgtcctaaggtgaattcagtatatgttttggtgaggcagaaagctggacagacaccacaagagcgagtggaagaagtccttagtggcaagctttttgacagattgagagatgaaaatccagattttagagagaaaattatagcaatcaacagcgaactcacccaacctaaactggctctcagtgaagaagataaagaggtgatcatagattctaccaatattatattccactgtgcagctacagtaaggtttaatgaaaatttaagagatgctgttcagttaaatgtgattgcaacgcgacagcttattctccttgcacaacaaatgaagaatctggaagtgttcatgcatgtatcaacagcatatgcctactgtaatcgcaagcatattgatgaagtagtctatccaccacctgtggatcccaagaagctgattgattctttagagtggatggatgatggcctagtaaatgatatcacgccaaaattgataggagacagacctaatacatacatatacacaaaagcattggcagaatatgttgtacaacaagaaggagcaaaactaaatgtggcaattgtaaggccatcgattgttggtgccagttggaaagaaccttttccaggatggattgataactttaatggaccaagtggtctctttattgcggcagggaaaggaattcttcgaacaatacgtgcctccaacaatgcccttgcagatcttgttcctgtagatgtagttgtcaacatgagtcttgcggcagcctggtattccggagttaatagaccaagaaacatcatggtgtayaattgtacaacaggcagcacyaatcctttccactggggtgaagttgagtaccatgtaatttccactttcaagaggaatcctctcgaacaggccttcagacggcccaatgtaaatctaacctccaatcatcttttatatcattactggattgctgtaagccataaggccccagcattcctgtatgatatctacctcaggatgactggaagaagcccaaggatgatgaaaacaataactcgtcttcacaaagctatggtgtttcttgartatttcacaagtaattcttgggtttggaatactgagaatgtcaatatgttaatgaatcaactaaaccctgaagataaaaagaccttcaatattgatgtacggcagttacattgggcagaatatatagagaactactgcttgggaactaagaagtacgtattgaatgaagaaatgtctggcctccctgcagccagaaaacatctgaacaagttgcggaatatacgttatggttttaatactatccttgtgatcctcatctggcgcatttttattgcaagatcacaaatggcaagaaatatctggtactttgtggttagtctgtgttacaagtttttgtcatacttccgagcatccagcactatgagatactgaagaccaaggattcagcattagaacatctatacatatggtgatctaaatgtacaaaatgtaaaatgtataagtcatctcactttttgtcaagacattaaaccatcttagatcggagtgtgaagtaaattatggtatattttatgtaacattttaatgtttatgctcataaaacttagtgaacacactgtgttatgccagctcaaatctacagtagccaccaaaaccatgacttaatattttgagccctagaagaaaggggtgtgctgaggacaagagtggggaaataggaacactgaccagtataactgtgcaattctggaacatattaattaaaataatatgccttaacatatagtgaatttctaattctaatgttcagtgcaatggaagacatttatttggacagtaatactagcaaagttggtagatatttgattcttcattttttgtttttttcattagttgaagtgggttttagttttgtttaaaattataaccagcgtattttcacatcattctgtaagttaaatgatatcaaacatgaaagagatgttctcatttttctttttctgattaaacgtctgatgcatatcatttttctataagtaatcagttgcttttaaaatcagaaggctatattattctaatgaccctattcgatctaaatgggtttgagaatccatatcagcaacatacgtgttttttgacagaaagtgaaaacaaattccgtaaaactgttagtatcaaaaagaataggaatacagttttcttttccacattatgatcaaataaaaatcttgtgagattgtttatgttttgaagcaggaggatttcttgagatttgatggaagtgggagttgggaaggattcaccatacttgtgttctcctccctttataaattttattcataggacttttaaaaggcttgtgctatctttccagtgaaaactgaaagtgcattattatggaagaatgtatttgcaggtagtaatagcattaaaaaatatactcgtgtgtaaacacatactaattttgaccttgaaagatgaattccttcaagaaaaataaaataatgcttaagataatgtgtacgaaattaaataaaggactttatttacatactacataaggtagcaaactgttgaatgagtttgaaggtatcacttattttttatgcatgtgattttagctttagaaagaaatgcgttatagaaacaagtaatagcaagaaaattgatgtatattttaatgatacattaaaattcccttttaatcataatagttaactctacttactgttttaacatacatttgatttaacaaattgttcagcataacacttctaattaagtttatcaagttgtactgtattagataatcagcagtgtatctggagtatgtttaaagagaacagttcgcaatacaaaaagttacatggagctttacatcttaactttctttgtcaatttaaatgcaatgtataaaaagtttattttgctattgtgaaaaactaaatgtaaaggaaatcacctactttcatgcaggtgtataatcttgaaaaggaaaaatgcttccatgttgaagccagattttctgtagtaaaacttttaaatattattttaaaagaaatatgtatataaatatctctatattctttggaatgatactaaagtctctggtctaggaccataccttatataaaggtataagagaccatgacaatgtctgaaaatggaatagataatgatgccttttatttaaagtggcccacataatatacattgagtactccatctctccaaatgtatttccataatgtgttgaaaacatgctaacatttgtatgatttttatacttctgccgaatagacttagaatcagatgaattgtctgtgtgtcttgcaaaagagttggggacaacttgggcaggcctatgaagtgcatagggagtgtatgtcttctgaatggttttattgttcttgtaatctagcttaaagaaatgttaactgggagggtgctgaggccactcactgcattaattttgtgtgtttagagttctgttgtcaaaagaaaactaatgaataaattagtttgtcattctagaatttaaagttctaagattagtataaagagtatatagattgttaatccccaccagctagactttgaacttaagtcagacttaaagatttgagaaattatttgtgtcatttactagacgtgatttttagttctgtttgattatatttcctacacaaacttcttatttaacaggatagcctactaaattaaatgtttcttatttcacttaactcatttgattaaactgtattctaaaacatttggggtttttccccctattcagttttaatcttggaatatgcatttgtaaattgtgatgtcattgagactatatttatatttgacttggcaacattaacaatttccttttcccccttttttgtgttgtctataggaattaacttgggattgttttgtgggtttttgtttgttttaaatgtaaattgagaatcttttataagaaataaaagcattattgggtgcctttgtttgtaaaccaaaaagtaataaatgaatccctatatttccattatagtatttattgtatttttatgttctgaaaattacccatggaacaatatgcttaggattacaggaagcagtccttacttacacttcttgtctgttttaggtgtacttgttaattcttatgtcctaattttatttaattctgagttccttacacagcattttagggaaagaatacaggcaggatgacactttgtgttaaagtgttatttttatgtattacctggaatgaggcaggtttttttctgttttctaaaaagagtaaccaagatacctccagggtgtcattgggttccagctgctctcctccacattgaatgatatcttgttaatttataggcacatttgtggtaatttatatgtctatagagtaagtataagagataattcattagtaataggaattaactgaccccttttggatgggggagagcatcaggctggggtcaggtaagtgtaaatggccttctgagcatgctcttctaggctgactcccagccctgacttgaaaccattagcgctaacttgctctgttttgagaaaaactttccaaacttttgcatgagaaactagaaaaaggaatgtatgccacgtaactggattacagaaatgagttaattaccctcttagcatatatctttgctatccttaagatcctaaacaaatcatctttgtcagttaagtatagttgcgcaaaaattgttaaatcctt

SEQ ID NO: 4793 - DNA, 5221 bp, Homo sapiens
cggtggaaaagcgagtgaagagagcgcgacggcggcggcggcggcggcgcagctattgctggacggccagtgggagagcgaggcctgagcctctgcgtctaggatcaaaatggtttcaatcccagaatactatgaaggcaagaaygtcctcctcacaggagctaccggttttctagggaaggtgcttctggaaaagttgctgaggtcttgtcctaaggtgaattcagtatatgttttggtgaggcagaaagctggacagacaccacaagagcgagtggaagaagtccttagtggcaagctttttgacagattgagagatgaaaatccagattttagagagaaaattatagcaatcaacagcgaactcacccaacctaaactggctctcagtgaagaagataaagaggtgatcatagattctaccaatattatattccactgtgcagctacagtaaggtttaatgaaaatttaagagatgctgttcagttaaatgtgattgcaacgcgacagcttattctccttgcacaacaaatgaagaatctggaagtgttcatgcatgtatcaacagcatatgcctactgtaatcgcaagcatattgatgaagtagtctatccaccacctgtggatcccaagaagctgattgattctttagagtggatggatgatggcctagtaaatgatatcacgccaaaattgataggagacagacctaatacatacatatacacaaaagcattggcagaatatgttgtacaacaagaaggagcaaaactaaatgtggcaattgtaaggccatcgattgttggtgccagttggaaagaaccttttccaggatggattgataactttaatggaccaagtggtctctttattgcggcagggaaaggaattcttcgaacaatacgtgcctccaacaatgcccttgcagatcttgttcctgtagatgtagttgtcaacatgagtcttgcggcagcctggtattccggagttaatagaccaagaaacatcatggtgtayaattgtacaacaggcagcacyaatcctttccactggggtgaagttgagtaccatgtaatttccactttcaagaggaatcctctcgaacaggccttcagacggcccaatgtaaatctaacctccaatcatcttttatatcattactggattgctgtaagccataaggccccagcattcctgtatgatatctacctcaggatgactggaagaagcccaaggatgatgaaaacaataactcgtcttcacaaagctatggtgtttcttgartatttcacaagtaattcttgggtttggaatactgagaatgtcaatatgttaatgaatcaactaaaccctgaagataaaaagaccttcaatattgatgtacggcagttacattgggcagaatatatagagaactactgcttgggaactaagaagtacgtattgaatgaagaaatgtctggcctccctgcagccagaaaacatctgaacaagttgcggaatatacgttatggttttaatactatccttgtgatcctcatctggcgcatttttattgcaagatcacaaatggcaagaaatatctggtactttgtggttagtctgtgttacaagtttttgtcatacttccgagcatccagcactatgagatactgaagaccaaggattcagcattagaacatctatacatatggtgatctaaatgtacaaaatgtaaaatgtataagtcatctcactttttgtcaagacattaaaccatcttagatcggagtgtgaagtaaattatggtatattttatgtaacattttaatgtttatgctcataaaacttagtgaacacactgtgttatgccagctcaaatctacagtagccaccaaaaccatgacttaatattttgagccctagaagaaaggggtgtgctgaggacaagagtggggaaataggaacactgaccagtataactgtgcaattctggaacatattaattaaaataatatgccttaacatatagtgaatttctaattctaatgttcagtgcaatggaagacatttatttggacagtaatactagcaaagttggtagatatttgattcttcattttttgtttttttcattagttgaagtgggttttagttttgtttaaaattataaccagcgtattttcacatcattctgtaagttaaatgatatcaaacatgaaagagatgttctcatttttctttttctgattaaacgtctgatgcatatcatttttctataagtaatcagttgcttttaaaatcagaaggctatattattctaatgaccctattcgatctaaatgggtttgagaatccatatcagcaacatacgtgttttttgacagaaagtgaaaacaaattccgtaaaactgttagtatcaaaaagaataggaatacagttttcttttccacattatgatcaaataaaaatcttgtgagattgtttatgttttgaagcaggaggatttcttgagatttgatggaagtgggagttgggaaggattcaccatacttgtgttctcctccctttataaattttattcataggacttttaaaaggcttgtgctatctttccagtgaaaactgaaagtgcattattatggaagaatgtatttgcaggtagtaatagcattaaaaaatatactcgtgtgtaaacacatactaattttgaccttgaaagatgaattccttcaagaaaaataaaataatgcttaagataatgtgtacgaaattaaataaaggactttatttacatactacataaggtagcaaactgttgaatgagtttgaaggtatcacttattttttatgcatgtgattttagctttagaaagaaatgcgttatagaaacaagtaatagcaagaaaattgatgtatattttaatgatacattaaaattcccttttaatcataatagttaactctacttactgttttaacatacatttgatttaacaaattgttcagcataacacttctaattaagtttatcaagttgtactgtattagataatcagcagtgtatctggagtatgtttaaagagaacagttcgcaatacaaaaagttacatggagctttacatcttaactttctttgtcaatttaaatgcaatgtataaaaagtttattttgctattgtgaaaaactaaatgtaaaggaaatcacctactttcatgcaggtgtataatcttgaaaaggaaaaatgcttccatgttgaagccagattttctgtagtaaaacttttaaatattattttaaaagaaatatgtatataaatatctctatattctttggaatgatactaaagtctctggtctaggaccataccttatataaaggtataagagaccatgacaatgtctgaaaatggaatagataatgatgccttttatttaaagtggcccacataatatacattgagtactccatctctccaaatgtatttccataatgtgttgaaaacatgctaacatttgtatgatttttatacttctgccgaatagacttagaatcagatgaattgtctgtgtgtcttgcaaaagagttggggacaacttgggcaggcctatgaagtgcatagggagtgtatgtcttctgaatggttttattgttcttgtaatctagcttaaagaaatgttaactgggagggtgctgaggccactcactgcattaattttgtgtgtttagagttctgttgtcaaaagaaaactaatgaataaattagtttgtcattctagaatttaaagttctaagattagtataaagagtatatagattgttaatccccaccagctagactttgaacttaagtcagacttaaagatttgagaaattatttgtgtcatttactagacgtgatttttagttctgtttgattatatttcctacacaaacttcttatttaacaggatagcctactaaattaaatgtttcttatttcacttaactcatttgattaaactgtattctaaaacatttggggtttttccccctattcagttttaatcttggaatatgcatttgtaaattgtgatgtcattgagactatatttatatttgacttggcaacattaacatgtcctaagacttagtgcagagaagcttggcagtacgttctttgacttaaggatggcataaaataatcatttttgaacctgtgtaataaagcttgaaagcagggaaaagaatttccttttcccccttttttgtgttgtctataggaattaacttgggattgttttgtgggtttttgtttgttttaaatgtaaattgagaatcttttataagaaataaaagcattattgggtgcctttgtttgtaaaccaaaaagtaataaatgaatccctatatttccattatagtatttattgtatttttatgttctgaaaattacccatggaacaatatgcttaggattacaggaagcagtccttacttacacttcttgtctgttttaggtgtacttgttaattcttatgtcctaattttatttaattctgagttccttacacagcattttagggaaagaatacaggcaggatgacactttgtgttaaagtgttatttttatgtattacctggaatgaggcaggtttttttctgttttctaaaaagagtaaccaagatacctccagggtgtcattgggttccagctgctctcctccacattgaatgatatcttgttaatttataggcacatttgtggtaatttatatgtctatagagtaagtataagagataattcattagtaataggaattaactgaccccttttggatgggggagagcatcaggctggggtcaggtaagtgtaaatggccttctgagcatgctcttctaggctgactcccagccctgacttgaaaccattagcgctaacttgctctgttttgagaaaaactttccaaacttttgcatgagaaactagaaaaaggaatgtatgccacgtaactggattacagaaatgagttaattgtctctgtgataaaaaaaaaaaatgaaatattttcttattgaattaatatttttgtcttgaagcattttctagtgatagaatgtatttgtcttttttcctggtggtaccctcttagcatatatctttgctatccttaagatcctaaacaaatcatctttgtcagttaagtatagttgcgcaaaaattgttaaatcctttgtctttattaaagaaaaatttgagt

SEQ ID NO: 4794 - DNA, 1126 bp, Homo sapiens
cggtggaaaagcgagtgaagagagcgcgacggcggcggcggcggcggcgcagctattgctggacggccagtgggagagcgaggcctgagcctctgcgtctaggatcaaaatggtttcaatcccagaatactatgaaggcaagaaygtcctcctcacaggagctaccggttttctagggaaggtgcttctggaaaagttgctgaggtcttgtcctaaggtgaattcagtatatgttttggtgaggcagaaagctggacagacaccacaagagcgagtggaagaagtccttagtggcaagctttttgacagattgagagatgaaaatccagattttagagagaaaattatagcaatcaacagcgaactcacccaacctaaactggctctcagtgaagaagataaagaggtgatcatagattctaccaatattatattccactgtgcagctacagtaaggtttaatgaaaatttaagagatgctgttcagttaaatgtgattgcaacgcgacagcttattctccttgcacaacaaatgaagaatctggaagtgttcatgcatgtatcaacagcatatgcctactgtaatcgcaagcatattgatgaagtagtctatccaccacctgtggatcccaagaagctgattgattctttagagtggatggatgatggcctagtaaatgatatcacgccaaaattgataggagacagacctaatacatacatatacacaaaagcattggcagaatatgttgtacaacaagaaggagcaaaactaaatgtggcaattgtaaggccatcgattgttggtgccagttggaaagaaccttttccaggatggattgataactttaatggaccaagtggtctctttattgcggcagggaaaggaattcttcgaacaatacgtgcctccaacaatgcccttgcagatcttgttcctgtagatgtagttgtcaacatgagtcttgcggcagcctggtattccggagttaatagaccaagaaacatcatggtgtayaattgtacaacaggcagcacyaatcctttccactggggtgaagttggtatgattttacctgtgtttttgaatgttagaataaatcttaaagaaccaagttccctgaag

SEQ ID NO: 4795 - DNA, 2853 bp, Homo sapiens
gcctcccagcacgctggtcagctcctcttgctcgcaagcaggtctggccccagcggcgcgaagtcacgaggctgggggcggccggcggcgaagggggcggggcgaggccggggcgccgcagcgcgcataggcggagcctcgggccgcgggccgccttggtatatctgcgcgtgcgcggcgtcgctgctgggccagtcgggacagaggagacaagatggcgctgcgggcgatgcgggggattgtcaacggggccgcacccgagctacccgtgcccaccggtgggccggcggtgggakctcgggagcaggcgctggcagtcagtcggaactacctctcccagcctcgcctcacatacaagacagtatctggagtcaatggtccactagtgatcttagatcatgttaagtttcccaggtatgctgaaattgtccatttgaccttaccggatggcacaaagagaagtgggcaagttctggaagttagtggttccaaggcagtagttcaggtatttgaagggacttcaggtatagatgctaagaaaacgtcctgtgagtttactggggatattctccgaacaccggtgtctgaggatatgcttggtcgggtattcaatggatcgggaaaacccattgacagaggtcctgttgtactggccgaagacttccttgatatcatgggtcagccaatcaaccctcaatgtcgaatctacccagaggaaatgattcagactggcatttcggccatcgatgggatgaacagtattgctagggggcagaaaattcctatcttctctgctgctgggctaccacacaatgagattgcagctcagatctgtcgccaggctggtttggtaaagaaatccaaagatgtagtagactacagtgaggaaaattttgcaattgtatttgctgctatgggtgtaaacatggaaactgcccggttcttyaaatctgactttgaagaaaatggctcaatggacaatgtctgcctctttttgaacttggctaatgacccaaccattgagcgaattatcactcctcgcctggctctaaccacagctgaatttctggcgtaccaatgtgagaaacatgtattggttattctaacagacatgagttcttatgctgaagcacttcgagaggtttcagcagccagggaagaggtacctggtcgacgaggttttccaggttacatgtatacagatttagccacgatatatgaacgcgctgggcgagtggaagggagaaacggctcgattactcaaatccctattctaaccatgcctaatgatgatatcactcaccccatcccagacttgactggctacattacagaggggcagatctatgtggacagacagctgcacaacagacagatttatccacctatcaatgtgctgccctcactatcacggttaatgaagtctgctattggagaagggatgaccaggaaggatcatgccgatgtatctaaccagctatatgcgtgctatgctattggraaggatgtgcaagccatgaaagctgtcgttggagaagaagcccttacctcagatgatcttctctacttggaatttctgcagaagtttgagaggaacttcattgctcagggtccttacgaaaatcgcactgtctttgagactttggacattggctggcagctactccgaatcttccccaaagaaatgctgaagagaatccctcagagcaccctcagcgaattttaccctcgagactctgcaaagcattagctgctgcttctgcattgctccgcgctcttgtgaaatactggttctgttttctttattccttttgcactctcggttcccacctttgtgttggagtttaccatgttaccctgtaattaaaaacaaagaataggtaacatattgtgccagtgttgcaacgttttaaactgctaacagaccttaaatggcgttttcttattgctgtatgtattgtacatagtggagtagttagttacctgataacagtcttgttatttgggtctcttagaccttacctctcaactccctcaagagtaccagtctctgaagttataatgctttggtctctacattaggggcaagatccagtctgagagaagtctcctttgagaagggccaagaggctctttcctgagtgtttgctttcggtttgttggtatgcctgtattgctgggctgtgctgctgctcgaagcagatggttttgactgtctttttgctctttcctatataatgaatagatgagtgaaaggagttttctttttctctttagtacttacgtattgggattcctgtgtcttacagctctccctctccaaataatacacagaatcctgcaactttttgcacagctggtatctgtctggtagcagtgagaccccttgtcttggtgatccttactgggtttccaagcagaggagycacatgattacaattgccagtagagttgttgtttggggtacaagatgagaagaaagaaaaacctacagcctttctacattctgacatgctaacagtggtttaagtttctaaagtgtttaccagatgctgaaggcaaggggagggagcagaagcacttatgtttacggatattttaaactctgttagagagcagcctttgaaaatccccaatttggttctgctttttgacctctctctaccttttcagggtaatctttgtggcacaaacgatagcatttccaagctttagagttttctgaattcctgcgccttcctgacgtgagccctgagcgatcttctatgcagttctgccatgcgtcctgttggtctctctgtgttctttgttacttgggtgcaatrgcaacttccctaccccgtgcattccatc

SEQ ID NO: 4796 - DNA, 3044 bp, Homo sapiens
gcctcccagcacgctggtcagctcctcttgctcgcaagcaggtctggccccagcggcgcgaagtcacgaggctgggggcggccggcggcgaagggggcggggcgaggccggggcgccgcagcgcgcataggcggagcctcgggccgcgggccgccttggtatatctgcgcgtgcgcggcgtcgctgctgggccagtcgggacagaggagacaagatggcgctgcgggcgatgcgggggattgtcaacggggccgcacccgagctacccgtgcccaccggtgggccggcggtgggakctcgggagcaggcgctggcagtcagtcggaactacctctcccagcctcgcctcacatacaagacagtatctggagtcaatggtccactagtgatcttagatcatgttaagtttcccaggtatgctgaaattgtccatttgaccttaccggatggcacaaagagaagtgggcaagttctggaagttagtggttccaaggcagtagttcaggtatttgaagggacttcaggtatagatgctaagaaaacgtcctgtgagtttactggggatattctccgaacaccggtgtctgaggatatgcttggtcgggtattcaatggatcgggaaaacccattgacagaggtcctgttgtactggccgaagacttccttgatatcatgggtcagccaatcaaccctcaatgtcgaatctacccagaggaaatgattcagactggcatttcggccatcgatgggatgaacagtattgctagggggcagaaaattcctatcttctctgctgctgggctaccacacaatgagattgcagctcagatctgtcgccaggctggtttggtaaagaaatccaaagatgtagtagactacagtgaggaaaattttgcaattgtatttgctgctatgggtgtaaacatggaaactgcccggttcttyaaatctgactttgaagaaaatggctcaatggacaatgtctgcctctttttgaacttggctaatgacccaaccattgagcgaattatcactcctcgcctggctctaaccacagctgaatttctggcgtaccaatgtgagaaacatgtattggttattctaacagacatgagttcttatgctgaagcacttcgagaggtttcagcagccagggaagaggtacctggtcgacgaggttttccaggttacatgtatacagatttagccacgatatatgaacgcgctgggcgagtggaagggagaaacggctcgattactcaaatccctattctaaccatgcctaatgatgatatcactcaccccatcccagacttgactggctacattacagaggggcagatctatgtggacagacagctgcacaacagacagatttatccacctatcaatgtgctgccctcactatcacggttaatgaagtctgctattggagaagggatgaccaggaaggatcatgccgatgtatctaaccagctatatgcgtgctatgctattggraaggatgtgcaagccatgaaagctgtcgttggagaagaagcccttacctcagatgatcttctctacttggaatttctgcagaagtttgagaggaacttcattgctcagggtccttacgaaaatcgcactgtctttgagactttggacattggctggcagctactccgaatcttccccaaagaaatgctgaagagaatccctcagagcaccctcagcgaattttaccctcgagactctgcaaagcattagctgctgcttctgcattgctccgcgctcttgtgaaatactggttctgttttctttattccttttgcactctcggttcccacctttgtgttggagtttaccatgttaccctgtaattaaaaacaaagaataggtaacatattgtgccagtgttgcaacgttttaaactgctaacagaccttaaaatatccccctacctgggtcctcagtgctatgtttaaagtgctgcagggatggagtggcgttttcttattgctgtatgtattgtacatagtggagtagttagttacctgataacagtcttgttatttgggtctcttagaccttacctctcaactccctcaagagtaccagtctctgaagttataatgctttggtctctacattaggggcaagatccagtctgagagaagtctcctttgagaagggccaagaggctctttcctgagtgtttgctttcggtttgttggtatgcctgtattgctgggctgtgctgctgctcgaagcagatggttttgactgtctttttgctctttcctatataatgaatagatgagtgaaaggagttttctttttctctttagtacttacgtattgggattcctgtgtcttacagctctccctctccaaataatacacagaatcctgcaactttttgcacagctggtatctgtctggtagcagtgagaccccttgtcttggtgatccttactgggtttccaagcagaggagycacatgattacaattgccagtagagttgttgtttggggtacaagatgagaagaaagaaaaacctacagcctttctacattctgacatgctaacagtggtttaagtttctaaagtgtttaccagatgctgaaggcaaggggagggagcagaagcacttatgtttacggatattttaaactctgttagagagcagcctttgaaaatccccaatttggttctgctttttgacctctctctaccttttcagggtaatctttgtggcacaaacgatagcatttccaagctttagagttttctgaattcctgcgccttcctgacgtgagccctgagcgatcttctatgcagttctgccatgcgtcctgttggtctctctgtgttctttgttacttgggtgcaatrgcaacttccctaccccgtgcattccatctttyatgttgtgtaaagttcttcacttttttctctgagggctgggggttgggggagtcagcatgattatattttaatgtagaaaatgtgacatctggatataaaatgaaaataaatgttaaattaaatggaccttaa

SEQ ID NO: 4797 - DNA, 4098 bp, Homo sapiens
aatggtgggtgaagagaagatgtctctaagaaaccggctgtcaaagtccagggaaaatcctgaggaagatgaagaccagagaaaccctgcaaaggagtccctagagacacctagtaatggtcgaattgacataaaacagttgatagcaaagaagataaagttgacagcagaggcagaggaattgaagccattttttatgaaggaagttggcagtcactttgatgattttgtgaccaatctcattgaaaagtcagcatcattagataatggtgggtgcgctctcacaaccttttctgttcttgaaggagagaaaaacaaccatagagcgaaggatttgagagcacctccagaacaaggaaagatttttattgcaaggcgctctctcttagatgaactgcttgaagtggaccacatcagaacaatatatcacatgtttattgccctcctcattctctttatcctcagcacacttgtagtagattacattgatgaaggaaggctggtgcttgagttcagcctcctgtcttatgcttttggcaaatttcctaccgttgtttggacctggtggatcatgttcctgtctacattttcagttccctattttctgtttcaacattgggccactggctatagcaagagttctcatccgctgatccgttctctcttccatggctttcttttcatgatcttccagattggagttctaggttttggaccaacatatgttgtgttagcatatacactgccaccagcttcccggttcatcattatattcgagcagattcgttttgtaatgaaggcccactcatttgtcagagagaacgtgcctcgggtactaaattcagctaaggagaaatcaagcactgttccaatacctacagtcaaccagtatttgtacttcttatttgctcctacccttatctaccgtgacagctatcccaggaatcccactgtaagatggggttatgtcgctatgaagtttgcacaggtctttggttgctttttctatgtgtactacatctttgaaaggctttgtgcccccttgtttcggaatatcaaacaggagcccttcagcgctcgtgttctggtcctatgtgtatttaactccatcttgccaggtgtgctgattctcttccttactttttttgcctttttgcactgctggctcaatgcctttgctgagatgttacgctttggtgacaggatgttctataaggattggtggaactccacgtcatactccaactattatagaacctggaatgtggtggtccatgactggctatattactatgcttacaaggactttctctggtttttctccaagagattcaaatctgctgccatgttagctgtctttgctgtatctgctgtagtacacgaatatgccttggctgtttgcttgagctttttctatcccgtgctsttcgtgctcttcatgttctttggaatggctttcaacttcattgtcaatgatagtcggaaaaagccgatttggaatgttctgatgtggacttctcttttcttgggcaatggagtcttactctgcttttattctcaagaatggtatgcacgtcagcactgtcctctgaaaaatcccacatttttggattatgtccggccacgttcctggacttgtcgttacgtgttttagaagcttggactttgtttcctccttgtcactgaagattgggtagctccctgatttggagycagctgtttccagttgttactgaagttatctgtgttatttggaccactccaggctttacagatgactcactccattcctaggtcacttgaagccaaactgttggaagttcactggagtcttgtacacttaagcagagcagaactttttttgtggggctgggtggggggagaagaccgactaacagctgaagtaatgacagattgttgctgggtcatatcagctttatcccttggtaattatatctgttttgtttcttgactctgtccaatcagagaataaacatcatagtttcttggccactgaattagccaaaacacttaggaagaaatcacttaaatacctctggcttagaaattttttcatgcacactgttggaatgtatgctaattgaacatgcaattggggaagaaaaaatgtagaatgatttttgctatttctagtagaaagaaaatgtctgttttccaaagataatgttatacatcctattttgtaatttttttgaaaaaagttcaatgttcagttttccttagtttttaccttgttttctctataggtcatgatttctgtgaagcaaaaagatgccttttaccatgaattcttgagtttacatcaataatattgtatattaaggggatcagaagtaggaaggaaaaaataagagatagcagaggaaaaagaaaaacatttcctcttataacttctgaagtaatttgtaaaaaagatttgtagagtcaatcatgtgtttaaattattttatcacaaacttaacatggaagatattcctttttaactttstggtaacttctttgaagttatttagaaatatcctttggaacaattattttattgtctaataaatattgacttctcttgaattattttgcagactagtgagtctgtamcataagtattaatcacctccactcatattaaagtgatcattaagaatccagaagctggcttctgcatttgctcagttatacttttaatggtagtatgtttttaggtggaataaattaatatgtgattggtttcaaggaaatgtactctattatgtaatacttccattttataagatgcccrtttctaatacaatgtgtgtaggaattatttgtatgtatgaggtatgattgtaaagattgagcattggaaggggtatcagagaccatgtagttcaactttccactcaaagtaagatttatgaattatttaaatgatagttgttacttggaacagccacttgagaggctctcttggtattgtttggaattgttttaaagtcagtttgagtctcacaagaaggtaagtagagtttcttaatagtcacaacttaatttgaaccacaagtatccagcttaatcacgtatcttactcacgataccactggtccagatgagtttaggtaattttcaaacattaaatccaacttcaacggaaacaaatacactcaagggaagttatttttaaaaaggtactctgcatgttcccgcagtaatgttctgcacaacagtattgtaattgtaatggaatcataacctgctaactagtttgctttaatatggcttgtaattcttgacatttttcttaaaattaaaacgaatttttattttgaatttataactgcattttaaatatattggggacagattgcgctgagacctggttatgagcaagccartcttttgaatctagagaatggaattcttaggtttatatttctgttaagaaatactataaatatgactcttatgagaagactttgttgctctgtagtgtttctgaatactgtatttgttggattgatcaaggctatttttcaaaaagctctctgcttcctgtttgtttgtttgtttgtttttgagacagagtcttgctctgtcgccggggctggagtgcaatggcgtgaactcagctcactgcaacctctgcctccctggttcaagctattctcctgcctcagcctcctgagtagctgggattacagggccacgcctggctaatttttgtatttttagtagagatggggtttcaccctgttggtcaggctggtctcaaactcctgaccttgtgatctgcccacctcagcctcccaaagtgctgggaagacaggcgttagccaccgtgcccggcctctgtttcctgttattagtgattttcctgcccaagattgcaacaacaaatatgtagaactacagactgtttagaatgctgagactgttctaagaaactttcaaaaacagtagcacttcaaggaatggtcactttctatgaaagaaactggtttgatagccataatcttattgctagctgcttttagcaaaagtcttttcttgaaaccaccacctatactctttaaacaaataaaaactaaaatctcttgctaa

SEQ ID NO: 4798 - DNA, 4293 bp, Homo sapiens
acgcagcggtgctcggaggcagggggcgtaggggccgggctgtccggcgctttagcttagcaggcgacgttgcgggccctgggcgccaggagagcttcccggagtcgaccttcctgctggctgctctgtgaccgcttcccggctctgccctcttggccgaagtgcccgctgccgggcgcgggcctcagacaatacaatggtgggtgaagagaagatgtctctaagaaaccggctgtcaaagtccagggaaaatcctgaggaagatgaagaccagagaaaccctgcaaaggagtccctagagacacctagtaatggtcgaattgacataaaacagttgatagcaaagaagataaagttgacagcagaggcagaggaattgaagccattttttatgaaggaagttggcagtcactttgatgattttgtgaccaatctcattgaaaagtcagcatcattagataatggtgggtgcgctctcacaaccttttctgttcttgaaggagagaaaaacaaccatagagcgaaggatttgagagcacctccagaacaaggaaagatttttattgcaaggcgctctctcttagatgaactgcttgaagtggaccacatcagaacaatatatcacatgtttattgccctcctcattctctttatcctcagcacacttgtagtagattacattgatgaaggaaggctggtgcttgagttcagcctcctgtcttatgcttttggcaaatttcctaccgttgtttggacctggtggatcatgttcctgtctacattttcagttccctattttctgtttcaacattgggccactggctatagcaagagttctcatccgctgatccgttctctcttccatggctttcttttcatgatcttccagattggagttctaggttttggaccaacatatgttgtgttagcatatacactgccaccagcttcccggttcatcattatattcgagcagattcgttttgtaatgaaggcccactcatttgtcagagagaacgtgcctcgggtactaaattcagctaaggagaaatcaagcactgttccaatacctacagtcaaccagtatttgtacttcttatttgctcctacccttatctaccgtgacagctatcccaggaatcccactgtaagatggggttatgtcgctatgaagtttgcacaggtctttggttgctttttctatgtgtactacatctttgaaaggctttgtgcccccttgtttcggaatatcaaacaggagcccttcagcgctcgtgttctggtcctatgtgtatttaactccatcttgccaggtgtgctgattctcttccttactttttttgcctttttgcactgctggctcaatgcctttgctgagatgttacgctttggtgacaggatgttctataaggattggtggaactccacgtcatactccaactattatagaacctggaatgtggtggtccatgactggctatattactatgcttacaaggactttctctggtttttctccaagagattcaaatctgctgccatgttagctgtctttgctgtatctgctgtagtacacgaatatgccttggctgtttgcttgagctttttctatcccgtgctsttcgtgctcttcatgttctttggaatggctttcaacttcattgtcaatgatagtcggaaaaagccgatttggaatgttctgatgtggacttctcttttcttgggcaatggagtcttactctgcttttattctcaagaatggtatgcacgtcagcactgtcctctgaaaaatcccacatttttggattatgtccggccacgttcctggacttgtcgttacgtgttttagaagcttggactttgtttcctccttgtcactgaagattgggtagctccctgatttggagycagctgtttccagttgttactgaagttatctgtgttatttggaccactccaggctttacagatgactcactccattcctaggtcacttgaagccaaactgttggaagttcactggagtcttgtacacttaagcagagcagaactttttttgtggggctgggtggggggagaagaccgactaacagctgaagtaatgacagattgttgctgggtcatatcagctttatcccttggtaattatatctgttttgtttcttgactctgtccaatcagagaataaacatcatagtttcttggccactgaattagccaaaacacttaggaagaaatcacttaaatacctctggcttagaaattttttcatgcacactgttggaatgtatgctaattgaacatgcaattggggaagaaaaaatgtagaatgatttttgctatttctagtagaaagaaaatgtctgttttccaaagataatgttatacatcctattttgtaatttttttgaaaaaagttcaatgttcagttttccttagtttttaccttgttttctctataggtcatgatttctgtgaagcaaaaagatgccttttaccatgaattcttgagtttacatcaataatattgtatattaaggggatcagaagtaggaaggaaaaaataagagatagcagaggaaaaagaaaaacatttcctcttataacttctgaagtaatttgtaaaaaagatttgtagagtcaatcatgtgtttaaattattttatcacaaacttaacatggaagatattcctttttaactttstggtaacttctttgaagttatttagaaatatcctttggaacaattattttattgtctaataaatattgacttctcttgaattattttgcagactagtgagtctgtamcataagtattaatcacctccactcatattaaagtgatcattaagaatccagaagctggcttctgcatttgctcagttatacttttaatggtagtatgtttttaggtggaataaattaatatgtgattggtttcaaggaaatgtactctattatgtaatacttccattttataagatgcccrtttctaatacaatgtgtgtaggaattatttgtatgtatgaggtatgattgtaaagattgagcattggaaggggtatcagagaccatgtagttcaactttccactcaaagtaagatttatgaattatttaaatgatagttgttacttggaacagccacttgagaggctctcttggtattgtttggaattgttttaaagtcagtttgagtctcacaagaaggtaagtagagtttcttaatagtcacaacttaatttgaaccacaagtatccagcttaatcacgtatcttactcacgataccactggtccagatgagtttaggtaattttcaaacattaaatccaacttcaacggaaacaaatacactcaagggaagttatttttaaaaaggtactctgcatgttcccgcagtaatgttctgcacaacagtattgtaattgtaatggaatcataacctgctaactagtttgctttaatatggcttgtaattcttgacatttttcttaaaattaaaacgaatttttattttgaatttataactgcattttaaatatattggggacagattgcgctgagacctggttatgagcaagccartcttttgaatctagagaatggaattcttaggtttatatttctgttaagaaatactataaatatgactcttatgagaagactttgttgctctgtagtgtttctgaatactgtatttgttggattgatcaaggctatttttcaaaaagctctctgcttcctgtttgtttgtttgtttgtttttgagacagagtcttgctctgtcgccggggctggagtgcaatggcgtgaactcagctcactgcaacctctgcctccctggttcaagctattctcctgcctcagcctcctgagtagctgggattacagggccacgcctggctaatttttgtatttttagtagagatggggtttcaccctgttggtcaggctggtctcaaactcctgaccttgtgatctgcccacctcagcctcccaaagtgctgggaagacaggcgttagccaccgtgcccggcctctgtttcctgttattagtgattttcctgcccaagattgcaacaacaaatatgtagaactacagactgtttagaatgctgagactgttctaagaaactttcaaaaacagtagcacttcaaggaatggtcactttctatgaaagaaactggtttgatagccataatcttattgctagctgcttttagcaaaagtcttttcttgaaaccaccacctatactctttaaacaaataaaaactaaaatctcttgctaa

SEQ ID NO: 4799 - DNA, 4258 bp, Homo sapiens
ggccgggctgtccggcgctttagcttagcaggcgacgttgcgggccctgggcgccaggagagcttcccggagtcgaccttcctgctggctgctctgtgaccgcttcccggctctgccctcttggccgaagtgcccgctgccgggcgcgggcctcagaatggtgggtgaagagaagatgtctctaagaaaccggctgtcaaagtccagggaaaatcctgaggaagatgaagaccagagaaaccctgcaaaggagtccctagagacacctagtaatggtcgaattgacataaaacagttgatagcaaagaagataaagttgacagcagaggcagaggcaagaattgaagccattttttatgaaggaagttggcagtcactttgatgattttgtgaccaatctcattgaaaagtcagcatcattagataatggtgggtgcgctctcacaaccttttctgttcttgaaggagagaaaaacaaccatagagcgaaggatttgagagcacctccagaacaaggaaagatttttattgcaaggcgctctctcttagatgaactgcttgaagtggaccacatcagaacaatatatcacatgtttattgccctcctcattctctttatcctcagcacacttgtagtagattacattgatgaaggaaggctggtgcttgagttcagcctcctgtcttatgcttttggcaaatttcctaccgttgtttggacctggtggatcatgttcctgtctacattttcagttccctattttctgtttcaacattgggccactggctatagcaagagttctcatccgctgatccgttctctcttccatggctttcttttcatgatcttccagattggagttctaggttttggaccaacatatgttgtgttagcatatacactgccaccagcttcccggttcatcattatattcgagcagattcgttttgtaatgaaggcccactcatttgtcagagagaacgtgcctcgggtactaaattcagctaaggagaaatcaagcactgttccaatacctacagtcaaccagtatttgtacttcttatttgctcctacccttatctaccgtgacagctatcccaggaatcccactgtaagatggggttatgtcgctatgaagtttgcacaggtctttggttgctttttctatgtgtactacatctttgaaaggctttgtgcccccttgtttcggaatatcaaacaggagcccttcagcgctcgtgttctggtcctatgtgtatttaactccatcttgccaggtgtgctgattctcttccttactttttttgcctttttgcactgctggctcaatgcctttgctgagatgttacgctttggtgacaggatgttctataaggattggtggaactccacgtcatactccaactattatagaacctggaatgtggtggtccatgactggctatattactatgcttacaaggactttctctggtttttctccaagagattcaaatctgctgccatgttagctgtctttgctgtatctgctgtagtacacgaatatgccttggctgtttgcttgagctttttctatcccgtgctsttcgtgctcttcatgttctttggaatggctttcaacttcattgtcaatgatagtcggaaaaagccgatttggaatgttctgatgtggacttctcttttcttgggcaatggagtcttactctgcttttattctcaagaatggtatgcacgtcagcactgtcctctgaaaaatcccacatttttggattatgtccggccacgttcctggacttgtcgttacgtgttttagaagcttggactttgtttcctccttgtcactgaagattgggtagctccctgatttggagycagctgtttccagttgttactgaagttatctgtgttatttggaccactccaggctttacagatgactcactccattcctaggtcacttgaagccaaactgttggaagttcactggagtcttgtacacttaagcagagcagaactttttttgtggggctgggtggggggagaagaccgactaacagctgaagtaatgacagattgttgctgggtcatatcagctttatcccttggtaattatatctgttttgtttcttgactctgtccaatcagagaataaacatcatagtttcttggccactgaattagccaaaacacttaggaagaaatcacttaaatacctctggcttagaaattttttcatgcacactgttggaatgtatgctaattgaacatgcaattggggaagaaaaaatgtagaatgatttttgctatttctagtagaaagaaaatgtctgttttccaaagataatgttatacatcctattttgtaatttttttgaaaaaagttcaatgttcagttttccttagtttttaccttgttttctctataggtcatgatttctgtgaagcaaaaagatgccttttaccatgaattcttgagtttacatcaataatattgtatattaaggggatcagaagtaggaaggaaaaaataagagatagcagaggaaaaagaaaaacatttcctcttataacttctgaagtaatttgtaaaaaagatttgtagagtcaatcatgtgtttaaattattttatcacaaacttaacatggaagatattcctttttaactttstggtaacttctttgaagttatttagaaatatcctttggaacaattattttattgtctaataaatattgacttctcttgaattattttgcagactagtgagtctgtamcataagtattaatcacctccactcatattaaagtgatcattaagaatccagaagctggcttctgcatttgctcagttatacttttaatggtagtatgtttttaggtggaataaattaatatgtgattggtttcaaggaaatgtactctattatgtaatacttccattttataagatgcccrtttctaatacaatgtgtgtaggaattatttgtatgtatgaggtatgattgtaaagattgagcattggaaggggtatcagagaccatgtagttcaactttccactcaaagtaagatttatgaattatttaaatgatagttgttacttggaacagccacttgagaggctctcttggtattgtttggaattgttttaaagtcagtttgagtctcacaagaaggtaagtagagtttcttaatagtcacaacttaatttgaaccacaagtatccagcttaatcacgtatcttactcacgataccactggtccagatgagtttaggtaattttcaaacattaaatccaacttcaacggaaacaaatacactcaagggaagttatttttaaaaaggtactctgcatgttcccgcagtaatgttctgcacaacagtattgtaattgtaatggaatcataacctgctaactagtttgctttaatatggcttgtaattcttgacatttttcttaaaattaaaacgaatttttattttgaatttataactgcattttaaatatattggggacagattgcgctgagacctggttatgagcaagccartcttttgaatctagagaatggaattcttaggtttatatttctgttaagaaatactataaatatgactcttatgagaagactttgttgctctgtagtgtttctgaatactgtatttgttggattgatcaaggctatttttcaaaaagctctctgcttcctgtttgtttgtttgtttgtttttgagacagagtcttgctctgtcgccggggctggagtgcaatggcgtgaactcagctcactgcaacctctgcctccctggttcaagctattctcctgcctcagcctcctgagtagctgggattacagggccacgcctggctaatttttgtatttttagtagagatggggtttcaccctgttggtcaggctggtctcaaactcctgaccttgtgatctgcccacctcagcctcccaaagtgctgggaagacaggcgttagccaccgtgcccggcctctgtttcctgttattagtgattttcctgcccaagattgcaacaacaaatatgtagaactacagactgtttagaatgctgagactgttctaagaaactttcaaaaacagtagcacttcaaggaatggtcactttctatgaaagaaactggtttgatagccataatcttattgctagctgcttttagcaaaagtcttttcttgaaaccaccacctatactctttaaacaaataaaaactaaaatctcttgctaa

SEQ ID NO: 4800 - DNA, 4254 bp, Homo sapiens
ggccgggctgtccggcgctttagcttagcaggcgacgttgcgggccctgggcgccaggagagcttcccggagtcgaccttcctgctggctgctctgtgaccgcttcccggctctgccctcttggccgaagtgcccgctgccgggcgcgggcctcagaatggtgggtgaagagaagatgtctctaagaaaccggctgtcaaagtccagggaaaatcctgaggaagatgaagaccagagaaaccctgcaaaggagtccctagagacacctagtaatggtcgaattgacataaaacagttgatagcaaagaagataaagttgacagcagaggcagaggaattgaagccattttttatgaaggaagttggcagtcactttgatgattttgtgaccaatctcattgaaaagtcagcatcattagataatggtgggtgcgctctcacaaccttttctgttcttgaaggagagaaaaacaaccatagagcgaaggatttgagagcacctccagaacaaggaaagatttttattgcaaggcgctctctcttagatgaactgcttgaagtggaccacatcagaacaatatatcacatgtttattgccctcctcattctctttatcctcagcacacttgtagtagattacattgatgaaggaaggctggtgcttgagttcagcctcctgtcttatgcttttggcaaatttcctaccgttgtttggacctggtggatcatgttcctgtctacattttcagttccctattttctgtttcaacattgggccactggctatagcaagagttctcatccgctgatccgttctctcttccatggctttcttttcatgatcttccagattggagttctaggttttggaccaacatatgttgtgttagcatatacactgccaccagcttcccggttcatcattatattcgagcagattcgttttgtaatgaaggcccactcatttgtcagagagaacgtgcctcgggtactaaattcagctaaggagaaatcaagcactgttccaatacctacagtcaaccagtatttgtacttcttatttgctcctacccttatctaccgtgacagctatcccaggaatcccactgtaagatggggttatgtcgctatgaagtttgcacaggtctttggttgctttttctatgtgtactacatctttgaaaggctttgtgcccccttgtttcggaatatcaaacaggagcccttcagcgctcgtgttctggtcctatgtgtatttaactccatcttgccaggtgtgctgattctcttccttactttttttgcctttttgcactgctggctcaatgcctttgctgagatgttacgctttggtgacaggatgttctataaggattggtggaactccacgtcatactccaactattatagaacctggaatgtggtggtccatgactggctatattactatgcttacaaggactttctctggtttttctccaagagattcaaatctgctgccatgttagctgtctttgctgtatctgctgtagtacacgaatatgccttggctgtttgcttgagctttttctatcccgtgctsttcgtgctcttcatgttctttggaatggctttcaacttcattgtcaatgatagtcggaaaaagccgatttggaatgttctgatgtggacttctcttttcttgggcaatggagtcttactctgcttttattctcaagaatggtatgcacgtcagcactgtcctctgaaaaatcccacatttttggattatgtccggccacgttcctggacttgtcgttacgtgttttagaagcttggactttgtttcctccttgtcactgaagattgggtagctccctgatttggagycagctgtttccagttgttactgaagttatctgtgttatttggaccactccaggctttacagatgactcactccattcctaggtcacttgaagccaaactgttggaagttcactggagtcttgtacacttaagcagagcagaactttttttgtggggctgggtggggggagaagaccgactaacagctgaagtaatgacagattgttgctgggtcatatcagctttatcccttggtaattatatctgttttgtttcttgactctgtccaatcagagaataaacatcatagtttcttggccactgaattagccaaaacacttaggaagaaatcacttaaatacctctggcttagaaattttttcatgcacactgttggaatgtatgctaattgaacatgcaattggggaagaaaaaatgtagaatgatttttgctatttctagtagaaagaaaatgtctgttttccaaagataatgttatacatcctattttgtaatttttttgaaaaaagttcaatgttcagttttccttagtttttaccttgttttctctataggtcatgatttctgtgaagcaaaaagatgccttttaccatgaattcttgagtttacatcaataatattgtatattaaggggatcagaagtaggaaggaaaaaataagagatagcagaggaaaaagaaaaacatttcctcttataacttctgaagtaatttgtaaaaaagatttgtagagtcaatcatgtgtttaaattattttatcacaaacttaacatggaagatattcctttttaactttstggtaacttctttgaagttatttagaaatatcctttggaacaattattttattgtctaataaatattgacttctcttgaattattttgcagactagtgagtctgtamcataagtattaatcacctccactcatattaaagtgatcattaagaatccagaagctggcttctgcatttgctcagttatacttttaatggtagtatgtttttaggtggaataaattaatatgtgattggtttcaaggaaatgtactctattatgtaatacttccattttataagatgcccrtttctaatacaatgtgtgtaggaattatttgtatgtatgaggtatgattgtaaagattgagcattggaaggggtatcagagaccatgtagttcaactttccactcaaagtaagatttatgaattatttaaatgatagttgttacttggaacagccacttgagaggctctcttggtattgtttggaattgttttaaagtcagtttgagtctcacaagaaggtaagtagagtttcttaatagtcacaacttaatttgaaccacaagtatccagcttaatcacgtatcttactcacgataccactggtccagatgagtttaggtaattttcaaacattaaatccaacttcaacggaaacaaatacactcaagggaagttatttttaaaaaggtactctgcatgttcccgcagtaatgttctgcacaacagtattgtaattgtaatggaatcataacctgctaactagtttgctttaatatggcttgtaattcttgacatttttcttaaaattaaaacgaatttttattttgaatttataactgcattttaaatatattggggacagattgcgctgagacctggttatgagcaagccartcttttgaatctagagaatggaattcttaggtttatatttctgttaagaaatactataaatatgactcttatgagaagactttgttgctctgtagtgtttctgaatactgtatttgttggattgatcaaggctatttttcaaaaagctctctgcttcctgtttgtttgtttgtttgtttttgagacagagtcttgctctgtcgccggggctggagtgcaatggcgtgaactcagctcactgcaacctctgcctccctggttcaagctattctcctgcctcagcctcctgagtagctgggattacagggccacgcctggctaatttttgtatttttagtagagatggggtttcaccctgttggtcaggctggtctcaaactcctgaccttgtgatctgcccacctcagcctcccaaagtgctgggaagacaggcgttagccaccgtgcccggcctctgtttcctgttattagtgattttcctgcccaagattgcaacaacaaatatgtagaactacagactgtttagaatgctgagactgttctaagaaactttcaaaaacagtagcacttcaaggaatggtcactttctatgaaagaaactggtttgatagccataatcttattgctagctgcttttagcaaaagtcttttcttgaaaccaccacctatactctttaaacaaataaaaactaaaatctcttgctaa

SEQ ID NO: 4801 - DNA, 1470 bp, Homo sapiens
gggctcggctctctccgcgcagaggtttcatggcttgcttcaatcttttgatatcttagagtaattgcttccaatttttgggcatcgccgcctcagtttacagaatagtatggatctggtgccagagccgggaaaacgatgcgcatcgtaaaccgcaaaacactgagcatccaggacagaagccaaggygcttggcttggttgaaggccagtgcgcatgcgcgagtttacccttcgcggactgggcgarctcttgccactcctacctcsgggcttcagtcttcgccgcctgttctggtcctttcccgggccgctattggaagaaccgtgaactatggaaggcccctctggattggctgggctggcccaagagtaaggagagccctcttcctgscggtggggaagggacggcggcgattggcggacgctcctggcaggagagcgcggattggtcaggcacggagcaggaggcggggctgatagcccagcagcagcagcrgcggcggcggctgcggagcgggtgtgaggcggctggaccgcgctgcaggcatccgcagggcgcggcaagatggaggtgacgggggtgtcggcacccacggtgaccgttttcatcagcagctccctcaacaccttccgctccgagaagcgatacagccgcagcctcaccatcgctgagttcaagtgtaaactggagttgctggtgggcagccctgcttcctgcatggaactggagctgtatggagttgacgacaagttctacagcaagctggatcaagaggatgcgctcctgggctcctaccctgtagatgacggctgccgcatccacgtcattgaccacagtggygcccgccttggtgagtatgaggacgtgtcccgggtggagaagtacacgatctcacaagaagcctacgaccagaggcaagacacggtccgctctttcctgaagcgcagmaagctcggccggtacaacgaggargagcgggctcagcaggaggccgaggccgcccagcgcctggccgaggagaaggcccaggccagctccatccccgtgggcagccgctgtgaggtgcgggcggcgggacaatcccctcgccggggcaccgtcatgtatgtaggtctcacagatttcaagcctggctactggattggtgtccgctatgatgagcmactggggaaaaatgatggcagtgtgaatgggaaacgctacttcgaatgccaggccaagtatggcgcctttgtcaagccagcagtcgtgacggtgggggacttccyggaggaggactacgggttggacgagatatgacacctaaggaatkcccctgcttcagctcctagctcagccactgactgcccctcctgtgtgtgcccatggcccttttctcctgaccccattttaattttattcattttttcctttgccattgatttttgagactcatgcattaaattcactagaaacccagaaagtatt

SEQ ID NO: 4802 - DNA, 914 bp, Homo sapiens
ggacccggtcgcggcggggcgggtccggagagaactcgagagtgcagagatgagggccgggtccagcgaaaaatccgacggtccagagggcgggggcaagaggcgaggggctggattgcggcccctgtaaactggagttgctggtgggcagccctgcttcctgcatggaactggagctgtatggagttgacgacaagttctacagcaagctggatcaagaggatgcgctcctgggctcctaccctgtagatgacggctgccgcatccacgtcattgaccacagtggygcccgccttggtgagtatgaggacgtgtcccgggtggagaagtacacgatctcacaagaagcctacgaccagaggcaagacacggtccgctctttcctgaagcgcagmaagctcggccggtacaacgaggargagcgggctcagcaggaggccgaggccgcccagcgcctggccgaggagaaggcccaggccagctccatccccgtgggcagccgctgtgaggtgcgggcggcgggacaatcccctcgccggggcaccgtcatgtatgtaggtctcacagatttcaagcctggctactggattggtgtccgctatgatgagcmactggggaaaaatgatggcagtgtgaatgggaaacgctacttcgaatgccaggccaagtatggcgcctttgtcaagccagcagtcgtgacggtgggggacttccyggaggaggactacgggttggacgagatatgacacctaaggaatkcccctgcttcagctcctagctcagccactgactgcccctcctgtgtgtgcccatggcccttttctcctgaccccattttaattttattcattttttcctttgccattgatttttgagactcatgcattaaattcactagaaacccagaaagtatt

SEQ ID NO: 4803 - DNA, 1494 bp, Homo sapiens
gggctcggctctctccgcgcagaggtttcatggcttgcttcaatcttttgatatcttagagtaattgcttccaatttttgggcatcgccgcctcagtttacagaatagtatggatctggtgccagagccgggaaaacgatgcgcatcgtaaaccgcaaaacactgagcatccaggacagaagccaaggygcttggcttggttgaaggccagtgcgcatgcgcgagtttacccttcgcggactgggcgarctcttgccactcctacctcsgggcttcagtcttcgccgcctgttctggtcctttcccgggccgctattggaagaaccgtgaactatggaaggcccctctggattggctgggctggcccaagagtaaggagagccctcttcctgscggtggggaagggacggcggcgattggcggacgctcctggcaggagagcgcggattggtcaggcacggagcaggaggcggggctgatagcccagcagcagcagcrgcggcggcggctgcggagcgggtgtgaggcggctggaccgcgctgcaggcatccgcagggcgcggcaagatggaggtgacgggggtgtcggcacccacggtgaccgttttcatcagcagctccctcaacaccttccgctccgagaagcgatacagccgcagcctcaccatcgctgagttcaagtgtaaactggagttgctggtgggcagccctgcttcctgcatggaactggagctgtatggagttgacgacaagttctacagcaagctggatcaagaggatgcgctcctgggctcctaccctgtagatgacggctgccgcatccacgtcattgaccacagtggygcccgccttggtgagtatgaggacgtgtcccgggtggagaagtacacgatctcacaagaagcctacgaccagaggcaaggtacgggcaggtgggcgtcgagggacacggtccgctctttcctgaagcgcagmaagctcggccggtacaacgaggargagcgggctcagcaggaggccgaggccgcccagcgcctggccgaggagaaggcccaggccagctccatccccgtgggcagccgctgtgaggtgcgggcggcgggacaatcccctcgccggggcaccgtcatgtatgtaggtctcacagatttcaagcctggctactggattggtgtccgctatgatgagcmactggggaaaaatgatggcagtgtgaatgggaaacgctacttcgaatgccaggccaagtatggcgcctttgtcaagccagcagtcgtgacggtgggggacttccyggaggaggactacgggttggacgagatatgacacctaaggaatkcccctgcttcagctcctagctcagccactgactgcccctcctgtgtgtgcccatggcccttttctcctgaccccattttaattttattcattttttcctttgccattgatttttgagactcatgcattaaattcactagaaacccagaaagtatt

SEQ ID NO: 4804 - DNA, 407 bp, Homo sapiens
ttaggccccccagaacaaagtccttctgggtcctctcccttccaggaccctctaggcagcccggtcacccccaggccagactccagggcgagtcccctcccaacccagctggcagttcgcgggtgtcccaggcgctgatccgctccttcagctccaccgcccggaaccgctttcagaaccgagtgcgcgagaaacagaagctcttccaggaggacaatgacatcccgttgtacctgaagggcggcatcgttgacaacatcctgtaccgagtgacaatgacgctgtgtctgggcggcacygtytacagcttgtactcccttggctgggcctccttccccaggaattaagaccaagaagcctggggggcctgagagacttgaacaagtgtcaataaacgctggcctctg

SEQ ID NO: 4805 - DNA, 762 bp, Homo sapiens
gttacagatacggaaacaggctcggaggtgcaatctctggctgtgtagacagaacagggagttggaacacggccttmtgcgtttcctcactctcacataccagcgggcagggagagatccggggaggagttgcacttgcccccggcggaaatctccaaaaatctgcaaaaatgtattccctggtaccgctttgggctccggtgggaccaagcgaaattccgagaccgaaacggatgcgcgctgcggcccagggtgcgggtctggaccgcctcctccgtggtggacgaatccgaggagcaggactccccgcaacccagccccagccccagccccagccccgccgcgtccccagctgtcacgctgcgcgcagcgggtggggcctggggttcctggacagaggaggactacgcgtgtccttgggcggagaagggaggtgactccggcggaagaggacaaggcagaatgcaggcccttcgggtgtcccaggcgctgatccgctccttcagctccaccgcccggaaccgctttcagaaccgagtgcgcgagaaacagaagctcttccaggaggacaatgacatcccgttgtacctgaagggcggcatcgttgacaacatcctgtaccgagtgacaatgacgctgtgtctgggcggcacygtytacagcttgtactcccttggctgggcctccttccccaggaattaagaccaagaagcctggggggcctgagagacttgaacaagtgtcaataaacgctggcctctg

SEQ ID NO: 4806 - DNA, 560 bp, Homo sapiens
cctcctgggagggagctgaagccgctcgcaagactcccgtagtccccacctctctcagcttccggctggtagtagttccgcttcctgtccgactgtggtgtctttgctgagggtcacattgagctgcaggttgaatccggggtgcctttaggattcagcaccatggcggaagacatggagaccaaaatcaagaactacaagacygccccttttgacagccgcttccccaaccagaaccagactagaaactgctggcagaactacctggacttccaccgctgtcagaaggcaatgaccgctaaaggaggcgatatctctgtgtgcgaatggtaccagcgtgtgtaccagtccctctgccccacatcctgggtcacagactgggatgagcaacgggctgaaggcacgtttcccgggaagatctgaactggctgcatctcccttwcctctgtcctccatccttctcccaggatggtgaagggggacctggtacccagtgatccccaccccaggatcctaaatcatgacttacctgctaataaaaactcattggaaaagtgaga

SEQ ID NO: 4807 - DNA, 1653 bp, Homo sapiens
aggacccacagccctggcsctccgcacgcacctcggtaacatcacagcaggtccaggccaatgataaccttataagaggccatgtcgaagcgcgacatcgtcctcaccaatgtcaccgttgtccagttgctgcgacagccgtgcccggtgaccagagcaccgcccccacctgagcctaaggctgaagtagagccccagccacaaccagagcccacaccagtcagggaggaaataaagccaccaccrccaccactgcctcctcaccccgctactcctcctcctaagatggtgtctgtggcccgggagctgactgtgggcatcaatggatttggacgcatcggtcgcctggtcctgcgckcctgcatggagaagggtgttaaggtggtggctgtgaatgatccattcattracccggaatacatggtgtacatgtttaagtatgactccacccacggccgatacaagggaagtgtggaattcaggaatggacaactggtcgtggacaaccatgagatctctgtctaccagtgcaaagagcccaaacagatcccctggagggctgtcgggagcccctacgtggtggagtccacaggcgtgtacctctccatacaggcagcttcggaccacatctctgcaggtgctcaacgtgtggtcatctccgcgccctcrccggatgcaccaatgttcgtyatgggtgtcaatgaaaatgactataaccctggctccatgaacattgtgagcaacgcgtcctgcaccaccaactgtttggctcccctcgccaaagtcatccacgagcgatttgggatcgtggaagggttgatgaccacagtccattcctacacggccacccagaagacagtggacgggccatcaaggaaggcctggcgagatgggcggggtgcccaccagaacatcatcccagcctccactggggctgcgaaagctgtgaccaaagtcatcccagagctcaaagggaagctgacagggatggcgttccgggtaccaaccccggatgtgtctgtcgtggacctgacctgccgcctcgcccagcctgccccctactcagccatcaaggaggctgtaaaagcagcagccaaggggcccatggctggcatccttgcctacaccgaggatgagstcgtctctacggacttcctcggtgatacccactcgtccatcttcgatgctaaggccggcattgcgctcaatgacaatttcgtgaagctcatttcatggtacgacaacgaatatggctacagtcaccgggtggtcgacctcctccgctacatgttcagccgagacaagtgaaacgggaaggtcctttctttccttcccaggggccggggccggaacatgtgcctcccgttccagcatctggctgcccgggggaggaaggacacccggggcgggcgccccacgccgatgggtccatggtgaaataaaaaacagtgctcacggctgcgtcccgtatctctgcgccggtcagggcgggttctgatccgggtttgaggcccgccccacccttactcgatcgcctgcgcccacgggcgaggggtcgcgctcgactccaagccgggttccacttcaggagaccgggaccgcgatggcagcggtagaggccccgcatggccggaagtcactccccaaagcgct

SEQ ID NO: 4808 - DNA, 1680 bp, Homo sapiens
aggacccacagccctggcsctccgcacgcacctcggtaacatcacagcaggtccaggccaatgataaccttataagaggccatgtcgaagcgcgacatcgtcctcaccaatgtcaccgttgtccagttgctgcgacagccgtgcccggtgaccagagcaccgcccccacctgagcctaaggctgaagtagagccccagccacaaccagagcccacaccagtcagggaggaaataaagccaccaccrccaccactgcctcctcaccccgctactcctcctcctaagatggtgtctgtggcccgggagctgactgtgggcatcaatggatttggacgcatcggtcgcctggtcctgcgckcctgcatggagaagggtgttaaggtggtggctgtgaatgatccattcattracccggaatacatggtgtacatgtttaagtatgactccacccacggccgatacaagggaagtgtggaattcaggaatggacaactggtcgtggacaaccatgagatctctgtctaccagtgcaaagagcccaaacagatcccctggagggctgtcgggagcccctacgtggtggagtccacaggcgtgtacctctccatacaggcagcttcggaccacatctctgcaggtgctcaacgtgtggtcatctccgcgccctcrccggatgcaccaatgttcgtyatgggtgtcaatgaaaatgactataaccctggctccatgaacattgtgagtgtccrtgcacaccttggctgtttcagcaacgcgtcctgcaccaccaactgtttggctcccctcgccaaagtcatccacgagcgatttgggatcgtggaagggttgatgaccacagtccattcctacacggccacccagaagacagtggacgggccatcaaggaaggcctggcgagatgggcggggtgcccaccagaacatcatcccagcctccactggggctgcgaaagctgtgaccaaagtcatcccagagctcaaagggaagctgacagggatggcgttccgggtaccaaccccggatgtgtctgtcgtggacctgacctgccgcctcgcccagcctgccccctactcagccatcaaggaggctgtaaaagcagcagccaaggggcccatggctggcatccttgcctacaccgaggatgagstcgtctctacggacttcctcggtgatacccactcgtccatcttcgatgctaaggccggcattgcgctcaatgacaatttcgtgaagctcatttcatggtacgacaacgaatatggctacagtcaccgggtggtcgacctcctccgctacatgttcagccgagacaagtgaaacgggaaggtcctttctttccttcccaggggccggggccggaacatgtgcctcccgttccagcatctggctgcccgggggaggaaggacacccggggcgggcgccccacgccgatgggtccatggtgaaataaaaaacagtgctcacggctgcgtcccgtatctctgcgccggtcagggcgggttctgatccgggtttgaggcccgccccacccttactcgatcgcctgcgcccacgggcgaggggtcgcgctcgactccaagccgggttccacttcaggagaccgggaccgcgatggcagcggtagaggccccgcatggccggaagtcactccccaaagcgct

SEQ ID NO: 4809 - DNA, 1233 bp, Homo sapiens
cgatggtgaggctgcggctgtatcgcttctcggagcggaaggtgttgagggagctgctgatgaaaacggtcaccgtgggtgccgacacccccgtcacctccatcttgccgcgccctgcggatgcctgcagcgcggtccagccgcctcacacccgctccgcagccgccgccgcygctgctgctgctgggctatcagccccgcctcctgctccgtgcctgaccaatccgcgctctcctgccaggagcgtccgccaatcgccgccgtcccttccccaccgscaggaagagggctctccttactcttgggccagcccagccaatccagaggggccttccatagttcacggttcttccaatagcggcccgggaaaggaccagaacaggcggcgaagactgaagcccsgaggtaggagtggcaagagytcgcccagtccgcgaagggtaaactcgcgcatgcgcactggccttcaaccaagccaagcrccttggcttctgtcctggatgctcagtgttttgcggtttacgatgcgcatcgttttcccggctctggcaccagatccatactattctgtaaactgaggcggcgatgcccaaaaattggaagcaattactctaagatatcaaaagattgaagcaagccatgaaacctctgcgcggagagagccgagcccgaggcggcggggagccagcamgtgtgcgcagctccgccctcttttggcgaagcacctaggcctggcccctcccgcgacctgtagcgcggcggagcaagcgcrgaaggctgggagggctgcgcggrctgcgcgtcgccatggagcccgacgggacttacgagccgggcttcgtgggtattcgcttctgccaggaatgtaacaacatgctgtaccccaaggaagacaaggaraaccgcattctgctctacgcgtgccggaactgtgattaccagcaggaggccgacaacagctgcatctatgtcaacaagatcacgcacgaagtggacgaactgacccagattatcgccgaygtgtcccaggaccccacgttgccgcggaccgaggaccacccgtgccaaaagtgcggccacaaggaggctgtgttcttccagtcacacagtgcgcgggccgaggacgccatgcgcctttactacgtgtgcacagccccacactgcggccaccgctggaccgagtgacctcctctctcccccgagtgtaataaacaccagattccatgcgtgagt

SEQ ID NO: 4810 - DNA, 1991 bp, Homo sapiens
tttctgggtttctagtgaatttaatgcatgagtctcaaaaatcaatggcaaaggaaaaaatgaataaaattaaaatggggtcaggagaaaagggccatgggcacacacaggaggggcagtcagtggctgagctaggagctgaagcaggggmattccttaggtgtcatatctcgtccaacccgtagtcctcctccrggaagtcccccaccgtcacgactgctggcttgacaaaggcgccatacttggcctggcattcgaatgggaattcttgttacctgccatcatttttccccagtkgctcatcatagcggacaccaatccagtagccaggcttgaaatctccacgcacctacatacatgacggtgccccggcgaggggattgtcccgccgcccgcacctcacagcggctgcccacggggatggagctggcctgggccttctcctcggccaggcgctgggcggcctcggcctcctgctgagcccgctcytcctcgttgtaccggccgagcttkctgcgcttcaggaaagagcggaccgtgtctgcttcttgtgagatcgtgtacttctccacccgggacacgtcctcatactcaccaaggcgggcrccactgtggtcaatgacctccgtcatctacagggtaggagcccaggagcgcatcctcttgatccagcttgctgtagaacttgtcgtcaactccatacagctccagttccatgcaggaagcagggctgcccaccagcaactccagtttacactcgatggtgaggctgcggctgtatcgcttctcggagcggaaggtgttgagggagctgctgatgaaaacggtcaccgtgggtgccgacacccccgtcacctccatcttgccgcgccctgcggatgcctgcagcgcggtccagccgcctcacacccgctccgcagccgccgccgcygctgctgctgctgggctatcagccccgcctcctgctccgtgcctgaccaatccgcgctctcctgccaggagcgtccgccaatcgccgccgtcccttccccaccgscaggaagagggctctccttactcttgggccagcccagccaatccagaggggccttccatagttcacggttcttccaatagcggcccgggaaaggaccagaacaggcggcgaagactgaagcccsgaggtaggagtggcaagagytcgcccagtccgcgaagggtaaactcgcgcatgcgcactggccttcaaccaagccaagcrccttggcttctgtcctggatgctcagtgttttgcggtttacgatgcgcatcgttttcccggctctggcaccagatccatactattctgtaaactgaggcggcgatgcccaaaaattggaagcaattactctaagatatcaaaagattgaagcaagccatgaaacctctgcgcggagagagccgagcccgaggcggcggggagccagcamgtgtgcgcagctccgccctcttttggcgaagcacctaggcctggcccctcccgcgacctgtagcgcggcggagcaagcgcrgaaggctgggagggctgcgcggrctgcgcgtcgccatggagcccgacgggacttacgagccgggcttcgtgggtattcgcttctgccaggaatgtaacaacatgctgtaccccaaggaagacaaggaraaccgcattctgctctacgcgtgccggaactgtgattaccagcaggaggccgacaacagctgcatctatgtcaacaagatcacgcacgaagtggacgaactgacccagattatcgccgaygtgtcccaggaccccacgttgccgcggaccgaggaccacccgtgccaaaagtgcggccacaaggaggctgtgttcttccagtcacacagtgcgcgggccgaggacgccatgcgcctttactacgtgtgcacagccccacactgcggccaccgctggaccgagtgacctcctctctcccccgagtgtaataaacaccagattccatgcgtgagt

SEQ ID NO: 4811 - DNA, 3556 bp, Homo sapiens
tgttgggtgggagcacaggcaccgggcaccatggggaaggccgagaactatgagctctactcggtggagctgggtcctggccctggcggggacatggctgccaagatgagcaagaagaagaaggcgggtggcgggggtggcaagaggaaggagaagctggagaacatgaagaaggagatggagattaacgaccaccagctgtcagtggcggagctggaacagaaataccagaccagtgccaccaagggcctctctgcgagcctggctgctgagctgctgctgcgggatgggcccaacgcactgcggccaccacggggcaccccagagtaygtcaagttygcgaggcagctggccgggggcctgcagtgcctcatgtgggttgccgccgccatctgcctcatcgcctttgccatccaggctagtgagggggacctcaccaccgacgacaatctgtacctggcaatcgctctcattgctgtggttgtcgtcaccggctgctttggctactaccaggaattcaagagcaccaacatcatcgccagctttaagaaccttgtgccacagcaagccactgtcatccgcgatggagacaaattccagatcaacgctgaccaactggtggtgggcgacctggtggagatgaaaggtggggacagagtgcccgccgacatccgcatcctggcggcccagggctgcaaggtggacaactcctcgctgacaggggagtctgagccacaracccgctcacccgagtgcacgcacgagagccctctggagacccgcaacatcgccttcttctccaccatgtgccttgagggcaccgygcagggcctggtggtgaacacgggcgaccgcaccatcattgggcgcatcgcatcgctggcgtcgggggtggaaaacgagaagacacccatcgctatcgagatcgagcattttgtggacatcatcgcgggcctggccattctcttcggtgccacattttttattgtggccatgkgcattggctacaccttcctgcgggccatggtcttcttcatggccatcgtggtggcctatgtgcctgaggggctgctggccactgtcacagtctgcctgtccctgacagccaagcgcctggccagtaagaactgcgtggtcaagaacctggaggcggtggagacattgggctccacttcggtgatctgctcggacaagacagggactctcactcagaaccgcatgactgtgtcccatctktggtttgacaaccacatccacacagctgacaccacggaagaccagtcagggcagacgtttgaccagtcctcggagacgtggcgggcgctgtgccgggtgctcaccctgtgcaaccgcgccgccttcaagtccggccaggatgcagtgcctgtgcccaagcgcatcgtgattggagacgcatcggagacggcgctgctcaagttctcggagctgacgctgggcaacgccatgggctaccgggaccgcttcccaaaagtctgcgagatacccttcaactccaccaacaagttccagctgtccatmcatacgctggaggacccgcgggacccgcgacacttgctggtgatgaagggcgcccccgagcgcgtgctggagcgctgcagctccatccttatcaagggccaggagctgccgctggacgagcagtggcgcgaggccttccagaccgcctacctcagcctgggaggcctgggcgaacgcgtgctcggcttctgccagctctacctgaatgagaaggactacccgcctggctatgccttcgacgtrgaggscatgaactttccatctagcggcctctgctttgcgggacttgtatccatgattgacccaccccgggccaccgtccctgatgctgtgctcaagtgtcgcacygcaggcatccgggtgatcatggtaacgggtgaccaccccatcaccgccaaggccattgcagccagtgtgggcatcatctcggaaggcagcgagacagtggaggacatcgctgcccgcctccgtgtgccygtagaccaggttaatcgcaaggatgcccgtgcctgtgtgatcaatggcatgcwgctgaaggacatggacccatcggaactggtcgaggccctgcgcacccaccccgagatggtgtttgcgcgcaccagcccccagcagaagctggtgatcgtggagagctgccagcggctgggtgcgattgtggccgtcacgggggatggtgtgaatgactccccagctctgaagaaggcagacatcggagtagccatgggcatcgctggctcagatgctgccaaaaatgcagctgacatgatcctgctggatgacaactttgcctccattgtgacaggcgtggagcagggtcgactgatcttcgacaacctgaagaagtctattgcctacacattgaccaagaacatcccagagctgacaccctacctcatctacatcaccgtcagcgtgccyctgcccctcgggtgcatcaccatcctcttcatcgaactctgcactgacattttcccatctgtgtccctggcatatgaaaaggccgagagtgacatcatgcacctgcgtccacgcaacccaaagcgtgacagattggtcaacgagcccctggctgcctactcctacttccagattggtgccattcagtcctttgctggcttcactgactacttcacggcaatggcccaggagggctggttcccactgctgtgcgtggggctgcgggcgcagtgggaggaccaccacctacaagatctgcaggacagctacggccaggagtggacattcgggcagcgcctgtaccagcagtacacctgctacaccgtgttcttcatcagcattgaggtgtgccagatcgccgatgtcctcatccgcaagacgcgccgtctctctgccttccagcaaggcttcttcaggaataagatcctggtgatcgccatcgtgttccaggtctgcatcggctgcttcctgtgctactgccccggcatgcccaacatcttcaacttcatgcccattcggttccagtggtggctggtccccctgccctacggcatcctcatcttcgtctatgatgagatccggaagcttggagttcgctgttgcccagggagctggtgggaccaggaactctactattagagggacgactgccttcaagcatccctgcaactgccacagcaggtgggggcagggcwcgtgggaccctctggacagccaccaagatatctgagcaaccaagagtcccagccccaccagtatctgcttctgtagcccacggcaccccaaacttggagggacctgcccactcccctcccccattcccaaggttcgcacctcctggagcagcagcgcctgggcagtcctctgggctggcctcgggaaagccgccacctgtggtggcggtggggctctgacagggagtacagctgaccgcttctggagggtgtttctgttcttaggactccagtccaggctggacggctgcctgagggcccttcgttaaagacacgcttgtgtcctgggcgatggtaataaaaccagctcatgctgactgtgc

SEQ ID NO: 4812 - DNA, 3529 bp, Homo sapiens
tgttgggtgggagcacaggcaccgggcaccatggggaaggccgagaactatgagctctactcggtggagctgggtcctggccctggcggggacatggctgccaagatgagcaagaagaagaaggcgggtggcgggggtggcaagaggaaggagaagctggagaacatgaagaaggagatggagattaacgaccaccagctgtcagtggcggagctggaacagaaataccagaccagtgccaccaagggcctctctgcgagcctggctgctgagctgctgctgcgggatgggcccaacgcactgcggccaccacggggcaccccagagtaygtcaagttygcgaggcagctggccgggggcctgcagtgcctcatgtgggttgccgccgccatctgcctcatcgcctttgccatccaggctagtgagggggacctcaccaccgacgacaatctgtacctggcaatcgctctcattgctgtggttgtcgtcaccggctgctttggctactaccaggaattcaagagcaccaacatcatcgccagctttaagaaccttgtgccacagcaagccactgtcatccgcgatggagacaaattccagatcaacgctgaccaactggtggtgggcgacctggtggagatgaaaggtggggacagagtgcccgccgacatccgcatcctggcggcccagggctgcaaggtggacaactcctcgctgacaggggagtctgagccacaracccgctcacccgagtgcacgcacgagagccctctggagacccgcaacatcgccttcttctccaccatgtgccttgagggcaccgygcagggcctggtggtgaacacgggcgaccgcaccatcattgggcgcatcgcatcgctggcgtcgggggtggaaaacgagaagacacccatcgctatcgagatcgagcattttgtggacatcatcgcgggcctggccattctcttcggtgccacattttttattgtggccatgkgcattggctacaccttcctgcgggccatggtcttcttcatggccatcgtggtggcctatgtgcctgaggggctgctggccactgtcacagtctgcctgtccctgacagccaagcgcctggccagtaagaactgcgtggtcaagaacctggaggcggtggagacattgggctccacttcggtgatctgctcggacaagacagggactctcactcagaaccgcatgactgtgtcccatctktggtttgacaaccacatccacacagctgacaccacggaagaccagtcagggcagacgtttgaccagtcctcggagacgtggcgggcgctgtgccgggtgctcaccctgtgcaaccgcgccgccttcaagtccggccaggatgcagtgcctgtgcccaagcgcatcgtgattggagacgcatcggagacggcgctgctcaagttctcggagctgacgctgggcaacgccatgggctaccgggaccgcttcccaaaagtctgcgagatacccttcaactccaccaacaagttccagctgtccatmcatacgctggaggacccgcgggacccgcgacacttgctggtgatgaagggcgcccccgagcgcgtgctggagcgctgcagctccatccttatcaagggccaggagctgccgctggacgagcagtggcgcgaggccttccagaccgcctacctcagcctgggaggcctgggcgaacgcgtgctcggcttctgccagctctacctgaatgagaaggactacccgcctggctatgccttcgacgtrgaggscatgaactttccatctagcggcctctgctttgcgggacttgtatccatgattgacccaccccgggccaccgtccctgatgctgtgctcaagtgtcgcacygcaggcatccgggtgatcatggtaacgggtgaccaccccatcaccgccaaggccattgcagccagtgtgggcatcatctcggaaggcagcgagacagtggaggacatcgctgcccgcctccgtgtgccygtagaccaggttaatcgcaaggatgcccgtgcctgtgtgatcaatggcatgcwgctgaaggacatggacccatcggaactggtcgaggccctgcgcacccaccccgagatggtgtttgcgcgcaccagcccccagcagaagctgggtgcgattgtggccgtcacgggggatggtgtgaatgactccccagctctgaagaaggcagacatcggagtagccatgggcatcgctggctcagatgctgccaaaaatgcagctgacatgatcctgctggatgacaactttgcctccattgtgacaggcgtggagcagggtcgactgatcttcgacaacctgaagaagtctattgcctacacattgaccaagaacatcccagagctgacaccctacctcatctacatcaccgtcagcgtgccyctgcccctcgggtgcatcaccatcctcttcatcgaactctgcactgacattttcccatctgtgtccctggcatatgaaaaggccgagagtgacatcatgcacctgcgtccacgcaacccaaagcgtgacagattggtcaacgagcccctggctgcctactcctacttccagattggtgccattcagtcctttgctggcttcactgactacttcacggcaatggcccaggagggctggttcccactgctgtgcgtggggctgcgggcgcagtgggaggaccaccacctacaagatctgcaggacagctacggccaggagtggacattcgggcagcgcctgtaccagcagtacacctgctacaccgtgttcttcatcagcattgaggtgtgccagatcgccgatgtcctcatccgcaagacgcgccgtctctctgccttccagcaaggcttcttcaggaataagatcctggtgatcgccatcgtgttccaggtctgcatcggctgcttcctgtgctactgccccggcatgcccaacatcttcaacttcatgcccattcggttccagtggtggctggtccccctgccctacggcatcctcatcttcgtctatgatgagatccggaagcttggagttcgctgttgcccagggagctggtgggaccaggaactctactattagagggacgactgccttcaagcatccctgcaactgccacagcaggtgggggcagggcwcgtgggaccctctggacagccaccaagatatctgagcaaccaagagtcccagccccaccagtatctgcttctgtagcccacggcaccccaaacttggagggacctgcccactcccctcccccattcccaaggttcgcacctcctggagcagcagcgcctgggcagtcctctgggctggcctcgggaaagccgccacctgtggtggcggtggggctctgacagggagtacagctgaccgcttctggagggtgtttctgttcttaggactccagtccaggctggacggctgcctgagggcccttcgttaaagacacgcttgtgtcctgggcgatggtaataaaaccagctcatgctgactgtgc

SEQ ID NO: 4813 - DNA, 4113 bp, Homo sapiens
cgggtgggtggccgaacttctcccgccatggagggagcagcggcccgggaggcccgggggaccgagaccccgcgcgcgtctgcgcccccgcccgcgccctcggagcccccggccgcgccccgcgcccgcccgcgcctcgtcttccgcacgcagctggcgcacgggagccccacgggcaagatcgagggcttcaccaacgtccgcgagctgtacgccaagatcgccgaagccttcgggatcgcgcccaccgagattttattctgcaccctcaacagccacaaagtggacatgcagaagctcctggggggtcagataggcctggaggacttcatctttgcccacgtgcgaggcgagaccaaggaggtggaggtcactaagacagaggatgctctggggctgaccatcacggacaacggggctggctacgccttcatcaagagaatcaaggaaggcagtatcatcaaccggatcgaggcagtgtgcgtgggtgacagcatcgaagccatcaacgaccactccattgtgggctgccgccactacgaggtggccaagatgctccgggagctgcccaagtcccagcccttcaccctgcgcctggtgcagcccaagagggccttcgatatgattggccagagaagtcggtccagcaaatgtccagtagaggcgaaagtgaccagcgggagggagaccctgcggcttcgttctgggggggctgccacagtggaggaagcgcccagtgagtttgaggaggaggcatctcggaaggttgatgacctgctggaaagctacatgggcattcgggaccccgagctggcgtccaccatggtggagacgtccaagaagacagcgagcgcccaggagtttgcacgctgtttagactccgtcttgggcgagttcgccttccccgacgagtttgtggtggaagtgtgggccgccatcggcgaggccagagaggcctgtggctagtttgccctgggggggcccagcacagccccagcccggagcccagccccctgccccggccctgctccagaacccagcccagatcggaggacaagttcctctctagaacccaatccaatttggagccccagcccaactccagaacccarcccttctctagaatccagcccagatctgaggccaagctatgtgctagagcccaggccagctctgagacyaagcccagcattgagaataagctctgttctaaaactcaggccagccctgagaccaagcccagctctagaactcagatgagctttgagaccatgcccagcactgagaccaagccctgttctagaactcaggcctgctctgaggccaagcccagctctagaacccagatgagctctgagaccatgcccagctctagaactcagatgggctctgagaccatgcccagctctagaactcagatgggctctgagaccgagcccagctctagaactcagatgggctctgagaccgagcccagctctaraactcagatgggctctgagaccatgcccagctctagaactcagatgggctctgagaccgagcccagctctagaactcagatgggctctgagaccgagcccagctctagaactcagatgggctctgagaccatgcccagctctagaactcagatgggctccgagaccaagcccagctctagaacccagatgagctctgagaccatgcccagctctagaactcagatgagctctgagacagagcccagtattgagaccaagccctgttctagagtccaggccagctccgagaccaagcccagctctagaacccagataagctctgaaaccaagcccagcatagagaccaagccgtgttctagaattcaggccacatctgaagccaagcccagctctagaactcaggtcagccctgagaccaagcccagctctagaacccagataagctctgaaaccaatcccagcattgagaccaagccctgttctagaactcaggccacctctgaggccaaacccagctctagaacccagataagatctgagaccaagccctgctctgaagcccaggccagctctgagacgaagcacatctctagaatccagctgagccctgacaacaagccaaactctggaacccagacacattttaagacccagaccagcttggagaccaatcccagttccagaatccaggctagctcggagaccaagccctgctggaaaactcaagctgactctggaactctggacagctccacgatgcagccacacctggacactcggtctagctccggaaccccagttaattttggaacccatgtgagattcatgaagcagcccagctctggaaccccagtcagctcaggattcagagacagctcccaaaycaaatcctattcaagaactcagaccagctcagaaacccaggtccacacggctgcccagtccagatcccaaccccagttgcatccaagtgcccatccccatcctgcagcccagtccagctccagtgatgattccagctctgagactgagcccagctctagaacctcgcctagtgctacaaccaggcccaactccaggattcagaccagctctggaaccccatccatcttggaagcaagacccagctccagcacacagcttggtgccaagccccactctccttgcacaatgcagctcagctctagaatgcagtttacttccaggacccagaccaatttcaaggcctggccaagctccagagctcaatccagcccaagcaccgcacccagctctggaactcagctcagttctggagcacaggctggttctgaaatcccagccagctccaaaacacagacagcagctgagacccagccaagttccagaatccagctaagctctggagtccaatctagtcctgggacccaggccatcgcagcaatagaattaagctccacagccctgtctagttccgacagcaggyccagctccaggacccagcgctgcccaggagctcgaccagcctctgggactcaattcgcctctaaaaccctgccaggttctagataccagctccagaccacagccccagacagctctggtattcaactggactttgggaagcagagcagttctgaaagtcagcttagctttggaactcagcccagctctgggacccagataagctcaagaattcaagccagctctggaagtcagcttagttcgggaacccagctgatttccggagcccaacccagctccagaactcagactagttctggaaaccagctcagctccgggacccagaccactgcaagaattcagctcagccctggagctcatcttagctccagaacccagtccagtcctgagaccaggctcagctctgaggctcagtccagctctggaacccagttcagttctgggattcagtttggctctgaaacccagaccggctcaagaattcagcccgactctggagcccaacttagttccagaacccagtccagctctgagaccgggctcagctctgaaacccagayyggctcaagaattcagcccagccctggagcccaccttagttctggaacccagcctgtttctggaacccaatccagttccagaactcacaccagttcaagaatctggctgagccctggaaatggamtctgcccacagacccctggccttgaccctagaatccagcttgaggcccctgccccagcccaacctcagcccccaggcccatcccccagagaccccaccccagcccctagcaaagacccccagcctctgcctcagccccatgatcaggtatgtggcatccaggccagccttggccccatcccaggcttaccccaagcctcctacctggccccacagtcacaggtctcctcaaccccccagaagccagccgtctctcccaagccccgggtgggaccccagaagtccaccccacccaccatatctgtcactcctagtcctgcccctagggcagccctcctgagttcccagctgtctgagtccccagctttggcgccagccctttgccccactctgggggagccaggagcccgcccttaccgcggggggccgtagcttggctgtgacttagccctggttcatgtggttctcgtcctctcctgtc

SEQ ID NO: 4814 - DNA, 2380 bp, Homo sapiens
atggagggagcagcggcccgggaggcccgggggaccgagaccccgcgcgcgtctgcgcccccgcccgcgccctcggagcccccggccgcgccccgcgcccgcccgcgcctcgtcttccgcacgcagctggcgcacgggagccccacgggcaagatcgagggcttcaccaacgtccgcgagctgtacgccaagatcgccgaagccttcgggatcgcgcccaccgaggtaaggagcccggacaccggcgcccaagaccacccgcctgatggggtgaggggctccttctcccccgggaagattttattctgcaccctcaacagccacaaagtggacatgcagaagctcctggggggtcagataggcctggaggacttcatctttgcccacgtgcgaggcgagaccaaggaggtggaggtcactaagacagaggatgctctggggctgaccatcacggacaacggggctggctacgccttcatcaagagaatcaaggaaggcagtatcatcaaccggatcgaggcagtgtgcgtgggtgacagcatcgaagccatcaacgaccactccattgtgggctgccgccactacgaggtggccaagatgctccgggagctgcccaagtcccagcccttcaccctgcgcctggtgcagcccaagagggccttcgatatgattggccagagaagtcggtccagcaaatgtccagtagaggcgaaagtgaccagcgggagggagaccctgcggcttcgttctgggggggctgccacagtggaggaagcggtgagtgaaggggaggggctctccccaggcttctgcaccttcagctcctccactgagtcagtgcggtcttggcccagtgagtttgaggaggaggcatctcggaaggttgatgacctgctggaaagctacatgggcattcgggaccccgagctggcgtccaccatggtggagacgtccaagaagacagcgagcgcccaggagtttgcacgctgtttagactccgtcttgggcgagttcgccttccccgacgagtttgtggtggaagtgtgggccgccatcggcgaggccagagaggcctgtggctagtttgccctgggggggcccagcacagccccagcccggagcccagccccctgccccggccctgctccagaacccagcccagatcggaggacaagttcctctctagaacccaatccaatttggagccccagcccaactccagaacccarcccttctctagaatccagcccagatctgaggccaagctatgtgctagagcccaggccagctctgagacyaagcccagcattgagaataagctctgttctaaaactcaggccagccctgagaccaagcccagctctagaactcagatgagctttgagaccatgcccagcactgagaccaagccctgttctagaactcaggcctgctctgaggccaagcccagctctagaacccagatgagctctgagaccatgcccagctctagaactcagatgggctctgagaccatgcccagctctagaactcagatgggctctgagaccgagcccagctctagaactcagatgggctctgagaccgagcccagctctaraactcagatgggctctgagaccatgcccagctctagaactcagatgggctctgagaccgagcccagctctagaactcagatgggctctgagaccgagcccagctctagaactcagatgggctctgagaccatgcccagctctagaactcagatgggctccgagaccaagcccagctctagaacccagatgagctctgagaccatgcccagctctagaactcagatgagctctgagacagagcccagtattgagaccaagccctgttctagagtccaggccagctccgagaccaagcccagctctagaacccagataagctctgaaaccaagcccagcatagagaccaagccgtgttctagaattcaggccacatctgaagccaagcccagctctagaactcaggtcagccctgagaccaagcccagctctagaacccagataagctctgaaaccaatcccagcattgagaccaagccctgttctagaactcaggccacctctgaggccaaacccagctctagaacccagataagatctgagaccaagccctgctctgaagcccaggccagctctgagacgaagcacatctctagaatccagctgagccctgacaacaagccaaactctggaacccagacacattttaagacccagaccagcttggagaccaatcccagttccagaatccaggctagctcggagaccaagccctgctggaaaactcaagctgactctggaactctggacagctccacgatgcagccacacctggacactcg

SEQ ID NO: 4815 - DNA, 1212 bp, Homo sapiens
cgggtgggtggccgaacttctcccgccatggagggagcagcggcccgggaggcccgggggaccgagaccccgcgcgcgtctgcgcccccgcccgcgccctcggagcccccggccgcgccccgcgcccgcccgcgcctcgtcttccgcacgcagctggcgcacgggagccccacgggcaagatcgagggcttcaccaacgtccgcgagctgtacgccaagatcgccgaagccttcgggatcgcgcccaccgagattttattctgcaccctcaacagccacaaagtggacatgcagaagctcctggggggtcagataggcctggaggacttcatctttgcccacgtgcgaggcgagaccaaggaggtggaggtcactaagacagaggatgctctggggctgaccatcacggacaacggggctggctacgccttcatcaagagaatcaaggaaggcagtatcatcaaccggatcgaggcagtgtgcgtgggtgacagcatcgaagccatcaacgaccactccattgtgggctgccgccactacgaggtggccaagatgctccgggagctgcccaagtcccagcccttcaccctgcgcctggtgcagcccaagagggccttcgatatgattggccagagaagtcggtccagcaaatgtccagtagaggcgaaagtgaccagcgggagggagaccctgcggcttcgttctgggggggctgccacagtggaggaagcgcccagtgagtttgaggaggaggcatctcggaaggttgatgacctgctggaaagctacatgggcattcgggaccccgagctggcgtccaccatggtggagacgtccaagaagacagcgagcgcccaggagtttgcacgctgtttagactccgtcttgggcgagttcgccttccccgacgagtttgtggtggaagtgtgggccgccatcggcgaggccagagaggcctgtggctagtttgccctgggggggcccagcacagccccagcccggagcccagccccctgccccggccctgctccagaacccagcccagatcggaggacaagttcctctctagaacccaatccaatttggagccccagcccaactccagaacccarcccttctctagaatccagcccagatctgaggccaagctatgtgctagagcccaggccagctctgagacyaagcccagcattgagaataagctctgttcta

SEQ ID NO: 4816 - DNA, 1257 bp, Homo sapiens
atggagggagcagcggcccgggaggcccgggggaccgagaccccgcgcgcgtctgcgcccccgcccgcgccctcggagcccccggccgcgccccgcgcccgcccgcgcctcgtcttccgcacgcagctggcgcacgggagccccacgggcaagatcgagggcttcaccaacgtccgcgagctgtacgccaagatcgccgaagccttcgggatcgcgcccaccgaggtaaggagcccggacaccggcgcccaagaccacccgcctgatggggtgaggggctccttctcccccgggaagattttattctgcaccctcaacagccacaaagtggacatgcagaagctcctggggggtcagataggcctggaggacttcatctttgcccacgtgcgaggcgagaccaaggaggtggaggtcactaagacagaggatgctctggggctgaccatcacggacaacggggctggctacgccttcatcaagagaatcaaggaaggcagtatcatcaaccggatcgaggcagtgtgcgtgggtgacagcatcgaagccatcaacgaccactccattgtgggctgccgccactacgaggtggccaagatgctccgggagctgcccaagtcccagcccttcaccctgcgcctggtgcagcccaagagggccttcgatatgattggccagagaagtcggtccagcaaatgtccagtagaggcgaaagtgaccagcgggagggagaccctgcggcttcgttctgggggggctgccacagtggaggaagcgcccagtgagtttgaggaggaggcatctcggaaggttgatgacctgctggaaagctacatgggcattcgggaccccgagctggcgtccaccatggtggagacgtccaagaagacagcgagcgcccaggagtttgcacgctgtttagactccgtcttgggcgagttcgccttccccgacgagtttgtggtggaagtgtgggccgccatcggcgaggccagagaggcctgtggctagtttgccctgggggggcccagcacagccccagcccggagcccagccccctgccccggccctgctccagaacccagcccagatcggaggacaagttcctctctagaacccaatccaatttggagccccagcccaactccagaacccarcccttctctagaatccagcccagatctgaggccaagctatgtgctagagcccaggccagctctgagacyaagcccagcattgagaataagctctgttcta

SEQ ID NO: 4817 - DNA, 5101 bp, Homo sapiens
cgccccgtccgccccgcgccggcccggcgcgccctcccttggccggcggcgcttgttgttcggcggcggcggtcgcagctcgggtccccctcgggcgcccccgccgccgtccgcgcgcggccatggagctggaggtaccggacgaggcggagagcgctgaggcgggggccgtgccctcggaggcggcgtgggcggcagagagcggggcggcggcaggtttggctcagaagaaggcggccccaacagaggttctgtccatgacggcacagccgggccctggccatgggaagaagttgggccatcgaggtgtggacgcatccggcgaaaccacctacaagaagaccacctcctccaccctgaagggtgccatccagctgggcatcrgctacaccgtgggccacctgagctccaagcccgaacgcgacgtgctcatgcaggacttctacgtggtggagagcatcttcttccccagcgaaggcagcaacctcacccccgcccaccacttccaggacttccgcttcaagacctatgcacctgtcgccttccgctacttccgggagctctttgggatccggccagatgattacttgtactccctgtgcaatgagccgctgatcgagctgtccaacccgggcgccagtggctccctcttctacgtcaccagcgacgacgagttcatcatcaagacygtcatgcacaaggaggccgagttyctgcagaagctgctccctggctactacatgaacctcaaccagaacccgcggacgctgctgcccaagttctatgggctgtactgcgtgcagtcrgggggcaagaacatccgcgtcgtggtcatgaacaacatcctgccccgcgtggtcaagatgcacctcaagttcgacctcaagggctccacctacaagcggcgcgccagcaagaaggagaaggagaagagcttccccacctacaaggacctggacttcatgcaggacatgcccgaggggctcctgctggacgccgacaccttcagcgccctggtcaagacgctgcagcgggactgcctggtcctggaaagtttcaagatcatggactacagcctgctgctgggcgtgcacaacatcgaccagcacgagcgcgagcggcaggcgcagggcgcccagagcacctcagatgagaagcggcctgtgggccagaaggcgctctactccacggccatggagtccatccagggtggcgccgcgcgcggggaggccatcgaatcggatgacacgatgggcgggatccccgctgtgaacggccgcggggagcggctgctgctgcacattggcatcatcgacatcctgcagtcctacaggttcatcaagaaactggagcacacctggaaggccctcgtccacgatggggacacggtgtccgtccaccgccccagcttctatgccgagcgctttttcaagttcatgagcaacacggtctttcggaagaactcctccctgaagtcctcgccctccaagaaggggcgcggcggagccttgctagctgtgaaaccgctggggcccaccgctgccttctcggccagccagatccctagcgagcgggaggaggcccagtacgacctgcggggggcccgcagctaccccacgctggaggacgaaggccggcccgacctcctgccctgcacgccaccttctttcgaagaagccactacagcctccattgccacgactctgtcatccacatccctctccattcctgagcggtccccctcggagacgtcggagcagccgcggtacaggcggcgcacacagtcgtctggacaggatggcaggccgcaggaggagccacccgcggaagaggatctgcagcagattacagtgcaggtggagcctgcgtgcagcgtggagattgtggtccccaaagaggaggacgcaggggtggaggcttccccggccggtgcctctgctgctgttgaagtagaaactgccagccaggcctcagacgaggagggcgcacctgccagccaggcctcggacgaggaggacgcgcccgccaccgacatctactttcccaccgatgagaggagctgggtgtactccccgctccactatagcrcccaggccyccccggcctccgacggcgagagcgacacacccccgacccagagccgagctccacttctgctccggctkcccccgaaggcgctgcccaccccgctgaggcccagagctcgggagatgcccgcctcgccgccccaccggacctcgtcctccccctgcacggatgccgacggccgggcccctccccgacaagcctcccagggccccggcaccccggtcggcagcctgcccctgtgagacccaccctcccgagcggccaatcgcatttgagtccttatttggcacagagacggaagcacgtgtgtgccgttttaggaaaagaacaaaaaagacacaaacaaaccaaccagagggagaagagcccctgcccactgcactctttggttctctgctgtgcctgcctgtgtcctgaggaagaagccaggctgttcgcggtggcctctggggacctgagccccgggggccccatcggcctgcagaggggacggctgggrtcccgagcaactctgcctccatccacgtgggaagcggaccctcctgccctcagcttgggtttgggggcctcagtgcaggacatctggcctgaacatcractgtggggacagccctcgccctgccaagcactgcrgccactcagcagctatgttcccgccgcagtggggccctgacgcccacctcccaggtgcccctcgagcaaaaacctctggcgcctccaatccagacccaccacagctggagggccaggcctcctcttccccaggctgccacccacgctggcggagctcagggctggggacttgtccttctcttccaacgtaggccactcagcaactggcatggagggcccaggcaacggagacgttttctccatggcaggacagagcgggaggccgggccttgggccacaggagaccagctcagggcggaaggtcaggctccccgccccctccacgtggagacatggcctagggggccaggcccggctccacaggagtctccttcaggactggtgtggatgtccgccgcctctttcttgtttaagtgatgtgatgtctccgaggaggggagagaagactttgtttccgactcatcaccctccaagagggcagcgctcccagtggtgggactcagcccagactgccctggggcagcttcctgggcccgctgcgctcagagggtgctggttggaggccagagctcggcagagtcacccaccctgcccttccccaggacccctgagaggggcttattggtgatggctgtgggaatcccccacttccaagatgtgcccaggatgtgaggagctggagtggaagctgcacctttgggaagaattcctctccagacctggcagagcctggtgtggggtctgagacggccggagaacctcccaggcagggctctgtgttttgtctgttacaacctccgtatgacgccacgccacccgctgttcacgtcccgtcggcctcctgcacagcccacacgctgcgccyggaaggcccctgctgtggagaagccggacccatccccgaggtccccagcgaggacacacactccacgagagcagcccctccactctgcccaggagaggggccgaccctcctcgggaaccggccasccgcgtggctcccagcatccatcaggacaagcccacgtggggtcctccctgcgtgctcagagggtctgtccagccctgggaagcgaccttggcctcagttcacagcctggtgctcatctgctggcaccgggcatccacccatcagcccccgccctgtccctccgaaggacacccagcaggcaccccccggggaggcaggggcagaggtcagaaggggtgtctgggacctggatggccagcagggacaggggcattgtcatctcaaaggcccaacccccagaggccacaccagtcctcccagggagtcctcgagtcgccctgcccagagccctggcaccagagacgccaagagcctgtggggtgactcggagcagcaggtgtggccccgggcgggcggcaccgcgtccagggcagcctccctccgctgagtgacacgggacaccagtgcccggccgacgcgcctttgcaggagaaatgtgcaaacctctgtggataccatttcatttccattcttgtgttgtctccaaggcccytttggagatatacttggtgttggttgtgttttttggttccttttcagagaactgtaaaccgaggctgacgtgctccactgactgtgccgaggggcgggggcaggaggacggcaagacctatttataatatttagcgaactcggtctccctcagatcccccgcgagggaggctgctggacccaccccgctgtcccccatgatagaagtctgtaaataccttggtgaccaatgcccacttcccctcctgggtcacctctgatggctgctgtccactgagaacgtgggcagtgtccaaattcctgtactgtaaagactaaaaggcgtttgctctgagactgacaaggcggaaacttccatgtgtctcctgccaggctctgtccccctacgccatcccgacacgtccccgttcccccgaaacctggctcagtgcaatactcccattgccatggggtccttcaccatggtactgtctccacagccctcagtccccaccccaggagaggcgcctgccacctcctcctcatctccggtggttcaatcgctccgcctgtccccaacccagtcccatttttatggccaaactgattctgaaacaaaatgaaactgcaaacctcgtgtgtcttaactccccccagggatgccactccattcctccgccccgtggtctggtgcgtgacaatccaaagcgccgagacgagggtgctgtgtccctcaaacccagagtggtgggcgcctctgaaaccatacagccactcctggccccaaacactggtttgcatcccaggttcctcgcccacctacccccgccacaccccgtctttttagagatctctctaataaatcgggtaataagcatc

SEQ ID NO: 4818 - DNA, 1670 bp, Homo sapiens
tactgcctttctcttttcgggctcaagattccctgcattattgcccataggcatgtgttttaccccatactccttctcccttttatcttgattttcgcggtgctggggagtctgcagggattccatggcgacgggctcactgggacaggggctggggttgtgcgtccctgaggcaaggcaaatacagaaaagcgaatagagacagagggctaagattccaaagcactgaaaggtagaaactgggttagaagagagaggggagcacaaacgcccggagagagcgagccctcgggataccattggctataggctggcctccgaacaactggacggtccaagtcctgagcgtctggttacccgggcaaccgcatggtctcgcgatacatacctcgcgcctgcgcactgcccctgtagcgggggtggggggacccggtccggagactccaccccggggcctaaactcgagtctaaaagattgggcctcgttgtgtcgtttccgggtcgcgcgacgctgtgggccgctttcccctctccggagtgacctaacacaggataacgaaacctgcactgctccgagcgcttcctccccggcccstcgcgtctgcgaggcgaggccgggaggcgagggctctgcgcacgcgcggcgcaggcgcactgggcgccggtgctgttgccttcaggtgaccacggattcgccatcgtgagttccaggattttcaaaatggctgcagctcctcaagcaccggggcggggatctctccgtaagacragacctctggttgtgaagacgtcgttgaacaacccatacatcatccgctggagcgctctggagagcgaggatatgcacttcatcctacagacgcttgaggacaggcttaaagctattggacttcagaagattgaagataaraagaaaaagaacaaaacaccttttctgaaaaaagaaagcagagagaaatgcagcattgctgttgatrttagtgakaatctgaaggagaagaaaacagatgctaagcagcaagtgtcagggtggacgcctgcacacgtcaggaagcagcttgycattggcgttaacgaagttaccagagccctggaaaggagggaactgctgttagttctggtgtgtaaatcagtcaagcctgccatgatcacctcacacttgattcagttaagcctaagcagaagtgtccctgcctgtcaggtcccccggctcagtgagagaatcgcccccgtcattggcttaaaatgtgttctagccttggsgttcaaaaagaacaccactgactttgtggacgaagtaagagccatcatccccagagtccccmgtttaagtgtaccatggcttcaagacagaaytgaagattctggggaaaatttagagactgaacctctggaaagccaagacagagagcttttggacacttcatttgaagatctgtcaaaacctaagagaaagcttgctgacggtsggcaggcttctgtaacaytacaaccccttaaaataaagaaactgattccaaaccctaataagataaggaaaccacccaaaagtaaaaaagctactccaaagtaatcttgcataaacttgtcatgtcatacagtttgtgaaaggacaccttgtaaagaagccttgaaactaataaaatgagttatacttacatagattcata

SEQ ID NO: 4819 - DNA, 959 bp, Homo sapiens
gattttcaaaatggctgcagctcctcaagcaccggggcggggatctctccgtaagacragacctctggttgtgaagacgtcgttgaacaacccatacatcatccgctggagcgctctggagagcgaggatatgcacttcatcctacagacgcttgaggacaggcttaaagctattggacttcagaagattgaagataaraagaaaaagaacaaaacaccttttctgaaaaaagaaagcagagagaaatgcagcattgctgttgatrttagtgakaatctgaaggagaagaaaacagatgctaagcagcaagtgtcagggtggacgcctgcacacgtcaggaagcagcttgycattggcgttaacgaagttaccagagccctggaaaggagggaactgctgttagttctggtgtgtaaatcagtcaagcctgccatgatcacctcacacttgattcagttaagcctaagcagaagtgtccctgcctgtcaggtcccccggctcagtgagagaatcgcccccgtcattggcttaaaatgtgttctagccttggsgttcaaaaagaacaccactgactttgtggacgaagtaagagccatcatccccagagtccccmgtttaagtgtaccatggcttcaagacagaaytgaagattctggggaaaatttagagactgaacctctggaaagccaagacagagagcttttggacacttcatttgaagatctgtcaaaacctaagagaaagcttgctgacggtsggcaggcttctgtaacaytacaaccccttaaaataaagaaactgattccaaaccctaataagataaggaaaccacccaaaagtaaaaaagctactccaaagtaatcttgcataaacttgtcatgtcatacagtttgtgaaaggacaccttgtaaagaagccttgaaactaataaaatgagttatacttacatagattcata

SEQ ID NO: 4820 - DNA, 1465 bp, Homo sapiens
tgaccacggattcgccatcgtgagttccaggtgggcgcgcggggcccacgtagggcaggaggccagccccggggggatcgggcccgggactctgcggaatctggaggccgaagcccgcgcgcacgcagggtctctgctgcttccccaacgcctgttgcgtggccgcaggacccgccgccctcccggttgggccgcccagtcccgggccgggcgcgtgcacccagagcttccgcgtttctagtccggctcctctgytggattgcagcgccggctgggcaccaggagtacaaagcgaaaacccccgccggcccttctgttctccacggtctccaaggagacacggacaacagaacaacacttccgtgtgctaaatagtaaagcaccaagacagggtcagatgtgttactgggctggagtgtggtggcacaatcacgctcactgcatccttgacctcctgggctcaagtgatcttcccacctcagcctcccaagtagctgggactacaggattttcaaaatggctgcagctcctcaagcaccggggcggggatctctccgtaagacragacctctggttgtgaagacgtcgttgaacaacccatacatcatccgctggagcgctctggagagcgaggatatgcacttcatcctacagacgcttgaggacaggcttaaagctattggacttcagaagattgaagataaraagaaaaagaacaaaacaccttttctgaaaaaagaaagcagagagaaatgcagcattgctgttgatrttagtgakaatctgaaggagaagaaaacagatgctaagcagcaagtgtcagggtggacgcctgcacacgtcaggaagcagcttgycattggcgttaacgaagttaccagagccctggaaaggagggaactgctgttagttctggtgtgtaaatcagtcaagcctgccatgatcacctcacacttgattcagttaagcctaagcagaagtgtccctgcctgtcaggtcccccggctcagtgagagaatcgcccccgtcattggcttaaaatgtgttctagccttggsgttcaaaaagaacaccactgactttgtggacgaagtaagagccatcatccccagagtccccmgtttaagtgtaccatggcttcaagacagaaytgaagattctggggaaaatttagagactgaacctctggaaagccaagacagagagcttttggacacttcatttgaagatctgtcaaaacctaagagaaagcttgctgacggtsggcaggcttctgtaacaytacaaccccttaaaataaagaaactgattccaaaccctaataagataaggaaaccacccaaaagtaaaaaagctactccaaagtaatcttgcataaacttgtcatgtcatacagtttgtgaaaggacaccttgtaaagaagccttgaaactaataaaatgagttatacttacatagattcata

SEQ ID NO: 4821 - DNA, 1719 bp, Homo sapiens
gttgacagcggacatcatttccaccgttgagtttaattactctggagatcttcttgcaacaggagacaagggcggcagagttgttatttttcagcgtgaacaagaggtactggcccagccccgccgtcctgccctgccatgaagtgtgagcagctttctcagcacttcctgcagagaagtctggcaggggtgtgaattctctcttcccttcagggagagaataaaagccgccctcattctaggggagaatataatgtttacagcacctttcaaagtcatgaaccggagtttgactatttgaaaagtctagaaattgaggaaaaaattaataaaattaggtggttaccacaacagaatgctgctcattttctactgtctacaaatgataaaactataaaattatggaaaataagtgaacgggataaaagagcagaaggttataacctgaaagacgaagatggaagacttcgagacccatttaggatcacggcgctacgggtcccaatattgaagcccatggatcttatggtagaagcgagtccacggcgaatttttgcaaatgctcacacatatcatataaattccatttcagtaaatagtgatcatgaaacatatctttctgcagatgacctgagaattaatttatggcacttagaaatcacagatagaagctttaacatcgtggacatcaagcctgctaacatggaggagctgaccgaagtcatcactgcagccgagttccacccgcaccagtgcaacgtgttcgtctacagcagtagcaaagggaccatccgcctgtgtgacatgcgctcctcggccctgtgcgacagacactccaagttttttgaagagcctgaagatcccagcagtaggtccttcttctcagaaataatttcatccatatccgatgtaaaattcagtcatagkgggcggtacatgatgaccagagactacctgtcggtgaaggtgtgggacctcaacatggagagcaggccggtggagacccaccaggtccacgagtacctgcgcagcaagctctgctctctctatgagaacgactgcatctttgacaagtttgagtgttgctggaacrgttcggatagcgccatcatgaccgggtcctataacaacttcttcaggatgtttgatagagacacgcggagggatgtgaccctggaggcctcgagagagagcagcaaaccgcgcgccagcctcaaaccccggaaggtgtgtacggggggtaagcggaggaaagacgagatcagtgtggacagtctggacttcaacaagaagatcctgcacacagcctggcaccccgtggacaatgtcattgccgtggctgccaccaataacttgtacatattccaggacaaaatcaactagagacgcgaacgtgasgaccaagtcttgtcttgcatagttaagccggacatttttctgtcagagaaaaggcatcattgtccgctccattaagaacagtgacgcacctgctacttcccttcacagacacaggagaaagccgcctccgctggaggcccggtgtggttccgcctcggcgaggaaaagttattgtcagataccgctctttctccaactttccctctttctctgcsatcacacttgggccttcactgcagcgtggtgtggccaccgtccgtgtcctctcggccttcctccgagtccaggtggactctgtggatgtgtggatgtggcccgagc

SEQ ID NO: 4822 - DNA, 1447 bp, Homo sapiens
gaaaataagtgaacgggataaaagagcagaaggttataacctgaaagacgaagatggaagacttcgagacccatttaggatcacggcgctacggatgacctgagaattaatttatggcacttagaaatcacagatagaagctttaacatcgtggacatcaagcctgctaacatggaggagctgaccgaagtcatcactgcagccgagttccacccgcaccagtgcaacgtgttcgtctacagcagtagcaaagggaccatccgcctgtgtgacatgcgctcctcggccctgtgcgacagacactccaagttttttgaagagcctgaagatcccagcagtaggtccttcttctcagaaataatttcatccatatccgatgtaaaattcagtcatagkgggcggtacatgatgaccagagactacctgtcggtgaaggtgtgggacctcaacatggagagcaggccggtggagacccaccaggtccacgagtacctgcgcagcaagctctgctctctctatgagaacgactgcatctttgacaagtttgagtgttgctggaacrgttcggatagcgccatcatgaccgggtcctataacaacttcttcaggatgtttgatagagacacgcggagggatgtgaccctggaggcctcgagagagagcagcaaaccgcgcgccagcctcaaaccccggaaggtgtgtacggggggtaagcggaggaaagacgagatcagtgtggacagtctggacttcaacaagaagatcctgcacacagcctggcaccccgtggacaatgtcattgccgtggctgccaccaataacttgtacatattccaggacaaaatcaactagagacgcgaacgtgasgaccaagtcttgtcttgcatagttaagccggacatttttctgtcagagaaaaggcatcattgtccgctccattaagaacagtgacgcacctgctacttcccttcacagacacaggagaaagccgcctccgctggaggcccggtgtggttccgcctcggcgaggcgcgagacaggcgctgctgctcacgtggagacgctctcgaagcagagttgacggacactgctcccaaaaggtcattactcagaataaatgtatttatttcagtccgagccttcctttccaatttatagaccaaaaaattaacatccaagagaaaagttattgtcagataccgctctttctccaactttccctctttctctgcsatcacacttgggccttcactgcagcgtggtgtggccaccgtccgtgtcctctcggccttcctccgagtccaggtggactctgtggatgtgtggatgtggcccgagcaggctcaggcggccccactcacccacagcatccgccgccaccccttcgggtgtgagcgctcaataaaaacaacacactataaagtgtttttaaatccaaacagaagta

SEQ ID NO: 4823 - DNA, 1770 bp, Homo sapiens
tcctcccacctcggcctcccaaaatgctgggaatacaagcatgagccatggcatgtggcygccacttgccttttttcattaagagtctataattggagatcttacagggaactgggctttctgctcagccatactygagctcatttgacccccggccactgccccttgaratcggacatcatttccaccgttgagtttaattactctggagatcttcttgcaacaggagacaagggcggcagagttgttatttttcagcgtgaacaagagaataaaagccgccctcattctaggggagaatataatgtttacagcacctttcaaagtcatgaaccggagtttgactatttgaaaagtctagaaattgaggaaaaaattaataaaattaggtggttaccacaacagaatgctgctcattttctactgtctacaaatgataaaactataaaattatggaaaataagtgaacgggataaaagagcagaaggttataacctgaaagacgaagatggaagacttcgagacccatttaggatcacggcgctacgggtcccaatattgaagcccatggatcttatggtagaagcgagtccacggcgaatttttgcaaatgctcacacatatcatataaattccatttcagtaaatagtgatcatgaaacatatctttctgcagatgacctgagaattaatttatggcacttagaaatcacagatagaagctttaacatcgtggacatcaagcctgctaacatggaggagctgaccgaagtcatcactgcagccgagttccacccgcaccagtgcaacgtgttcgtctacagcagtagcaaagggaccatccgcctgtgtgacatgcgctcctcggccctgtgcgacagacactccaagttttttgaagagcctgaagatcccagcagtaggtccttcttctcagaaataatttcatccatatccgatgtaaaattcagtcatagkgggcggtacatgatgaccagagactacctgtcggtgaaggtgtgggacctcaacatggagagcaggccggtggagacccaccaggtccacgagtacctgcgcagcaagctctgctctctctatgagaacgactgcatctttgacaagtttgagtgttgctggaacrgttcggatagcgccatcatgaccgggtcctataacaacttcttcaggatgtttgatagagacacgcggagggatgtgaccctggaggcctcgagagagagcagcaaaccgcgcgccagcctcaaaccccggaaggtgtgtacggggggtaagcggaggaaagacgagatcagtgtggacagtctggacttcaacaagaagatcctgcacacagcctggcaccccgtggacaatgtcattgccgtggctgccaccaataacttgtacatattccaggacaaaatcaactagagacgcgaacgtgasgaccaagtcttgtcttgcatagttaagccggacatttttctgtcagagaaaaggcatcattgtccgctccattaagaacagtgacgcacctgctacttcccttcacagacacaggagaaagccgcctccgctggaggcccggtgtggttccgcctcggcgaggaaaagttattgtcagataccgctctttctccaactttccctctttctctgcsatcacacttgggccttcactgcagcgtggtgtggccaccgtccgtgtcctctcggccttcctccgagtccaggtggactctgtggatgtgtggatgtggcccgagc

SEQ ID NO: 4824 - DNA, 1606 bp, Homo sapiens
gttgacagcggacatcatttccaccgttgagtttaattactctggagatcttcttgcaacaggagacaagggcggcagagttgttatttttcagcgtgaacaagagaataaaagccgccctcattctaggggagaatataatgtttacagcacctttcaaagtcatgaaccggagtttgactatttgaaaagtctagaaattgaggaaaaaattaataaaattaggtggttaccacaacagaatgctgctcattttctactgtctacaaatgataaaactataaaattatggaaaataagtgaacgggataaaagagcagaaggttataacctgaaagacgaagatggaagacttcgagacccatttaggatcacggcgctacgggtcccaatattgaagcccatggatcttatggtagaagcgagtccacggcgaatttttgcaaatgctcacacatatcatataaattccatttcagtaaatagtgatcatgaaacatatctttctgcagatgacctgagaattaatttatggcacttagaaatcacagatagaagctttaacatcgtggacatcaagcctgctaacatggaggagctgaccgaagtcatcactgcagccgagttccacccgcaccagtgcaacgtgttcgtctacagcagtagcaaagggaccatccgcctgtgtgacatgcgctcctcggccctgtgcgacagacactccaagttttttgaagagcctgaagatcccagcagtaggtccttcttctcagaaataatttcatccatatccgatgtaaaattcagtcatagkgggcggtacatgatgaccagagactacctgtcggtgaaggtgtgggacctcaacatggagagcaggccggtggagacccaccaggtccacgagtacctgcgcagcaagctctgctctctctatgagaacgactgcatctttgacaagtttgagtgttgctggaacrgttcggatagcgccatcatgaccgggtcctataacaacttcttcaggatgtttgatagagacacgcggagggatgtgaccctggaggcctcgagagagagcagcaaaccgcgcgccagcctcaaaccccggaaggtgtgtacggggggtaagcggaggaaagacgagatcagtgtggacagtctggacttcaacaagaagatcctgcacacagcctggcaccccgtggacaatgtcattgccgtggctgccaccaataacttgtacatattccaggacaaaatcaactagagacgcgaacgtgasgaccaagtcttgtcttgcatagttaagccggacatttttctgtcagagaaaaggcatcattgtccgctccattaagaacagtgacgcacctgctacttcccttcacagacacaggagaaagccgcctccgctggaggcccggtgtggttccgcctcggcgaggaaaagttattgtcagataccgctctttctccaactttccctctttctctgcsatcacacttgggccttcactgcagcgtggtgtggccaccgtccgtgtcctctcggccttcctccgagtccaggtggactctgtggatgtgtggatgtggcccgagc

SEQ ID NO: 4825 - DNA, 909 bp, Homo sapiens
atgctgtttatcaaattcattcatctcgaagtattcagtatgccagaaagggctattgcaagacacgaagtccgagaaattgagcagcgacatacaatggatggccctcggcaagatgccactttagatgaggaagaggacatggtgatcatttataacagagttcccaaaacggcaagcacttcatttaccaatatcgcctatgacctgtgtgcaaagaataaataccatgtccttcatatcaacactaccaaaaataatccagtgatgtcattgcaagatcaggtgcgctttgtaaagaatataacttcctggaaagagatgaaaccaggattttatcatggacacgtttcttacttggattttgcaaaatttggtgtgaagaagaaaccaatttacattaatgtcataagggatcctattgagaggctagtttcttattattactttctgagatttggagatgattatagaccagggttacggagacgaaaacaaggagacaaaaagacctttgatgaatgtgtagcagaaggtggctcagactgtgctccagagaagctctggcttcaaatcccgttcttctgtggccatagctccgaatgctggaatgtgggaagcagrtgggctatggatcaagccaagtataacctaattaatgaatattttctggtgggagttactgaagaacttgaagattttatcatgttattggaggcagcattgccccggtttttcaggggtgctactgaactctatcgcacagcaccagatactgctacaccatctcatcggcatggacctatatgtggcagcaagtccatctcatcgcttttggtgaaagtcagtccagtttgtaaagattctcattgccttggaaagtgttccaggaatggactttctgcagta

SEQ ID NO: 4826 - DNA, 6201 bp, Homo sapiens
cgccggtggaggggcgcgcggccgcgagcaaaggagggagggaaggaaggaagagagggaggcgggcaagcaggcgggcgcgggggtcggggactgaggcagtagagggaggcgagagcccggcagccgcttcgcgctgtttgctgcgcgggcttttggagggggcggccgtttagtcggctgaggagaagcggacaccagcggcgttggtgatagcgcctgggggagggggactggagaggcgagaaggggggtcgctgcggtggttctctcgctgtcgctctctctttgcctcgctcccggytcggcgggctcctcccggcgtctctctcgcctccggggycccgctccccgccccccgcggtatgtcttgatcccgagcagcgggtttcatggggctcctcaggattatgatgccgcccaagttgcagctgctggcggtggtggccttcgcggtggcgatgctcttcttggaaaaccagatccagaaactggaggagtcccgctcgaagctagaaagggctattgcaagacacgaagtccgagaaattgagcagcgacatacaatggatggccctcggcaagatgccactttagatgaggaagaggacatggtgatcatttataacagagttcccaaaacggcaagcacttcatttaccaatatcgcctatgacctgtgtgcaaagaataaataccatgtccttcatatcaacactaccaaaaataatccagtgatgtcattgcaagatcaggtgcgctttgtaaagaatataacttcctggaaagagatgaaaccaggattttatcatggacacgtttcttacttggattttgcaaaatttggtgtgaagaagaaaccaatttacattaatgtcataagggatcctattgagaggctagtttcttattattactttctgagatttggagatgattatagaccagggttacggagacgaaaacaaggagacaaaaagacctttgatgaatgtgtagcagaaggtggctcagactgtgctccagagaagctctggcttcaaatcccgttcttctgtggccatagctccgaatgctggaatgtgggaagcagrtgggctatggatcaagccaagtataacctaattaatgaatattttctggtgggagttactgaagaacttgaagattttatcatgttattggaggcagcattgccccggtttttcaggggtgctactgaactctatcgcacaggaaagaaatctcatcttaggaaaaccacagagaagaaactccccactaaacaaaccattgcaaaactacagcaatctgatatttggamaatggagaatgagttctatgaatttgcactagagcagttccaattcatcagagcccatgccgttcgagaaaaagatggagacctctacatcctcgcacaaaactttttctatgaaaagatttaccctaagtcgaactgagtataaggtgtgactattrgattcttgaactaawatttgaccctgtcttcacctttgttctcagctccacagtctggattgctgacagtaggtgtatatgacaatttgtattgagccaaattaggaaacagacagtaacgtcaaggaagtagatactggctggcattgtcagtgttctaagtttcaggcatttttatttttcctggctaaacgttggtgaaagttataacctcctgcctgggagaaaatatacatcacctaaaatgaacttatggcaggtctaatcaaaaggctaaatacaatttcagaaaaggttctgatactcttgtttttgataaagcattttttcaactaaccatgaattaagatgagtccatttgcctcttctgccttcactgagggtttgggttatacacctctactgaattgtgttaataactgtttggcagtgtgtactttgtttttgtgagtcatgtctcatgaaatttattggaatgtttaatcatatttgctaagaaatgtttctgctgtagttggatttgcccatatttatgtaggtggttttaattttttaaatggtgattagtgttaaaaatcaatttaaatcatgactaatatggtaaaaagataaagcatcaaagcagtatttctcattcctgcctcctcaatatctaatactgggaagatacttcaaagaatattgagattgtctgaagttttagttaagattttcacacattaatatcaaaaaagtaagtttagtatttgtttctccatgggttatttgtaaagctgtaaactgagatatcggtgactccgtattatgactccattagtgagctgtggtatgggtaggattttcctacttcttctgtacttttacctgtagactatttttactaaggtgctttataatgtgttttaaagcattgcatttacaaaacaaggaaaatgctgtaaatattgcatattttatgtatttggaccaaaaggttacaagtaattagacaaaagtggttttgcaccaattttatgtcaagtaaaaccatcagacctactgttcttgtatttctcatttaactttactgttaagacatcactgaaatgaacttcagtaagctttcaattttgatacacagttcattattcataacttgaggcagtaattacagtggaatgagtactggacaaggagtcaaaaaacttgatttcaggtcctagctctagcacttacagctgtgtgatcttgggcaagtcacttaacctctctttgcctcaatttcctcatcttgaaatgaggataataatacctgctgtacctacctcacagggctgttgtgaggattaaatgagatggcatgtgaaagcactttgaaaattgtaaagttagctgactagggtcagggaaacttttctcttcaaatttgaaagctgtttctgttttcattttacattattattcagaaatggtagctattctatacctatggtttaagtaaatatttctgaataaggcttcaccatactgtaagcattttaggtagattgccttaaaggttatgggagggcatgagggaacacttcttatgagaaaacatttataaacaaaagaaacatttataaactaaagaaaaactaaaagaatgacagaacaatcatcttagcaccctttcctcacaataatataaaaatattaaaagaacataggcaggctttttttaaatttggcttttttctttccttttttcaaattgacttttataggtatttcctgaaagtgtatacaaattatttcctcgcccaaaataaagcaccacttcaaggtgtggtttgacattacatgctaatgaacaaacccagtatgcaagttattcttgcaccacatgctcaaatcttcttgaggtgcattaactcttttaggtaactagagcagtacttggtgaactagatcaggaggtcagtaaactttctgtggaagggccagagagtaaatattttaggctttgcagcccatacggtctctgtcacagctagtcaaccctgccattttaccacaaaagcagcaatagacattatgtaaacaaatgagcacagttatgttccaataaaactttatttacaaaaacagatgacatcccagatgcagaccatgggcaaccaaccattgcactggcyaaatcattatttatggagaaatcctctttgtgtctctactctagatgcctaaaagagtttatatacttctaaaagctcctaacttatatccaaagaattgctttctgattcgtgtagtctctcccacagattcataaacttttatgacttatattgtttccaggtgggcatggtttatttcccagtttaacagttcagaataggggcatttattttatcatattttagggtgggttaggagtatcctttctggagactgagaaaggggtgtatttaattccatcaggtccagtacagtactaggagtcataatactttataatcaattaaataaatagaaccactgagacaataatgtatttttttaaagtggcaaatgtggttttcttttttcagcctttgcgctttttcagtattttgaccatagggagataatttttttataatacaaaagtaaccacttggaattttaaagataatgttatgtgtgtatgtgaaatatatatacatatatatatatatwtcctaaaagaagaaaagatacctttctgttcaacttgtatcaactcctcttttctaattgctgtgaaatggcaactgttgataaattattgtgattgttttaaaatctaatgggaagtaaaatatattttgattttacccagcttaatctgtaaagtagcacttaaatatatctgatagcaacacttaagatattgcatggggattactttcctatcatccatatgcatttgtgcaacttcaaacatattgggtgcttctgaattcctgatgattggatttaagctattgaaaattggataatttaaacttaatgatttttataattttctgatcttaaaatttggttaatgcctataatctgttgctttttctcaatatgtgtcctattggaaattcctcaaatcgttggtgccatcagtgatttacaaacaatattttgatattgcagatgacttgcttactgtatttgcaytgttagaaaacagtttgtagacaatgattcttttttaataaaatcaaataattctaaaagtgctagagaatttaactaaaagctggttcccaaatgcatagctggcattttaatttaaattcaaatctacatagagaacatcygtgtaaatcatctaactggattttyccattggtcattcccaaacacacctatggtcctagaatccttaagagaagcaccctgtaaccttttatgtggtttgcctttaagaggcccaggtgcttctcctttatgatttgagttggcctcttcataaattagtgctgtttactttcagaggaagcagagaagttgctgttatgtttttgcatccgtttaccctatgcaaagttgctgtatgatgccaactaaactrctctttaggcagccttctgaggagaaaagcaaccctgtttcaaatccactgccaattcagctcctctggagtggagctttctgatttcttggagcaggaattttagagattgaaatgaatgatcatttagtcagatttatcctgtaatttcatgcagctttgtggcctttgcagtactatttataaaatggaccctgatggtgatgaactctttagaacgcattactgttaagcctgtgttgagacattgatgctgtctatctcattttttagacagtttttgtagctttctattgagagtcaggtatgtgagcatctctgaagcagtgttgaatgtaattttcggaaacatggattgtgtattttgacttttattttataaatacacagctcaacagtgccttttttttccctcatagtcctgttggaagatgctcactactttctctcttctctctccctgccctcccccactccattcagttgattcatttatgcaaattctgtttccaacttgaaaccattttgtcacatctgttggagagataatcactccttttccttaacattctgccagctttctgatgttgaagtgtttcagttgactacctgatgcaaaagctataaaataaacagtgggaaggggaaaaattggtgtcctgttttaatattttcttttgtagccttgacactgatggacattttccaagctgactcagtgttcagtgtcaacttaactctcagatagtgttgccatcaagaaagcatgcaacatcattggtttctaatgattttatggcttgtgacaatattttatctggactgacatgcctctgctgcttttgctttgtacttcattgctggtaataaaatttcagatggaaaacttacaaaatatatacttaattagaagaaaaaaatagagaaagggctattagaattaaaaaaatttgaaagtaacttaatctaacatttatggcacagtttggacatatccataattttttttgggaacacacatttctgattttttttttcccccttaaagaagaaagtctcaattccattgattttcaattcttagccactggctcattgctttgagcaatgcttgattgattctatttatattatatgatattgggttgataaaataccagttcaatgat

SEQ ID NO: 4827 - DNA, 6227 bp, Homo sapiens
aaagggctattgcaagacacgaagtccgagaaattgagcagcgacatacaatggatggccctcggcaagatgccactttagatgaggaagaggacatggtgatcatttataacagagttcccaaaacggcaagcacttcatttaccaatatcgcctatgacctgtgtgcaaagaataaataccatgtccttcatatcaacactaccaaaaataatccagtgatgtcattgcaagatcaggtgcgctttgtaaagaatataacttcctggaaagagatgaaaccaggattttatcatggacacgtttcttacttggattttgcaaaatttggtgtgaagaagaaaccaatttacattaatgtcataagggatcctattgagaggctagtttcttattattactttctgagatttggagatgattatagaccagggttacggagacgaaaacaaggagacaaaaagacctttgatgaatgtgtagcagaaggtggctcagactgtgctccagagaagctctggcttcaaatcccgttcttctgtggccatagctccgaatgctggaatgtgggaagcagrtgggctatggatcaagccaagtataacctaattaatgaatattttctggtgggagttactgaagaacttgaagattttatcatgttattggaggcagcattgccccggtttttcaggggtgctactgaactctatcgcacaggaaagaaatctcatcttaggaaaaccacagagaagaaactccccactaaacaaaccattgcaaaactacagcaatctgatatttggamaatggagaatgagttctatgaatttgcactagagcagttccaattcatcagagcccatgccgttcgagaaaaagatggagacctctacatcctcgcacaaaactttttctatgaaaagatttaccctaagtcgaactgagtataaggtgtgactattrgattcttgaactaawatttgaccctgtcttcacctttgttctcagctccacagtctggattgctgacagtaggtgtatatgacaatttgtattgagccaaattaggaaacagacagtaacgtcaaggaagtagatactggctggcattgtcagtgttctaagtttcaggcatttttatttttcctggctaaacgttggtgaaagttataacctcctgcctgggagaaaatatacatcacctaaaatgaacttatggcaggtctaatcaaaaggctaaatacaatttcagaaaaggttctgatactcttgtttttgataaagcattttttcaactaaccatgaattaagatgagtccatttgcctcttctgccttcactgagggtttgggttatacacctctactgaattgtgttaataactgtttggcagtgtgtactttgtttttgtgagtcatgtctcatgaaatttattggaatgtttaatcatatttgctaagaaatgtttctgctgtagttggatttgcccatatttatgtaggtggttttaattttttaaatggtgattagtgttaaaaatcaatttaaatcatgactaatatggtaaaaagataaagcatcaaagcagtatttctcattcctgcctcctcaatatctaatactgggaagatacttcaaagaatattgagattgtctgaagttttagttaagattttcacacattaatatcaaaaaagtaagtttagtatttgtttctccatgggttatttgtaaagctgtaaactgagatatcggtgactccgtattatgactccattagtgagctgtggtatgggtaggattttcctacttcttctgtacttttacctgtagactatttttactaaggtgctttataatgtgttttaaagcattgcatttacaaaacaaggaaaatgctgtaaatattgcatattttatgtatttggaccaaaaggttacaagtaattagacaaaagtggttttgcaccaattttatgtcaagtaaaaccatcagacctactgttcttgtatttctcatttaactttactgttaagacatcactgaaatgaacttcagtaagctttcaattttgatacacagttcattattcataacttgaggcagtaattacagtggaatgagtactggacaaggagtcaaaaaacttgatttcaggtcctagctctagcacttacagctgtgtgatcttgggcaagtcacttaacctctctttgcctcaatttcctcatcttgaaatgaggataataatacctgctgtacctacctcacagggctgttgtgaggattaaatgagatggcatgtgaaagcactttgaaaattgtaaagcgctatgtaaatgtaaggtattatagaaacatctttaacatatagtttcataccattcattttttaacaaagaaagggaaaagtctgcttgtaagctggttgaaaaagttaatcttgatataaatttgtgtttgataaatatcctctcagtgttttatcttccatgtttcaacaactattgaaatatgaaatgcctgtgaactcttaaagcttcatgagcagctgcttgagttcaggaagttcactgttagaaataggctttgttagctgactagggtcagggaaacttttctcttcaaatttgaaagctgtttctgttttcattttacattattattcagaaatggtagctattctatacctatggtttaagtaaatatttctgaataaggcttcaccatactgtaagcattttaggtagattgccttaaaggttatgggagggcatgagggaacacttcttatgagaaaacatttataaacaaaagaaacatttataaactaaagaaaaactaaaagaatgacagaacaatcatcttagcaccctttcctcacaataatataaaaatattaaaagaacataggcaggctttttttaaatttggcttttttctttccttttttcaaattgacttttataggtatttcctgaaagtgtatacaaattatttcctcgcccaaaataaagcaccacttcaaggtgtggtttgacattacatgctaatgaacaaacccagtatgcaagttattcttgcaccacatgctcaaatcttcttgaggtgcattaactcttttaggtaactagagcagtacttggtgaactagatcaggaggtcagtaaactttctgtggaagggccagagagtaaatattttaggctttgcagcccatacggtctctgtcacagctagtcaaccctgccattttaccacaaaagcagcaatagacattatgtaaacaaatgagcacagttatgttccaataaaactttatttacaaaaacagatgacatcccagatgcagaccatgggcaaccaaccattgcactggcyaaatcattatttatggagaaatcctctttgtgtctctactctagatgcctaaaagagtttatatacttctaaaagctcctaacttatatccaaagaattgctttctgattcgtgtagtctctcccacagattcataaacttttatgacttatattgtttccaggtgggcatggtttatttcccagtttaacagttcagaataggggcatttattttatcatattttagggtgggttaggagtatcctttctggagactgagaaaggggtgtatttaattccatcaggtccagtacagtactaggagtcataatactttataatcaattaaataaatagaaccactgagacaataatgtatttttttaaagtggcaaatgtggttttcttttttcagcctttgcgctttttcagtattttgaccatagggagataatttttttataatacaaaagtaaccacttggaattttaaagataatgttatgtgtgtatgtgaaatatatatacatatatatatatatwtcctaaaagaagaaaagatacctttctgttcaacttgtatcaactcctcttttctaattgctgtgaaatggcaactgttgataaattattgtgattgttttaaaatctaatgggaagtaaaatatattttgattttacccagcttaatctgtaaagtagcacttaaatatatctgatagcaacacttaagatattgcatggggattactttcctatcatccatatgcatttgtgcaacttcaaacatattgggtgcttctgaattcctgatgattggatttaagctattgaaaattggataatttaaacttaatgatttttataattttctgatcttaaaatttggttaatgcctataatctgttgctttttctcaatatgtgtcctattggaaattcctcaaatcgttggtgccatcagtgatttacaaacaatattttgatattgcagatgacttgcttactgtatttgcaytgttagaaaacagtttgtagacaatgattcttttttaataaaatcaaataattctaaaagtgctagagaatttaactaaaagctggttcccaaatgcatagctggcattttaatttaaattcaaatctacatagagaacatcygtgtaaatcatctaactggattttyccattggtcattcccaaacacacctatggtcctagaatccttaagagaagcaccctgtaaccttttatgtggtttgcctttaagaggcccaggtgcttctcctttatgatttgagttggcctcttcataaattagtgctgtttactttcagaggaagcagagaagttgctgttatgtttttgcatccgtttaccctatgcaaagttgctgtatgatgccaactaaactrctctttaggcagccttctgaggagaaaagcaaccctgtttcaaatccactgccaattcagctcctctggagtggagctttctgatttcttggagcaggaattttagagattgaaatgaatgatcatttagtcagatttatcctgtaatttcatgcagctttgtggcctttgcagtactatttataaaatggaccctgatggtgatgaactctttagaacgcattactgttaagcctgtgttgagacattgatgctgtctatctcattttttagacagtttttgtagctttctattgagagtcaggtatgtgagcatctctgaagcagtgttgaatgtaattttcggaaacatggattgtgtattttgacttttattttataaatacacagctcaacagtgccttttttttccctcatagtcctgttggaagatgctcactactttctctcttctctctccctgccctcccccactccattcagttgattcatttatgcaaattctgtttccaacttgaaaccattttgtcacatctgttggagagataatcactccttttccttaacattctgccagctttctgatgttgaagtgtttcagttgactacctgatgcaaaagctataaaataaacagtgggaaggggaaaaattggtgtcctgttttaatattttcttttgtagccttgacactgatggacattttccaagctgactcagtgttcagtgtcaacttaactctcagatagtgttgccatcaagaaagcatgcaacatcattggtttctaatgattttatggcttgtgacaatattttatctggactgacatgcctctgctgcttttgctttgtacttcattgctggtaataaaatttcagatggaaaacttacaaaatatatacttaattagaagaaaaaaatagagaaagggctattagaattaaaaaaatttgaaagtaacttaatctaacatttatggcacagtttggacatatccataattttttttgggaacacacatttctgattttttttttcccccttaaagaagaaagtctcaattccattgattttcaattcttagccactggctcattgctttgagcaatgcttgattgattctatttatattatatgatattgggttgataaaataccagttcaatgatgagttttcttaacagaatttggtttgtacttgcagtggctgaacaaagagcatggcttgagaatcaaagggatctgcatttagcaatgtgatgtcagtaaatggacataacaggattgttgtaaaggttgggcatgatgtatgcaaagtactggccagggtagactaataactgatggcatttatatgctgtgctggaatattgttaccaagctgatgtgccgttctcaccctgcagaatactggttttgtcatttcataaatgatatttttataaata

SEQ ID NO: 4828 - DNA, 796 bp, Homo sapiens
aaggaagagagggaggcgggcaagcaggcgggcgcgggggtcggggactgaggcagtagagggaggcgagagcccggcagccgcttcgcgctgtttgctgcgcgggcttttggagggggcggccgtttagtcggctgaggagaagcggacaccagcggcgttggtgatagcgcctgggggagggggactggagaggcgagaaggggggtcgctgcggtggttctctcgctgtcgctctctctttgcctcgctcccggytcggcgggctcctcccggcgtctctctcgcctccggggycccgctccccgccccccgcggtatgtcttgatcccgagcagcgggtttcatggggctcctcaggattatgatgccgcccaagttgcagctgctggcggtggtggccttcgcggtggcgatgctcttcttggaaaaccagatccagaaactggaggagtcccgctcgaagctaggtgaggarctgaactgccccgggctgagtgctgtggaaggggccgaggaggcgctgccgccggagcaagtgggcgttcatctaacctggggtctggctcgggggctgaaagcggtttcaaagagaaccgggaacaaggggcagcgagagcacgagctccaagaatgggttgaattaagcttgagcggcgtgctgggctcgcgaggtcacggggcagaggttgcaagcaaaggaccttgtaattgccagctgagggaggctggccgggtagtgcgggaacgcgagtgmaaagcttcatcggagtacggaaatgagggtccggagatt

SEQ ID NO: 4829 - DNA, 6743 bp, Homo sapiens
cgccggtggaggggcgcgcggccgcgagcaaaggagggagggaaggaaggaagagagggaggcgggcaagcaggcgggcgcgggggtcggggactgaggcagtagagggaggcgagagcccggcagccgcttcgcgctgtttgctgcgcgggcttttggagggggcggccgtttagtcggctgaggagaagcggacaccagcggcgttggtgatagcgcctgggggagggggactggagaggcgagaaggggggtcgctgcggtggttctctcgctgtcgctctctctttgcctcgctcccggytcggcgggctcctcccggcgtctctctcgcctccggggycccgctccccgccccccgcggtatgtcttgatcccgagcagcgggtttcatggggctcctcaggattatgatgccgcccaagttgcagctgctggcggtggtggccttcgcggtggcgatgctcttcttggaaaaccagatccagaaactggaggagtcccgctcgaagctagaaagggctattgcaagacacgaagtccgagaaattgagcagcgacatacaatggatggccctcggcaagatgccactttagatgaggaagaggacatggtgatcatttataacagagttcccaaaacggcaagcacttcatttaccaatatcgcctatgacctgtgtgcaaagaataaataccatgtccttcatatcaacactaccaaaaataatccagtgatgtcattgcaagatcaggtgcgctttgtaaagaatataacttcctggaaagagatgaaaccaggattttatcatggacacgtttcttacttggattttgcaaaatttggtgtgaagaagaaaccaatttacattaatgtcataagggatcctattgagaggctagtttcttattattactttctgagatttggagatgattatagaccagggttacggagacgaaaacaaggagacaaaaagacctttgatgaatgtgtagcagaaggtggctcagactgtgctccagagaagctctggcttcaaatcccgttcttctgtggccatagctccgaatgctggaatgtgggaagcagrtgggctatggatcaagccaagtataacctaattaatgaatattttctggtgggagttactgaagaacttgaagattttatcatgttattggaggcagcattgccccggtttttcaggggtgctactgaactctatcgcacaggaaagaaatctcatcttaggaaaaccacagagaagaaactccccactaaacaaaccattgcaaaactacagcaatctgatatttggamaatggagaatgagttctatgaatttgcactagagcagttccaattcatcagagcccatgccgttcgagaaaaagatggagacctctacatcctcgcacaaaactttttctatgaaaagatttaccctaagtcgaactgagtataaggtgtgactattrgattcttgaactaawatttgaccctgtcttcacctttgttctcagctccacagtctggattgctgacagtaggtgtatatgacaatttgtattgagccaaattaggaaacagacagtaacgtcaaggaagtagatactggctggcattgtcagtgttctaagtttcaggcatttttatttttcctggctaaacgttggtgaaagttataacctcctgcctgggagaaaatatacatcacctaaaatgaacttatggcaggtctaatcaaaaggctaaatacaatttcagaaaaggttctgatactcttgtttttgataaagcattttttcaactaaccatgaattaagatgagtccatttgcctcttctgccttcactgagggtttgggttatacacctctactgaattgtgttaataactgtttggcagtgtgtactttgtttttgtgagtcatgtctcatgaaatttattggaatgtttaatcatatttgctaagaaatgtttctgctgtagttggatttgcccatatttatgtaggtggttttaattttttaaatggtgattagtgttaaaaatcaatttaaatcatgactaatatggtaaaaagataaagcatcaaagcagtatttctcattcctgcctcctcaatatctaatactgggaagatacttcaaagaatattgagattgtctgaagttttagttaagattttcacacattaatatcaaaaaagtaagtttagtatttgtttctccatgggttatttgtaaagctgtaaactgagatatcggtgactccgtattatgactccattagtgagctgtggtatgggtaggattttcctacttcttctgtacttttacctgtagactatttttactaaggtgctttataatgtgttttaaagcattgcatttacaaaacaaggaaaatgctgtaaatattgcatattttatgtatttggaccaaaaggttacaagtaattagacaaaagtggttttgcaccaattttatgtcaagtaaaaccatcagacctactgttcttgtatttctcatttaactttactgttaagacatcactgaaatgaacttcagtaagctttcaattttgatacacagttcattattcataacttgaggcagtaattacagtggaatgagtactggacaaggagtcaaaaaacttgatttcaggtcctagctctagcacttacagctgtgtgatcttgggcaagtcacttaacctctctttgcctcaatttcctcatcttgaaatgaggataataatacctgctgtacctacctcacagggctgttgtgaggattaaatgagatggcatgtgaaagcactttgaaaattgtaaagcgctatgtaaatgtaaggtattatagaaacatctttaacatatagtttcataccattcattttttaacaaagaaagggaaaagtctgcttgtaagctggttgaaaaagttaatcttgatataaatttgtgtttgataaatatcctctcagtgttttatcttccatgtttcaacaactattgaaatatgaaatgcctgtgaactcttaaagcttcatgagcagctgcttgagttcaggaagttcactgttagaaataggctttgttagctgactagggtcagggaaacttttctcttcaaatttgaaagctgtttctgttttcattttacattattattcagaaatggtagctattctatacctatggtttaagtaaatatttctgaataaggcttcaccatactgtaagcattttaggtagattgccttaaaggttatgggagggcatgagggaacacttcttatgagaaaacatttataaacaaaagaaacatttataaactaaagaaaaactaaaagaatgacagaacaatcatcttagcaccctttcctcacaataatataaaaatattaaaagaacataggcaggctttttttaaatttggcttttttctttccttttttcaaattgacttttataggtatttcctgaaagtgtatacaaattatttcctcgcccaaaataaagcaccacttcaaggtgtggtttgacattacatgctaatgaacaaacccagtatgcaagttattcttgcaccacatgctcaaatcttcttgaggtgcattaactcttttaggtaactagagcagtacttggtgaactagatcaggaggtcagtaaactttctgtggaagggccagagagtaaatattttaggctttgcagcccatacggtctctgtcacagctagtcaaccctgccattttaccacaaaagcagcaatagacattatgtaaacaaatgagcacagttatgttccaataaaactttatttacaaaaacagatgacatcccagatgcagaccatgggcaaccaaccattgcactggcyaaatcattatttatggagaaatcctctttgtgtctctactctagatgcctaaaagagtttatatacttctaaaagctcctaacttatatccaaagaattgctttctgattcgtgtagtctctcccacagattcataaacttttatgacttatattgtttccaggtgggcatggtttatttcccagtttaacagttcagaataggggcatttattttatcatattttagggtgggttaggagtatcctttctggagactgagaaaggggtgtatttaattccatcaggtccagtacagtactaggagtcataatactttataatcaattaaataaatagaaccactgagacaataatgtatttttttaaagtggcaaatgtggttttcttttttcagcctttgcgctttttcagtattttgaccatagggagataatttttttataatacaaaagtaaccacttggaattttaaagataatgttatgtgtgtatgtgaaatatatatacatatatatatatatwtcctaaaagaagaaaagatacctttctgttcaacttgtatcaactcctcttttctaattgctgtgaaatggcaactgttgataaattattgtgattgttttaaaatctaatgggaagtaaaatatattttgattttacccagcttaatctgtaaagtagcacttaaatatatctgatagcaacacttaagatattgcatggggattactttcctatcatccatatgcatttgtgcaacttcaaacatattgggtgcttctgaattcctgatgattggatttaagctattgaaaattggataatttaaacttaatgatttttataattttctgatcttaaaatttggttaatgcctataatctgttgctttttctcaatatgtgtcctattggaaattcctcaaatcgttggtgccatcagtgatttacaaacaatattttgatattgcagatgacttgcttactgtatttgcaytgttagaaaacagtttgtagacaatgattcttttttaataaaatcaaataattctaaaagtgctagagaatttaactaaaagctggttcccaaatgcatagctggcattttaatttaaattcaaatctacatagagaacatcygtgtaaatcatctaactggattttyccattggtcattcccaaacacacctatggtcctagaatccttaagagaagcaccctgtaaccttttatgtggtttgcctttaagaggcccaggtgcttctcctttatgatttgagttggcctcttcataaattagtgctgtttactttcagaggaagcagagaagttgctgttatgtttttgcatccgtttaccctatgcaaagttgctgtatgatgccaactaaactrctctttaggcagccttctgaggagaaaagcaaccctgtttcaaatccactgccaattcagctcctctggagtggagctttctgatttcttggagcaggaattttagagattgaaatgaatgatcatttagtcagatttatcctgtaatttcatgcagctttgtggcctttgcagtactatttataaaatggaccctgatggtgatgaactctttagaacgcattactgttaagcctgtgttgagacattgatgctgtctatctcattttttagacagtttttgtagctttctattgagagtcaggtatgtgagcatctctgaagcagtgttgaatgtaattttcggaaacatggattgtgtattttgacttttattttataaatacacagctcaacagtgccttttttttccctcatagtcctgttggaagatgctcactactttctctcttctctctccctgccctcccccactccattcagttgattcatttatgcaaattctgtttccaacttgaaaccattttgtcacatctgttggagagataatcactccttttccttaacattctgccagctttctgatgttgaagtgtttcagttgactacctgatgcaaaagctataaaataaacagtgggaaggggaaaaattggtgtcctgttttaatattttcttttgtagccttgacactgatggacattttccaagctgactcagtgttcagtgtcaacttaactctcagatagtgttgccatcaagaaagcatgcaacatcattggtttctaatgattttatggcttgtgacaatattttatctggactgacatgcctctgctgcttttgctttgtacttcattgctggtaataaaatttcagatggaaaacttacaaaatatatacttaattagaagaaaaaaatagagaaagggctattagaattaaaaaaatttgaaagtaacttaatctaacatttatggcacagtttggacatatccataattttttttgggaacacacatttctgattttttttttcccccttaaagaagaaagtctcaattccattgattttcaattcttagccactggctcattgctttgagcaatgcttgattgattctatttatattatatgatattgggttgataaaataccagttcaatgatgagttttcttaacagaatttggtttgtacttgcagtggctgaacaaagagcatggcttgagaatcaaagggatctgcatttagcaatgtgatgtcagtaaatggacataacaggattgttgtaaaggttgggcatgatgtatgcaaagtactggccagggtagactaataactgatggcatttatatgctgtgctggaatattgttaccaagctgatgtgccgttctcaccctgcagaatactggttttgtcatttcataaatgatatttttataaata

SEQ ID NO: 4830 - DNA, 2733 bp, Homo sapiens
cggcggccgaggcgatgagggtgttggygcggcgctgttggggtcctccgctggctcatggcgccaggcgtgggaggccgagtccccagtggcgagcactggcccgactcggctgggaggactgccgggactccagagtccgcgagaagcctccctggcgggtgctcttcttcggcacggaccagttcgcccgcgaggcgctgcgggcgctgcacgccgccagggaaaacaaagaagaagagttaatcgacaaactggaggtggtcacaatgccttccccatcaccaaaaggactgccagtgaagcaatatgctgtgcagtctcagcttcccgtatatgagtggccggatgtgggatctggagaatatgatgttggagtagtggcttcgtttggccgacttttgaatgaggctcttattcttaaatttccctatggcatattgaatgttcatcccagttgcctcccgagatggcgtggcccagcccctgtaatccatacagtgcttcacggagacacagttactggagtaacaattatgcaaattagacctaaaaggtttgatgtaggcccaattctcaaacaagaaactgttcctgtgccacccaagagcactgcaaaggaattggaagcagtgttgtcaagactgggtgccaacatgctcatttcagttttgaaaaatttgcctgaaagtctgagcaatggaaggcagcagccaatggagggggcgacttacgcccctaagatttctgctggtaccagttgtataaaatgggaggaacaaacttcagaacaaatattcagactttacygtgccattggaaatataattccgttgcagacgctctggatggcgaataccattaaacttctggatttggtagaagttaacagttcagtccttgctgatccaaaattaacrggacaggctcttattccaggatcagtaatataccacaaacagtcacaaatactattggtttattgcaaggatggttggattggtgttcgatcagtgatgctcaagaaatcactaacagctactgacttctacaatggatatttgcacccctggtaccaraaaaattcccaagctcaaccaagccartgcagatttcagactctcagacttccaacaaagaagmagcagaaaaaaactgttgctatgcaacaatgcattgagtagttaggaagaagatggataaaaacctattacatatttgtaatttattaaaaaccttatttacaaggaattatctggacttttttttttttttttttttttgagacagagtctcactctgtcacccaggctggaatccagtggcactatctcagctcactgcaacctccgcctcccaggttcaagcaattctcctgcctcagcctcctgagtagctgggattacaggcacacgccaccacacgcagctaatttttgtatttttagtagagatggggtttcaccatgttgktcaggctggtctcgaactcctgaccttgtgatctgcccacctcagcctcccaaagtgctatgattacagacgtgagccaccgtgcctggcctggaattatctggactttcaaagaagatggcattattataagaagagaagattattgccgaaaagatggattgcctcactttccactttttatgtaacagtagttaaaaaacagcttyttttttacttgaattacaaaaaagtttaaataaaacttgtatttatgatacgaaactcaaggagattatctttccttaagaacaagggcaaccctaactggtgtatgtatgtacctacatacatactgagaagaggttttttgtttttatttttatttttttgagacggagtcttgttctgtggcccaggctggagtgcagtggcgtgatgtcagctcactgcaagctccacctcccgggttcacaccattctcctgcctcagcctcccaagtagctgggactacaggcgtcygccaccatgcctggctaatttttttttttgtatttttagtagagatggggtttcactgtgttagccaggatggtcttgatctcctgacctcgtgatccacccgccttggcctcccaaagtgctgggattacagctgtgagccaccgtgcctggccgagaagaggtttttttaaaaacagtgcatctatttaattttttaaaaatcgtgtcaccactgacattttaggagtattgaatctgcattttttatttcctataagtagtaaatccagctctttacatttcactaccagctagatttaaccaagtagtaaacgtaggtaatatttaataatctctgccacattgatctgtactataaattaacattttacatccagattttatttttttttattaatttttttagagatggggtcttgctctctcacacagtctggagtccagtggcgtgaaacactgcttactgcatcttcaacctcctgggcttaagtgatcctccagcctcagcctcccaaagtggggccaccacgcctggctaattttcttttttagtttttaaaaaaaattttgtagagataggggtctcactatgttgcttaggctggtcttgaactcctgggcccaagcaatcctcctgccttggcctctcaaagtgctgggattacaagcatgaaccactgcacccggcccaggttttcttgaagtaggaacgtgctaacatttttcaacttacttgtgcaataaaggttattgagc

SEQ ID NO: 4831 - DNA, 2903 bp, Homo sapiens
tgcgcagggccggccgccggcggccgaggcgatgagggtgttggygcggcgctgttggggtcctccgctggctcatggcgccaggcgtgggaggccgagtccccagtggcgagcactggcccgactcggctgggaggactgccgggactccagagtccgcgagaagcctccctggcgggtgctcttcttcggcacggaccagttcgcccgcgaggcgctgcgggcgctgcacgccgccaggtacccgggccagggatccggggacccggccgctgaaggcctccaggccgcgcccgggcggccggccccgagggttttggacttctggttgcggaaagcatgggcggcagagcggtgtgggcccagatctcggcgtcttctggctcccagaagggaaaacaaagaagaagagttaatcgacaaactggaggtggtcacaatgccttccccatcaccaaaaggactgccagtgaagcaatatgctgtgcagtctcagcttcccgtatatgagtggccggatgtgggatctggagaatatgatgttggagtagtggcttcgtttggccgacttttgaatgaggctcttattcttaaatttccctatggcatattgaatgttcatcccagttgcctcccgagatggcgtggcccagcccctgtaatccatacagtgcttcacggagacacagttactggagtaacaattatgcaaattagacctaaaaggtttgatgtaggcccaattctcaaacaagaaactgttcctgtgccacccaagagcactgcaaaggaattggaagcagtgttgtcaagactgggtgccaacatgctcatttcagttttgaaaaatttgcctgaaagtctgagcaatggaaggcagcagccaatggagggggcgacttacgcccctaagatttctgctggtaccagttgtataaaatgggaggaacaaacttcagaacaaatattcagactttacygtgccattggaaatataattccgttgcagacgctctggatggcgaataccattaaacttctggatttggtagaagttaacagttcagtccttgctgatccaaaattaacrggacaggctcttattccaggatcagtaatataccacaaacagtcacaaatactattggtttattgcaaggatggttggattggtgttcgatcagtgatgctcaagaaatcactaacagctactgacttctacaatggatatttgcacccctggtaccaraaaaattcccaagctcaaccaagccartgcagatttcagactctcagacttccaacaaagaagmagcagaaaaaaactgttgctatgcaacaatgcattgagtagttaggaagaagatggataaaaacctattacatatttgtaatttattaaaaaccttatttacaaggaattatctggacttttttttttttttttttttttgagacagagtctcactctgtcacccaggctggaatccagtggcactatctcagctcactgcaacctccgcctcccaggttcaagcaattctcctgcctcagcctcctgagtagctgggattacaggcacacgccaccacacgcagctaatttttgtatttttagtagagatggggtttcaccatgttgktcaggctggtctcgaactcctgaccttgtgatctgcccacctcagcctcccaaagtgctatgattacagacgtgagccaccgtgcctggcctggaattatctggactttcaaagaagatggcattattataagaagagaagattattgccgaaaagatggattgcctcactttccactttttatgtaacagtagttaaaaaacagcttyttttttacttgaattacaaaaaagtttaaataaaacttgtatttatgatacgaaactcaaggagattatctttccttaagaacaagggcaaccctaactggtgtatgtatgtacctacatacatactgagaagaggttttttgtttttatttttatttttttgagacggagtcttgttctgtggcccaggctggagtgcagtggcgtgatgtcagctcactgcaagctccacctcccgggttcacaccattctcctgcctcagcctcccaagtagctgggactacaggcgtcygccaccatgcctggctaatttttttttttgtatttttagtagagatggggtttcactgtgttagccaggatggtcttgatctcctgacctcgtgatccacccgccttggcctcccaaagtgctgggattacagctgtgagccaccgtgcctggccgagaagaggtttttttaaaaacagtgcatctatttaattttttaaaaatcgtgtcaccactgacattttaggagtattgaatctgcattttttatttcctataagtagtaaatccagctctttacatttcactaccagctagatttaaccaagtagtaaacgtaggtaatatttaataatctctgccacattgatctgtactataaattaacattttacatccagattttatttttttttattaatttttttagagatggggtcttgctctctcacacagtctggagtccagtggcgtgaaacactgcttactgcatcttcaacctcctgggcttaagtgatcctccagcctcagcctcccaaagtggggccaccacgcctggctaattttcttttttagtttttaaaaaaaattttgtagagataggggtctcactatgttgcttaggctggtcttgaactcctgggcccaagcaatcctcctgccttggcctctcaaagtgctgggattacaagcatgaaccactgcacccggcccaggttttcttgaagtaggaacgtgctaacatttttcaacttacttgtgcaataaaggttattgagc

SEQ ID NO: 4832 - DNA, 1081 bp, Homo sapiens
ggcgcgtcactgcgcaggcgcggcccgsgagcgtggggtatctcgaggtgccgggttgcaggcgctcaggagcgctagggtttgaggcctgctttctgctcgcgccagcagagcactacctgaggcagcgaggcgcagcgagcctagcctccccgcgccctgggcagtgtggccatggagaatcaggtgttgacgccgcatgtctactgggctcagcgacaccgcgagctatatctgcgcgtggagctgagtgacgtacagaaccctgccatcagcatcactgaaaacgtgctgcatttcaaagctcaaggacatggtgccaaaggagacaatgtctatraatttcacctggagttcttagaccttgtgaaaccagagcctgtttacaaactgacccagaggcaggtaaacattacagtacagaagaaagtgagtcagtggtgggagagactcacaaagcaggaaaagcgaccactgtttttggctcctgactttgatcgttggctggatgaatctgatgcggaaatggagctcagagctaaggaagaagagcgcctaaataaactccgactggaaagcgaaggctctcctgaaactcttacaaacttaaggaaaggatacctgtttatgtataatcttgtgcaattcttgggattctcctggatctttgtcaacctgactgtgcgattctgtatcttgggaaaaggcaatccttttatgacacattccatactgtggctgacatgatgtatttctgccagatgctggcagttgtggaaactatcaatgcagcaattggagtcactacrtcaccggtgctgccttctctgatccaggtggctcacgcctgtaatcccagcactttgggaggccgaggcgagcggattacctgtggtcaggagttcaagaccagcctggccaacatggtgaaaccccgtctctactaaaaatacaaaaattagccgggcatggtggcacacacctgtaatcccagctactgaggtcaaggctgcagtgagccaagactgtgccactgcacttcagcctgggtgacagagtgagaccctgtctcaaaaaataa

SEQ ID NO: 4833 - DNA, 839 bp, Homo sapiens
ggcgcgtcactgcgcaggcgcggcccgsgagcgtggggtatctcgaggtgccgggttgcaggcgctcaggagcgctagggtttgaggcctgctttctgctcgcgccagcagagcactacctgaggcagcgaggcgcagcgagcctagcctccccgcgccctgggcagtgtggccatggagaatcaggtgttgacgccgcatgtctactgggctcagcgacaccgcgagctatatctgcgcgtggagctgagtgacgtacagaaccctgccatcagcatcactgaaaacgtgctgcatttcaaagctcaaggacatggtgccaaaggagacaatgtctatraatttcacctggagttcttagaccttgtgaaaccagagcctgtttacaaactgacccagaggcaggtaaacattacagtacagaagaaagtgagtcagtggtgggagagactcacaaagcaggaaaagcgaccactgtttttggctcctgactttgatcgttggctggatgaatctgatgcggaaatggagctcagagctaaggaagaagagcgcctaaataaactccgactggaaagcgaaggctctcctgaaactcttacaaacttaaggaaaggatacctgtttatgtataatcttgtgcaattcttgggattctcctggatctttgtcaacctgactgtgcgattctgtatcttgggaaaaagtccttttatgacacattccatactgtggctgacatgatgtatttctgccagatgctggcagttgtggaaactatcaatgcagcaattggagtcactacrtcaccggtgctgccttctctgatccaggtattg

SEQ ID NO: 4834 - DNA, 1363 bp, Homo sapiens
tcacgcctgtaatcccagcactttgggaggctgaggtgggcggatcacaaggtcaggagtttgagaccagcctggccaacatggtgaaactccatctctactaaaaatmcaaaaaaaaaaaagctaagaatattgtacacaaagattcttgacgttcttgaggaaatccctaaaaatgcagcatatagaaagtatacagaacagattacaaatgagaagctggctatggttaaagcggaaccagatgttaaaaaattagaagaccaacttcaaggcagtcaattagaagaggtgattctttaggctgaacatgaactaaatctggcaagaaaaatgagggagtggaaaccatgggcgccattagtggaagagcctcctgccgatcagtggaaatggccaatataattattaagtgactttggtgtgttgatgggaaactgatgtaattaaatattctgctatatcgagggcgtgttcatattactgacattttataatcaagaaaagtgatatagaaaatatgtaggagagtgttaaaattggtgattatggtaatatggtcatgtgaatccatttttgatttataaagtattcacacaggttatttcaaagatgatatttctatgaacagagaggtcatgggaagatttgaaaattattaaagaaaaattcctacagatcttcaatgcagagaccataatcaaaaagtaaagtttctttagtagtatgttcaatacatcatttaatttttcaagttatctggaagaagaaaaggtccttaactattatagtctaaacaaatttatagatcactgtttgaggtaaataatatgagtgaatattttcaaatgtgataaaatagcacaagtggckggtgataaaatttgaaattatggttaacctcagctgtgatcttatgtatgtaaagcaaaatttaaatatataattataggttgattacaaaatccataatgtcattttattttagtcattatttgaattataccatttactctgttttctgatagttttaattttattatattttgttgttactatattatatttgaaaaccttcaaattagaatacattgtacagttgaagaaattgacttggtacttaaaagaaagatttcccattgcacagaggttaytggagaaatttttccttttgttgcatttgtggaagttagttttctggaccgtggcctttaattttcttaacctaattacatcaggatagaggtagagtttctgtaaaagagacattaagagttcctgaaatttatatctggcatacggataggcttatattcaaaacatcttagtcatacgactataaattaaaagcggaatcactaaa

SEQ ID NO: 4835 - DNA, 1336 bp, Homo sapiens
tgtgttgatcgaatcgttggcgctgtcagggagggtgtgctgaagaagaccactggccttgtgggattggctgtgtgcaatactccacatgagaggctaagaatattgtacacaaagattcttgacgttcttgaggaaatccctaaaaatgcagcatatagaaagtatacagaacagattacaaatgagaagctggctatggttaaagcggaaccagatgttaaaaaattagaagaccaacttcaaggcagtcaattagaagaggtgattctttaggctgaacatgaactaaatctggcaagaaaaatgagggagtggaaaccatgggcgccattagtggaagagcctcctgccgatcagtggaaatggccaatataattattaagtgactttggtgtgttgatgggaaactgatgtaattaaatattctgctatatcgagggcgtgttcatattactgacattttataatcaagaaaagtgatatagaaaatatgtaggagagtgttaaaattggtgattatggtaatatggtcatgtgaatccatttttgatttataaagtattcacacaggttatttcaaagatgatatttctatgaacagagaggtcatgggaagatttgaaaattattaaagaaaaattcctacagatcttcaatgcagagaccataatcaaaaagtaaagtttctttagtagtatgttcaatacatcatttaatttttcaagttatctggaagaagaaaaggtccttaactattatagtctaaacaaatttatagatcactgtttgaggtaaataatatgagtgaatattttcaaatgtgataaaatagcacaagtggckggtgataaaatttgaaattatggttaacctcagctgtgatcttatgtatgtaaagcaaaatttaaatatataattataggttgattacaaaatccataatgtcattttattttagtcattatttgaattataccatttactctgttttctgatagttttaattttattatattttgttgttactatattatatttgaaaaccttcaaattagaatacattgtacagttgaagaaattgacttggtacttaaaagaaagatttcccattgcacagaggttaytggagaaatttttccttttgttgcatttgtggaagttagttttctggaccgtggcctttaattttcttaacctaattacatcaggatagaggtagagtttctgtaaaagagacattaagagttcctgaaatttatatctggcatacggataggcttatattcaaaacatcttagtcatacgactataaattaaaagcggaatcactaaa

SEQ ID NO: 4836 - DNA, 4381 bp, Homo sapiens
tttcaaatcagggaagcgcctcttcatcctcgactgtccagtgccgccgaagaaaaagtgcctgtgatccgaccccggaggaggtccagctgcgtgtcgttaggagaaactgcagccagttactatggcagttgcaaaatattcaggagaccgtcgttgccttgtatttccagagaacagttttatagatggtatggaaaaaggtacagaattgtcagatgattctttgggattgggacttaaaacaatggtataagcctcattatcaaaattctggaggtggaaatggagttgatctttcagtgctaaatgaggctcgcaatatggtgtcagatcttctgactgatccaagccttccaccacaagtcatttcctctctacggagtattagtagcttaatgggtgctttctcaggttcctgtaggccaaagattaatcctctcacaccatttcctggattttacccctgttctgaaatagaggacccagctgagaaaggggatagaaaacttaacaagggactaaataggaatagtttgccaactccacagctgaggagaagctcaggaacttcaggattgctacctgttgaacagtcttcaaggtgggatcgtaataatggcaaaagrcctcaccaagaatttggcatttcaagtcaaggatgctatctaaatgggccttttaattcaaatctactgactatcccgaagcaaaggtcatcttctgtatcactgactcaccatgtaggtctcagaagagctggtgttttgtccagtctgagtcctgtgaattcttccaaccatggaccagtgtctactggctctctaactaatcgatcacccatagaatttcctgatactgctgattttcttaataagccaagcgttatcttgcagagatctctgggcaatgcacctaatactccagatttttatcagcaacttagaaattctgatagcaatctgtgtaacagctgtggacatcaaatgctgaaatatgtttcaacatctgaatcagatggtacagattgctgcagtggaaaatcaggtgaagaagaaaacattttctcgaaagaatcattcaaacttatggaaactcaacaagaagaggaaacagagaagaaagacagcagaaaattatttcaggaaggtgataagtggctaacagaagaggcacagagtgaacagcaaacaaatattgaacaggaagtatcactggacctgattttagtagaagagtatgactcattaatagaaaagatgagcaactggaattttccaatttttgaacttgtagaaaagatgggagagaaatcaggaaggattctcagtcaggttatgtataccttatttcaagacactggtttattggaaatatttaaaattcccactcaacaatttatgaactattttcgtgcattagaaaatggctatcgagacattccttatcacaatcgtatacatgccacagatgtgctacatgcagtttggtatctgacaacacggccagttcctggcttacagcagatccacaatggttgtggaacaggaaatgaaacagattctgatggtagaattaaccatgggcgaattgcttatatttcttcgaagagctgctctaatcctgatgagagttatggctgcctgtcttcaaacattcctgcattagaattgatggctctatacgtggcagctgccatgcatgattatgatcacccagggaggacaaatgcatttctagtggctacaaatgcccctcaggcagttttatacaatgacagatctgttctggaaaatcatcatgctgcgtcagcttggaatctatatctttctcgcccagaatacaacttccttcttcatcttgatcatgtggaattcaagcgctttcgttttttagtcattgaagcaatccttgctacggatcttaaaaagcattttgattttctcgcagaattcaatgccaaggcaaatgatgtaaatagtaatggcatagaatggagtaatgaaaatgatcgcctcttggtatgccaggtgtgcatcaaactggcagatataaatggcccagcaaaagttcgagacttgcatttgaaatggacagaaggcattgtcaatgaattttatgagcagggagatgaagaagcaaatcttggtctgcccatcagtccattcatggatcgttcttctcctcaactagcaaaactccaagaatcttttatcacccacatagtgggtcccctgtgtaactcctatgatgctgctggtttgctaccaggtcagtggttagaagcagaagaggataatgatactgaaagtggtgatgatgaagacggtgaagaattagatacagaagatgaagaaatggaaaacaatctaaatccaaaaccaccaagaaggaaaagcagacggcgaatattttgtcagctaatgcaccacctcactgaaaaccacaagatatggaaggaaatcgtagaggaagaagaaaaatgtaaagctgatgggaataaactgcaggtgsagaattcctccttacctcaagcagatgagattcaggtaattgaagaggcagatgaagaggaatagcgacagtttgagtaaaagaaaagtcatattgaagaagcccagagggttgtgcccaggggcagaaatcattgcctagtgttcaccggctgactctcaactgaccattcccatgtggacaggccttaatactgtgagaggatccttgctctgctggcagtttcccactcctatgcactttcacaggaactagaaaactattcttaaaccaaaaataccatccgtgttgacccatgttgcagagcccttacttaaatccttcactggtgtatgaatactttgtcataatgctgctttgctgggtagtgagctcttatttttcactgggggtcagctataactaaaaactcaagtgacatatttcagttaccaaagtggccaggaactttttgcttttatgaaaatagattcatattgtatttcccagtgtgtcttttatgtctttgaatgttwtggagaaaagtctatgcctgtctaaaaatgaatccagtgttgcctttctgagggatttctgctcaatgcaatacactgttcagtgctattctcccagctaggtttatccatgaaggactgagtgacctttgttgtatttaacaaaatccaggtgcatcaatttctgatgctttttactattgtgtattatctactatgtgtgttttatttctgctgagagtattcaggtttgccatggacatcagaagtttgaattccagtcttatcttatgttccatggctgaattttaaagctgtttaggtttaacaatgaagggatttattctttagtcaaaattgttgtttttactctagctcaggattcgtatttttaaagatttagttaatatraacacagcacagatttgtyagaagaaaaaaaatttgctgtaataccaaaactaacctcatcaaagatacagaaaaaaagaaatatagtgagccctaaaggacacatacattgaataaataattggaacatgtggttatctttagatccacatcttagctgtcatttgttcactctaaaactgatgttcatctttctgttaatttccctctgcctaaagactacatgacagaaatgacctatcactacttattatttctgaagcctaactgcaagactgatttctgagaacaagtaaagaactggaatacttatttttcatataaaaatctaaatgtgttaataaatcatttcatacaaaagtacattattaaataaccacattattaaaataattgcaagaaaatggaccatatttacaatgttttgtaaacttgctagtgtgtggatatgtaccctacttgtgaaatacatttgaagatataaagagcagccaaaatgatggcaaaatggtaggctaatattttctattattattggagaacatatcatattttggaatcatgcaattttgcacacagtgaaaccattaattttccaaggtaattcctttagaatatggtattggcatgcagtttcttacttatctagaatatttggcttatctgaaagatatcaatttaagatctctggaagtgttagaatttttgatccttcacagtgtcaatatttaatgaatcactaagctttatttattagacgtgttgagtgagtgctgagttccttgctgccacttttgttaccattgtcacacactatgtgtaaaccagtcccaccasttattactaataaaattttgactgataatttatatttgcacttacaatatatatatcctgtccttatatttctctagagtacattttccatcatgtttaagtgtatttctgctattatttcctct

SEQ ID NO: 4837 - DNA, 5141 bp, Homo sapiens
atgaggagggacgagcgagacgccaaagccatgcggtccctgcagccgccggatggggccggctcgccccccgagagtctgaggaacggctacgtgaagagctgcgtgagccccttgcggcaggaccctccgcgcggcttcttcttccacctctgccgcttctgcaacgtggagctgcggccgccgccggcctctccccagcagccgcggcgctgctcccccttctgccgggcgcgcctctcgctgggcgccctggctgyctttgtcctcgccctgctgctgggcgcggaacccgagagctgggctgccggggccgcctggctgcggacgctgctgagcgtgtgttcgcacagcttgagccccctcttcagcatcgcctgtgccttcttcttcctcacctgcttcctcacccggaccaagcggggacccggcccgggccggagctgcggctcctggtggctgctggcgctgcccgcctgctgttacctgggggacttcttggtgtggcagtggtggtcttggccttggggggatggcgacgcagggtccgcggccccgcacacgcccccggaggcggcagcgggcaggttgctgctggtgctgagctgcgtagggctgctgctgacgctcgcgcacccgctgcggctccggcactgcgttctggtgctgctcctggccagcttcgtctggtgggtctccttcaccagcctcgggtcgctgccctccgccctcaggccgctgctctccggcctggtggggggcgctggctgcctgctggccctggggttggatcacttctttcaaatcagggaagcgcctcttcatcctcgactgtccagtgccgccgaagaaaaagtgcctgtgatccgaccccggaggaggtccagctgcgtgtcgttaggagaaactgcagccagttactatggcagttgcaaaatattcaggagaccgtcgttgccttgtatttccagagaacagatgattctttgggattgggacttaaaacaatggtataagcctcattatcaaaattctggaggtggaaatggagttgatctttcagtgctaaatgaggctcgcaatatggtgtcagatcttctgactgatccaagccttccaccacaagtcatttcctctctacggagtattagtagcttaatgggtgctttctcaggttcctgtaggccaaagattaatcctctcacaccatttcctggattttacccctgttctgaaatagaggacccagctgagaaaggggatagaaaacttaacaagggactaaataggaatagtttgccaactccacagctgaggagaagctcaggaacttcaggattgctacctgttgaacagtcttcaaggtgggatcgtaataatggcaaaagrcctcaccaagaatttggcatttcaagtcaaggatgctatctaaatgggccttttaattcaaatctactgactatcccgaagcaaaggtcatcttctgtatcactgactcaccatgtaggtctcagaagagctggtgttttgtccagtctgagtcctgtgaattcttccaaccatggaccagtgtctactggctctctaactaatcgatcacccatagaatttcctgatactgctgattttcttaataagccaagcgttatcttgcagagatctctgggcaatgcacctaatactccagatttttatcagcaacttagaaattctgatagcaatctgtgtaacagctgtggacatcaaatgctgaaatatgtttcaacatctgaatcagatggtacagattgctgcagtggaaaatcaggtgaagaagaaaacattttctcgaaagaatcattcaaacttatggaaactcaacaagaagaggaaacagagaagaaagacagcagaaaattatttcaggaaggtgataagtggctaacagaagaggcacagagtgaacagcaaacaaatattgaacaggaagtatcactggacctgattttagtagaagagtatgactcattaatagaaaagatgagcaactggaattttccaatttttgaacttgtagaaaagatgggagagaaatcaggaaggattctcagtcaggttatgtataccttatttcaagacactggtttattggaaatatttaaaattcccactcaacaatttatgaactattttcgtgcattagaaaatggctatcgagacattccttatcacaatcgtatacatgccacagatgtgctacatgcagtttggtatctgacaacacggccagttcctggcttacagcagatccacaatggttgtggaacaggaaatgaaacagattctgatggtagaattaaccatgggcgaattgcttatatttcttcgaagagctgctctaatcctgatgagagttatggctgcctgtcttcaaacattcctgcattagaattgatggctctatacgtggcagctgccatgcatgattatgatcacccagggaggacaaatgcatttctagtggctacaaatgcccctcaggcagttttatacaatgacagatctgttctggaaaatcatcatgctgcgtcagcttggaatctatatctttctcgcccagaatacaacttccttcttcatcttgatcatgtggaattcaagcgctttcgttttttagtcattgaagcaatccttgctacggatcttaaaaagcattttgattttctcgcagaattcaatgccaaggcaaatgatgtaaatagtaatggcatagaatggagtaatgaaaatgatcgcctcttggtatgccaggtgtgcatcaaactggcagatataaatggcccagcaaaagttcgagacttgcatttgaaatggacagaaggcattgtcaatgaattttatgagcagggagatgaagaagcaaatcttggtctgcccatcagtccattcatggatcgttcttctcctcaactagcaaaactccaagaatcttttatcacccacatagtgggtcccctgtgtaactcctatgatgctgctggtttgctaccaggtcagtggttagaagcagaagaggataatgatactgaaagtggtgatgatgaagacggtgaagaattagatacagaagatgaagaaatggaaaacaatctaaatccaaaaccaccaagaaggaaaagcagacggcgaatattttgtcagctaatgcaccacctcactgaaaaccacaagatatggaaggaaatcgtagaggaagaagaaaaatgtaaagctgatgggaataaactgcaggtgsagaattcctccttacctcaagcagatgagattcaggtaattgaagaggcagatgaagaggaatagcgacagtttgagtaaaagaaaagtcatattgaagaagcccagagggttgtgcccaggggcagaaatcattgcctagtgttcaccggctgactctcaactgaccattcccatgtggacaggccttaatactgtgagaggatccttgctctgctggcagtttcccactcctatgcactttcacaggaactagaaaactattcttaaaccaaaaataccatccgtgttgacccatgttgcagagcccttacttaaatccttcactggtgtatgaatactttgtcataatgctgctttgctgggtagtgagctcttatttttcactgggggtcagctataactaaaaactcaagtgacatatttcagttaccaaagtggccaggaactttttgcttttatgaaaatagattcatattgtatttcccagtgtgtcttttatgtctttgaatgttwtggagaaaagtctatgcctgtctaaaaatgaatccagtgttgcctttctgagggatttctgctcaatgcaatacactgttcagtgctattctcccagctaggtttatccatgaaggactgagtgacctttgttgtatttaacaaaatccaggtgcatcaatttctgatgctttttactattgtgtattatctactatgtgtgttttatttctgctgagagtattcaggtttgccatggacatcagaagtttgaattccagtcttatcttatgttccatggctgaattttaaagctgtttaggtttaacaatgaagggatttattctttagtcaaaattgttgtttttactctagctcaggattcgtatttttaaagatttagttaatatraacacagcacagatttgtyagaagaaaaaaaatttgctgtaataccaaaactaacctcatcaaagatacagaaaaaaagaaatatagtgagccctaaaggacacatacattgaataaataattggaacatgtggttatctttagatccacatcttagctgtcatttgttcactctaaaactgatgttcatctttctgttaatttccctctgcctaaagactacatgacagaaatgacctatcactacttattatttctgaagcctaactgcaagactgatttctgagaacaagtaaagaactggaatacttatttttcatataaaaatctaaatgtgttaataaatcatttcatacaaaagtacattattaaataaccacattattaaaataattgcaagaaaatggaccatatttacaatgttttgtaaacttgctagtgtgtggatatgtaccctacttgtgaaatacatttgaagatataaagagcagccaaaatgatggcaaaatggtaggctaatattttctattattattggagaacatatcatattttggaatcatgcaattttgcacacagtgaaaccattaattttccaaggtaattcctttagaatatggtattggcatgcagtttcttacttatctagaatatttggcttatctgaaagatatcaatttaagatctctggaagtgttagaatttttgatccttcacagtgtcaatatttaatgaatcactaagctttatttattagacgtgttgagtgagtgctgagttccttgctgccacttttgttaccattgtcacacactatgtgtaaaccagtcccaccasttattactaataaaattttgactgataatttatatttgcacttacaatatatatatcctgtccttatatttctctagagtacattttccatcatgtttaagtgtatttctgctattatttcctct

SEQ ID NO: 4838 - DNA, 1693 bp, Homo sapiens
gtgggccacgccttccgggccccgcggctggccggctcctcgcgycstcccctcwctcggccgctcttcgggccgcctctgcgtgtggggccgcccgcgccagtgtgagcctgagctgacggcggctccgggaggctcgcagaaggggagggccgggcggcgcgggagctgagcatcgccagggcgggcggcagggcgcggcctctccgccgggtgtaccacctgtcgcggcgcgagacctctggtgaaagaaaagatgttgtcccggttaagagtagtttccaccacttgtactttggcatgtcgacatttgcacataaaagaaaaaggcaagccacttatgctgaacccaagaacaaacaagggaatggcatttactttacaagaacgacaaatgcttggtcttcaaggacttctacctcccaaaatagagacacaagatattcaagccttacgatttcatagaaacttgaagaaaatgactagccctttggaaaaatatatctacataatgggaatacaagaaagaaatgagaaattgttttatagaatactgcaagatgacattgagagtttaatgccaattgtatatacaccgacggttggtcttgcctgctcccagtatggacacatctttagaagacctaagggattatttatttcgatctcagacagaggtcatgttagatcaattgtggataactggccagaaaatcatgttaaggctgttgtagtgactgatggagagagaattctgggtcttggagatctgggtgtctatggaatgggaattccagtaggaaaactttgtttgtatacagcttgtgcaggaatacggcctgatagatgcctgccagtgtgtattgatgtgggaactgataatatcgcactcttaaaagacccattttacatgggcttgtaccagaaacgagatcgcacacaacagtatgatgacctgattgatgagtttatgaaagctattactgacagatatggccggaacacactcattcagttcgaagactttggaaatcataatgcattcaggttcttgagaaagtaccgagaaaaatattgtactttcaatgatgatattcaagggacagctgcagtagctctagcaggtcttcttgcagcacaaaaagttattagtaaaccaatctccgaacacaaaatcttattccttggagcaggagaggctgctcttggaattgcaaatcttatagttatgtctatggtagaaaatggcctgtcagaacaagaggcacaaaagaaaatctggatgtttgacaagtatggtttattagttaagggacggaaagcaaaaatagatagttatcaggaaccatttactcactcagccccagagagcatacctgatacttttgaagatgcagtgaatatactgaagccttcaactataattggagttgcaggtgctggccgtcttttcactcctgatgtaatcagagccatggcctctatcaatgaaaggcctgtaatatttgcattaagtaatcctacagcacaggcagagtgcacggctgaagaagcatatacacttacagagggcaggtgtttgtttgccagtggcagtccatttgrgccagtgaaacttacagatgggcgagtctttacaccaggtcaaggaaacaatgtttatatttttccaggttacagaatacctatatgc

SEQ ID NO: 4839 - DNA, 3206 bp, Homo sapiens
gtgggccacgccttccgggccccgcggctggccggctcctcgcgycstcccctcwctcggccgctcttcgggccgcctctgcgtgtggggccgcccgcgccagtgtgagcctgagctgacggcggctccgggaggctcgcagaaggggagggccgggcggcgcgggagctgagcatcgccagggcgggcggcagggcgcggcctctccgccgggtgtaccacctgtcgcggcgcgagacctctggtgaaagaaaagatgttgtcccggttaagagtagtttccaccacttgtactttggcatgtcgacatttgcacataaaagaaaaaggcaagccacttatgctgaacccaagaacaaacaagggaatggcatttactttacaagaacgacaaatgcttggtcttcaaggacttctacctcccaaaatagagacacaagatattcaagccttacgatttcatagaaacttgaagaaaatgactagccctttggaaaaatatatctacataatgggaatacaagaaagaaatgagaaattgttttatagaatactgcaagatgacattgagagtttaatgccaattgtatatacaccgacggttggtcttgcctgctcccagtatggacacatctttagaagacctaagggattatttatttcgatctcagacagaggtcatgttagatcaattgtggataactggccagaaaatcatgttaaggctgttgtagtgactgatggagagagaattctgggtcttggagatctgggtgtctatggaatgggaattccagtaggaaaactttgtttgtatacagcttgtgcaggaatacggcctgatagatgcctgccagtgtgtattgatgtgggaactgataatatcgcactcttaaaagacccattttacatgggcttgtaccagaaacgagatcgcacacaacagtatgatgacctgattgatgagtttatgaaagctattactgacagatatggccggaacacactcattcagttcgaagactttggaaatcataatgcattcaggttcttgagaaagtaccgagaaaaatattgtactttcaatgatgatattcaagggacagctgcagtagctctagcaggtcttcttgcagcacaaaaagttattagtaaaccaatctccgaacacaaaatcttattccttggagcaggagaggctgctcttggaattgcaaatcttatagttatgtctatggtagaaaatggcctgtcagaacaagaggcacaaaagaaaatctggatgtttgacaagtatggtttattagttaagggacggaaagcaaaaatagatagttatcaggaaccatttactcactcagccccagagagcatacctgatacttttgaagatgcagtgaatatactgaagccttcaactataattggagttgcaggtgctggccgtcttttcactcctgatgtaatcagagccatggcctctatcaatgaaaggcctgtaatatttgcattaagtaatcctacagcacaggcagagtgcacggctgaagaagcatatacacttacagagggcaggtgtttgtttgccagtggcagtccatttgrgccagtgaaacttacagatgggcgagtctttacaccaggtcaaggaaacaatgtttatatttttccaggtgtggctttagctgttattctctgtaacacccggcatattagtgacagtgttttcctagaagctgcaaaggccctgacaagccaattgacagatgaagagctagcccaagggagactttacccaccgcttgctaatattcaggaagtttctattaacattgctattaaagttacagaatacctatatgctaataaaatggctttccgatacccagaacctgaagacaaggccaaatatgttaaagaaagaacatggcggagtgaatatgattccctgctgccagatgtgtatgaatggccagaatctgcatcaagccctcctgtgataacagaatagaagcactcccctgataaatactttctgtgctccagggaacccyttttttcagacaagaagagataatgtcttcagttttatggtgttttctgtgttttgttctccctgaccactttggttgatgtattttttccatgcrtctccacatctgttggggtagacgtgttgattgattgcattgcccaccagcaccctacartcagatagttgtgatgctttaattctaacatacagcccgtaccacatccaggagatgtaaaaagtgtgtttgtgaatgtcttcacttgtactctaattcagacttgccaaagtatttgctatttactattatgggtaatactcttctctggcctagttcttacagagctactaaaatagaaatttacttttatggatagaagtacagaattttgagaagaaactaaattttcmccaaattttaaggaaaaattgtcattatctaaaaatgttcttatatatctgcttcatcttaccttcatactctgaaattccctatagcagacagagctagggaaatattaaaaatttaccctatttattttctggaactaaatcaagccttaactataacattatgagagtaatgggaactactgctggctttaagtaaataaaagtcattgttttcaacagtgtataaaaatcatagtgtaacctttttatttaataaatatcttacatttaattgcttcagttatgctatcttattgcccaactagaaatttagatttgcttatgaaaaacacatatttttgttacttctagatgattctaggagggagtataagatacctaatcatatgggaacatcacgtgactttttaaatctaaattagtcatgcttcacatcaaaatgagtcatatttaactggagaaactatgcccttattccagaactgatgctctttattgcttgagataattttggaatgttactatgatactgtttctttgaatatcattagtagtgacaactctttctccattgaaggcagacttaatttttttaaaccaccaacattaatttagagctaaatggggatgaataaggttggtgttcatctgggaaatgccttttttaatcccagtaaaatgggtaataatggctatccagaacagttttcttgtgtggcttgcatattgaagaattctaaaggaaaatatatctgcctac

SEQ ID NO: 4840 - DNA, 3059 bp, Homo sapiens
gtgggccacgccttccgggccccgcggctggccggctcctcgcgycstcccctcwctcggccgctcttcgggccgcctctgcgtgtggggccgcccgcgccagtgtgagcctgagctgacggcggctccgggaggctcgcagaaggggagggccgggcggcgcgggagctgagcatcgccagggcgggcggcagggcgcggcctctccgccgggtgtaccacctgtcgcggcgcgagacctctggtgaaagaaaagatgttgtcccggttaagagtagtttccaccacttgtactttggcatgtcgacatttgcacataaaagaaaaaggcaagccacttatgctgaacccaagaacaaacaagggaatggcatttactttacaagaacgacaaatgcttggtcttcaaggacttctacctcccaaaatagagacacaagatattcaagccttacgatttcatagaaacttgaagaaaatgactagccctttggaaaaatatatctacataatgggaatacaagaaagaaatgagaaattgttttatagaatactgcaagatgacattgagagtttaatgccaattgtatatacaccgacggttggtcttgcctgctcccagtatggacacatctttagaagacctaagctgttgtagtgactgatggagagagaattctgggtcttggagatctgggtgtctatggaatgggaattccagtaggaaaactttgtttgtatacagcttgtgcaggaatacggcctgatagatgcctgccagtgtgtattgatgtgggaactgataatatcgcactcttaaaagacccattttacatgggcttgtaccagaaacgagatcgcacacaacagtatgatgacctgattgatgagtttatgaaagctattactgacagatatggccggaacacactcattcagttcgaagactttggaaatcataatgcattcaggttcttgagaaagtaccgagaaaaatattgtactttcaatgatgatattcaagggacagctgcagtagctctagcaggtcttcttgcagcacaaaaagttattagtaaaccaatctccgaacacaaaatcttattccttggagcaggagaggctgctcttggaattgcaaatcttatagttatgtctatggtagaaaatggcctgtcagaacaagaggcacaaaagaaaatctggatgtttgacaagtatggtttattagttaagggacggaaagcaaaaatagatagttatcaggaaccatttactcactcagccccagagagcatacctgatacttttgaagatgcagtgaatatactgaagccttcaactataattggagttgcaggtgctggccgtcttttcactcctgatgtaatcagagccatggcctctatcaatgaaaggcctgtaatatttgcattaagtaatcctacagcacaggcagagtgcacggctgaagaagcatatacacttacagagggcaggtgtttgtttgccagtggcagtccatttgrgccagtgaaacttacagatgggcgagtctttacaccaggtcaaggaaacaatgtttatatttttccaggccctgacaagccaattgacagatgaagagctagcccaagggagactttacccaccgcttgctaatattcaggaagtttctattaacattgctattaaagttacagaatacctatatgctaataaaatggctttccgatacccagaacctgaagacaaggccaaatatgttaaagaaagaacatggcggagtgaatatgattccctgctgccagatgtgtatgaatggccagaatctgcatcaagccctcctgtgataacagaatagaagcactcccctgataaatactttctgtgctccagggaacccyttttttcagacaagaagagataatgtcttcagttttatggtgttttctgtgttttgttctccctgaccactttggttgatgtattttttccatgcrtctccacatctgttggggtagacgtgttgattgattgcattgcccaccagcaccctacartcagatagttgtgatgctttaattctaacatacagcccgtaccacatccaggagatgtaaaaagtgtgtttgtgaatgtcttcacttgtactctaattcagacttgccaaagtatttgctatttactattatgggtaatactcttctctggcctagttcttacagagctactaaaatagaaatttacttttatggatagaagtacagaattttgagaagaaactaaattttcmccaaattttaaggaaaaattgtcattatctaaaaatgttcttatatatctgcttcatcttaccttcatactctgaaattccctatagcagacagagctagggaaatattaaaaatttaccctatttattttctggaactaaatcaagccttaactataacattatgagagtaatgggaactactgctggctttaagtaaataaaagtcattgttttcaacagtgtataaaaatcatagtgtaacctttttatttaataaatatcttacatttaattgcttcagttatgctatcttattgcccaactagaaatttagatttgcttatgaaaaacacatatttttgttacttctagatgattctaggagggagtataagatacctaatcatatgggaacatcacgtgactttttaaatctaaattagtcatgcttcacatcaaaatgagtcatatttaactggagaaactatgcccttattccagaactgatgctctttattgcttgagataattttggaatgttactatgatactgtttctttgaatatcattagtagtgacaactctttctccattgaaggcagacttaatttttttaaaccaccaacattaatttagagctaaatggggatgaataaggttggtgttcatctgggaaatgccttttttaatcccagtaaaatgggtaataatggctatccagaacagttttcttgtgtggcttgcatattgaagaattctaaaggaaaatatatctgcctac

SEQ ID NO: 4841 - DNA, 7066 bp, Homo sapiens
cgccaagcgcgcccgaggctcctacgctgccgcgcccggcttctctccagcgccccgcgccgttagccacgtggaccgactccggcgcgccgtcctcacgtggttccagtggagtttgcagtccttcccgcttctccgtactcgcccccgcctctgagctcccttcccatggcggccctagtgttggaggacgggtcggtcctgcggggccagccctttggggccgccgtgtcgactgccggggaagtggtgtttcaaaccggcatggtcggctaccccgaggccctcacygatccctcctacaaggcacagatcttagtgctcacctatcctctgatcggcaactatggcatccccccagatgaaatggatragttcggtctctgcaagtggtttgaatcctcgggcatccacgtagcagcactggtagtgggagagtgctgtcctactcccagccactggagtgccacccgcaccctgcatgagtggctgcagcagcatggcatccctggcttgcaaggagtagacactcgggagctgaccaagaagttgcgggaacaggggtctctgctggggaagctggtccagaatggaacagaaccttcatccctgccattcttggaccccaatgcccgccccctggtaccagaggtctccattaagactccacgggtattcaatacagggggtgcccctcggatccttgctttggactgtggcctcaagtataatcagatccgatgcctctgccagcgtggggctgaggtcactgtggtaccctgggaccatgcactrgacagccaagagtatgagggtctcttcttaagtaatgggcctggtgaccctgcctcctatcccagtgtcgtatccacactgagccgtgttttatctgagcctaatccccgacctgtctttgggatctgcctgggacaccagctattggccttagccattggggccaagacttacaagatgagatatgggaaccgaggccataaccagccctgcttgttggtgggctctgggcgctgctttctgacatcccagaaccatgggtttgctgtggagacagactcactgccagcagactgggctcctctcttcaccaacgccaatgatggttccaatgaaggcattgtgcacaacagcttgcctttcttcagtgtccagtttcacccagagcaccaagctggcccttcagatatggaactgcttttcgatatctttctggaaactgtgaaagaggccacagctgggaaccctgggggccagacagttagagagcggctgactgagcgcctctgtccccctgggattcccactcccggctctggacttccaccaccacgaaaggttctgatcctgggctcagggggcctctccattggccaagctggagaatttgactactcgggctctcaggcaattaargccctgaaggaggaaaacatccagacgttgctgatcaaccccaatattgccacagtgcagacctcccaggggctggccgacaaggtctattttcttcccataacacctcattatgtaacccaggtgatacgtaatgaacgccccgatggtgtgttactgacttttgggggccagactgctctgaactgtggtgtggagctgaccaaggccggggtgctggctcggtatggggtccgggtcctgggcacaccagtggagaccattgagctgaccgaggatcgacgggcctttgctgccagaatggcagagatcggagagcatgtggccccgagcgaggcagcaaattctcttgaacaggcccaggcagccgctgaacggctggggtaccctgtgctagtgcgtgcagcctttgccctgggtggcctgggctctggctttgcctctaacagggaggagctctctgctctcgtggccccagcttttgcccataccagccaagtgctagtagacaagtctctgaagggatggaaggagattgagtacgaggtggtgagagacgcctatggcaactgtgtcacggtgtgtaacatggagaacttggacccactgggcatccacactggtgagtccatagtggtggcccctagccagacactgaatgacagggagtatcagctcctgaggcagacagctatcaaggtgacccagcacctgggaattgttggggagtgcaatgtgcagtatgccttgaaccctgagtctgagcagtattacatcattgaagtgaatgccaggctctctcgcagctctgccctrgccagtaaggccacaggttatccactggcttatgtggcagccaagctagcattgggcatccctttgcctgagctcaggaactctgtgacagggggtacagcagcctttgaacccagcgtggattattgtgtggtgaagattcctcgatgggaccttagcaagttcctgcgagtcagcacaaagattgggagctgcatgaagagcgttggtgaagtcatgggcattgggcgttcatttgaggaggccttccagaaggccctgcgcatggtggatgagaactgtgtgggctttgatcacacagtgaaaccagtcagcgatatggagttggagactccaacagataagcggatttttgtggtggcagctgctttgtgggctggttattcagtggaccgcctgtatgagctcacacgcatcgaccgctggttcctgcaccgaatgaagcgtatcatcgcacatgcccagctgctagaacaacaccgtggacagcctttgccgccagacctgctgcaacaggccaagtgtcttggcttctcagacaaacagattgcccttgcagttctgagcacagagctggctgttcgcaagctgcgtcaggaactggggatctgtccagcagtgaaacagattgacacagttgcagctgagtggccagcccagacaaattacctatacctaacgtattggggcaccacccatgacctcacctttcgaacacctcatgtcctagtccttggctctggcgtctaccgtattggctctagcgttgaatttgactggtgtgctgtaggctgcatccagcagctccgaaagatgggatataagaccatcatggtgaactataacccagagacagtcagcaccgactatgacatgtgtgatcgactctactttgatgagatctcttttgaggtggtgatggacatctatgagctcgagaaccctgaaggtgtgatcctatccatgggtggacagctgcccaacaacatggccatggcgttgcatcggcagcagtgccgggtgctgggcacctcccctgaagccattgactcggctgagaaccgtttcaagttttcccggctccttgacaccattggtatcagccagcctcagtggagggagctcagtgacctcgagtctgctcgccaattctgccagaccgtggggtacccctgtgtggtgcgcccctcctatgtgctgagcggtgctgctatgaatgtggcctacacggatggagacctggagcgcttcctgagcagcgcagcagccgtctccaaagagcatcccgtggtcatctccaagttcatccaggaggctaaggagattgacgtggatgccgtggcctctgatggtgtggtggcagccatcgccatctctgagcatgtggagaatgcaggtgtgcattcaggtgatgcgacgctggtgacccccccacaagatatcactgccaaaaccctrgagcggatcaaagccattgtgcatgctgtgggccaggagctacaggtcacaggacccttcaatctgcagctcattgccaaggatgaccagctgaaagttattgaatgcaacgtacgtgtctctcgctccttccccttcgtttccaagacactgggtgtggacctagtagccttggccacgcgggtcatcatgggggaagaagtggaacctgtggggctaatgactggttctggagtcgtgggagtaaaggtgcctcagttctccttctcccgcttggcgggtgctgacgtggtgttgggtgtggaaatgaccagtactggggaggtggccggctttggggagagccgctgtgaggcatacctcaaggccatgctaagcactggctttaagatccccaagaagaatatcctgctgaccattggcagctataagaacaaaagcgagctgctcccaactgtgcggctactggagagcctgggctacagcctctatgccagtctcggcacagctgacttctacactgagcatggcgtcaaggtaacagctgtggactggcactttgaggaggctgtggatggtgagtgcccaccacagcggagcatcctggagcagctagctgagaaaaactttgagctggtgattaacctgtcaatgcgtggagctgggggccggcgtctctcytcctttgtcaccaagggctaccgcacccgacgcttggccgctgacttctccgtgcccctaatcatcgayatcaagtgcaccaaactctttgtggaggccctaggccagatcgggccagcccctcctttgaaggtgcatgttgactgtatgacctcccaaaagcttgtgcgactgccgggattgattgatgtccatgtgcacctgcgggaaccaggtgggacacataaggaggactttgcttcaggcacagccgctgccctggctgggggtatcaccatggtgtgtgccatgcctaatacccggccccccatcattgacgcccctgctctggccctggcccagaagctggcagaggctggcgcccggtgcgactttgcgctattccttggggcctcgtctgaaaatgcaggaaccttgggcaccgtggccgggtctgcagccgggctgaagctttacctcaatgagaccttctctgagctgcggctggacagygtggtccagtggatggagcatttcgagacatggccctcccacctccccattgtggctcacgcrgagcagcaaaccgtggctgctgtcctcatggtggctcagctcactcagcgctcagtgcacatatgtcacgtggcacggaaggaggagatcctgctaattaaagctgcaaaggcacggggcttgccagtgacctgcgaggtggctccccaccacctgttcctaagccatgatgacctggagcgcctggggcctgggaagggggaggtccggcctgagcttggctcccgccaggatgtggaagccctgtgggagaacatggctgtcatcgactgctttgcctcagaccatgctccccataccttggaggagaagtgtgggtccaggcccccacmtgggttcccagggttagagaccatgctgccactactcctgacggctgtaagcgagggccggctcagcctggacgacctgctgcagcgattgcaccacaatcctcggcgcatctttcacctgccyccgcaggaggacacctatgtggaggtggatctggagcatgagtggacaattcccagccacatgcccttctccaaggcccactggacaccttttgaagggcagaaagtgaagggcaccgtccgccgtgtggtcctgcgaggggaggttgcctatatcgatgggcaggttctggtacccccgggctatggacaggatgtacggaagtggccacagggggctgttcctcagctcccaccctcagcccctgccacyagtgagatgaccacgacacctgaaagaccccgccgtggcatcccagggcttcctgatggccgcttccatctgccgccccgaatccatcgagcctccgacccaggtttgccagctgaggagccaaaggagaagtcctctcggaaggtagccgagccagagctgatgggaacccctgatggcacctgctaccctccaccaccagtaccgagacaggcatctccccagaacctggggacccctggcttgctgcacccccagacctcacccctgctgcactcattagtgggccaacatatcctgtccgtccagcagttcaccaaggatcagatgtctcacctgttcaatgtggcacacacactgcgtatgatggtgcagaaggagcggagcctcgacatcctgaaggggaaggtcatggcctccatgttctatgaagtgagcacacggaccagcagctcctttgcagcagccatggcccggctgggaggtgctgtgctcagcttctcggaagccacatcgtccgtccagaagggygaatccctggctgactccgtgcagaccatgagctgctatgccgacgtcgtcgtgctccggcacccccagcctggagcagtggagctggccgccaagcactgccggaggccagtgatcaatgctggggatggggtcggagagcaccccacccaggccctgctggacatcttcaccatccgtgaggagctgggaactgtcaatggcatgacgatcacgatggtgggtgacctgaagcacggacgcacagtacattccctggcctgcctgctcacccagtatcgtgtcagcctgcgctacgtggcacctcccagcctgcgcatgccacccactstgcgggccttcgtggcctcccgcggcaccaagcaggaggaattcgagagcattgaggaggcgctgcctgacactgatgtgctctacatgactcgaatccagaaggaacgatttggctctacccaggagtacgaagcttgctttggtcagttcatcctcactccccacatcatgacccgggccaagaagaagatggtggtgatgcacccgatgccccgtgtcaacgagataagcgtggaagtggactcggatccccgcgcagcctacttccgccaggctgagaacggcatgtacatccgcatggctctgttagccacygtgctgggccgtttctagggcctggcttcctcagcctcttctctttaggcccagctgctgggcaaggaattccagtgcctcctacgggggcagcacacttagatattcctggacatccagatagctcacatgtgctgaccacacttcaggctctggactggaatgtcgtccaggctggtctcaaactcctcctgacctcgtgatccgcccgcctcagcctcccaaagtgctgggatta

SEQ ID NO: 4842 - DNA, 7056 bp, Homo sapiens
cgccaagcgcgcccgaggctcctacgctgccgcgcccggcttctctccagcgccccgcgccgttagccacgtggaccgactccggcgcgccgtcctcacgtggttccagtggagtttgcagtccttcccgcttctccgtactcgcccccgcctctgagctcccttcccatggcggccctagtgttggaggacgggtcggtcctgcggggccagccctttggggccgccgtgtcgactgccggggaagtggtgtttcaaaccggcatggtcggctaccccgaggccctcacygatccctcctacaaggcacagatcttagtgctcacctatcctctgatcggcaactatggcatccccccagatgaaatggatragttcggtctctgcaagtggtttgaatcctcgggcatccacgtagcagcactggtagtgggagagtgctgtcctactcccagccactggagtgccacccgcaccctgcatgagtggctgcagcagcatggcatccctggcttgcaaggagtagacactcgggagctgaccaagaagttgcgggaacaggggtctctgctggggaagctggtccagaatggaacagaaccttcatccctgccattcttggaccccaatgcccgccccctggtaccagaggtctccattaagactccacgggtattcaatacagggggtgcccctcggatccttgctttggactgtggcctcaagtataatcagatccgatgcctctgccagcgtggggctgaggtcactgtggtaccctgggaccatgcactrgacagccaagagtatgagggtctcttcttaagtaatgggcctggtgaccctgcctcctatcccagtgtcgtatccacactgagccgtgttttatctgagcctaatccccgacctgtctttgggatctgcctgggacaccagctattggccttagccattggggccaagacttacaagatgagatatgggaaccgaggccataaccagccctgcttgttggtgggctctgggcgctgctttctgacatcccagaaccatgggtttgctgtggagacagactcactgccagcagactgggctcctctcttcaccaacgccaatgatggttccaatgaaggcattgtgcacaacagcttgcctttcttcagtgtccagtttcacccagagcaccaagctggcccttcagatatggaactgcttttcgatatctttctggaaactgtgaaagaggccacagctgggaaccctgggggccagacagttagagagcggctgactgagcgcctctgtccccctgggattcccactcccggctctggacttccaccaccacgaaaggttctgatcctgggctcagggggcctctccattggccaagctggagaatttgactactcgggctctcaggcaattaargccctgaaggaggaaaacatccagacgttgctgatcaaccccaatattgccacagtgcagacctcccaggggctggccgacaaggtctattttcttcccataacacctcattatgtaacccaggtgatacgtaatgaacgccccgatggtgtgttactgacttttgggggccagactgctctgaactgtggtgtggagctgaccaaggccggggtgctggctcggtatggggtccgggtcctgggcacaccagtggagaccattgagctgaccgaggatcgacgggcctttgctgccagaatggcagagatcggagagcatgtggccccgagcgaggcagcaaattctcttgaacaggcccaggcagccgctgaacggctggggtaccctgtgctagtgcgtgcagcctttgccctgggtggcctgggctctggctttgcctctaacagggaggagctctctgctctcgtggccccagcttttgcccataccagccaagtgctagtagacaagtctctgaagggatggaaggagattgagtacgaggtggtgagagacgcctatggcaactgtgtcacggtgtgtaacatggagaacttggacccactgggcatccacactggtgagtccatagtggtggcccctagccagacactgaatgacagggagtatcagctcctgaggcagacagctatcaaggtgacccagcacctgggaattgttggggagtgcaatgtgcagtatgccttgaaccctgagtctgagcagtattacatcattgaagtgaatgccaggctctctcgcagctctgccctrgccagtaaggccacaggttatccactggcttatgtggcagccaagctagcattgggcatccctttgcctgagctcaggaactctgtgacagggggtacagcagcctttgaacccagcgtggattattgtgtggtgaagattcctcgatgggaccttagcaagttcctgcgagtcagcacaaagattgggagctgcatgaagagcgttggtgaagtcatgggcattgggcgttcatttgaggaggccttccagaaggccctgcgcatggtggatgagaactgtgtgggctttgatcacacagtgaaaccagtcagcgatatggagttggagactccaacagataagcggatttttgtggtggcagctgctttgtgggctggttattcagtggaccgcctgtatgagctcacacgcatcgaccgctggttcctgcaccgaatgaagcgtatcatcgcacatgcccagctgctagaacaacaccgtggacagcctttgccgccagacctgctgcaacaggccaagtgtcttggcttctcagacaaacagattgcccttgcagttctgagcacagagctggctgttcgcaagctgcgtcaggaactggggatctgtccagcagtgaaacagattgacacagttgcagctgagtggccagcccagacaaattacctatacctaacgtattggggcaccacccatgacctcacctttcgaacacctcatgtcctagtccttggctctggcgtctaccgtattggctctagcgttgaatttgactggtgtgctgtaggctgcatccagcagctccgaaagatgggatataagaccatcatggtgaactataacccagagacagtcagcaccgactatgacatgtgtgatcgactctactttgatgagatctcttttgaggtggtgatggacatctatgagctcgagaaccctgaaggtgtgatcctatccatgggtggacagctgcccaacaacatggccatggcgttgcatcggcagcagtgccgggtgctgggcacctcccctgaagccattgactcggctgagaaccgtttcaagttttcccggctccttgacaccattggtatcagccagcctcagtggagggagctcagtgacctcgagtctgctcgccaattctgccagaccgtggggtacccctgtgtggtgcgcccctcctatgtgctgagcggtgctgctatgaatgtggcctacacggatggagacctggagcgcttcctgagcagcgcagcagccgtctccaaagagcatcccgtggtcatctccaagttcatccaggaggctaaggagattgacgtggatgccgtggcctctgatggtgtggtggcagccatcgccatctctgagcatgtggagaatgcaggtgtgcattcaggtgatgcgacgctggtgacccccccacaagatatcactgccaaaaccctrgagcggatcaaagccattgtgcatgctgtgggccaggagctacaggtcacaggacccttcaatctgcagctcattgccaaggatgaccagctgaaagttattgaatgcaacgtacgtgtctctcgctccttccccttcgtttccaagacactgggtgtggacctagtagccttggccacgcgggtcatcatgggggaagaagtggaacctgtggggctaatgactggttctggagtcgtgggagtaaaggtgcctcagttctccttctcccgcttggcgggtgctgacgtggtgttgggtgtggaaatgaccagtactggggaggtggccggctttggggagagccgctgtgaggcatacctcaaggccatgctaagcactggctttaagatccccaagaagaatatcctgctgaccattggcagctataagaacaaaagcgagctgctcccaactgtgcggctactggagagcctgggctacagcctctatgccagtctcggcacagctgacttctacactgagcatggcgtcaaggtaacagctgtggactggcactttgaggaggctgtggatggtgagtgcccaccacagcggagcatcctggagcagctagctgagaaaaactttgagctggtgattaacctgtcaatgcgtggagctgggggccggcgtctctcytcctttgtcaccaagggctaccgcacccgacgcttggccgctgacttctccgtgcccctaatcatcgayatcaagtgcaccaaactctttgtggaggccctaggccagatcgggccagcccctcctttgaaggtgcatgttgactgtatgacctcccaaaagcttgtgcgactgccgggattgattgatgtccatgtgcacctgcgggaaccaggtgggacacataaggaggactttgcttcaggcacagccgctgccctggctgggggtatcaccatggtgtgtgccatgcctaatacccggccccccatcattgacgcccctgctctggccctggcccagaagctggcagaggctggcgcccggtgcgactttgcgctattccttggggcctcgtctgaaaatgcaggaaccttgggcaccgtggccgggtctgcagccgggctgaagctttacctcaatgagaccttctctgagctgcggctggacagygtggtccagtggatggagcatttcgagacatggccctcccacctccccattgtggctcacgcrgagcagcaaaccgtggctgctgtcctcatggtggctcagctcactcagcgctcagtgcacatatgtcacgtggcacggaaggaggagatcctgctaattaaagctgcaaaggcacggggcttgccagtgacctgcgaggtggctccccaccacctgttcctaagccatgatgacctggagcgcctggggcctgggaagggggaggtccggcctgagcttggctcccgccaggatgtggaagccctgtgggagaacatggctgtcatcgactgctttgcctcagaccatgctccccataccttggaggagaagtgtgggtccaggcccccacmtgggttcccagggttagagaccatgctgccactactcctgacggctgtaagcgagggccggctcagcctggacgacctgctgcagcgattgcaccacaatcctcggcgcatctttcacctgccyccgcaggaggacacctatgtggaggtggatctggagcatgagtggacaattcccagccacatgcccttctccaaggcccactggacaccttttgaagggcagaaagtgaagggcaccgtccgccgtgtggtcctgcgaggggaggttgcctatatcgatgggcaggttctggtacccccgggctatggacaggatgtacggaagtggccacagggggctgttcctcagctcccaccctcagcccctgccacyagtgagatgaccacgacacctgaaagaccccgccgtggcatcccagggcttcctgatggccgcttccatctgccgccccgaatccatcgagcctccgacccaggtttgccagctgaggagccaaaggagaagtcctctcggaaggtagccgagccagagctgatgggaacccctgatggcacctgctaccctccaccaccagtaccgagacaggcatctccccagaacctggggacccctggcttgctgcacccccagacctcacccctgctgcactcattagtgggccaacatatcctgtccgtccagcagttcaccaaggatcagatgtctcacctgttcaatgtggcacacacactgcgtatgatggtgcagaaggagcggagcctcgacatcctgaaggggaaggtcatggcctccatgttctatgaagtgagcacacggaccagcagctcctttgcagcagccatggcccggctgggaggtgctgtgctcagcttctcggaagccacatcgtccgtccagaagggygaatccctggctgactccgtgcagaccatgagctgctatgccgacgtcgtcgtgctccggcacccccagcctggagcagtggagctggccgccaagcactgccggaggccagtgatcaatgctggggatggggtcggagagcaccccacccaggccctgctggacatcttcaccatccgtgaggagctgggaactgtcaatggcatgacgatcacgatggtgggtgacctgaagcacggacgcacagtacattccctggcctgcctgctcacccagtatcgtgtcagcctgcgctacgtggcacctcccagcctgcgcatgccacccactstgcgggccttcgtggcctcccgcggcaccaagcaggaggaattcgagagcattgaggaggcgctgcctgacactgatgtgctctacatgactcgaatccagaaggaacgatttggctctacccaggagtacgaagcttgctttggtcagttcatcctcactccccacatcatgacccgggccaagaagaagatggtggtgatgcacccgatgccccgtgtcaacgagataagcgtggaagtggactcggatccccgcgcagcctacttccgccaggctgagaacggcatgtacatccgcatggctctgttagccacygtgctgggccgtttctagggcctggcttcctcagcctcttctctttaggcccagctgctgggcaaggaattccagtgcctcctacgggggcagcacacttagatattcctggacatccagatagctcacatgtgctgaccacacttcaggctatgtcgtccaggctggtctcaaactcctcctgacctcgtgatccgcccgcctcagcctcccaaagtgctgggatta

SEQ ID NO: 4843 - DNA, 7360 bp, Homo sapiens
ctccccgtggctccgcggaccccgccccttacgtgcccggccccgcccctcacgccgcctgtgtccgcgccgccgcagtctctgctgctgccgccaagcgcgcccgaggctcctacgctgccgcgcccggcttctctccagcgccccgcgccgttagccacgtggaccgactccggcgcgccgtcctcacgtggttccagtggagtttgcagtccttcccgcttctccgtactcgcccccgcctctgagctcccttcccatggcggccctagtgttggaggacgggtcggtcctgcggggccagccctttggggccgccgtgtcgactgccggggaagtggtgtttcaaaccggcatggtcggctaccccgaggccctcacygatccctcctacaaggcacagatcttagtgctcacctatcctctgatcggcaactatggcatccccccagatgaaatggatragttcggtctctgcaagtggtttgaatcctcgggcatccacgtagcagcactggtagtgggagagtgctgtcctactcccagccactggagtgccacccgcaccctgcatgagtggctgcagcagcatggcatccctggcttgcaaggagtagacactcgggagctgaccaagaagttgcgggaacaggggtctctgctggggaagctggtccagaatggaacagaaccttcatccctgccattcttggaccccaatgcccgccccctggtaccagaggtctccattaagactccacgggtattcaatacagggggtgcccctcggatccttgctttggactgtggcctcaagtataatcagatccgatgcctctgccagcgtggggctgaggtcactgtggtaccctgggaccatgcactrgacagccaagagtatgagggtctcttcttaagtaatgggcctggtgaccctgcctcctatcccagtgtcgtatccacactgagccgtgttttatctgagcctaatccccgacctgtctttgggatctgcctgggacaccagctattggccttagccattggggccaagacttacaagatgagatatgggaaccgaggccataaccagccctgcttgttggtgggctctgggcgctgctttctgacatcccagaaccatgggtttgctgtggagacagactcactgccagcagactgggctcctctcttcaccaacgccaatgatggttccaatgaaggcattgtgcacaacagcttgcctttcttcagtgtccagtttcacccagagcaccaagctggcccttcagatatggaactgcttttcgatatctttctggaaactgtgaaagaggccacagctgggaaccctgggggccagacagttagagagcggctgactgagcgcctctgtccccctgggattcccactcccggctctggacttccaccaccacgaaaggttctgatcctgggctcagggggcctctccattggccaagctggagaatttgactactcgggctctcaggcaattaargccctgaaggaggaaaacatccagacgttgctgatcaaccccaatattgccacagtgcagacctcccaggggctggccgacaaggtctattttcttcccataacacctcattatgtaacccaggtgatacgtaatgaacgccccgatggtgtgttactgacttttgggggccagactgctctgaactgtggtgtggagctgaccaaggccggggtgctggctcggtatggggtccgggtcctgggcacaccagtggagaccattgagctgaccgaggatcgacgggcctttgctgccagaatggcagagatcggagagcatgtggccccgagcgaggcagcaaattctcttgaacaggcccaggcagccgctgaacggctggggtaccctgtgctagtgcgtgcagcctttgccctgggtggcctgggctctggctttgcctctaacagggaggagctctctgctctcgtggccccagcttttgcccataccagccaagtgctagtagacaagtctctgaagggatggaaggagattgagtacgaggtggtgagagacgcctatggcaactgtgtcacggtgtgtaacatggagaacttggacccactgggcatccacactggtgagtccatagtggtggcccctagccagacactgaatgacagggagtatcagctcctgaggcagacagctatcaaggtgacccagcacctgggaattgttggggagtgcaatgtgcagtatgccttgaaccctgagtctgagcagtattacatcattgaagtgaatgccaggctctctcgcagctctgccctrgccagtaaggccacaggttatccactggcttatgtggcagccaagctagcattgggcatccctttgcctgagctcaggaactctgtgacagggggtacagcagcctttgaacccagcgtggattattgtgtggtgaagattcctcgatgggaccttagcaagttcctgcgagtcagcacaaagattgggagctgcatgaagagcgttggtgaagtcatgggcattgggcgttcatttgaggaggccttccagaaggccctgcgcatggtggatgagaactgtgtgggctttgatcacacagtgaaaccagtcagcgatatggagttggagactccaacagataagcggatttttgtggtggcagctgctttgtgggctggttattcagtggaccgcctgtatgagctcacacgcatcgaccgctggttcctgcaccgaatgaagcgtatcatcgcacatgcccagctgctagaacaacaccgtggacagcctttgccgccagacctgctgcaacaggccaagtgtcttggcttctcagacaaacagattgcccttgcagttctgagcacagagctggctgttcgcaagctgcgtcaggaactggggatctgtccagcagtgaaacagattgacacagttgcagctgagtggccagcccagacaaattacctatacctaacgtattggggcaccacccatgacctcacctttcgaacacctcatgtcctagtccttggctctggcgtctaccgtattggctctagcgttgaatttgactggtgtgctgtaggctgcatccagcagctccgaaagatgggatataagaccatcatggtgaactataacccagagacagtcagcaccgactatgacatgtgtgatcgactctactttgatgagatctcttttgaggtggtgatggacatctatgagctcgagaaccctgaaggtgtgatcctatccatgggtggacagctgcccaacaacatggccatggcgttgcatcggcagcagtgccgggtgctgggcacctcccctgaagccattgactcggctgagaaccgtttcaagttttcccggctccttgacaccattggtatcagccagcctcagtggagggagctcagtgacctcgagtctgctcgccaattctgccagaccgtggggtacccctgtgtggtgcgcccctcctatgtgctgagcggtgctgctatgaatgtggcctacacggatggagacctggagcgcttcctgagcagcgcagcagccgtctccaaagagcatcccgtggtcatctccaagttcatccaggaggctaaggagattgacgtggatgccgtggcctctgatggtgtggtggcagccatcgccatctctgagcatgtggagaatgcaggtgtgcattcaggtgatgcgacgctggtgacccccccacaagatatcactgccaaaaccctrgagcggatcaaagccattgtgcatgctgtgggccaggagctacaggtcacaggacccttcaatctgcagctcattgccaaggatgaccagctgaaagttattgaatgcaacgtacgtgtctctcgctccttccccttcgtttccaagacactgggtgtggacctagtagccttggccacgcgggtcatcatgggggaagaagtggaacctgtggggctaatgactggttctggagtcgtgggagtaaaggtgcctcagttctccttctcccgcttggcgggtgctgacgtggtgttgggtgtggaaatgaccagtactggggaggtggccggctttggggagagccgctgtgaggcatacctcaaggccatgctaagcactggctttaagatccccaagaagaatatcctgctgaccattggcagctataagaacaaaagcgagctgctcccaactgtgcggctactggagagcctgggctacagcctctatgccagtctcggcacagctgacttctacactgagcatggcgtcaaggtaacagctgtggactggcactttgaggaggctgtggatggtgagtgcccaccacagcggagcatcctggagcagctagctgagaaaaactttgagctggtgattaacctgtcaatgcgtggagctgggggccggcgtctctcytcctttgtcaccaagggctaccgcacccgacgcttggccgctgacttctccgtgcccctaatcatcgayatcaagtgcaccaaactctttgtggaggccctaggccagatcgggccagcccctcctttgaaggtgcatgttgactgtatgacctcccaaaagcttgtgcgactgccgggattgattgatgtccatgtgcacctgcgggaaccaggtgggacacataaggaggactttgcttcaggcacagccgctgccctggctgggggtatcaccatggtgtgtgccatgcctaatacccggccccccatcattgacgcccctgctctggccctggcccagaagctggcagaggctggcgcccggtgcgactttgcgctattccttggggcctcgtctgaaaatgcaggaaccttgggcaccgtggccgggtctgcagccgggctgaagctttacctcaatgagaccttctctgagctgcggctggacagygtggtccagtggatggagcatttcgagacatggccctcccacctccccattgtggctcacgcrgagcagcaaaccgtggctgctgtcctcatggtggctcagctcactcagcgctcagtgcacatatgtcacgtggcacggaaggaggagatcctgctaattaaagctgcaaaggcacggggcttgccagtgacctgcgaggtggctccccaccacctgttcctaagccatgatgacctggagcgcctggggcctgggaagggggaggtccggcctgagcttggctcccgccaggatgtggaagccctgtgggagaacatggctgtcatcgactgctttgcctcagaccatgctccccataccttggaggagaagtgtgggtccaggcccccacmtgggttcccagggttagagaccatgctgccactactcctgacggctgtaagcgagggccggctcagcctggacgacctgctgcagcgattgcaccacaatcctcggcgcatctttcacctgccyccgcaggaggacacctatgtggaggtggatctggagcatgagtggacaattcccagccacatgcccttctccaaggcccactggacaccttttgaagggcagaaagtgaagggcaccgtccgccgtgtggtcctgcgaggggaggttgcctatatcgatgggcaggttctggtacccccgggctatggacaggatgtacggaagtggccacagggggctgttcctcagctcccaccctcagcccctgccacyagtgagatgaccacgacacctgaaagaccccgccgtggcatcccagggcttcctgatggccgcttccatctgccgccccgaatccatcgagcctccgacccaggtttgccagctgaggagccaaaggagaagtcctctcggaaggtagccgagccagagctgatgggaacccctgatggcacctgctaccctccaccaccagtaccgagacaggcatctccccagaacctggggacccctggcttgctgcacccccagacctcacccctgctgcactcattagtgggccaacatatcctgtccgtccagcagttcaccaaggatcagatgtctcacctgttcaatgtggcacacacactgcgtatgatggtgcagaaggagcggagcctcgacatcctgaaggggaaggtcatggcctccatgttctatgaagtgagcacacggaccagcagctcctttgcagcagccatggcccggctgggaggtgctgtgctcagcttctcggaagccacatcgtccgtccagaagggygaatccctggctgactccgtgcagaccatgagctgctatgccgacgtcgtcgtgctccggcacccccagcctggagcagtggagctggccgccaagcactgccggaggccagtgatcaatgctggggatggggtcggagagcaccccacccaggccctgctggacatcttcaccatccgtgaggagctgggaactgtcaatggcatgacgatcacgatggtgggtgacctgaagcacggacgcacagtacattccctggcctgcctgctcacccagtatcgtgtcagcctgcgctacgtggcacctcccagcctgcgcatgccacccactstgcgggccttcgtggcctcccgcggcaccaagcaggaggaattcgagagcattgaggaggcgctgcctgacactgatgtgctctacatgactcgaatccagaaggaacgatttggctctacccaggagtacgaagcttgctttggtcagttcatcctcactccccacatcatgacccgggccaagaagaagatggtggtgatgcacccgatgccccgtgtcaacgagataagcgtggaagtggactcggatccccgcgcagcctacttccgccaggctgagaacggcatgtacatccgcatggctctgttagccacygtgctgggccgtttctagggcctggcttcctcagcctcttctctttaggcccagctgctgggcaaggaattccagtgcctcctacgggggcagcacacttagatattcctggacatccagatagctcacatgtgctgaccacacttcaggctctggactggagctctctggcatgggggtggggcctcagatgctggggcccagtctgccccatcttcattcctgcaccttaaacctgtacagtcatttttctactgacttaataaacagccgagctgtcccttgatgctgagtgtagtagaacagagctttcttttagaaaattgagcagattcccaaattataagagcagcctcaccaggcagggctctggctagggctgcgtgcccacactcggcattttcacactcgtgactctttgggactcggcaggagcgtgtt

SEQ ID NO: 4844 - DNA, 4107 bp, Homo sapiens
tgcccccgccccctactcccttccctcaggccccaggaagttgcaagagtaccatttgtcgcacactcggggaccgcgggtggccggaggagatgaaaccgtcttggctgcagtgtcgtaaagtcaccagcgccggggggctcggagggcccttgcctgggtcctctccggcccggggagccggtgcggccctcagggctttagtggtcccgggcccgcggggcggtctcgggggccggggatgcagggcactgtcctccggcagtggcagcgagtacaagacccacttcgcagcctcggtgaccgaccccgagaggttctggggcaaagctgccgagcagatcagctggtacaagccctggaccaaaacgctggagaacaaacactcgccctctaccaggtggtttgtggaaggaatgcttaacatttgttacaatgccgttgatcgtcatattgaaaatggtaaaggggataagattgctatcatctatgacagtcctgttacaaacactaaagcaacctttacctataaagaagttctggagcaggtctccaagctggctggtgtcttggtcaagyatggcatcaagaaaggtgacactgtggttatctacatgcctatgatcccacaggcgatgtataccatgttggcatgtgcaaggataggtgccatccacagtctcatatttggaggatttgcttccaaagaactaagtagtcgcattgatcatgtaaagcccaaggtggttgttacagcatcatttggcattgaacctggaaggagggtagagtacgtaccacttgtagaagaagcgctaaaaataggacaacacaaaccagacaaaattctcatttataatcgtccaaatatggaggcggttcctttggctccsggtcgtgaccttgattgggatgaagagatggcaaaagcccagtcacatgactgtgttcctgttctttcagaacacccactgtatattctttacacatctggcacaacggggttacctaagggtgtgattaggcccactgggggatacgctgtcatgctacactggtcaatgtcttccatatacggacttcaacccggagaggtgtggtgggcagcttctgacttaggctgggttgttggacattcctatatctgctatggacctcttcttcatgggaacacaacagttttatatgaggggaagcctgtgggaacaccagatgctggcgcttatttccgtgtgcttgcagagcatggagtagctgccttgtttacagcaccaactgcaattagagcaatccgtcaacaggaccctggggcagctttggggaagcagtactctctgacaaggttcaaaacattatttgtggctggagaacgatgtgatgtagagaccctggaatggtccaaaaatgtcttcagagtacctgtcttagaccattggtggcaaactgagactggatctccaattactgcrtcatgtgttggattaggcaattctaaaacacctccaccagggcaagcaggaaaaagcgtcccaggatacaatgttatgattttggatgacaacatgcaaaaactgaaggctcggtgtttaggaaatattgtggtaaagttaccattgccacctggggctttttcaggactctggaagaatcaggaagcattcaagcatttatactttgaaaaatttcctggatattatgataccatggatgctggttacatggatgaagaaggctatttgtatgttatgtctcgagtggatgatgtaataaatgttgcaggtcacagaatttctgcaggygccattgaagagtcaatcctttcccatggtaccgtggcagactgtgctgttgttggcaaggaagatcccttaaaaggtcaygtccccttagcactctgtgtattgagaaaagatataaatgcaacagaggagcaagttttggaagaaattgtgaaacacgttagacagaacattggccctgtggctgcttttcgaaatgcagtgtttgtcaaacagctacccaaaaccagatctggcaagatcccccgatcagctttatctgccattgtcaatggcaarccatacaagataacttctacaattgaagaccccagcatttttggccacgtagaagaaatgctgaagcaagcataatgagtttgtcttattcctattttgagttgatttaatttcttaattgaaattaaattatttgagttgtttctcagaaataaatatttcagtagaaattacttgcaaaatgaaatgtgaattgtaaaacttggcctaaacaaatctaatgaaaacatgtgaaagacctgtgccttttttttggtttgaccctgttagcattgttattagttatctataacatggcttattgaatgtcatctactgctttaggaaaaacgtatctagtgtattatttttaaaattgtacctcccaagaagaacactttaattgaaagcaacactaatatagagccacttcctgaaaccaagaatctgtagttttgatccaaaatctaaaacttaaagtcagaaaataattaaaatttttcttgtagaaattttagatattttctagtattctttagatgctcacattgttttaaataaaatagatgaaatgggaagtttaggtaatcatctagacagatgaaattattatctaggtaggagggcttttctatacattttctgagggaaagcagaacaccggggttatagctataccttcaggtcttttgttacttaggcaaggaaaaccacatgtctgacctggttcagcatgtaatccgagcactttgggaggctgaggcaggcggatcacttgaggtcagcagtttgagacgagcctggccaacatggtgaaaccctgtagctactgaaaatacaaaaataagccaggcgtggtggcgggaggctgaggcaaggagaatcacttgaatacaagaggcagaggttgcagtgagccaagttcccccactgtactccagcctgggtgacagagtaagactccatctcaaaacaacaaaaacaacaaaaaaaccacatgcctggcggagaacaaagagatcatttagtccaatctcttcatggagatgagggctcctgggagcccctcttcatgtctcaggttcttagttgactatgtttatccaaatgattccagattcctgtggaaacaaggaatcgatgtacaaatggggtagggtggcaaggaaaactcttaagagagaaacatcaaggttttcacattaggttaaagacaagaaggtttctaggcaggtagtgtaatgtctaggtgattttgaagtgaacttaagccactaggtttgagggacaaaggacagtagaaaatggtgaagactgcagatcacctgctatacctcaaggagcagcggacccagcagaatatggcccaaaaaggaggcaggtctcctgttgcaagagcctctgtttttttaaagagaaaacaaagaatcctggtttttatgtgaaatctctaattttaaaataataactcattaaaaatattgtaatgtccaaaagtatctttccatttaacttctaaaaatctcttaaatkttttttttaaataattgtaaagtgagtttttgttaagcttataggaatgggccagttaactaaggtagacagatgtaggaaattaaatatttgatttacttagggatctatatgacatcagttatcaaagaatacattttaacccaaaagtataccatgctcattgtatctttgatcgttcttcaagtatttctcaatcttttaatctatcaggaacattamtatcaagagcagattgttgtaacataatactcaggatacatgaaatgtatgtgagagataaatagataatagaaagtttattgttataaaaatgacctacaacttatataaaaaaattctgaaaatgttgactttttttggactgaagrctgcaaaataaatggcttctcaaagtaaattcctatttacttaaattgccttcttgattgttacacctggaaaaatatattcatctactttttccttttaattatgttagtagactgaattaaaccagctacatagacactctctc

SEQ ID NO: 4845 - DNA, 3116 bp, Homo sapiens
aaggcgcgggccccggcgcggcggggagggctcggccggaggggaggctgcggcgcgcggccggtcgctgcgggcccgggccccaagccgtgccggtccgctcgcccgggccgcgtctcaggccgctgcccccccgcctcctctggggaggactcgctccaaactccctgaacttcggggacagtcccccgaagcggcgaaactctcagggttggcaaccctgcccagggacccccatcccgggcggcgctccggacgccctcccctcaccgcgcccccgcagacacgtgcctggactccgagggcttctggagccaccggccgggccacgatgctcatgaggaaagtgcccggcttcgtcccggcctccccgtgggggctgcggctgccgcagaagttcctcttcctcctcttcctctcgggcctggtcaccctgtgcttcggggccctcttcctgctgccccactcctctcgcctcaagcgcctcttcctggccscccggacccagcagcctggtctggaagtggtggctgaaatcgccggccatgccccggcccgcgagcaggagccgcctcccaacccggcccccgccgcgccggccccgggcgaggatgaccccagcagctgggccagtccccgccgcaggaaaggggggctgcggcgcacccgccccactggaccccgcgaggaggccacggcggcccggggcaatagcatcccggcctccaggcccggggacgagggcgtccctttccgctttgacttcaacgcattccggagccgtctccgccacccggtcctgggaacgagggccgatgagagtcaggagccccagagccaagtgcgagcccagcgggagaaaatcaaggagatgatgcagtttgcttggcagagctataagcgttatgcaatggggaaaaacgaactccgtccactaacaaaagatggctacgagggtaacatgttcggaggcctcagcggggcaacagtcattgactccctcgataccctctacctcatggagctgaaggaggagttccaggaggccaaggcctgggtgggagagagcttccacctgaacgtgagcggagaagcatccttgtttgaggtgaacatccgctacatcgggggactcctctcagccttctacctgacaggagaagaggtgttccgaataaaggccatcaggctgggagagaagctcctgccggcgttcaacacccccacgggaatcccaaagggcgtggtgagcttcaaaagtgggaactggggctgggccacagccggcagcagcagcatcttggcggagtttggatccctgcacttggaattcttacacctcactgaactctctggcaaccaggtcttcgctgaaaaggcaagtcaggaacatccgcaaggtcctcaggaagatcgaaaagccctttggcctctaccccaacttcctcagcccagtgagtgggaactgggtgcaacaccatgtctcagttggaggactcggggacagtttttatgaatatttgatcaaatcctggttgatgtcgggcaagacagatatggaggctaaaaatatgtactacgaagccttggaggcgatagagacctacttgctgaatgtctctcccggggggctgacctacattgccgagtggcgaggggggattctggaccacaagatggggcacctggcctgtttctccgggggcatgatcgcccttggcgccgaggatgccaaggaagaaaagagggcccactaccgagagctcgcagcccagatcaccaagacgtgtcacgagtcatacgcccgctcagacaccaaacttgggcctgaggccttctggtttaactccggcagagaggccgtggccacccagctgagcgagagctactacatcctccggccagaggtggtggagagctacatgtacctgtggcgacagacccacaaccccatctacagggagtggggctgggaggtggtgctggccttggagaaatactgtcggacagaagccggtttctctgggatccaagacgtgtacagtagcacccccaaccacgacaacaagcagcagagcttctttctagcggagacactaaagtatctctatcttctgttctctgaagatgacttgctctccctggaagactgggtgttcaacaccgaggcccacccactcccggtgaaccactcagacagctccggcagagcctggggcagacactgaccccatctcctgccgccgccctggggccgccgcagggatgccttgccttttcaggatttgagactgttctcaaagggattgggaacgaaggccccatctcgggcagacccccagcagatgtgtcggacaagcaacttcttttcctctgtgaggagacaagacttggagactcagcgatgtcaggccagggccatggccacactggcccacacattcctttctacagagaatttctatgaagcccactcacttgccattccagggccaaaggaccggaggtttgcatatccgccccttgtatttgatttgcttccttttggtttcttggtttttgtttttgcttgattttgtcttttctctacagtttagttttgtcacaattacacatatagttttcaaaatcatgcactttctaaaatggtgtcatcctgaaaaacaaaacccagtgtttgcacacacacaaaatcttgaccccgttatctatattttaaatgctttttgcccaacactgaccctatgttcaactttgtgtcatttaccttataatttgaggaggggtttccctttgggcctcagtgttacaaattactagtgctattttcattattattgtaatggaaaaatctgtggactagaataaaagagtttattgaataagaaatatgattgggctcattgcacatcagtgactcctagaaaaaccattgcaattaccatgctcttgacaggcagcatgagagcgtgactcccatgacccacctgtgctcaaaaaaaaaaaaaaaaaaaaagcaaaccaggaaaactgactacacaaacattgtagaaagattagaaaatagaagcagaaagaagactcattggccatcccactctctggggtgaatactg

SEQ ID NO: 4846 - DNA, 3227 bp, Homo sapiens
aaggcgcgggccccggcgcggcggggagggctcggccggaggggaggctgcggcgcgcggccggtcgctgcgggcccgggccccaagccgtgccggtccgctcgcccgggccgcgtctcaggccgctgcccccccgcctcctctggggaggactcgctccaaactccctgaacttcggggacagtcccccgaagcggcgaaactctcagggttggcaaccctgcccagggacccccatcccgggcggcgctccggacgccctcccctcaccgcgcccccgcagacacgtgcctggactccgagggcttctggagccaccggccgggccacgatgctcatgaggaaagtgcccggcttcgtcccggcctccccgtgggggctgcggctgccgcagaagttcctcttcctcctcttcctctcgggcctggtcaccctgtgcttcggggccctcttcctgctgccccactcctctcgcctcaagcgcctcttcctggccscccggacccagcagcctggtctggaagtggtggctgaaatcgccggccatgccccggcccgcgagcaggagccgcctcccaacccggcccccgccgcgccggccccgggcgaggatgaccccagcagctgggccagtccccgccgcaggaaaggggggctgcggcgcacccgccccactggaccccgcgaggaggccacggcggcccggggcaatagcatcccggcctccaggcccggggacgagggcgtccctttccgctttgacttcaacgcattccggagccgtctccgccacccggtcctgggaacgagggccgatgagagtcaggagccccagagccaagtgcgagcccagcgggagaaaatcaaggagatgatgcagtttgcttggcagagctataagcgttatgcaatggggaaaaacgaactccgtccactaacaaaagatggctacgagggtaacatgttcggaggcctcagcggggcaacagtcattgactccctcgataccctctacctcatggagctgaaggaggagttccaggaggccaaggcctgggtgggagagagcttccacctgaacgtgagcggagaagcatccttgtttgaggtgaacatccgctacatcgggggactcctctcagccttctacctgacaggagaagaggtgttccgaataaaggccatcaggctgggagagaagctcctgccggcgttcaacacccccacgggaatcccaaagggcgtggtgagcttcaaaagtgggaactggggctgggccacagccggcagcagcagcatcttggcggagtttggatccctgcacttggaattcttacacctcactgaactctctggcaaccaggtcttcgctgaaaaggcaagaacatccgcaaggtcctcaggaagatcgaaaagccctttggcctctaccccaacttcctcagcccagtgagtgggaactgggtgcaacaccatgtctcagttggaggactcggggacagtttttatgaatatttgatcaaatcctggttgatgtcgggcaagacagatatggaggctaaaaatatgtactacgaagccttggaggcgatagagacctacttgctgaatgtctctcccggggggctgacctacattgccgagtggcgaggggggattctggaccacaagatggggcacctggcctgtttctccgggggcatgatcgcccttggcgccgaggatgccaaggaagaaaagagggcccactaccgagagctcgcagcccagatcaccaagacgtgtcacgagtcatacgcccgctcagacaccaaacttgggcctgaggccttctggtttaactccggcagagaggccgtggccacccagctgagcgagagctactacatcctccggccagaggtggtggagagctacatgtacctgtggcgacagacccacaaccccatctacagggagtggggctgggaggtggtgctggccttggagaaatactgtcggacagaagccggtttctctgggatccaagacgtgtacagtagcacccccaaccacgacaacaagcagcagagcttctttctagcggagacactaaagtatctctatcttctgttctctgaagatgacttgctctccctggaagactgggtgttcaacaccgaggcccacccactcccggtgaaccactcagacagctccggcagagcctggggcagacactgaccccatctcctgccgccgccctggggccgccgcagggatgccttgccttttcaggatttgagactgttctcaaagggattgggaacgaaggccccatctcgggcagacccccagcagatgtgtcggacaagcaacttcttttcctctgtgaggagacaagacttggagactcagcgatgtcaggccagggccatggccacactggcccacacattcctttctacagagaatttctatgaagcccactcacttgccattccagggccaaaggaccggaggtttgcatatccgccccttgtatttgatttgcttccttttggtttcttggtttttgtttttgcttgattttgtcttttctctacagtttagttttgtcacaattacacatatagttttcaaaatcatgcactttctaaaatggtgtcatcctgaaaaacaaaacccagtgtttgcacacacacaaaatcttgaccccgttatctatattttaaatgctttttgcccaacactgaccctatgttcaactttgtgtcatttaccttataatttgaggaggggtttccctttgggcctcagtgttacaaattactagtgctattttcattattattgtaatggaaaaatctgtggactagaataaaagagtttattgaataagaaatatgattgggctcattgcacatcagtgactcctagaaaaaccattgcaatgttaccatcagaaataataatcagccagcagttgatttaaggtataatttagtaaacgattccaacttctattacctcccctgaaatcggtcctgatatattcgagaagcatgaggccagcccttcagatgcagttgtttatttatactcaggtttagattgggaagaggcccagggaggagcagcaacttgcctgaggtcacacagcccaaaaaaggcaaaggagagtctcgcccctgccgtctcctggccaccccagttgagtgtccgtctgttccatcattcagcagatg

SEQ ID NO: 4847 - DNA, 1892 bp, Homo sapiens
tgtgtgtgtgtgtgtgtgtgtgtgtgtgtgtgtgtgtgtgtgagtccggaggctgcggctkcagaagtaccgcctgcggagtaactgcaaagatgctgtccgtgcgcgttgctgcggccgtggtccgcgcccttcctcggcgggccggactggtctccagaaatgctttgggttcatctttcattgctgcaaggaacttccatgcctctaacactcatcttcaaaagactgggactgctgagatgtcctctattcttgaagagcgtattcttggagctgatacctctgttgatcttgaagaaactgggcgtgtcttaagtattggtgatggtattgcccgcgtacatgggctgaggaatgttcaagcagaagaaatggtagagttttcttcaggcttaaagggtatgtccttgaacttggaacctgacaatgttggtgttgtcgtgtttggaaatgataaactaattaaggaaggagatatagtgaagaggacaggagccattgtggacgttccagttggtgaggagctgttgggtcgtgtagttgatgcccttggtaatgctattgatggaaagggtccaattggttccaagacgcgtaggcgagttggtctgaaagcccccggtatcattcctcgaatttcagtgcgggaaccaatgcagactggcattaaggctgtggatagcttggtgccaattggtcgtggtcagcgtgaactgattattggtgaccgacagactgggaaaacctcaattgctattgacacaatcattaaccagaaacgtttcaatgatggatctgatgaaaagaagaagctgtactgtatttatgttgctattggtcaaaagagatccactgttgcccagttggtgaagagacttacagatgcagatgccatgaagtacaccattgtggtgtcggctacggcctcggatgctgccccacttcagtacctggctccttactctggctgttccatgggagagtattttagagacaatggcaaacatgctttgatcatctatgacgacttatccaaacaggctgttgcttaccgtcagatgtctctgttgctccgccgaccccctggtcgtgaggcctatcctggtgatgtgttctacctacactcccggttgctrgagagagcagccaaaatgaacgatgcttttggtggtggctccttgactgctttgccagtcatagaaacacaggctggtgatgtgtctgcttacattccaacaaatgtcatttccatcactgacggacagatcttcttggaaacagaattgttctacaaaggtatccgccctgcaattaacgttggtctgtctgtatctcgtgtcggatccgctgcccaaaccagggctatgaagcaggtagcaggtaccatgaagctggaattggctcagtatcgtgaggttgctgcttttgcccagttcggttctgacctcgatgctgccactcaacaacttttgagtcgtggcgtgcgtctaactgagttgctgaagcaaggacagtattctcccatggctattgaagaacaagtggctgttatctatgcgggtgtaaggggatatcttgataaactggagcccagcaagattacaaagtttgagaatgctttcttgtctcatgtcgtcagccagcaccaagccttgttgggcactatcagggctgatggaaagatctcagaacaatcagatgcaaagctgaaagagattgtaacaaatttcttggctggatttgaagcttaaactcctgtggattcacatcaaataccagttcagttttgtcattgttctagtaaattagttccatttgtaaaaggkttactctcatactccttatgtacagaaatcacatgaaaaataaaggttccataatgcrtagtt

SEQ ID NO: 4848 - DNA, 1368 bp, Homo sapiens
tgtgtgtgtgtgtgtgtgtgtgtgtgtgtgtgtgtgtgtgtgagtccggaggctgcggctkcagaagtaccgcctgcggagtaactgcaaagatgctgtccgtgcgcgttgctgcggccgtggtccgcgcccttcctcggcgggccggactggtctccagaaatgctttgggttcatctttcattgctgcaaggaacttccatgcctctaacactcatcttcaaaagactgggactgctgagatgtcctctattcttgaagagcgtattcttggagctgatacctctgttgatcttgaagaaactgggcgtgtcttaagtattggtgatggtattgcccgcgtacatgggctgaggaatgttcaagcagaagaaatggtagagttttcttcaggcttaaagggtatgtccttgaacttggaacctgacaatgttggtgttgtcgtgtttggaaatgataaactaattaaggaaggagatatagtgaagaggacaggagccattgtggacgttccagttggtgaggagctgttgggtcgtgtagttgatgcccttggtaatgctattgatggaaagggtccaattggttccaagacgcgtaggcgagttggtctgaaagcccccggtatcattcctcgaatttcagtgcgggaaccaatgcagactggcattaaggctgtggatagcttggtgccaattggtcgtggtcagcgtgaactgattattggtgaccgacagactggaaacacaggctggtgatgtgtctgcttacattccaacaaatgtcatttccatcactgacggacagatcttcttggaaacagaattgttctacaaaggtatccgccctgcaattaacgttggtctgtctgtatctcgtgtcggatccgctgcccaaaccagggctatgaagcagggttctgacctcgatgctgccactcaacaacttttgagtcgtggcgtgcgtctaactgagttgctgaagcaaggacagtattctcccatggctattgaagaacaagtggctgttatctatgcgggtgtaaggggatatcttgataaactggagcccagcaagattacaaagtttgagaatgctttcttgtctcatgtcgtcagccagcaccaagccttgttgggcactatcagggctgatggaaagatctcagaacaatcagatgcaaagctgaaagagattgtaacaaatttcttggctggatttgaagcttaaactcctgtggattcacatcaaataccagttcagttttgtcattgttctagtaaattagttccatttgtaaaaggkttactctcatactccttatgtacagaaatcacatgaaaaataaaggttccataatgcrtagtt

SEQ ID NO: 4849 - DNA, 1867 bp, Homo sapiens
gccattttgtcccagtcagtccggaggctgcggctkcagaagtaccgcctgcggagtaactgcaaagatgctgtccgtgcgcgttgctgcggccgtggtccgcgcccttcctcggcgggccggactggtctccagaaatgctttgggttcatctttcattgctgcaaggaacttccatgcctctaacactcatcttcaaaagactgggactgctgagatgtcctctattcttgaagagcgtattcttggagctgatacctctgttgatcttgaagaaactgggcgtgtcttaagtattggtgatggtattgcccgcgtacatgggctgaggaatgttcaagcagaagaaatggtagagttttcttcaggcttaaagggtatgtccttgaacttggaacctgacaatgttggtgttgtcgtgtttggaaatgataaactaattaaggaaggagatatagtgaagaggacaggagccattgtggacgttccagttggtgaggagctgttgggtcgtgtagttgatgcccttggtaatgctattgatggaaagggtccaattggttccaagacgcgtaggcgagttggtctgaaagcccccggtatcattcctcgaatttcagtgcgggaaccaatgcagactggcattaaggctgtggatagcttggtgccaattggtcgtggtcagcgtgaactgattattggtgaccgacagactgggaaaacctcaattgctattgacacaatcattaaccagaaacgtttcaatgatggatctgatgaaaagaagaagctgtactgtatttatgttgctattggtcaaaagagatccactgttgcccagttggtgaagagacttacagatgcagatgccatgaagtacaccattgtggtgtcggctacggcctcggatgctgccccacttcagtacctggctccttactctggctgttccatgggagagtattttagagacaatggcaaacatgctttgatcatctatgacgacttatccaaacaggctgttgcttaccgtcagatgtctctgttgctccgccgaccccctggtcgtgaggcctatcctggtgatgtgttctacctacactcccggttgctrgagagagcagccaaaatgaacgatgcttttggtggtggctccttgactgctttgccagtcatagaaacacaggctggtgatgtgtctgcttacattccaacaaatgtcatttccatcactgacggacagatcttcttggaaacagaattgttctacaaaggtatccgccctgcaattaacgttggtctgtctgtatctcgtgtcggatccgctgcccaaaccagggctatgaagcaggtagcaggtaccatgaagctggaattggctcagtatcgtgaggttgctgcttttgcccagttcggttctgacctcgatgctgccactcaacaacttttgagtcgtggcgtgcgtctaactgagttgctgaagcaaggacagtattctcccatggctattgaagaacaagtggctgttatctatgcgggtgtaaggggatatcttgataaactggagcccagcaagattacaaagtttgagaatgctttcttgtctcatgtcgtcagccagcaccaagccttgttgggcactatcagggctgatggaaagatctcagaacaatcagatgcaaagctgaaagagattgtaacaaatttcttggctggatttgaagcttaaactcctgtggattcacatcaaataccagttcagttttgtcattgttctagtaaattagttccatttgtaaaaggkttactctcatactccttatgtacagaaatcacatgaaaaataaaggttccataatgcrtagtt

SEQ ID NO: 4850 - DNA, 1369 bp, Homo sapiens
gggtttattgccgtaggagcagtgttattttttgttgtcatcctacctaaattttcctctgttccagtgcgagatgaggacagaagcacgacgaaaaaatcttctcattttgatttcgcattatttaacacaagaagggtatatcgatacagcaaatgctttggagcaagaaactaaactggggttacgacggtttgaagtttgtgacaacattgatcttgaaactattttgatggaatatgagagttattattttgtaaaatttcagaaataccccaaaattgtcaaaaagtcatcagacacagaaaataatttaccgcaaagaagtagagggaagaccagaaggatgatgaacgacagttgtcaaaatcttcccaagatcaatcagcagaggccccggtccaaaaccacagcggggaagacaggggacaccaaatcgctcaataaggagcatcctaatcaggaggtagttgataacactcgcctggaaartgccaacttcggcctacatatatcaagaatccgtaaagacagtggagaggaaaatgcccacccacgaagaggccaaatcattgacttccaagggctgctcacagatgccatcaagggagcaaccagtgaacttgccttgaacaccttcgaccataatccagacccctcagaacgactgctgaaacctctgagtgcatttattggcatgaacagtgagatgcgagaattggcagccgtggtgagccggtatccacagctatttacaggaattctttctccctggaaaggactactgctgtacggycctccaggtacaggaaagactttactggccaaagctgtggccactgaatgtaaaacaaccttctttaacatttctgcatccaccattgtcagcaaatggagaggggattcagaaaaactcgttcgggtgttatttgagcttgcccgctaccacgccccatccacgatcttcctggacgagctggagtcggtgatgagtcagagaggcacagcttctgggggagaacatgaaggaagcctgcggatgaagacagagttactggtgcagatggatgggctggcacgctcagaagatctcgtatttgtcttagcagcttctaacctgccgtgcttgaaagccattgcactccagcctggcgacagagcaagactccgtctcaaaaaaaaaaaaagtgtactagtccattttcatgctgctggtgaagacatatccaagactgggaagaaaaaaaaattaactggacttacagtttcacatggatggggagcctcagaatcatggcggggggcaaaagacacttcttatatggtggcagcaagagaaaatgaggaagacgcaagaagcggaaacccc

SEQ ID NO: 4851 - DNA, 3616 bp, Homo sapiens
gccgccgagaccctcaggggctgcggccctggtcccgcgggacctgtgggggcctgggcggcggcgcccccgacccagccagcggacgggccggggggggaaccgggaggtcccggggggcgtccacgggggtgtccccgggggtctccggaaggcgccggcggaggctcccgcgctgcgcttgaaaatcgcgcgcggccccgcggccagcctgggtaggggcaaggcgcagccaatgggaagggtcggaggcatggcacagccaatgggaagggccggggcaccaaagccaatgggaagggccgggagcgcgcggcgcgggagatttaaaggctgctggagtgagggrtcgccsgtgcaccctgtcccagccgtcctgtcytggctgctcgctctgcttcgctgcgcckccactatgctctccctccgtgtcccgctcgcgcccatcacggacccgcagcagctgcagctctcgccgctgaaggggctcagcttggtcgayaaggagaacacgccgccggccctgagcgggacccgcgtcctggccagcaagaccgcgaggaggatcttccaggagcccacggagccgaaaactaaagcagctgcccccggcgtggaggatgagccgctgctgagagaaaacccccgccgctttgtcatcttccccatcgagtaccatgatatctggcagatgtataagaaggcagaggcttccttttggaccgccgaggaggtggacctctcsaaggacattcagcactgggaatccctgaaacccgaggagagatattttatatcccatgttctggctttctttgcagcaagcgatggcatagtaaatgaaaacttggtggagcgatttagccaagaagttcagattacagaagcccgctgtttctatggcttccaaattgccatggaaaacatacattctgaaatgtatagtcttcttattgacacttacataaaagatcccaaagaaagggaatttctcttcaatgccattgaaacgatgccttgtgtcaagaagaaggcagactgggccttgcgctggattggggacaaagaggctacctatggtgaacgtgttgtagcctttgctgcagtggaaggcattttcttttccggttcttttgcgtcgatattctggctcaagaaacgaggactgatgcctggcctcacattttctaatgaacttattagcagagatgagggtttacactgtgattttgcttgcctgatgttcaaacacctggtacacaaaccatcggaggagagagtaagagaaataattatcaatgctgttcggatagaacaggagttcctcactgaggccttgcctgtgaagctcattgggatgaattgcactctaatgaagcaatacattgagtttgtggcagacagacttatgctggaactgggttttagcaaggttttcagagtagagaacccatttgactttatggagaatatttcactggaaggaaagactaacttctttgagaagagagtaggcgagtatcagaggatgggagtgatgtcaagtccaacakagaattcttttaccttggatgctgacttctaaatgaactgaagatgtgcccttacttggctgattttttttttccatctcataagaaaaatcagctgaagtgttaccaactagccacaccatgaattgtccgtaatgttcattaacagcatctttaaaactgtgtagctacctcacaaccagtcctgtctgtttatagtgctggtagtatcaccttttgccagaaggcctggctggctgtgacttaccatagcagtgacaatggcagtcttggctttaaagtgaggggtgaccctttagtgagcttagcacagcgggattaaacagtcctttaaccagcacagccagttaaaagatgcagcctcactgcttcaacgcagattttaatgtttacttaaatataaacctggcactttacaaacaaataaacattgtttgtactcacaaggcgataatagcttgatttatttggtttctacaccaaatacattctcctgaccactaatgggagccaattcacaattcactaagtgactaaagtaagttaaacttgtgtagactaagcatgtaatttttaagttttattttaatgaattaaaatatttgttaaccaactttaaagtcagtcctgtgtatacctagatattagtcagttggtgccagatagaagacaggttgtgtttttatcctgtggcttgtgtagtgtcctgggattctctgccccctctgagtagagtgttgtgggataaaggaatctctcagggcaaggagcttcttaagttaaatcactagaaatttaggggtgatctgggccttcatatgtgtgagaagccgtttcattttatttctcactgtattttcctcaacgtctggttgatgagaaaaaattcttgaagagttttcatatgtgggagctaaggtagtattgtaaaatttcaagtcatccttaaacaaaatgatccacctaagatcttgcccctgttaagtggtgaaatcaactagaggtggttcctacaagttgttcattctagttttgtttggtgtaagtaggttgtgtgagttaattcatttatatttactatgtctgttaaatcagaaattttttattatctatgttcttctagattttacctgtagttcatacttcagtcacccagtgtcttattctggcattgtctaaatctgagcattgtctagggggatcttaaactttagtaggaaaccatgagctgttaatacagtttccattcaaatattaatttcagaatgaaacataatttttttttttttttttgagatggagtctcgctctgttgcccaggctggagtgcagtggcgcgattttggctcactgtaacctccatctcctgggttcaagcaattctcctgtctcagcctccctagtagctgggactgcaggtatgtgctaccacacctggctaatttttgtatttttagtagagatggagtttcaccatattggtcaggctggtcttgaactcctgacctcaggtgatccacccacctcggcctcccaaagtgctgggattgcaggcgtgataaacaaatattcttaatagggctactttgaattaatctgcctttatgtttgggagaagaaagctgagacattgcatgaaagatgatgagagataaatgttgatcttttggccccatttgttaattgtattcagtatttgaacgtcgtcctgtttrttgttagttttcttcatcatttattgtatagacaatttttaaatctctgtaatatgatacattttcctatcttttaagttattgttacctaaagttaatccagattatatggtccttatatgtgtacaacattaaaatgaaaggctttgtcttgcattgtgaggtacaggcggaagttggaatcaggttttaggattctgtctctcattagctgaataatgtgaggattaacttctgccagctcagaccatttcctaatcagttgaaagggaaacaagtatttcagtctcaaaattgaataatgcacaagtcttaagtgattaaaataaaactgttcttatgtcagtt

SEQ ID NO: 4852 - DNA, 2909 bp, Homo sapiens
gccgccgagaccctcaggggctgcggccctggtcccgcgggacctgtgggggcctgggcggcggcgcccccgacccagccagcggacgggccggggggggaaccgggaggtcccggggggcgtccacgggggtgtccccgggggtctccggaaggcgccggcggaggctcccgcgctgcgcttgaaaatcgcgcgcggccccgcggccagcctgggtaggggcaaggcgcagccaatgggaagggtcggaggcatggcacagccaatgggaagggccggggcaccaaagccaatgggaagggccgggagcgcgcggcgcgggagatttaaaggctgctggagtgagggrtcgccsgtgcaccctgtcccagccgtcctgtcytggctgctcgctctgcttcgctgcgcckccactatgctctccctccgtgtcccgctcgcgcccatcacggacccgcagcagctgcagctctcgccgctgaaggggctcagcttggtcgayaaggagaacacgccgccggccctgagcgggacccgcgtcctggccagcaagaccgcgaggaggatcttccaggagcccacggagccgaaaactaaagcagctgcccccggcgtggaggatgagccgctgctgagagaaaacccccgccgctttgtcatcttccccatcgagtaccatgatatctggcagatgtataagaaggcagaggcttccttttggaccgccgaggaggtggacctctcsaaggacattcagcactgggaatccctgaaacccgaggagagatattttatatcccatgttctggctttctttgcagcaagcgatggcatagtaaatgaaaacttggtggagcgatttagccaagaagttcagattacagaagcccgctgtttctatggcttccaaattgccatggaaaacatacattctgaaatgtatagtcttcttattgacacttacataaaagatcccaaagaaagggaatttctcttcaatgccattgaaacgatgccttgtgtcaagaagaaggcagactgggccttgcgctggattggggacaaagaggctacctatggtgaacgtgttgtagcctttgctgcagtggaaggcattttcttttccggttcttttgcgtcgatattctggctcaagaaacgaggactgatgcctggcctcacattttctaatgaacttattagcagagatgagggtttacactgtgattttgcttgcctgatgttcaaacacctggtacacaaaccatcggaggagagagtaagagaaataattatcaatgctgttcggatagaacaggagttcctcactgaggccttgcctgtgaagctcattgggatgaattgcactctaatgaagcaatacattgagtttgtggcagacagacttatgctggaactgggttttagcaaggttttcagagtagagaacccatttgactttatggagaatatttcactggaaggaaagactaacttctttgagaagagagtaggcgagtatcagaggatgggagtgatgtcaagtccaacakagaattcttttaccttggatgctgacttctaaatgaactgaagatgtgcccttacttggctgattttttttttccatctcataagaaaaatcagctgaagtgttaccaactagccacaccatgaattgtccgtaatgttcattaacagcatctttaaaactgtgtagctacctcacaaccagtcctgtctgtttatagtgctggtagtatcaccttttgccagaaggcctggctggctgtgacttaccatagcagtgacaatggcagtcttggctttaaagtgaggggtgaccctttagtgagcttagcacagcgggattaaacagtcctttaaccagcacagccagttaaaagatgcagcctcactgcttcaacgcagattttaatgtttacttaaatataaacctggcactttacaaacaaataaacattgtttgtactcacaaggcgataatagcttgatttatttggtttctacaccaaatacattctcctgaccactaatgggagccaattcacaattcactaagtgactaaagtaagttaaacttgtgtagactaagcatgtaatttttaagttttattttaatgaattaaaatatttgttaaccaactttaaagtcagtcctgtgtatacctagatattagtcagttggtgccagatagaagacaggttgtgtttttatcctgtggcttgtgtagtgtcctgggattctctgccccctctgagtagagtgttgtgggataaaggaatctctcagggcaaggagcttcttaagttaaatcactagaaatttaggggtgatctgggccttcatatgtgtgagaagccgtttcattttatttctcactgtattttcctcaacgtctggttgatgagaaaaaattcttgaagagttttcatatgtgggagctaaggtagtattgtaaaatttcaagtcatccttaaacaaaatgatccacctaagatcttgcccctgttaagtggtgaaatcaactagaggtggttcctacaagttgttcattctagttttgtttggtgtaagtaggttgtgtgagttaattcatttatatttactatgtctgttaaatcagaaattttttattatctatgttcttctagattttacctgtagttcatacttcagtcacccagtgtcttattctggcattgtctaaatctgagcattgtctagggggatcttaaactttagtaggaaaccatgagctgttaatacagtttccattcaaatattaatttcagaatgaaacataattttcaattctcctgtctcagcctccctagtagctgggactgcaggtatgtgctaccacacctggctaatttttgtattt

SEQ ID NO: 4853 - DNA, 6893 bp, Homo sapiens
cgctgcaaatgccagggcagtgaagccgaacagaaaaccccatcgctttaaaaaggcagctgtccgccctccccctttcccctcgccagggcgaggggcccctcaagtccgggatccgcgagctgcgcggaggatctcgccaaacccragcaccgtgcggcgtcttttaagagctcgaacaacgggaatccagcaaaaaacaagccggccccagaaggcagcctccctcctctctccgcgcacgggctacaatcgcccccagtccccaaactgtcccagtagaggccgcgcggagagagcagagccgagggacccagcgcaaggcgggagccaagcgcggctgctttaagaacgcggagagcgcgcgcccgccgccagctggcccgggctgcgcgcccccgccgccaccgcgcgccccctgttcgctcgctccttcgctcgccggctttaaagtctctgccaggatccatgctcacatgttacttcctgtatggaggcatggccagtttccagccccgcgctcttcgttccttcccagcctgcgccggagccacaactttcaggagcatggactgaaggcgccctcgccccagcgcccctctgagatcctttgtgttttcctccgtttcctccggccgtttctattttggggggctctccgctccccctgcctctcccctccccttcccctctcgcaaacatgcctccttccttcccggggccctggaaggagctgcctgcctgaagcccggagacgccgcgccgcgctcagccccgccgccgcccgccggctctcgggctgtgctgcgctgccgactcaagttggggatcctcggctgctcgccgccgccgcccgcggtccctgcctgccccaggcccggggcatcgccgccggccgccgactccgcgccctgcccgatcggctctctcctttttaaacggaaagcagcctttctccgccgagaggatcgtccccagcgtggctctgcgttcccggtcactttttgagattttccggggggcgctcggcggcttcccggattccaaggggactcgggccgccgagcgcggggggcccgtggagcgggcgagccggggaagcgccccggcttagcggaggctcgcacggaggcaagaacttattcaacaagtttacctccctgctttcctcttttcgatgtgcgttttcggacatgcggaggttactggaaccgtgttggtggattttgttcctgaaaatcaccagttccgtgctccattatgtcgtgtgcttcccckcgttgacagaaggctacgttggggccctgcacgagaatagacacggcagcgcagtgcagatccgcaggcgcaaggcttcaggcgacccrtactgggcctactctggtgcctatggtcctgagcactgggtcacgtctagtgtcagctgtgggggccgtcaccagtctcctattgacattttagaccagyatgcgcgtgttggggaagaataccaggaactgcaactcgatggcttcgacaatgagtcttctaacaaaacctggatgaaaaacacagggaaaacagtcgccatccttctgaaagacgactattttgtcagtggagctggtctacctggcagattcaaagctgagaaggtggaatttcactggggccacagcaatggctcagcgggctctgaacacagcatcaatggcaggaggtttcctgttgagatgcagattttcttttacaatccagatgactttgacagctttcaaaccgcaatttctgagaacagaataatcggagccatggccatattttttcaagtcagtccgagggacaattctgcactggatcctattatccacgggttgaagggtgtcgtacatcatgagaaggagacctttctggatcctttcgtcctccgggacctcctgcctgcatccctgggcagctattatcggtacacaggttccttgaccacaccaccgtgtagcgaaatagtggagtggatagtcttccggagacccgtccccatctcttaccatcagcttgaggctttttattccatcttcaccacggagcagcaagaccatgtcaagtcggtggagtatctgagaaataactttcgaccacagcagcgtctgcatgacagggtggtgtccaagtccgccgtccgtgactcctggaaccacgacatgacagacttcttagaaaacccactggggacagaagcctctaaagtttgcagctctccacccatccacatgaaggtgcagcctctgaaccagacggcactgcaggtgtcctggagccagccggagactatctaccacccacccatcatgaactacatgatctcctacagctggaccaagaatgaggacgagaaggagaagacgtttacaaaggacagcgacaaagacttgaaagccaccattagccaygtctcacccgatagcctttacctgttccgagtccaggcygtgtgtcggaacgacatgcgcagcgactttagccagacgatgctgtttcaagctaataccactcgaatattccaagggaccagaatagtgaaaacaggagtgcccacagcgtctcctgcctcttcagccgacatggcccccatcagctcggggtcttctacctggacgtcctctggcatcccattctcatttgtttccatggcaactgggatgggcccctcctccagtggcagccaggccacagtggcctcggtggtcaccagcacgctgctcgccggcctggggttcggcggtggtggcatctcctctttccccagcactgtgtggcccacgcgcctcccgacggccgcctcagccagcaagcaggcggctaggccagtcctagccaccacagaggccttggcttctccagggcccgatggtgattcgtcaccaaccaaggacrgcgagggcaccgaggaaggagagaaggatgagaaaagcgagagtgaggatggggagcgggagcacgaggaggatggagagaaggactccgaaaagaaggagaagagtggggtgacccacgctgccgaggagcggaatcagacggagcccagccccacaccctcgtctcctaacaggactgccgagggagggcatcrgactatacctgggcatgagcaggatcacactgccgtccccacagaccagacsggcggaaggagggatgccggcccaggcytggaccccgacatggtcacctccacccaagtgccccccaccgccacagaggagcagtatgcagggagtgatcccaagaggcccgaaatgccatctaaaaagcctatgtcccgcggggaccgattttctgaagacagcagatttatcactgttaatccagcggaaaaaaacacctctggaatgataagccgccctgctccagggaggatggagtggatcatccctctgattgtggtatcagccttgaccttcgtgtgcctcatccttctcattgctgtgctcgtttactggagagggtgtaacaaaataaagtccaagggctttcccagaygtttccgtgaagtgccttcttctggggagagaggagagaaggggagcagaaaatgttttcagactgctcatttctatgtsgaagacagcagttcacctcgagtggtccctaatgaaagtatycctattattcctattccggatgacatggaagccattcctgtcaaacagtttgtcaaacacatcggtgagctctattctaataaccagcatgggttctctgaggattttgaggaagtccagcgctgtactgctgatatgaacatcactgcagagcattccaatcatccagaaaacaagcacaaaaacagatacatcaacattttagcatatgatcacagtagggtgaagttaagacctttaccaggaaaagactctaagcacagcgactacattaaygcaaactatgttgatggttacaacaaagcaaaagcctacattgccacccaaggacctttgaagtctacatttgaagatttctggaggatgatttgggaacaaaacactggaatcattgtgatgattacgaaccttgtggaaaaaggaagacgaaaatgtgatcagtattggccaacagagaacagtgaggaatatggaaacattattgtcacgctgaagagcacaaaaatacatgcctgctacactgttcgtcgtttttcaatcagaaatacaaaagtgaaaaagggtcagaagggaaatcccaagggtcgtcagaatgaaagggtagtgatccagtatcactatacacagtggcctgacatgggagttcccgagtatgcccttccagtactgactttcgtgaggagatcctcagcagctcggatgccagaaacgggccctgtgttggtgcactgcagtgctggtgtgggcagaacaggcacctatattgtaatagacagcatgctgcaacagataaaagacaaaagcacagttaacgtcctgggattcctgaagcatatcaggacacagcgtaactacctcgtccagactgaggagcagtacattttcatccatgatgccttgttggaagccattcttggaaaggagactgaagtatcttcaaatcagctgcacagctatgttaacagcatccttataccaggagtaggaggaaagacacgactggaaaagcaattcaagctggtcacacagtgtaatgcaaaatatgtggaatgtttcagtgctcagaaagagtgtaacaaagaaaagaacagaaactcttcagttgtgccatctgagcgtgctcgagtgggtcttgcaccattgcctggaatgaaaggaacagattacattaatgcttcttatatcatgggctattataggagcaatgaatttattataactcagcatcctctgccacatactacgaaagatttctggcgaatgatttgggatcataacgcacagatcattgtcatgctgccagacaaccagagcttggcagaagatgagtttgtgtactggccaagtcgagaagaatccatgaactgtgaggcctttaccgtcacccttatcagcaaagacagactgtgcctctctaatgaagaacaaattatcatccatgactttatccttgaagctacacaggatgactatgtcttagaagttcggcactttcagtgtcccaaatggcctaacccagatgcccccataagtagtacctttgaacttatcaacgtcatcaaggaagaggccttaacaagggatggtcccaccattgttcatgatgagtatggagcagtttcagcaggaatgttatgtgcccttaccaccctgtcccagcaactggagaatgaaaatgctgtggatgttttccaggttgcaaaaatgatcaatcttatgaggcctggagtattcacagacattgaacaataccagttcatctataaagcaatgcttagcttggtcagcactaaagaaaatggaaatggtcccatgacagtagacaaaaatggtgctgttcttattgcagatgaatcagaccctgctgagagcatggagtccctagtgtgactggaatcctgaaagggcacttaatttgtaaacttctgaagactgagaacttttttgaggccttttttgccagactctaggttatacaataacccagttacttttttacactgataaaagttttgatatttattttttgccattttatgtcttaatggtatcctactgagcatttgcacctctgttcatttcacacagtgaaacgcaattttacctagtttgcactatatgatcagtgttactgcctataatcttatacaacagcaaaccctgatgtgacattccatgacgacatacatgctacttttttttagttcaatacagtgaaggtctttgttatgacagtgaatattgcttttattattattattgctgaagtggttgcattctactagcaggcaatgctgtacttttcttcagtcctcctctcctttttattttaggcactgttcaatactgtatgccttctgtattttaatggagtggatagcattgttttcttttacagactagcaggctactgggacctaaaaaggtctgttaatgtcatggccttgaaacagttccatttatgctggttaagagatcccttaagaagttagaaggcttaagaactgcttcatgtgaacatcccttattagttacaaagttatattcacagttttttaaaaatgtgtcaaaataaaggataactctgtattacagctttcacagtagctatgtggacaatgtgttatttccattttgactctctaaaatagctacatcctaaaatcagggctatctttaacaatagcaagatagcaatattatatacaactcagttatgagaccctttagttattctccattaatgcttcttagtttgtaataccatacctcacagtaggtagaagaatgaaaacttctgcaggtgtgtaattttgaaactagtcctctaaaaattccctattactcctatagcaatctaataaaaactacctacatagttactgttttctttccttctttgccaaatgttttataataaatctcttaattacatacatttttctacttaagattaaattggaaatactgtmttagcaaaagtcttgggactatctaaactcccacacatagataaatctgatttggagagagaaatttaaaatatttaattaaaggtgatacccacattttcaagtttttaaaagagggagatggctttgtatgcttttgtgtagtttagaacagatacacattagtaaaagataccaataatcattagagctcaaggaagttattaggtgcagcctctggagccatactcacgctgcagtgcataatgggaaaattaggagcattaataagaaatttcag

SEQ ID NO: 4854 - DNA, 3422 bp, Homo sapiens
ttgggggcctgatctgactgacgtcagggggtgcctactccttcgaggcaagaagcctgaactttccttcctgtcactgtgaatacttggccagggctgtgaatgtcaccattgcttttcaggaagaagacatggcagactagggctgcaccttctttatgggctctgtaggtctgaaagaaatcagatcagcctgggatccctcagccaactctgaagacaggatggggatcacgcctgcatgttaaagagatttctgccttgttgtgtctcatggtaaataaaaaacccagcaaagaagcaaacagctcactgtcctctggatctgctgcgtcctgcaggagcattgcgcttaaactatgggaagcggcacctccacccaacatcattttgctttccagaatgcagagagagccttcaaggcagcagccctgatccagagatggtaccggcgctacgtggcccgcctggagatgaggcggcgttgcacctggagcatcttccagtctatagaatatgctgggcagcaagaccaagtcaagctccatgacttcttcagctatctcatggatcacttcatccccagcagccacaacgacagggacttcctgacccgcatattcactgaggacagatkcgcccaggactccgagatgaagaaatgcagtgactatgaatccatagaggtacccgacagttacacggggccahgcctctccttcccactcctgcctgaccatgcaactgccctggtagaagcattcagactgaaacaacagctccatgctcgctacgtcttgaaccttttgtatgaaaccaagaaacatctggtacagctgccaaacatcaaccgggtctcaacctgttacagyraggagatcacagtgtgtggagacttacatggccaattggatgacttaatctttatattttataagaatggcctcccrtcgccagaacggtcatatgtgttcaacggtgactttgtggatcgaggcaaggattcagtagagatcctgatgattctttttgccttcatgctggtttaccccaaagagttccatcttaacagaggaaaccatgaggaccatatggtgaacttacgatatggcttcaccaaggaagtgatgaataaatacaaggtacacgggaaggaaatactaagaaccctgcaagatgttttctgttggcttccactggccactctgatagatgagaaagttctaattcttcatggtggggtgtcagacataactgatctggagcttttggacaaaatagagaggagcaagatagtttccaccatgaggtgcaaaacgagacagaagagtgagaagcagatggaggagaagagaagagccaaccagaagagctctgcacagggacccatcccatggtttctccccgaaagccgctctcttccctcttcgccccttcggcttggctcctacaaggcccagaaaaccagcaggtcctccagcatcccctgcagcggttccctggacgggcgggagctctcccggcaggtgcggagctccstggaactggagctagagcggtgccggcagcaagcaggcctcctggtgaccggaragaaagaggagccctcccgctcagcctcagaagcagactctgaagccggagagctgcggaagcccactcaggaggagtggaggcaggttgtagatatcctgtggagtgatcccatggctcaagagggctgcaaggccaacactattcgaggaggaggctgttattttgggcctgatgtgacacaacagttgctacaaaaatacaacctgcaattcctgatccgttcacatgaatgcaaacctgaaggctatgaattctgtcacaaccgcaaggtattaacaatcttttctgcctccaactactatgaagttggcagcaacagaggggcctatgtcaaactggggccagccctgaccccacatatygtgcagtatcaagctaacaaggtgacccacacactcaccatgaggcaaaggattagcaragtggaggagtcggctctgagagctctgagggagaagctgtttgctcattcttcagatcttctcwgtgaatttaagaagcatgatgcagataaagtcggtttaatcaccttgagtgactgggcagcagcggtggagtctgtgttgcacctaggactgccatggcggatgctgaggccacagctggtgaacagctcagcagacaacatgctggagtacaagtcttggctgaagaacttggccaaggaacaactgagtcgcgagaacatacaatcaagtttgctggaaacattgtatcgaaacygatccaacctagagaccatttttaggatcatagacagtgatcattcagggttcatctcactggacgagttcaggcagacctggaagctgttcagctctcacatgaatatcgacattacagatgactgcatctgtgaccttgctcggagcattgatttcaacaaagatggccacattgatatcaatgagttcctggaggccttccgccttgtggagaaatcctgcccagagggcgatgcctcagaatgcccacaagctacaaatgctaaagacagtggctgcagcagtccaggtgcacactaagaacagcctggtcttcatcacccaaagtgcctcataggcaatgctcagcttctcactagactatctcccttattctccatgtgaaactttatgctgaaaatttacctatccatatgcatcagaatcacctgtgtatttcagtgtggaggggtgggttggggtgttgtgtatgtatgtgttttaagtatatgagtgccccaaccccacctcacaatcttcacaaagtagaacttaggtatagtgttttcaaattctaaagtccacttcagttaagaaccactgacaatgtaactctctcattgttttcattttatacgtttttttgagatggagtttctctcttgttgcccaggctggagtgcattggcgcgatctcggctcaccgcaaagtccgcctcccaggcgattctcctgcctcagcctcctgagtagctgggattacaggcatgcaccaccacaccaggctaattttgtatttttagtagacacagggtttctccatgttggtcaggctggtcttgaactcccaacctcaggtgatccaccctcctcagcctcccaaagtgctgggattacaggcatgagccaccgcacccagcctattttatactttttatttattgtctttaacaatgtctattggtaaagsaaagttatttttaaaaattgtattgtaattccatgacccaagcatatggattttcttcattatttactttttcttacttgttactgtagtgtttatataattttatgttctacttttaaaaaaataaattaatatctaattgtaaacccttt

SEQ ID NO: 4855 - DNA, 759 bp, Homo sapiens
gcggsgcagtgcatcctgggttggcgtagccatggcgtctcgtgtcctttcagcctatgtcagccgcctgcccgcggcctttgcgccgctgccccgggtccggatgctggccgtggcccggcctctcagcaccgctctstgctccgcggggacccagacgaggctcgggactttgcagccggccttagtgctcgcgcagctttcagtaaattctcattttatgaaagacctgggcttagacagtttggaccaagtggagattatcatggccatggaagacgaatttgggtttgaaattcctgatatagatgctgaaaagttaatgtgtccacaagaaattgtagattacattgcagataagaaggatgtatatgaataaagtatcagaccctttggctttgctgagagaggactcagatgatagtgacgaatgtctggcagtgaggacacattttggcattcttgctgactctgacagagtgattctgatggacttgtatttaaattgtatgtgttttactctttgaaaataaatctataaaaccaacattttcccccatcttcagtttttcaatgatgtctataaagtgcttttttatgtttgtatactgacattgcttaatatttttaaaggtctgatttgtcatttgtattcatgcatgtcaaaaacaatggcttccccagccatgtacttgaagtaaggctgtctccccaccttcgtatcaggagtgaatatattcatggaaatggactttttgc

SEQ ID NO: 4856 - DNA, 882 bp, Homo sapiens
gcggsgcagtgcatcctgggttggcgtagccatggcgtctcgtgtcctttcagcctatgtcagccgcctgcccgcggcctttgcgccgctgccccgggtccggatgctggccgtggcccggcctctcagcaccgctctstgctccgcggggacccagacgaggctcgggactttgcagccggccttagtgctcgcgcaggttcctggtagagttacacagttgtgccgccagtatagcgacatgcctcctttgacgttagagggcatccaggaccgtgttctttacgtattgaaactctatgacaagattgacccagagaagctttcagtaaattctcattttatgaaagacctgggcttagacagtttggaccaagtggagattatcatggccatggaagacgaatttgggtttgaaattcctgatatagatgctgaaaagttaatgtgtccacaagaaattgtagattacattgcagataagaaggatgtatatgaataaagtatcagaccctttggctttgctgagagaggactcagatgatagtgacgaatgtctggcagtgaggacacattttggcattcttgctgactctgacagagtgattctgatggacttgtatttaaattgtatgtgttttactctttgaaaataaatctataaaaccaacattttcccccatcttcagtttttcaatgatgtctataaagtgcttttttatgtttgtatactgacattgcttaatatttttaaaggtctgatttgtcatttgtattcatgcatgtcaaaaacaatggcttccccagccatgtacttgaagtaaggctgtctccccaccttcgtatcaggagtgaatatattcatggaaatggactttttgc

SEQ ID NO: 4857 - DNA, 3557 bp, Homo sapiens
ttccatcccacatggcggcgctcctgaggagactgctgcagcgcgagaggccttcggcggcctctggccgccccgtaggacggcgcgaggccaacctgggcactgatgccggggttgcggtgcgagtgcggttcgctcccagccccacaggcttcttgcacctgggtggcctccgcactgccttgtacaactacatctttgctaagaagtaccaggggagcttcatcctgaggctagaggacacagatcagactcgcgttgtgcctggggcagcrgagaatattgaggacatgctggagtgggcaggcatcccgcctgatgagagcccccgccggggcggtcctgctgggccctaccagcaatctcagcggttggagctgtatgcccaggccacagaagcgctgctgaagaccggagctgcttacccctgtttctgctcaccccagcggctggagctcctgaagaaggaggccttgcggaaccaccagacgccccgctatgacagaggtaggactcctgtccatcaacctttccatcaacagtactcatgctgctctgctccccatcaggtatgacaatcggtgcaggaacatgagccaggagcaggtggcccagaagctggccaaggaccccaagcctgcgatccgcttccgcctggagcaggtggtgccagccttccaggacctggtstatggctggaataggcatgaagtggccagcgtggagggagacccagtcatcatgaagagcgacggcttccccacataccacctggcctgcgtggtggacgaccaccacatgggcatcagccacgtgctgcgaggctctgagtggctcgtctccactgccaagcacctgctcctctaccaggccctgggctggcagccaccccacttcgcccacctgcccctgctcctcaacagggatggcagcaagctctccaagaggcaaggggaygttttcctggagcactttgctgctgatggcttcctgcccgattccttgttggacatcatcaccaactgtggctcaggttttgcagagaaccaaatgggcaggaccctgccggagctgatcacacagttcaacctgacacaggtcacctgtcactcagccctgctggacctggagaagctcccagaattcaacagactgcacctccagcggctggtgagcaatgagagccagaggcgccagctggtggggaagctgcaggtccttgtggaggaggcctttggttgccagctgcaaaacagggatgtcctcaacccagtctacgtggagaggatcctcctgctgagacagggtcacatttgccgcctgcaggacttggtgtccccagtatactcttacctgtggactcgccctgcagtaggtcgagcacagctggacgccatctcggagaaggtggatgtgattgccaagcgtgtgctggggcttctagaaagatctrgtatgagcttaactcaggatatgctgaatggagaactgaagaagctatcagaaggtctggaaggcaccaagtacagtaatgtgatgaaactccttcggatggccctcagtggacagcagcaaggacctcctgtagctgagatgatgttggccttgggaccaaaggaagtacgggaacggatccagaaggtggtttccagctagggagaggatgtktcgggcagtggagatcgccctaagaacctgtgagcttagaaacagctttcagagaccagaaggaggcctggggcccgtcgggaagtttgctgaaggaactaagagtggaaacaatctctgactgcacacaagtgcatttgtgatccaccacaggcacgtttttgtcaattggctggggaagcccaacccatctaacctcctggactctggaaaggcattctccgggtctggtttctcacacattacacagcagaggtttggagttagttcacagaaaagttaacatcccggaacagtgcagaaggcttgggtttcagtttgctagggcccccataacaaaatgccacagaaccaggtggtttaaacaacagagatttattttctcacatttggaggctagaagttcaagatcaaggtgtcagcaggcctggtttttcctagaggcctcttttgttggcttgcagacagctgtcttctcactgtgtccttgtgcggtcttccctccatgcacacacatctctagtttcattatgtgcccaacgttcctcttctaagaacaccagttggactggattttaactttaaccagcctcatttaagttaatcacctctttaaatgctcaatctccaagtacagtctcattctgaggttccaggggtttctcaacgtaagaatttagggggacagaattcagcccgtagcagctgggcagcaggactcatgggtcccagttctcaggcyccaaggactcagagcagcaaaggatacgtgacacaagcagggctgaactggacaccagactttctttggggttgtaaaaggagaagtgtgactccactgccaaggtcttccagacctggtccttggactggagaccttcacccttcctattttgtggctttctcttcaaatccacctcgtccttcctccatgacttataagtcatcatctctgctggtttctgaaatgagatatgcttcttggggtcttcagtgaagaggaatagcaagtgaaaggaggatggtggcagrgtacatgaacccctaccaggcttctaggcttcccctgcatggcagccagcctctaagttggcccccaaccatccctgccttcttctattcacacccttgtgtggttccttcccacattgaataggcctgacttgtgtaaccactacactattgaagaaatgagagtttgacttctgagggtaagycataaaatacatcgtggcttctgtcttgttttctttgatcgcttactttgggggaagccagcttccaggtcatgaaaatactcaagcagccttatggagtgctccacatgacaagggatsgaggcctcccaccaatagccatgggagtgtgcaatcttgaaagctggtccttcaattccagccaagcattcacatgaccgcaatcctagctgatctcgcttgtgacctctatgggagaccctaagccagaaccactcagagaagctgctcyggaacgtcagacacacatgaactgtgagatagtaaacgtttattgtttaaagctacttggtttggggataatttgcgtttcagcagtagacaatatatttattttgtccaggggagtggaaaggcgattacagagtttgttgagccccatagagtcctagtctttgcttaaagaaatataccagttctttctaatacagaatccattaagttcgttggttgcaaacaatagaaaccaactctgcctcacttatgtttattggaggccataagagagccacagcatctaccaaaaagccaaaaaaaaaacaggttttggaaaagacaggaactagctacaggagctaatggccaatcttgtctgagttctttgatggcgacacatgaactacagccgttttg

SEQ ID NO: 4858 - DNA, 3484 bp, Homo sapiens
ttccatcccacatggcggcgctcctgaggagactgctgcagcgcgagaggccttcggcggcctctggccgccccgtaggacggcgcgaggccaacctgggcactgatgccggggttgcggtgcgagtgcggttcgctcccagccccacaggcttcttgcacctgggtggcctccgcactgccttgtacaactacatctttgctaagaagtaccaggggagcttcatcctgaggctagaggacacagatcagactcgcgttgtgcctggggcagcrgagaatattgaggacatgctggagtgggcaggcatcccgcctgatgagagcccccgccggggcggtcctgctgggccctaccagcaatctcagcggttggagctgtatgcccaggccacagaagcgctgctgaagaccggagctgcttacccctgtttctgctcaccccagcggctggagctcctgaagaaggaggccttgcggaaccaccagacgccccggtatgacaatcggtgcaggaacatgagccaggagcaggtggcccagaagctggccaaggaccccaagcctgcgatccgcttccgcctggagcaggtggtgccagccttccaggacctggtstatggctggaataggcatgaagtggccagcgtggagggagacccagtcatcatgaagagcgacggcttccccacataccacctggcctgcgtggtggacgaccaccacatgggcatcagccacgtgctgcgaggctctgagtggctcgtctccactgccaagcacctgctcctctaccaggccctgggctggcagccaccccacttcgcccacctgcccctgctcctcaacagggatggcagcaagctctccaagaggcaaggggaygttttcctggagcactttgctgctgatggcttcctgcccgattccttgttggacatcatcaccaactgtggctcaggttttgcagagaaccaaatgggcaggaccctgccggagctgatcacacagttcaacctgacacaggtcacctgtcactcagccctgctggacctggagaagctcccagaattcaacagactgcacctccagcggctggtgagcaatgagagccagaggcgccagctggtggggaagctgcaggtccttgtggaggaggcctttggttgccagctgcaaaacagggatgtcctcaacccagtctacgtggagaggatcctcctgctgagacagggtcacatttgccgcctgcaggacttggtgtccccagtatactcttacctgtggactcgccctgcagtaggtcgagcacagctggacgccatctcggagaaggtggatgtgattgccaagcgtgtgctggggcttctagaaagatctrgtatgagcttaactcaggatatgctgaatggagaactgaagaagctatcagaaggtctggaaggcaccaagtacagtaatgtgatgaaactccttcggatggccctcagtggacagcagcaaggacctcctgtagctgagatgatgttggccttgggaccaaaggaagtacgggaacggatccagaaggtggtttccagctagggagaggatgtktcgggcagtggagatcgccctaagaacctgtgagcttagaaacagctttcagagaccagaaggaggcctggggcccgtcgggaagtttgctgaaggaactaagagtggaaacaatctctgactgcacacaagtgcatttgtgatccaccacaggcacgtttttgtcaattggctggggaagcccaacccatctaacctcctggactctggaaaggcattctccgggtctggtttctcacacattacacagcagaggtttggagttagttcacagaaaagttaacatcccggaacagtgcagaaggcttgggtttcagtttgctagggcccccataacaaaatgccacagaaccaggtggtttaaacaacagagatttattttctcacatttggaggctagaagttcaagatcaaggtgtcagcaggcctggtttttcctagaggcctcttttgttggcttgcagacagctgtcttctcactgtgtccttgtgcggtcttccctccatgcacacacatctctagtttcattatgtgcccaacgttcctcttctaagaacaccagttggactggattttaactttaaccagcctcatttaagttaatcacctctttaaatgctcaatctccaagtacagtctcattctgaggttccaggggtttctcaacgtaagaatttagggggacagaattcagcccgtagcagctgggcagcaggactcatgggtcccagttctcaggcyccaaggactcagagcagcaaaggatacgtgacacaagcagggctgaactggacaccagactttctttggggttgtaaaaggagaagtgtgactccactgccaaggtcttccagacctggtccttggactggagaccttcacccttcctattttgtggctttctcttcaaatccacctcgtccttcctccatgacttataagtcatcatctctgctggtttctgaaatgagatatgcttcttggggtcttcagtgaagaggaatagcaagtgaaaggaggatggtggcagrgtacatgaacccctaccaggcttctaggcttcccctgcatggcagccagcctctaagttggcccccaaccatccctgccttcttctattcacacccttgtgtggttccttcccacattgaataggcctgacttgtgtaaccactacactattgaagaaatgagagtttgacttctgagggtaagycataaaatacatcgtggcttctgtcttgttttctttgatcgcttactttgggggaagccagcttccaggtcatgaaaatactcaagcagccttatggagtgctccacatgacaagggatsgaggcctcccaccaatagccatgggagtgtgcaatcttgaaagctggtccttcaattccagccaagcattcacatgaccgcaatcctagctgatctcgcttgtgacctctatgggagaccctaagccagaaccactcagagaagctgctcyggaacgtcagacacacatgaactgtgagatagtaaacgtttattgtttaaagctacttggtttggggataatttgcgtttcagcagtagacaatatatttattttgtccaggggagtggaaaggcgattacagagtttgttgagccccatagagtcctagtctttgcttaaagaaatataccagttctttctaatacagaatccattaagttcgttggttgcaaacaatagaaaccaactctgcctcacttatgtttattggaggccataagagagccacagcatctaccaaaaagccaaaaaaaaaacaggttttggaaaagacaggaactagctacaggagctaatggccaatcttgtctgagttctttgatggcgacacatgaactacagccgttttg

SEQ ID NO: 4859 - DNA, 3956 bp, Homo sapiens
ttccatcccacatggcggcgctcctgaggagactgctgcagcgcgagaggccttcggcggcctctggccgccccgtaggacggcgcgaggccaacctgggcactgatgccggggttgcggtgcgagtgcggttcgctcccagccccacaggcttcttgcacctgggtggcctccgcactgccttgtacaactacatctttgctaagaagtaccaggggagcttcatcctgaggctagaggacacagatcagactcgcgttgtgcctggggcagcrgagaatattgaggacatgctggagtgggcaggcatcccgcctgatgagagcccccgccggggcggtcctgctgggccctaccagcaatctcagcggttggagctgtatgcccaggccacagaagcgctgctgaagaccggagctgcttacccctgtttctgctcaccccagcggctggagctcctgaagaaggaggccttgcggaaccaccagacgccccgctatgacagaggtaggactcctgtccatcaacctttccatcaacagtactcatgctgctctgctccccatcaggtatgacaatcggtgcaggaacatgagccaggagcaggtggcccagaagctggccaaggaccccaagcctgcgatccgcttccgcctggagcaggtggtgccagccttccaggacctggtstatggctggaataggcatgaagtggccagcgtggagggagacccagtcatcatgaagagcgacggcttccccacataccacctggcctgcgtggtggacgaccaccacatgggcatcagccacgtgctgcgaggctctgagtggctcgtctccactgccaagcacctgctcctctaccaggccctgggctggcagccaccccacttcgcccacctgcccctgctcctcaacagggatggcagcaagctctccaagaggcaaggggaygttttcctggagcactttgctgctgatggcttcctgcccgattccttgttggacatcatcaccaactgtggctcaggttttgcagagaaccaaatgggcaggaccctgccggagctgatcacacagttcaacctgacacaggtcacctgtcactcagccctgctggacctggagaagctcccagaattcaacagactgcacctccagcggctggtgagcaatgagagccagaggcgccagctggtggggaagctgcaggtccttgtggaggaggcctttggttgccagctgcaaaacagggatgtcctcaacccagtctacgtggagaggatcctcctgctgagacagggtcacatttgccgcctgcaggacttggtgtccccagtatactcttacctgtggactcgccctgcagtaggtcgagcacagctggacgccatctcggagaaggtggatgtgattgccaagcgtgtgctggggtgagcttctagaaagatctrgtatgagcttaactcaggatatgctgaatggagaactgaagaagctatcagaaggtctggaaggcaccaagtacagtaatgtgatgaaactccttcggatggccctcagtggacagcagcaaggacctcctgtagctgagatgatgttggccttgggaccaaaggaagtacgggaacggatccagaaggtggtttccagctagggagaggatgtktcgggcagtggagatcgccctaagaacctgtgagcttagaaacagctttcagagaccagaaggaggcctggggcccgtcgggaagtttgctgaaggaactaagagtggaaacaatctctgactgcacacaagtgcatttgtgatccaccacaggcacgtttttgtcaattggctggggaagcccaacccatctaacctcctggactctggaaaggcattctccgggtctggtttctcacacattacacagcagaggtttggagttagttcacagaaaagttaacatcccggaacagtgcagaaggcttgggtttcagtttgctagggcccccataacaaaatgccacagaaccaggtggtttaaacaacagagatttattttctcacatttggaggctagaagttcaagatcaaggtgtcagcaggcctggtttttcctagaggcctcttttgttggcttgcagacagctgtcttctcactgtgtccttgtgcggtcttccctccatgcacacacatctctagtttcattatgtgcccaacgttcctcttctaagaacaccagttggactggattttaactttaaccagcctcatttaagttaatcacctctttaaatgctcaatctccaagtacagtctcattctgaggttccaggggtttctcaacgtaagaatttagggggacagaattcagcccgtagcagctgggcagcaggactcatgggtcccagttctcaggcyccaaggactcagagcagcaaaggatacgtgacacaagcagggctgaactggacaccagactttctttggggttgtaaaaggagaagtgtgactccactgccaagggtaagcactcttgtcttatgctaccctttattcttgaaccttggggcagcctgtgtctcccttccctaaacgtcatctgttccgtttttccagtcttccagacctggtccttggactggagaccttcacccttcctattttgtggctttctcttcaaatccacctcgtccttcctccatgacttataagtcatcatctctgctggtttctgaaatgagatatgcttcttggggtcttcagtgaagaggaatagcaagtgaaaggaggatggtggcagrgtacatgaacccctaccaggcttctaggcttcccctgcatggcagccagcctctaagttggcccccaaccatccctgccttcttctattcacacccttgtgtggttccttcccacattgaataggcctgacttgtgtaaccactacactattgaagaaatgagagtttgacttctgagggtaagycataaaatacatcgtggcttctgtcttgttttctttgatcgcttactttgggggaagccagcttccaggtcatgaaaatactcaagcagccttatggagtgctccacatgacaagggatsgaggcctcccaccaatagccatgggagtgtgcaatcttgaaagctggtccttcaattccagccaagcattcacatgaccgcaatcctagctgatctcgcttgtgacctctatgggagaccctaagccagaaccactcagagaagctgctcyggaacgtcagacacacatgaactgtgagatagtaaacgtttattgtttaaagctacttggtttggggataatttgcgtttcagcagtagacaatatatttattttgtccaggggagtggaaaggcgattacagagtttgttgagccccatagagtcctagtctttgcttaaagaaatataccagttctttctaatacagaatccattaagttcgttggttgcaaacaatagaaaccaactctgcctcacttatgtttattggaggccataagagagccacagcatctaccaaaaagccaaaaaaaaaacaggttttggaaaagacaggaactagctacaggagctaatggccaatcttgtctgagttctttgatggcgacacatgaactacagccgttttgttgttgttaatttctccgtgttttcccctcagttttggatgactctgctcaaggttcagattctgaggagcaagtatctgttgggctatctgaggtcctgctaccattccttggccagtaataggtagtttcacagggattatatgcaatggaggaaaagttgttctcaaggaaaactagggagctttctccagaagatgatgtaatggcagaaacaacaggtggttgaccacagaagsggacaataataatacttgtaatttattgtgcgcttatatgagcctcaccctctcccaggtgtc

SEQ ID NO: 4860 - DNA, 1016 bp, Homo sapiens
ctccgcgggtagtgccccgacaaggtggagcccggcgggcccgcgagtccgagacctgtcccaggagctccagctcacgtgacctgtcactgcctcccgccgcctcctgcccgcgccatgacccagccggtgccccggctctccgtgcccgccgcgctggccctgggctcagccgcactgggcgccgccttcgccactggcctcttcctggggaggcggtgccccccatggcgaggccggcgagagcagtgcctgcttccccccgaggacagccgcctgtggcagtatcttctgagccgctccatgcgggagcacccggcgctgcgaagcctgaggctgctgaccctggagcagccgcagggggattctatgatgacctgcgagcaggcccagctcttggccaacctggcgcggctcatccaggccaagaaggcgctggaccygggcaccttcacgggctactccgccctggccctggccctggcgctgcccgcggacgggcgcgtggtgacctgcgaggtggacgcgcagcccccggagctgggacggcccctgtggaggcaggccgaggcggagcacaagatcgacctccggctgaagcccgccttggagaccctggacgagctgctggcggcgggcgaggccggcaccttcgacgtggccgtggtggatgcggacaaggagaactgctccgcctactacgagcgctgcctgcagctgctgcgacccggaggcatcctcgccgtcctcagagtcctgtggcgcgggaaggtgctgcaacctccgaaaggggacgtggcggccgagtgtgtgcgaaacctaaacgaacgcatccggcgggacgtcagggtytacatcagcctcctgcccctgggcgatggactcaccttggccttcaagatctagggctggcccctagtgagtgggctcgagggagggttgcctgggaaccccaggaattgaccctgagttttaaattcgaaaataaagtggggctgggacacacgacctcctga

SEQ ID NO: 4861 - DNA, 1387 bp, Homo sapiens
cccggcgggcccgcgagtccgagacctgtcccaggagctccagctcacgtgacctgtcactgcctcccgccgcctcctgcccgcgccatgacccagccggtgccccggctctccgtgcccgccgcgctggccctgggctcagccgcactgggcgccgccttcgccactggcctcttcctgggtgagcaggacctggtcccggcgggcgggtgggcgggcgcagagtagggcgcggcgtggctcaggttaatccaacaccctctccccgtcagggaggcggtgccccccatggcgaggccggcgagagcagtgcctgcttccccccgaggacagccgcctgtggcagtatcttctgagccgctccatgcgggagcacccggcgctgcgaagcctgaggctggtcagcagggcgcgggacggaaacgggcgtccctctcgacccctgcgggtcccacgtggctgtgtgaccttgggctgggccctggccctccctgggcttccggcttccctgggccgggtgcggtgggcgttccgaagggccagtcccccaggccacgcccagaaccgcgcccctggggcttgggacccccagggcgaaggtgggtgacctgcatggctggtgccaccctctcctttcacgcagctgaccctggagcagccgcagggggattctatgatgacctgcgagcaggcccagctcttggccaacctggcgcggctcatccaggccaagaaggcgctggaccygggcaccttcacgggctactccgccctggccctggccctggcgctgcccgcggacgggcgcgtggtgacctgcgaggtggacgcgcagcccccggagctgggacggcccctgtggaggcaggtgagcgcccgcgcctagctctgcagccccaggcgggggcgcaacggctgacccgctccctccgcaggccgaggcggagcacaagatcgacctccggctgaagcccgccttggagaccctggacgagctgctggcggcgggcgaggccggcaccttcgacgtggccgtggtggatgcggacaaggagaactgctccgcctactacgagcgctgcctgcagctgctgcgacccggaggcatcctcgccgtcctcagagtcctgtggcgcgggaaggtgctgcaacctccgaaaggggacgtggcggccgagtgtgtgcgaaacctaaacgaacgcatccggcgggacgtcagggtytacatcagcctcctgcccctgggcgatggactcaccttggccttcaagatctagggctggcccctagtgagtgggctcgagggagggttgcctgggaaccccaggaattgaccctgagttttaaattcgaaaataaagtggggctgggacacacgacctcctga

SEQ ID NO: 4862 - DNA, 3657 bp, Homo sapiens
tataggtcttaaagaagtctaggagatttctagagaagggaaagaacamaagcagagaagtgaactgaagrgcatgtttggggaacaccaagtagtttcatttacagcagagttcaagaagagaaaaaagttaaggaagaaaaacccttgccaayccccaggccgcgaggccctctgaagccctgagcctggagcggtaggagacgggggaactgaaacgccgcggaaccagaggctgagggagcggcgcgatggagggaggaggagcgacggaccggcaggcctagctccggggctgcggcggctgaggcgsggggatggagcccctgcgggtgctggagctatacagcggcgtgggcggcatgcaccacgcgctgagagaaagctgtatacctgcacaagtggtggctgccattgatgtcaacactgtcgctaatgaagtatacaagtataattttcctcacacacagttacttgccaagacrattgaaggcrttacactcgaagagtttgacagattatctttygatatgattttaatgagccctccctgccagccattcacaagagacctcttgatacaaacaatagaaaattgtggctttcagtaccaagagtttctattatctccaacctctcttggcattccaaattcaaggctacgatattttcttattgcaaagcttcagtcagagccattaccctttcaagcccctggtcaggtaytkatggagttccccaaaattgaatctgtacatccacaaaaatatgcaatggatgtagaaaataaaattcaagaaaagaacgttgaaccaaatattagctttgatggcagcatacagtgttctggaaaagatgccattctttttaagcttgaaactgcagaagaaattcacaggaaaaatcaacaagatagtgatctctctgtgaaaatgctaaaagattttcttgaagatgacactgacgtgaaccagtatcttttaccaccaaagtcattgctgcgatatgctcttctgttagacattgttcagcccacttgtagaaggtccgtgtgctttaccaaaggatatggaagctacatagaagggacagggtctgtgttacagactgcagaggatgtgcaggttgagaatatctacaaatcccttaccaatttgtcacaagaagaacagataacaaagctgttaatacttaaactgcgatatttcactcctaaagaaatagcaaatctccttggatttcctccagagttcggatttcctgagaagataacagtgaaacagcgttatcgcctacttggaaatagtctcaacgtgcatgtagtagctaaactaatcaaaatcttatatgaataattttgaaataactctgaaagatggtcatatgatattccttcattttcagagagtaattctgaaattctgttttgaactaattctggtgaaatttaactaaattattttaatctgtccttattaagaaatttggattttattaaaaaaatccatgtgtttcatcaaatttatattactgtattttataaaatacgaactattgttatgctttatggagagtatattttcatatgaaactgataaatatatatgtggaatattctttttaaaaacrattttataaacaaatcaaggagcactagagctttagtgtctacatgagtatcttgtgaagtgtcataacaggcataacatatttttatgttaattaaagaagttttttatttctaattttaaaataatgattctaattctagcccattgaatgttttacttaatttccaatcctgtaaatatttctttatttcatctaaacaaatgcatatgatatgtaaaccaaattatcatcattcagtttatacagcagactgaagaatatgtcaggaaaaataatcctaaatgtttgattacctctccatgaagcggccacagaaactgttggtgcacattatctacattttcctcagcctctatctgaaggacaaaactcatttttccttcttcattttgtatgtactttcctttagttgactattatcaaagcttgtttttgtcttctcagcttctgagttgaatttgcctttgcacgctgaggaatgtagcatgacgttaagatttcagggaggaagctgccctctgatcccatgtcatatgacagtactcccctccccccagttgttctttattgtagcaacatacactctcaatgaacttttatgacttttaactttctctgtctctcttcctcagcagacctcttggaattagggtttctaatcaaactaagtcttgcatcataaattctatggtttgtgataaaagcaagtgacaaagagaagagagatgaaaagaaacaagtccagaaatcatattacaagattttaattcaaatttttcttcttaaaaatcagctatttagaggtggataaattggaagtttgtgcattgcttgtgggaacgtaaaatggttcagctgctgttggaaaacgctatggaggttcgtcacaaaattcaacatagaattaccctatgattcagcgattccacctctggctatagatccaaaagaattgaaagcagggacttgaacagatatttgtacaccagygtttataacaccattatttacagtagccaaaaggtagaagcagcccaagtgtcatcccattcacccatgaatggatgcaggaattgtgttccgtgcatgcagtggaatagtaccagccttccgcaggaaggaaattctgacatatgcggtgacatggatgaaccttgagtacattatgcgaagtgaaataagccaccctgtggggatggagaatgggtagttagtgcataatggatacaaagtttctgattggggtgatgagaaagttctggaggtggatggggaggatggttgcacaacagtgtgagtgtacttaatgccactgcaactgtatatttaaaaatagttaaaatgataaattttacattatgtatattttactgcaattgaaaaaatcatactctattaccaatttttcagaactcatagataaatatgaatgtagggaagctgtaagccagcccatatacagaaactatcactatctacatttttcatatgtgttcagacagagcctattacaagtctcataaatttcagtaaacaatcacaaattattttggcacactttcatgtaggttctgttcactgctgaaatattctaaataaaatggtttagagttttactgtaactatgaataattatgctataattatagtatcccacattcggttgagcaacattatacaaaataagtgtcgagttactgtgcaccaactataaatacttgaaaggtctgtagagacatttgcttacaaactggtagacagaatgtagcttagtggaattcttaaattatgggaatgtattcacaggaagacggtgattcttgcccttaattcataattgaaaatatgcagtaacaagcataaaactcacatcttaatgaagatgtatctaccagtgtcattcaattagcagatgtatatgtatgcataattaatttggaaaatgttattttatggaatgtctgctatatgcttttggtaataatgctgtatataaaatttgcactggaaattctgtttcctgat

SEQ ID NO: 4863 - DNA, 3723 bp, Homo sapiens
tataggtcttaaagaagtctaggagatttctagagaagggaaagaacamaagcagagaagtgaactgaagrgcatgtttggggaacaccaagtagtttcatttacagcagagttcaagaagagaaaaaagttaaggaagaaaaacccttgccaayccccaggccgcgaggccctctgaagccctgagcctggagcggtaggagacgggggaactgaaacgccgcggaaccagaggctgagggagcggcgcgatggagggaggaggagcgacggaccggcaggcctagctccggggctgcggcggctgaggcgsggggatggagcccctgcgggtgctggagctatacagcggcgtgggcggcatgcaccacgcgctgagagaaagctgtatacctgcacaagtggtggctgccattgatgtcaacactgtcgctaatgaagtatacaagtataattttcctcacacacagttacttgccaagacrattgaaggcrttacactcgaagagtttgacagattatctttygatatgattttaatgagccctccctgccagccattcacaagattacaaaaattaccaaagtatattcttttggaaaatgttaaaggttttgaagtatcttctacaagagacctcttgatacaaacaatagaaaattgtggctttcagtaccaagagtttctattatctccaacctctcttggcattccaaattcaaggctacgatattttcttattgcaaagcttcagtcagagccattaccctttcaagcccctggtcaggtaytkatggagttccccaaaattgaatctgtacatccacaaaaatatgcaatggatgtagaaaataaaattcaagaaaagaacgttgaaccaaatattagctttgatggcagcatacagtgttctggaaaagatgccattctttttaagcttgaaactgcagaagaaattcacaggaaaaatcaacaagatagtgatctctctgtgaaaatgctaaaagattttcttgaagatgacactgacgtgaaccagtatcttttaccaccaaagtcattgctgcgatatgctcttctgttagacattgttcagcccacttgtagaaggtccgtgtgctttaccaaaggatatggaagctacatagaagggacagggtctgtgttacagactgcagaggatgtgcaggttgagaatatctacaaatcccttaccaatttgtcacaagaagaacagataacaaagctgttaatacttaaactgcgatatttcactcctaaagaaatagcaaatctccttggatttcctccagagttcggatttcctgagaagataacagtgaaacagcgttatcgcctacttggaaatagtctcaacgtgcatgtagtagctaaactaatcaaaatcttatatgaataattttgaaataactctgaaagatggtcatatgatattccttcattttcagagagtaattctgaaattctgttttgaactaattctggtgaaatttaactaaattattttaatctgtccttattaagaaatttggattttattaaaaaaatccatgtgtttcatcaaatttatattactgtattttataaaatacgaactattgttatgctttatggagagtatattttcatatgaaactgataaatatatatgtggaatattctttttaaaaacrattttataaacaaatcaaggagcactagagctttagtgtctacatgagtatcttgtgaagtgtcataacaggcataacatatttttatgttaattaaagaagttttttatttctaattttaaaataatgattctaattctagcccattgaatgttttacttaatttccaatcctgtaaatatttctttatttcatctaaacaaatgcatatgatatgtaaaccaaattatcatcattcagtttatacagcagactgaagaatatgtcaggaaaaataatcctaaatgtttgattacctctccatgaagcggccacagaaactgttggtgcacattatctacattttcctcagcctctatctgaaggacaaaactcatttttccttcttcattttgtatgtactttcctttagttgactattatcaaagcttgtttttgtcttctcagcttctgagttgaatttgcctttgcacgctgaggaatgtagcatgacgttaagatttcagggaggaagctgccctctgatcccatgtcatatgacagtactcccctccccccagttgttctttattgtagcaacatacactctcaatgaacttttatgacttttaactttctctgtctctcttcctcagcagacctcttggaattagggtttctaatcaaactaagtcttgcatcataaattctatggtttgtgataaaagcaagtgacaaagagaagagagatgaaaagaaacaagtccagaaatcatattacaagattttaattcaaatttttcttcttaaaaatcagctatttagaggtggataaattggaagtttgtgcattgcttgtgggaacgtaaaatggttcagctgctgttggaaaacgctatggaggttcgtcacaaaattcaacatagaattaccctatgattcagcgattccacctctggctatagatccaaaagaattgaaagcagggacttgaacagatatttgtacaccagygtttataacaccattatttacagtagccaaaaggtagaagcagcccaagtgtcatcccattcacccatgaatggatgcaggaattgtgttccgtgcatgcagtggaatagtaccagccttccgcaggaaggaaattctgacatatgcggtgacatggatgaaccttgagtacattatgcgaagtgaaataagccaccctgtggggatggagaatgggtagttagtgcataatggatacaaagtttctgattggggtgatgagaaagttctggaggtggatggggaggatggttgcacaacagtgtgagtgtacttaatgccactgcaactgtatatttaaaaatagttaaaatgataaattttacattatgtatattttactgcaattgaaaaaatcatactctattaccaatttttcagaactcatagataaatatgaatgtagggaagctgtaagccagcccatatacagaaactatcactatctacatttttcatatgtgttcagacagagcctattacaagtctcataaatttcagtaaacaatcacaaattattttggcacactttcatgtaggttctgttcactgctgaaatattctaaataaaatggtttagagttttactgtaactatgaataattatgctataattatagtatcccacattcggttgagcaacattatacaaaataagtgtcgagttactgtgcaccaactataaatacttgaaaggtctgtagagacatttgcttacaaactggtagacagaatgtagcttagtggaattcttaaattatgggaatgtattcacaggaagacggtgattcttgcccttaattcataattgaaaatatgcagtaacaagcataaaactcacatcttaatgaagatgtatctaccagtgtcattcaattagcagatgtatatgtatgcataattaatttggaaaatgttattttatggaatgtctgctatatgcttttggtaataatgctgtatataaaatttgcactggaaattctgtttcctgat

SEQ ID NO: 4864 - DNA, 3795 bp, Homo sapiens
tataggtcttaaagaagtctaggagatttctagagaagggaaagaacamaagcagagaagtgaactgaagrgcatgtttggggaacaccaagtagtttcatttacagcagagttcaagaagagaaaaaagttaaggaagaaaaacccttgccaayccccaggccgcgaggccctctgaagccctgagcctggagcggtaggagacgggggaactgaaacgccgcggaaccagaggctgagggagcggcgcgatggagggaggaggagcgacggaccggcaggcctagctccggggctgcggcggctgaggcgsggggatggagcccctgcgggtgctggagctatacagcggcgtgggcggcatgcaccacgcgctgagagaaagctgtatacctgcacaagtggtggctgccattgatgtcaacactgtcgctaatgaagtatacaagtataattttcctcacacacagttacttgccaagacrattgaaggcrttacactcgaagagtttgacagattatctttygatatgattttaatgagccctccctgccagccattcacaaggattggccggcagggtgatatgactgattcaaggacgaatagcttcttayatattctagatattctcccaagattacaaaaattaccaaagtatattcttttggaaaatgttaaaggttttgaagtatcttctacaagagacctcttgatacaaacaatagaaaattgtggctttcagtaccaagagtttctattatctccaacctctcttggcattccaaattcaaggctacgatattttcttattgcaaagcttcagtcagagccattaccctttcaagcccctggtcaggtaytkatggagttccccaaaattgaatctgtacatccacaaaaatatgcaatggatgtagaaaataaaattcaagaaaagaacgttgaaccaaatattagctttgatggcagcatacagtgttctggaaaagatgccattctttttaagcttgaaactgcagaagaaattcacaggaaaaatcaacaagatagtgatctctctgtgaaaatgctaaaagattttcttgaagatgacactgacgtgaaccagtatcttttaccaccaaagtcattgctgcgatatgctcttctgttagacattgttcagcccacttgtagaaggtccgtgtgctttaccaaaggatatggaagctacatagaagggacagggtctgtgttacagactgcagaggatgtgcaggttgagaatatctacaaatcccttaccaatttgtcacaagaagaacagataacaaagctgttaatacttaaactgcgatatttcactcctaaagaaatagcaaatctccttggatttcctccagagttcggatttcctgagaagataacagtgaaacagcgttatcgcctacttggaaatagtctcaacgtgcatgtagtagctaaactaatcaaaatcttatatgaataattttgaaataactctgaaagatggtcatatgatattccttcattttcagagagtaattctgaaattctgttttgaactaattctggtgaaatttaactaaattattttaatctgtccttattaagaaatttggattttattaaaaaaatccatgtgtttcatcaaatttatattactgtattttataaaatacgaactattgttatgctttatggagagtatattttcatatgaaactgataaatatatatgtggaatattctttttaaaaacrattttataaacaaatcaaggagcactagagctttagtgtctacatgagtatcttgtgaagtgtcataacaggcataacatatttttatgttaattaaagaagttttttatttctaattttaaaataatgattctaattctagcccattgaatgttttacttaatttccaatcctgtaaatatttctttatttcatctaaacaaatgcatatgatatgtaaaccaaattatcatcattcagtttatacagcagactgaagaatatgtcaggaaaaataatcctaaatgtttgattacctctccatgaagcggccacagaaactgttggtgcacattatctacattttcctcagcctctatctgaaggacaaaactcatttttccttcttcattttgtatgtactttcctttagttgactattatcaaagcttgtttttgtcttctcagcttctgagttgaatttgcctttgcacgctgaggaatgtagcatgacgttaagatttcagggaggaagctgccctctgatcccatgtcatatgacagtactcccctccccccagttgttctttattgtagcaacatacactctcaatgaacttttatgacttttaactttctctgtctctcttcctcagcagacctcttggaattagggtttctaatcaaactaagtcttgcatcataaattctatggtttgtgataaaagcaagtgacaaagagaagagagatgaaaagaaacaagtccagaaatcatattacaagattttaattcaaatttttcttcttaaaaatcagctatttagaggtggataaattggaagtttgtgcattgcttgtgggaacgtaaaatggttcagctgctgttggaaaacgctatggaggttcgtcacaaaattcaacatagaattaccctatgattcagcgattccacctctggctatagatccaaaagaattgaaagcagggacttgaacagatatttgtacaccagygtttataacaccattatttacagtagccaaaaggtagaagcagcccaagtgtcatcccattcacccatgaatggatgcaggaattgtgttccgtgcatgcagtggaatagtaccagccttccgcaggaaggaaattctgacatatgcggtgacatggatgaaccttgagtacattatgcgaagtgaaataagccaccctgtggggatggagaatgggtagttagtgcataatggatacaaagtttctgattggggtgatgagaaagttctggaggtggatggggaggatggttgcacaacagtgtgagtgtacttaatgccactgcaactgtatatttaaaaatagttaaaatgataaattttacattatgtatattttactgcaattgaaaaaatcatactctattaccaatttttcagaactcatagataaatatgaatgtagggaagctgtaagccagcccatatacagaaactatcactatctacatttttcatatgtgttcagacagagcctattacaagtctcataaatttcagtaaacaatcacaaattattttggcacactttcatgtaggttctgttcactgctgaaatattctaaataaaatggtttagagttttactgtaactatgaataattatgctataattatagtatcccacattcggttgagcaacattatacaaaataagtgtcgagttactgtgcaccaactataaatacttgaaaggtctgtagagacatttgcttacaaactggtagacagaatgtagcttagtggaattcttaaattatgggaatgtattcacaggaagacggtgattcttgcccttaattcataattgaaaatatgcagtaacaagcataaaactcacatcttaatgaagatgtatctaccagtgtcattcaattagcagatgtatatgtatgcataattaatttggaaaatgttattttatggaatgtctgctatatgcttttggtaataatgctgtatataaaatttgcactggaaattctgtttcctgat

SEQ ID NO: 4865 - DNA, 3652 bp, Homo sapiens
acccttgccaayccccaggccgcgaggccctctgaagccctgagcctggagcggtaggagacgggggaactgaaacgccgcggaaccagaggctgagggagcggcgcgatggagggaggaggagcgacggaccggcaggcctagctccggggctgcggcggctgaggcgsggggatggagcccctgcgggtgctggagctatacagcggcgtgggcggcatgcaccacgcgctgagagaaagctgtatacctgcacaagtggtggctgccattgatgtcaacactgtcgctaatgaagtatacaagtataattttcctcacacacagttacttgccaagacrattgaaggcrttacactcgaagagtttgacagattatctttygatatgattttaatgagccctccctgccagccattcacaaggattggccggcagggtgatatgactgattcaaggacgaatagcttcttayatattctagatattctcccaagattacaaaaattaccaaagtatattcttttggaaaatgttaaaggttttgaagtatcttctacaagagacctcttgatacaaacaatagaaaattgtggctttcagtaccaagagtttctattatctccaacctctcttggcattccaaattcaaggctacgatattttcttattgcaaagcttcagtcagagccattaccctttcaagcccctggtcaggtaytkatggagttccccaaaattgaatctgtacatccacaaaaatatgcaatggatgtagaaaataaaattcaagaaaagaacgttgaaccaaatattagctttgatggcagcatacagtgttctggaaaagatgccattctttttaagcttgaaactgcagaagaaattcacaggaaaaatcaacaagatagtgatctctctgtgaaaatgctaaaagattttcttgaagatgacactgacgtgaaccagtatcttttaccaccaaagtcattgctgcgatatgctcttctgttagacattgttcagcccacttgtagaaggtccgtgtgctttaccaaaggatatggaagctacatagaagggacagggtctgtgttacagactgcagaggatgtgcaggttgagaatatctacaaatcccttaccaatttgtcacaagaagaacagataacaaagctgttaatacttaaactgcgatatttcactcctaaagaaatagcaaatctccttggatttcctccagagttcggatttcctgagaagataacagtgaaacagcgttatcgcctacttggaaatagtctcaacgtgcatgtagtagctaaactaatcaaaatcttatatgaataattttgaaataactctgaaagatggtcatatgatattccttcattttcagagagtaattctgaaattctgttttgaactaattctggtgaaatttaactaaattattttaatctgtccttattaagaaatttggattttattaaaaaaatccatgtgtttcatcaaatttatattactgtattttataaaatacgaactattgttatgctttatggagagtatattttcatatgaaactgataaatatatatgtggaatattctttttaaaaacrattttataaacaaatcaaggagcactagagctttagtgtctacatgagtatcttgtgaagtgtcataacaggcataacatatttttatgttaattaaagaagttttttatttctaattttaaaataatgattctaattctagcccattgaatgttttacttaatttccaatcctgtaaatatttctttatttcatctaaacaaatgcatatgatatgtaaaccaaattatcatcattcagtttatacagcagactgaagaatatgtcaggaaaaataatcctaaatgtttgattacctctccatgaagcggccacagaaactgttggtgcacattatctacattttcctcagcctctatctgaaggacaaaactcatttttccttcttcattttgtatgtactttcctttagttgactattatcaaagcttgtttttgtcttctcagcttctgagttgaatttgcctttgcacgctgaggaatgtagcatgacgttaagatttcagggaggaagctgccctctgatcccatgtcatatgacagtactcccctccccccagttgttctttattgtagcaacatacactctcaatgaacttttatgacttttaactttctctgtctctcttcctcagcagacctcttggaattagggtttctaatcaaactaagtcttgcatcataaattctatggtttgtgataaaagcaagtgacaaagagaagagagatgaaaagaaacaagtccagaaatcatattacaagattttaattcaaatttttcttcttaaaaatcagctatttagaggtggataaattggaagtttgtgcattgcttgtgggaacgtaaaatggttcagctgctgttggaaaacgctatggaggttcgtcacaaaattcaacatagaattaccctatgattcagcgattccacctctggctatagatccaaaagaattgaaagcagggacttgaacagatatttgtacaccagygtttataacaccattatttacagtagccaaaaggtagaagcagcccaagtgtcatcccattcacccatgaatggatgcaggaattgtgttccgtgcatgcagtggaatagtaccagccttccgcaggaaggaaattctgacatatgcggtgacatggatgaaccttgagtacattatgcgaagtgaaataagccaccctgtggggatggagaatgggtagttagtgcataatggatacaaagtttctgattggggtgatgagaaagttctggaggtggatggggaggatggttgcacaacagtgtgagtgtacttaatgccactgcaactgtatatttaaaaatagttaaaatgataaattttacattatgtatattttactgcaattgaaaaaatcatactctattaccaatttttcagaactcatagataaatatgaatgtagggaagctgtaagccagcccatatacagaaactatcactatctacatttttcatatgtgttcagacagagcctattacaagtctcataaatttcagtaaacaatcacaaattattttggcacactttcatgtaggttctgttcactgctgaaatattctaaataaaatggtttagagttttactgtaactatgaataattatgctataattatagtatcccacattcggttgagcaacattatacaaaataagtgtcgagttactgtgcaccaactataaatacttgaaaggtctgtagagacatttgcttacaaactggtagacagaatgtagcttagtggaattcttaaattatgggaatgtattcacaggaagacggtgattcttgcccttaattcataattgaaaatatgcagtaacaagcataaaactcacatcttaatgaagatgtatctaccagtgtcattcaattagcagatgtatatgtatgcataattaatttggaaaatgttattttatggaatgtctgctatatgcttttggtaataatgctgtatataaaatttgcactggaaattctgtttcctgat

SEQ ID NO: 4866 - DNA, 3682 bp, Homo sapiens
atggtgctgctgctggtgatcctcatcccggtgctggtgagctcggccggcacgtcggcgcactackagatgctgggcacctgccgcatggtctgcgacccctacgggggcaccaaggcgcccagcaccgctgccacgcccgaccgcggcctcatgcagtccctgcccaccttcatccagggccccaaaggcgaggccggcaggcccgggaaggcgggtccgcgcgggccccccggagagcccgggccacccggccccatggggcccccgggcgagaagggcgagccgggccgccaaggcctgccgggcccgcccggggcgcccggcctgaacgcggccggggccatcagcgccgccacctacagcacggtgcccaagatcgccttctacgccggcctcaagcggcagcatgaaggctacgaggtgctcaagttcgacgacgtggtcaccaacctcggaaaccactacgaccccaccaccggcaagttcacctgctccatcccgggcatctacttcttcacctaccacgtcctgatgcgcggaggggacggcaccagcatgtgggctgatctctgcaaaaacaaccaggtgcgtgctagtgcaattgcccaagatgctgatcagaattacgactatgccagtaacagtgtggttcttcatttggagccgggagatgaagtctatatcaaattagatggcgggaaagcccatggaggaaacaacaacaaatacagcacgttttctggatttattatttatgctgactgataatgcagaaactaarcttattattctgagtttgaacactggattcgtatggctaacgtcagtgaatcaaggatcccaggggatgccaatggcagggcacctcagttgtgtatatgtggggaaatcaaatgctacctgactcacatctgtatcactcagaaacattatgtaaaaaatatcaaagcaagataagcagatgtgtgatccactaccgccaaagcaaatactccttatcgttagtgtccatgtgaatgaagtcctatatagatcacaaatttttatagacaaatctaagacattgaattatttcttctatatatatgatactttggtgtactgtgatcttgctgcttttatccatatgtcagctttggttcttgtgagtttacctgcttattatgatacttggagtccattcatagtgtggggaagaatgatttttgccctgcaggagaaggtctaattgaaataatgctgcttgtccccaaagaaattgtttgccttgtactcttgttaaccttagagctagacctgggaatgattcaacttcaagccttaacctggaattttctggatttgagggaattcccaagcctatgatctttttcacattttctttttcttatatgaattttcttttctctcttttctggtgatagtctttaaaaatagagattgacagtgtatcataggattaccctctaagtgtgaaaatgtgtaattatgtacggtatttaraaaaagcccttatgtgtccattttgtcaactgaatacatttagattcactgggaaagtcagagaaatttattctttagtatcaaatcaaaccgaggcttttgccatctttggaagaaaagattattcataacccaatgcacaaaggtttaatttgagctgctgcatacgtcaccaaggggacactaggtgaggccttcaaatgattactacaagtctgtggcctgaggttattttaaaattaacaatttcgcatatagccwatatgacaacagagtgtttatattttatacaaatatctgctaaacatgcacacatatactcacrcacacatatatatattagatgaaatgttttatwtatgtataaaacatatacatataaaacatttatatatatggctttattccacagggcacagtggctgtatagcctcaaaattttaatataaaaaagtgtatgcatatatacacacacaaacatgcacaaattatttaacttattttgggttaaaatatattttgaatgacaatatatggagtagcaaaaacagttaaaatgacttctctttaagagttatccagaaaattaattgtattaggtcaaaatgccctttatttcacaggtctgtaagttaaggctatggttgctctattaccatatgccaatcaatactttaactgcattctgtgacagactgttaatatgaggactgcagacaccaagtggctctcctttgcagtgtttatgaattacatgcatttgagctatcaatttttttttcttttttctcaggtggagtgaagctgacagtacagtagatttggagagtaatacaaatcctttctttctggttagaacacactgccaaaagccatctctttcatctaaggaaaagattaaaaatgcatgttgatatctcctaactatcacacaacttccactattacaatgaaaaatctgttcccctttcattgcctctgaaaactctttgacgagtagatttcaaaaacagagattttaaaaatttgcttgctttactggtgaaggacatttgcattttttttwtttatttatttaaaggaattagtttgttctcctggctcattcctctttgttactttctgttccaatacacagaaagcttgrtcatctttgatcagcagaaatatcttttatttagcaaagctcaacttcccaagagttatgcatggtgtgcctatctgaaggtggtgttagctctgttgaaatgcctgggtctgagtaactgtcatgatttttatgattaaaaacagactcttcatcaagaataatgactaattctaattggtctttgtgatatgtaagataactcataaatgaattgcaatggattttatttcgaattaactatatatttatcaaagaggaactggcagcaagggtttggagaatatttttaggtaccaaatagcatagtgaggattcaaccaaaagatgaatttataagcagcagtgcccatcacctaagtgttttaactaacaggttttaaaaacattttatttacacaaaatatcagggctggataccttttaaagaggaggctcaagtatcgggctgtcatttccaatagatctgaccttttcttcagatacataagcattattttctctgtttaggtccaaggaaaaacaaaaggtaaaggaaataaagggaatatacataaggcaaacatttctctttttttttttgcattatatcttaccaattaattaaattgtggcctttgttattataaatgtaatgattcattaaactatattatgtaatatattttgacttttatgattgartttttataattcagtagtgttatgtgttcttatacaaactttgcaaaacagcaaaatgtatggcaaaaatagataccggaaagccaaagatatcaaaatcatttcagtagaagaatatatagataggtggacagtataaaattaacctttcaaaatatttttatcattgtgaattggtaattgtattacagtcagtatcctttggggaaaaaagtctcaaaatttaacttcccttgttgmagaagctattttacagtgccatattattcattaagcattaattaaagaacagcaggataattagtaggatcatcaatattacaagaaacattagatcgctcaaga

SEQ ID NO: 4867 - DNA, 3994 bp, Homo sapiens
gtttcagttacctgtagtcaaccacagtctgaaaatattaaggtattttaagacagaaagagagagaggagagaaaccgcattcayaaaaaagaaatcctctttttagaacatctcttggtggtaccatcagaaatgtcttccttaagtggaaaagtccaaaccgttttgggccttgtagagccaagcaaactgggccgtaccctgacccatgaacacctggccatgacctttgactgctgttactgtccacctcccccgtgccaggaagctatttccaaagaacctatcgtgatgaaaaatttrtattggattcagaaaaacgcctattcccataaagaaaaccttcaattaaatcaggagacagaagccataaaggaagaactgttgtattttaaagctaatggtggaggggctttggtggraaacacaaccactgggattagccgagacacacagacgttgaagaggcttgcagaagagactggcgtccatatcatatctggagccgggttttatgtggatgcaactcactcctcagagaccagggccatgtcagtggagcagcttrccgatgtccttatgaatgaaattctccatggagctgatggaaccagtatcaagtgtggcattattggagaaattggttgctcctggcctttgactgagagtgaaagaaaggttctccaggccacagctcatgcccaggctcagcttggttgtcctgttattatccatcctggacggagctccagggcaccatttcagattatccgaatattgcaagaagcaggygcagacatctccaaaacagtcatgtcacacctggataggactattcttgataagaaagagctcttggagtttgctcarcttggctgctacttggaatatgatctctttggtactgaactacttcattaccaactcggcccagatattgacatgcctgatgataacaaaagaattagaagggtgcgtctcctggtggaagagggctgtgaagatcgaattctggtagcacatgacatacatacgaaaacccggctgatgaaatatggaggtcacggctattctcatatactcaccaatgttgttcctaaaatgttgctgagaggcataactgagaatgtgcttgataagattctaatagagaaccctaagcaatggctaactttcaaataggatggktgcttatgaattcacaccttgagtataaaacttgcagagaacattcagcgatttccagtccactgtgagatattaatcagttacctakgactartgacagatcatttccttctgatgagaactaggagggkttgccttctctgagaccagctattacaactgtgcctctagggagttactcagcctaattgagccctattattttaacttaacaaaataaatacagaagtacctatttctaaacaatgatttaaagtctatatcccctaagcggagttgttgtttttctccctaatctatcagctgcactacttgagaaaatttaaagtgtttctagttaaattatttccttcttgagcgatctaatgtttcttgtaatattgatgatcctactaattatcctgctgttctttaattaatgcttaatgaataatatggcactgtaaaatagcttctkcaacaagggaagttaaattttgagacttttttccccaaaggatactgactgtaatacaattaccaattcacaatgataaaaatattttgaaaggttaattttatactgtccacctatctatatattcttctactgaaatgattttgatatctttggctttccggtatctatttttgccatacattttgctgttttgcaaagtttgtataagaacacataacactactgaattataaaaaytcaatcataaaagtcaaaatatattacataatatagtttaatgaatcattacatttataataacaaaggccacaatttaattaattggtaagatataatgcaaaaaaaaaaagagaaatgtttgccttatgtatattccctttatttcctttaccttttgtttttccttggacctaaacagagaaaataatgcttatgtatctgaagaaaaggtcagatctattggaaatgacagcccgatacttgagcctcctctttaaaaggtatccagccctgatattttgtgtaaataaaatgtttttaaaacctgttagttaaaacacttaggtgatgggcactgctgcttataaattcatcttttggttgaatcctcactatgctatttggtacctaaaaatattctccaaacccttgctgccagttcctctttgataaatatatagttaattcgaaataaaatccattgcaattcatttatgagttatcttacatatcacaaagaccaattagaattagtcattattcttgatgaagagtctgtttttaatcataaaaatcatgacagttactcagacccaggcatttcaacagagctaacaccaccttcagataggcacaccatgcataactcttgggaagttgagctttgctaaataaaagatatttctgctgatcaaagatgaycaagctttctgtgtattggaacagaaagtaacaaagaggaatgagccaggagaacaaactaattcctttaaataaataaawaaaaaaaatgcaaatgtccttcaccagtaaagcaagcaaatttttaaaatctctgtttttgaaatctactcgtcaaagagttttcagaggcaatgaaaggggaacagatttttcattgtaatagtggaagttgtgtgatagttaggagatatcaacatgcatttttaatcttttccttagatgaaagagatggcttttggcagtgtgttctaaccagaaagaaaggatttgtattactctccaaatctactgtactgtcagcttcactccacctgagaaaaaagaaaaaaaaattgatagctcaaatgcatgtaattcataaacactgcaaaggagagccacttggtgtctgcagtcctcatattaacagtctgtcacagaatgcagttaaagtattgattggcatatggtaatagagcaaccatagccttaacttacagacctgtgaaataaagggcattttgacctaatacaattaattttctggataactcttaaagagaagtcattttaactgtttttgctactccatatattgtcattcaaaatatattttaacccaaaataagttaaataatttgtgcatgtttgtgtgtgtatatatgcatacacttttttatattaaaattttgaggctatacagccactgtgccctgtggaataaagccatatatataaatgttttatatgtatatgttttatacatawataaaacatttcatctaatatatatatgtgtgygtgagtatatgtgtgcatgtttagcagatatttgtataaaatataaacactctgttgtcatatwggctatatgcgaaattgttaattttaaaataacctcaggccacagacttgtagtaatcatttgaaggcctcacctagtgtccccttggtgacgtatgcagcagctcaaattaaacctttgtgcattgggttatgaataatcttttcttccaaagatggcaaaagcctcggtttgatttgatactaaagaataaatttctctgactttcccagtgaatctaaatgtattcagttgacaaaatggacacataagggctttttytaaataccgtacataattacacattttcacacttagagggtaatcctatgatacactgtcaatctctatttttaaagactatcaccagaaaagagagaaaagaaaattcatataagaaaaagaaaatgtgaaaaagatcataggcttgggaattccctcaaatccagaaaattccaggttaaggcttgaagttgaatcattcccaggtctagctctaaggttaacaagagtacaaggcaaacaatttctttggggacaagcagcattatttcaatt

SEQ ID NO: 4868 - DNA, 3196 bp, Homo sapiens
tgggagggcacaggggagactaaaaaggccagggaagttggcctgscggaagttcccagggagaaggcagcgcgttgtacccgagattcagggtctggctctgcttcccaggctagagtgcatttggcgcgatcacagctcactgcagcctcgacctcctgagctcaagcgaacttcctgcctcagcctcctgagcttcctgagtagctgcgactacagaaaaaagaaatcctctttttagaacatctcttggtggtaccatcagaaatgtcttccttaagtggaaaagtccaaaccgttttgggccttgtagagccaagcaaactgggccgtaccctgacccatgaacacctggccatgacctttgactgctgttactgtccacctcccccgtgccaggaagctatttccaaagaacctatcgtgatgaaaaatttrtattggattcagaaaaacgcctattcccataaagaaaaccttcaattaaatcaggagacagaagccataaaggaagaactgttgtattttaaagctaatggtggaggggctttggtggraaacacaaccactgggattagccgagacacacagacgttgaagaggcttgcagaagagactggcgtccatatcatatctggagccgggttttatgtggatgcaactcactcctcagagaccagggccatgtcagtggagcagcttrccgatgtccttatgaatgaaattctccatggagctgatggaaccagtatcaagtgtggcattattggagaaattggttgctcctggcctttgactgagagtgaaagaaaggttctccaggccacagctcatgcccaggctcagcttggttgtcctgttattatccatcctggacggagctccagggcaccatttcagattatccgaatattgcaagaagcaggygcagacatctccaaaacagtcatgtcacacctggataggactattcttgataagaaagagctcttggagtttgctcarcttggctgctacttggaatatgatctctttggtactgaactacttcattaccaactcggcccagatattgacatgcctgatgataacaaaagaattagaagggtgcgtctcctggtggaagagggctgtgaagatcgaattctggtagcacatgacatacatacgaaaacccggctgatgaaatatggaggtcacggctattctcatatactcaccaatgttgttcctaaaatgttgctgagaggcataactgagaatgtgcttgataagattctaatagagaaccctaagcaatggctaactttcaaataggatggktgcttatgaattcacaccttgagtataaaacttgcagagaacattcagcgatttccagtccactgtgagatattaatcagttacctakgactartgacagatcatttccttctgatgagaactaggagggkttgccttctctgagaccagctattacaactgtgcctctagggagttactcagcctaattgagccctattattttaacttaacaaaataaatacagaagtacctatttctaaacaatgatttaaagtctatatcccctaagcggagttgttgtttttctccctaatctatcagctgcactacttgagaaaatttaaagtgtttctagttaaattatttccttcttgagcgatctaatgtttcttgtaatattgatgatcctactaattatcctgctgttctttaattaatgcttaatgaataatatggcactgtaaaatagcttctkcaacaagggaagttaaattttgagacttttttccccaaaggatactgactgtaatacaattaccaattcacaatgataaaaatattttgaaaggttaattttatactgtccacctatctatatattcttctactgaaatgattttgatatctttggctttccggtatctatttttgccatacattttgctgttttgcaaagtttgtataagaacacataacactactgaattataaaaaytcaatcataaaagtcaaaatatattacataatatagtttaatgaatcattacatttataataacaaaggccacaatttaattaattggtaagatataatgcaaaaaaaaaaagagaaatgtttgccttatgtatattccctttatttcctttaccttttgtttttccttggacctaaacagagaaaataatgcttatgtatctgaagaaaaggtcagatctattggaaatgacagcccgatacttgagcctcctctttaaaaggtatccagccctgatattttgtgtaaataaaatgtttttaaaacctgttagttaaaacacttaggtgatgggcactgctgcttataaattcatcttttggttgaatcctcactatgctatttggtacctaaaaatattctccaaacccttgctgccagttcctctttgataaatatatagttaattcgaaataaaatccattgcaattcatttatgagttatcttacatatcacaaagaccaattagaattagtcattattcttgatgaagagtctgtttttaatcataaaaatcatgacagttactcagacccaggcatttcaacagagctaacaccaccttcagataggcacaccatgcataactcttgggaagttgagctttgctaaataaaagatatttctgctgatcaaagatgaycaagctttctgtgtattggaacagaaagtaacaaagaggaatgagccaggagaacaaactaattcctttaaataaataaawaaaaaaaatgcaaatgtccttcaccagtaaagcaagcaaatttttaaaatctctgtttttgaaatctactcgtcaaagagttttcagaggcaatgaaaggggaacagatttttcattgtaatagtggaagttgtgtgatagttaggagatatcaacatgcatttttaatcttttccttagatgaaagagatggcttttggcagtgtgttctaaccagaaagaaaggatttgtattactctccaaatctactgtactgtcagcttcactccacctgagaaaaaaccacttggtgtctgcagtcctcatattaacagtctgtcacagaatgcagttaaagtattgattggcatatggtaatagagcaaccatagccttaacttacagacctgtgaaataaagggcattttgac

SEQ ID NO: 4869 - DNA, 3063 bp, Homo sapiens
gtttcagttacctgtagtcaaccacagtctgaaaatattaaggtattttaagacagaaagagagagaggagagaaaccgcattcayaaaaaagaaatcctctttttagaacatctcttggtggtaccatcagaaatgtcttccttaagtggaaaagtccaaaccgttttgggccttgtagagccaagcaaactgggccgtaccctgacccatgaacacctggccatgacctttgactgctgttactgtccacctcccccgtgccaggaagctatttccaaagaacctatcgtgatgaaaaatttrtattggattcagaaaaacgcctattcccataaagaaaaccttcaattaaatcaggagacagaagccataaaggaagaactgttgtattttaaagctaatggtggaggggctttggtggraaacacaaccactgggattagccgagacacacagacgttgaagaggcttgcagaagagactggcgtccatatcatatctggagccgggttttatgtggatgcaactcactcctcagagaccagggccatgtcagtggagcagcttrccgatgtccttatgaatgaaattctccatggagctgatggaaccagtatcaagtgtggcattattggagaaattggttgctcctggcctttgactgagagtgaaagaaaggttctccaggccacagctcatgcccaggctcagcttggttgtcctgttattatccatcctggacggagctccagggcaccatttcagattatccgaatattgcaagaagcaggygcagacatctccaaaacagtcatgtcacacctggataggactattcttgataagaaagagctcttggagtttgctcarcttggctgctacttggaatatgatctctttggtactgaactacttcattaccaactcggcccagatattgacatgcctgatgataacaaaagaattagaagggtgcgtctcctggtggaagagggctgtgaagatcgaattctggtagcacatgacatacatacgaaaacccggctgatgaaatatggaggtcacggctattctcatatactcaccaatgttgttcctaaaatgttgctgagaggcataactgagaatgtgcttgataagattctaatagagaaccctaagcaatggctaactttcaaataggatggktgcttatgaattcacaccttgagtataaaacttgcagagaacattcagcgatttccagtccactgtgagatattaatcagttacctakgactartgacagatcatttccttctgatgagaactaggagggkttgccttctctgagaccagctattacaactgtgcctctagggagttactcagcctaattgagccctattattttaacttaacaaaataaatacagaagtacctatttctaaacaatgatttaaagtctatatcccctaagcggagttgttgtttttctccctaatctatcagctgcactacttgagaaaatttaaagtgtttctagttaaattatttccttcttgagcgatctaatgtttcttgtaatattgatgatcctactaattatcctgctgttctttaattaatgcttaatgaataatatggcactgtaaaatagcttctkcaacaagggaagttaaattttgagacttttttccccaaaggatactgactgtaatacaattaccaattcacaatgataaaaatattttgaaaggttaattttatactgtccacctatctatatattcttctactgaaatgattttgatatctttggctttccggtatctatttttgccatacattttgctgttttgcaaagtttgtataagaacacataacactactgaattataaaaaytcaatcataaaagtcaaaatatattacataatatagtttaatgaatcattacatttataataacaaaggccacaatttaattaattggtaagatataatgcaaaaaaaaaaagagaaatgtttgccttatgtatattccctttatttcctttaccttttgtttttccttggacctaaacagagaaaataatgcttatgtatctgaagaaaaggtcagatctattggaaatgacagcccgatacttgagcctcctctttaaaaggtatccagccctgatattttgtgtaaataaaatgtttttaaaacctgttagttaaaacacttaggtgatgggcactgctgcttataaattcatcttttggttgaatcctcactatgctatttggtacctaaaaatattctccaaacccttgctgccagttcctctttgataaatatatagttaattcgaaataaaatccattgcaattcatttatgagttatcttacatatcacaaagaccaattagaattagtcattattcttgatgaagagtctgtttttaatcataaaaatcatgacagttactcagacccaggcatttcaacagagctaacaccaccttcagataggcacaccatgcataactcttgggaagttgagctttgctaaataaaagatatttctgctgatcaaagatgaycaagctttctgtgtattggaacagaaagtaacaaagaggaatgagccaggagaacaaactaattcctttaaataaataaawaaaaaaaatgcaaatgtccttcaccagtaaagcaagcaaatttttaaaatctctgtttttgaaatctactcgtcaaagagttttcagaggcaatgaaaggggaacagatttttcattgtaatagtggaagttgtgtgatagttaggagatatcaacatgcatttttaatcttttccttagatgaaagagatggcttttggcagtgtgttctaaccagaaagaaaggatttgtattactctccaaatctactgtactgtcagcttcactccacctgagaaaaaaccacttggtgtctgcagtcctcatattaacagtctgtcacagaatgcagttaaagtattgattggcatatggtaatagagcaaccatagccttaacttacagacctgtgaaataaagggcattttgac

SEQ ID NO: 4870 - DNA, 3828 bp, Homo sapiens
ctgcgcgggagattcgctggacgatcgcaagcgcggaggccgggcgggcgcgcgcgccatggagcggctgcgggacgtgcgggagcggctgcaggcgtgggagcgcgcgttccgacggcagcgcgggcggcgaccgagccaggacgacgtggaggcggcgccggaggagacccgcgcgctctaccgggartaccgcactctgaagcgtaccacgggccaggccggcggcgggctccgcagctccgagtcgctccccgcggcggccgaagaggcgccagagccccgctgctgggggccccatctgaatcgggctgcgaccaagagtccacagyctacgccagggcggagccgccagggytcggtgccggactacgggcagcggctcaaggccaatctgaaaggcaccctgcaggccggaccagccctgggccgcagaccgtggcctctaggaagagcctcatctaaggcatccaccccaaagcccccaggtacagggcctgtcccctcctttgcagaaaaagtcagtgatgagcctccacagctccctgagccccagccaaggccaggccggctccagcatctgcaggcatccctgagccagcggctgggctccctagatcctggctggttacagcgatgtcacagtgaggtcccagattttctgggggcccccaaagcctgcaggcctgatctaggctcagaggaatcacaacttctgatccctggtgagtcggctgtccttggtcctggtgctggctcccagggcccagaggcttcagccttccaagaagtcagyatccgtgtggggagcccccagcccagcagcagtggaggcgagaagcggagatggaacgaggasccctgggagagccccgcacaggtccagcaggagagcagccaagctggacccccatcggagggggctggggctgtagcagttgaggaagaccctccaggggaacctgtacaggcacagccacctcagccctgcagcagcccatcgaaccccaggtaccacggactcagcccctccagtcaagctagggctgggaaggctgagggcacagcccccctgcacatcttccctcggctggcccgccatgacaggggcaattacgtacggctcaacatgaagcagaaacactacgtgcggggccgggcactccgtagcaggctcctccgcaagcaggcatggaagcagaagtggcggaagaaaggggagtgttttgggggtggtggtgccacagtcacaaccaaggagtcttgtttcctgaacgagcagttcgatcactgggcagcccagtgtccccggccagcaagtgaggaagacacagatgctgttgggcctgagccactggttccttcaccacaacctgtacctgaggtgcccagcctggaccccaccgtgctgccactctactccctggggccctcagggcagttggcagrgacgccggctgaggtgttccaggccctggagcagctggggcaccaagcctttcgccctgggcaggagcgtgcagtcatgcggatcctgtctggcatctccacgctgctggtgctgcctacaggtgccggcaagtccctgtgctaccagctcccagcgctgctctacagccggcrcagcccctgcctcacgttggtcgtctctcccctgctgtcactcatggatgaccaggtgtctggcctgccaccgtgtctcaaggcggcctgcatacactcgggcatgaccaggaagcaacgggaatctgtcctgcagaagattcgggcagcccaggtacacgtgctgatgctgacacctgaggcactggtgggggcgggaggcctccytccagccgcacagctgcctccagttgcttttgcctgcattgatgaggcccactgcctctcccagtggtcccacaacttccggccctgctacctgcgcgtctgcaaggtgcttcgggagcgcatgggcgtgcactgcttcctgggcctcacagccacagccacacgccgcactgccagtgacgtggcacagcacctggctgtggctgaagagcctgacctccacgggccagccccagttcccaccaacctgcacctttccgtgtccatggacagggacacagaccaggcactgttgacgctgctgcaaggcaaacgttttcaaaacctcgattccattatcatttactgcaaccggcgcgaggacacagagcggatcgctgcgctcctccgaacctgcctgcacgcagcctgggtcccagggtctggaggtcgtgcccccaaaaccacagccgaggcctaccacgcgggcatgtgcagccgggaacggcggcgggtayagcgagccttcatgcagggccagttgcgggtggtggtggccacggtggcctttgggatggggctggaccggccagatgtgcgggctgtgctgcatctggggctgcccccaagcttcgagagctacgtgcaggccgtgggccgggccgggcgtgacgggcagcctgcccactgccacctcttcctgcagccccagggcgaagacctgcgagagctgcgcagacatgtgcacgccgacagcacggacttcctggctgtgaagaggctggtacagcgcgtgttcccagcctgcacctgcacctgcaccaggccgccctcggagcaggaaggggccgtgggtggggagaggcctgtgcccaagtacccccctcaagaggctgagcagcttagccaccaagcagccccaggacccagaagggtctgcatgggccatgagcgggcactcccaatacagcttaccgtacaggctttggacatgccggaggaggccatcgagactttgctgtgctacctggagctgcacccacaccactggctggagctgctggcgaccacctatacccattgccgtctgaactgccctgggggccctgcccagctccaggccctggcccacaggtgtccccctttggctgtgtgcttggcccagcagctgcctgaggacccagggcaaggcagcagctccgtggagtttgacatggtcaagctggtggactccatgggctgggagctggcctctgtgcggcrggctctctgccagctgcagtgggaccacgagcccaggacaggtgtgcggcgtgggacaggggtgcttgtggagttcagtgagctggccttccaccttcgcagcccgggggacytgaccgctgaggagaaggaccagatatgtgacttcctctatggccgtgtgcaggcccgggagcgccaggccctggcccgtctgcgcagaaccttccaggcctttcacagcgtagccttccccagctgcgggccctgcctggagcagcaggatgaggagcgcagcaccaggctcaaggacctgctcggccgctactttgaggaagaggaagggcaggagccgggaggcatggaggacgcacagggccccgagccagggcaggccagactccaggattgggaggaccaggtccgctgcgacatccgccagttcctgtccctgaggccagaggagaagttctccagcagggctgtggcccgcatcttccacggcatcggaagcccctgctacccggcccaggtgtacgggcaggaccgacgcttctggagaaaatacctgcacctgagcttccatgccctggtgggcctggccacggaagagctcctgcaggtggcccgytgactgcactgcattgggggatgtcgggtagagctggggttgtcagaggctagggcagtgactgaggacctgggcaaaacctgccacagggtgtgggaacgaggaggctccaaaatgcagaataaaaaatgctcactttgttttta

SEQ ID NO: 4871 - DNA, 2051 bp, Homo sapiens
gccttgccccaagccccgcctgccacctcacccactgcctctgcctccctggggcagagctgttcccagacgggtggggcggggcccaactgtccccagctccttcagccctttctgtccctcccagtgaggccagctgcggtgaagagggtgctctcttgcctggagttccctctgctacggctgccccctcccagccctggcccactaagccagacccagctgtcgccattcccacttctggtcctgccacctcctgagctgccttcccgcctggtctgggtagagtcatggcctcgagcacaggtgaccggagccaggcggtgaggmatggactgagggcgaaggtgctgacgctggacggcatgaacccgcgtgtgcggagagtggagtacgcagtgcgtggccccatagtgcagcgagccttggagctggagcaggagctgcgccagggtgtgaagaagcctttcaccgaggtcatccgtgccaacatcggggacgcacaggctatggggcagaggcccatcaccttcctgcgccaggtcttggccctctgtgttaaccctgatcttctgagcagccccaacttccctgacgatgccaagaaaagggcggagcgcatcttgcaggcgtgtgggggccacagtctgggggcctacagcgtcagctccggcatccagctgatccgggaggacgtggcgcggtacattgagaggcgtgacggaggcatccctgcggaccccaacaacgtcttcctgtccacaggggccagcgatgccatcgtgacggtgctgaagctgctggtggccggcgagggccacacacgcacgggtgtgctcatccccatcccccagtacccactctactcggccacgctggcagagctgggcgcagtgcaggtggattactacctggacgaggagcgtgcctgggcgctggacgtggccgagcttcaccgtgcactgggccaggcgcgtgaccactgccgccctcgtgcgctctgtgtcatcaaccctggcaaccccaccgggcaggtgcagacccgcgagtgcatcgaggccgtgatccgcttcgccttcgaagagcggctctttctgctggcggacgaggtgtaccaggacaacgtgtacgccgcgggttcgcagttccactcattcaagaaggtgctcatggagatggggccgccctacgccgggcagcaggagcttgcctccttccactccacctccaagggctacatgggcgagtgcgtgcgtacgaggcgggtgggggctcgcgggccatggccaggccctcctcgcccgatgggccaccccctcctccgcacctgacctggccgtgcgcaggtgcgggttccgcggcggctakgtggaggtggtgaacatggacgctgcagtgcagcagcagatgctgaagctgatgagtgtgcggctgtgcccgccggtgccaggacaggccctgctggacctggtggtcagcccgcccgcgcccaccgacccctcctttgcgcagttccaggctgagaagcaggcagtgctggcagagctggcggccaaggccaagctcaccgagcaggtcttcaatgaggctcctggcatcagctgcaacccagtgcagggcgccatgtactccttcccgcgcgtgcagctgcccccgcgggcggtggagcgcgctcaggagctgggcctggcccccgatatgttcttctgcctgcgcctcctggaggagaccggcatctgcgtggtgccagggagcggctttgggcagcgggaaggcacctaccacttccggatgaccattctgccccccttggagaaactgcggctgctgctggagaagctgagcaggttccatgccaagttcaccctcgagtactcctgagcaccccagctggggccaggctgggtcgccmtggactgtgtgctcaggagccctgggaggctctggagcccactgtacttgctcttgatgcctggcggggtggggtggggggggtgctgggcccctgcctctctgcaggtccctaataaagctgtgtggcagtctgactc

SEQ ID NO: 4872 - DNA, 1951 bp, Homo sapiens
gccttgccccaagccccgcctgccacctcacccactgcctctgcctccctggggcagagctgttcccagacgggtggggcggggcccaactgtccccagctccttcagccctttctgtccctcccagtgaggccagctgcggtgaagagggtgctctcttgcctggagttccctctgctacggctgccccctcccagccctggcccactaagccagacccagctgtcgccattcccacttctggtcctgccacctcctgagctgccttcccgcctggtctgggtagagtcatggcctcgagcacaggtgaccggagccaggcggtgaggmatggactgagggcgaaggtgctgacgctggacggcatgaacccgcgtgtgcggagagtggagtacgcagtgcgtggccccatagtgcagcgagccttggagctggagcaggagctgcgccagggtgtgaagaagcctttcaccgaggtcatccgtgccaacatcggggacgcacaggctatggggcagaggcccatcaccttcctgcgccaggtcttggccctctgtgttaaccctgatcttctgagcagccccaacttccctgacgatgccaagaaaagggcggagcgcatcttgcaggcgtgtgggggccacagtctgggggcctacagcgtcagctccggcatccagctgatccgggaggacgtggcgcggtacattgagaggcgtgacggaggcatccctgcggaccccaacaacgtcttcctgtccacaggggccagcgatgccatcgtgacggtgctgaagctgctggtggccggcgagggccacacacgcacgggtgtgctcatccccatcccccagtacccactctactcggccacgctggcagagctgggcgcagtgcaggtggattactacctggacgaggagcgtgcctgggcgctggacgtggccgagcttcaccgtgcactgggccaggcgcgtgaccactgccgccctcgtgcgctctgtgtcatcaaccctggcaaccccaccgggcaggtgcagacccgcgagtgcatcgaggccgtgatccgcttcgccttcgaagagcggctctttctgctggcggacgaggtgtaccaggacaacgtgtacgccgcgggttcgcagttccactcattcaagaaggtgctcatggagatggggccgccctacgccgggcagcaggagcttgcctccttccactccacctccaagggctacatgggcgagtgcgggttccgcggcggctakgtggaggtggtgaacatggacgctgcagtgcagcagcagatgctgaagctgatgagtgtgcggctgtgcccgccggtgccaggacaggccctgctggacctggtggtcagcccgcccgcgcccaccgacccctcctttgcgcagttccaggctgagaagcaggcagtgctggcagagctggcggccaaggccaagctcaccgagcaggtcttcaatgaggctcctggcatcagctgcaacccagtgcagggcgccatgtactccttcccgcgcgtgcagctgcccccgcgggcggtggagcgcgctcaggagctgggcctggcccccgatatgttcttctgcctgcgcctcctggaggagaccggcatctgcgtggtgccagggagcggctttgggcagcgggaaggcacctaccacttccggatgaccattctgccccccttggagaaactgcggctgctgctggagaagctgagcaggttccatgccaagttcaccctcgagtactcctgagcaccccagctggggccaggctgggtcgccmtggactgtgtgctcaggagccctgggaggctctggagcccactgtacttgctcttgatgcctggcggggtggggtggggggggtgctgggcccctgcctctctgcaggtccctaataaagctgtgtggcagtctgactc

SEQ ID NO: 4873 - DNA, 1817 bp, Homo sapiens
gggctgccacttggactcccttgccagggggcgggcaggggctggctctgcctggggccaggcccatgttaacctgtgccccggcctgggggccagaggggcaggcctgcgcacggggaggctgttgtggcagcggaacagagacgtgcacgagtcatggcctcgagcacaggtgaccggagccaggcggtgaggmatggactgagggcgaaggtgctgacgctggacggcatgaacccgcgtgtgcggagagtggagtacgcagtgcgtggccccatagtgcagcgagccttggagctggagcaggagctgcgccagggtgtgaagaagcctttcaccgaggtcatccgtgccaacatcggggacgcacaggctatggggcagaggcccatcaccttcctgcgccaggtcttggccctctgtgttaaccctgatcttctgagcagccccaacttccctgacgatgccaagaaaagggcggagcgcatcttgcaggcgtgtgggggccacagtctgggggcctacagcgtcagctccggcatccagctgatccgggaggacgtggcgcggtacattgagaggcgtgacggaggcatccctgcggaccccaacaacgtcttcctgtccacaggggccagcgatgccatcgtgacggtgctgaagctgctggtggccggcgagggccacacacgcacgggtgtgctcatccccatcccccagtacccactctactcggccacgctggcagagctgggcgcagtgcaggtggattactacctggacgaggagcgtgcctgggcgctggacgtggccgagcttcaccgtgcactgggccaggcgcgtgaccactgccgccctcgtgcgctctgtgtcatcaaccctggcaaccccaccgggcaggtgcagacccgcgagtgcatcgaggccgtgatccgcttcgccttcgaagagcggctctttctgctggcggacgaggtgtaccaggacaacgtgtacgccgcgggttcgcagttccactcattcaagaaggtgctcatggagatggggccgccctacgccgggcagcaggagcttgcctccttccactccacctccaagggctacatgggcgagtgcgggttccgcggcggctakgtggaggtggtgaacatggacgctgcagtgcagcagcagatgctgaagctgatgagtgtgcggctgtgcccgccggtgccaggacaggccctgctggacctggtggtcagcccgcccgcgcccaccgacccctcctttgcgcagttccaggctgagaagcaggcagtgctggcagagctggcggccaaggccaagctcaccgagcaggtcttcaatgaggctcctggcatcagctgcaacccagtgcagggcgccatgtactccttcccgcgcgtgcagctgcccccgcgggcggtggagcgcgctcaggagctgggcctggcccccgatatgttcttctgcctgcgcctcctggaggagaccggcatctgcgtggtgccagggagcggctttgggcagcgggaaggcacctaccacttccggatgaccattctgccccccttggagaaactgcggctgctgctggagaagctgagcaggttccatgccaagttcaccctcgagtactcctgagcaccccagctggggccaggctgggtcgccmtggactgtgtgctcaggagccctgggaggctctggagcccactgtacttgctcttgatgcctggcggggtggggtggggggggtgctgggcccctgcctctctgcaggtccctaataaagctgtgtggcagtctgactc

SEQ ID NO: 4874 - DNA, 3743 bp, Homo sapiens
caggccccgcctcaggtcggccgcggactacaaatggacgagagaggcggccgtccattagttagcggctccggagcaacgcagccgttgtccttgaggccgacgggcctgacgcgggcgggttgaacgcgctggtgaggcggtcacccgggctacggcggccggcagggggcagtggcggccgttgtctagggcccggaggtggggccgcgcgcctcgggcgctacgaacccggcaggcccacgcttggctgcggccgggtgcgggctgaggccatgggcgaccgcggcagctcccggcgccggaggacagggtcgcggccctcgagccacggcggcggcgggcctgcggcggcggaagaggaggtgcgggacgccgctgcgggccccgacgtgggagccgcgggggacgcgccagccccggcccccaacaaggacggagacgccggcgtgggcagcggccactgggagctgaggtgccatcgcctgcaggattctttattcagctctgacagtggcttcagcaactaccgtggcatcctgaactggtgtgtggtgatgctgatcttgagcaatgcccggttatttctggagaacctcatcaagtatggcatcctggtggaccccatccaggtggtttctctgttcctgaaggatccctatagctggcccgccccatgcctggttattgcggccaatgtctttgctgtggctgcattccaggttgagargcgcctggcggtgggtgccctgacggagcaggcgggactgctgctgcacgtggccaacctggccaccattctgtgtttcccagcggctgtggtcttactggttgagtctatcactccagtgggctccctgctggcgctgatggcgcacaccatcctcttcctcaagctcttctcctaccgcgacgtcaactcatggtgccgcagggccagggccaaggctgcctctgcagggaagaaggccagcagtgctgctgccccgcacaccgtgagctacccggacaatctgacctaccgcgatctctactacttcctcttcgcccccaccttgtgctacgagctcaactttccccgctctccccgcatccggaagcgctttctgctgcgacggatccttgagatgctgttcttcacccagctccaggtggggctgatccagcagtggatggtccccaccatccagaactccatgaagcccttcaaggacatggactactcacgcatcatcgagcgcctcctgaagctggcggtccccaatcacctcatctggctcatcttcttctactggctcttccactcctgcctgaatgccgtggctgagctcatgcagtttggagaccgggagttctaccgggactggtggaactccgagtctgtcacctacttctggcagaactggaasatccctgtgcacaagtggtgcatcagacacttctacaagcccatgcttcgacggggcagcagcaagtggatggccaggacaggggtgttcctggcctcggccttcttccacgagtacctggtgagcgtccctctgcgaatgttccgcctctgggcgttcacgggcatgatggctcagatcccactggcctggttcgtgggccgctttttccagggcaactatggcaacgcagctgtgtggctgtcgctcatcatcggacagccaatwgccgtcctcatgtacgtccacgactactacgtgctcaactatgaggccccagcggcagaggcctgagctgcacctgagggcctggcttctcactgccacctcamacccgctgccagagcccacctctcctcctaggcctcgagtgctggggatgggcctggctgcacagcatcctcctctggtcccagggaggcctctctgcccctatggggctctgtcctgcacccctcagggatggcgacagcaggccagacacagtctgatgccagctgggagtcttgctgaccctgccccgggtccgagggtgtcaataaagtgctgtccagtgacctcttcagcctgccaggggcctggggcctggtggggggtatggccacacccacaagggcgagtgccagagctgtgtggacagctgtcccaggacctgccggggagcagcagctccactgcagcagggcgggcatggccggtagggggagtgcaaggccaggcagacgcccccattccccacactcccctacctagaaaagctcagctcaggcgtcctctcctggtgctactcctgctgggtgtgcgggaatcggcactctggccctcagtgcaggatggtcaacttgcacccaccgtgctcagcttcagcttgggaagaggtcggccctgggtttgcgggaagtgggctccagccaggatggcccagggatgggcagtccacagggcctttctggtgtgggtctggtgagccgaggggctacggtacacaatggctatgtccatggctattcgccttggggcagggctcggtttggcagcctctttccttcacttggaacctgggcagccaggtgggctggtggctctcagctgccctccacgaggttggggcacccctgatccccaggcctgccttgccctctgctcttctggcaccaggctgggcagtgcagacagcgcagccctgcagccttcaggacaccttgttcccaggccctgcaatccaccaagctggatagatggggccccccttgatggtagcgggaggtcaggggtaaccccagggccctgctgctgccttaccttgctggggtgactgcttgattaaagaccccaagactggaccaggccctggtgtccccagacctgcagctatggcccaacaaggcaggtgtttgaggaggccctgcacagggtcccaggactgcaccaggggcctcatcagcaacctgctgaactggtggtgtgaggggagggtgggctcccttggtggtatcctccctctaccccagtgggggctggtgggccctgagatggaggcatctccttgggccctgctgaggatggcagtagtgggtgagctcctggtggggggatgggtgtggggccgactcctccatcccacatgggctcctgtgcctctccctatcagttggccagtggagctcgagaacaaactgttgctgccagataaagcagcaaagcctgctccactgcccagcgcargcccccttcccttcctccaccaggctgagtggagaaccctaaagctacgggacaggctcccgttccccgtgcctacacagggtgctggctctggcagaaagacagtgtgcccgccccgcatcacctgtccgagtgcgaacaccttgggaagggggttcctggtggtcctgtgacaaccagagacccccagggccaaggaggccactgcagccyggcccttctgtgccctgggcccctcctcattgcagcaccacccaccgcaccaccctgggacagaggaaacacatggaggccatagcatagagcctgtctgtttatagatctctgcctgtcttgtccgtccatccactgkgtgtatatatctgtgtatctctgtggagcggggaacgggacagttgtgtaaaaatccaaaatacaattctgactatgaacaacctgcagggtcagtccaggtgtggctgtgaagccccaaccaaaccacaggacacggggttgggggaaggcagactggggctatggcggccgacccaccagtgcccaagaccgcgaggctgccctgcctccccaaga

SEQ ID NO: 4875 - DNA, 4251 bp, Homo sapiens
caggccccgcctcaggtcggccgcggactacaaatggacgagagaggcggccgtccattagttagcggctccggagcaacgcagccgttgtccttgaggccgacgggcctgacgcgggcgggttgaacgcgctggtgaggcggtcacccgggctacggcggccggcagggggcagtggcggccgttgtctagggcccggaggtggggccgcgcgcctcgggcgctacgaacccggcaggcccacgcttggctgcggccgggtgcgggctgaggccatgggcgaccgcggcagctcccggcgccggaggacagggtcgcggccctcgagccacggcggcggcgggcctgcggcggcggaagaggaggtgcgggacgccgctgcgggccccgacgtgggagccgcgggggacgcgccagccccggcccccaacaaggacggagacgccggcgtgggcagcggccactgggagctgaggtgccatcgcctgcaggattctttattcagctctgacagtggcttcagcaactaccgtggcatcctgaactggtgtgtggtgatgctgatcttgagcaatgcccggttatttctggagaacctcatcaagtatggcatcctggtggaccccatccaggtggtttctctgttcctgaaggatccctatagctggcccgccccatgcctggttattgcggccaatgtctttgctgtggctgcattccaggttgagargcgcctggcggtgggtgccctgacggagcaggcgggactgctgctgcacgtggccaacctggccaccattctgtgtttcccagcggctgtggtcttactggttgagtctatcactccagtgggctccctgctggcgctgatggcgcacaccatcctcttcctcaagctcttctcctaccgcgacgtcaactcatggtgccgcagggccagggccaaggctgcctctgcagggaagaaggccagcagtgctgctgccccgcacaccgtgagctacccggacaatctgacctaccgcgatctctactacttcctcttcgcccccaccttgtgctacgagctcaactttccccgctctccccgcatccggaagcgctttctgctgcgacggatccttgagatgctgttcttcacccagctccaggtggggctgatccagcagtggatggtccccaccatccagaactccatgaagcccttcaaggacatggactactcacgcatcatcgagcgcctcctgaagctggcggtccccaatcacctcatctggctcatcttcttctactggctcttccactcctgcctgaatgccgtggctgagctcatgcagtttggagaccgggagttctaccgggactggtggaactccgagtctgtcacctacttctggcagaactggaasatccctgtgcacaagtggtgcatcaggtaggtggggtgtgtgtgtgtgtgatgtggaacatggctgtgaacctgaaccgctttccatgccccctcctctgcagacacttctacaagcccatgcttcgacggggcagcagcaagtggatggccaggacaggggtgttcctggcctcggccttcttccacgagtacctggtgagcgtccctctgcgaatgttccgcctctgggcgttcacgggcatgatggctcagatcccactggcctggttcgtgggccgctttttccagggcaactatggcaacgcagctgtgtggctgtcgctcatcatcggacagccaatwgccgtcctcatgtacgtccacgactactacgtgctcaactatgaggccccagcggcagaggcctgagctgcacctgagggcctggcttctcactgccacctcamacccgctgccagagcccacctctcctcctaggcctcgagtgctggggatgggcctggctgcacagcatcctcctctggtcccagggaggcctctctgcccctatggggctctgtcctgcacccctcagggatggcgacagcaggccagacacagtctgatgccagctgggagtcttgctgaccctgccccgggtccgagggtgtcaataaagtgctgtccagtgacctcttcagcctgccaggggcctggggcctggtggggggtatggccacacccacaagggcgagtgccagagctgtgtggacagctgtcccaggacctgccggggagcagcagctccactgcagcagggcgggcatggccggtagggggagtgcaaggccaggcagacgcccccattccccacactcccctacctagaaaagctcagctcaggcgtcctctcctggtgctactcctgctgggtgtgcgggaatcggcactctggccctcagtgcaggatggtcaacttgcacccaccgtgctcagcttcagcttgggaagaggtcggccctgggtttgcgggaagtgggctccagccaggatggcccagggatgggcagtccacagggcctttctggtgtgggtctggtgagccgaggggctacggtacacaatggctatgtccatggctattcgccttggggcagggctcggtttggcagcctctttccttcacttggaacctgggcagccaggtgggctggtggctctcagctgccctccacgaggttggggcacccctgatccccaggcctgccttgccctctgctcttctggcaccaggctgggcagtgcagacagcgcagccctgcagccttcaggacaccttgttcccaggccctgcaatccaccaagctggatagatggggccccccttgatggtagcgggaggtcaggggtaaccccagggccctgctgctgccttaccttgctggggtgactgcttgattaaagaccccaagactggaccaggccctggtgtccccagacctgcagctatggcccaacaaggcaggtgtttgaggaggccctgcacagggtcccaggactgcaccaggggcctcatcagcaacctgctgaactggtggtgtgaggggagggtgggctcccttggtggtatcctccctctaccccagtgggggctggtgggccctgagatggaggcatctccttgggccctgctgaggatggcagtagtgggtgagctcctggtggggggatgggtgtggggccgactcctccatcccacatgggctcctgtgcctctccctatcagttggccagtggagctcgagaacaaactgttgctgccagataaagcagcaaagcctgctccactgcccagcgcargcccccttcccttcctccaccaggctgagtggagaaccctaaagctacgggacaggctcccgttccccgtgcctacacagggtgctggctctggcagaaagacagtgtgcccgccccgcatcacctgtccgagtgcgaacaccttgggaagggggttcctggtggtcctgtgacaaccagagacccccagggccaaggtgaggcgcccacccctggtccctcaataaagaactgcaagcacatgctggtcctggggagtcgggcaggcacggagctagctgcaagcatccgtcttcccccaggaggccactgcagccyggcccttctgtgccctgggcccctcctcattgcagcaccacccaccgcaccaccctgggacagaggaaacacatggaggccatagcatagagcctgtctgtttatagatctctgcctgtcttgtccgtccatccactgkgtgtatatatctgtgtatctctgtggagcggggaacgggacagttgtgtaaaaatccaaaatacaattctgactatgaacaacctgcagggtcagtccaggtgtggctgtgaagccccaaccaaaccacaggacacggggttgggggaaggcagactggcaggccagggtgaccctcctgaccagaggtgctgcccagacccgagcccgtttgtcctactggggctatggcggccgacccaccagtgcccaagaccgcgaggctgccctgcctccccaagaccagccctgcactgggggtgggggtgggcggctggcccagctcctccggggcctctaggagacagtggggtccttggctttgggaggctccgagcctgtcagcagggagatggtggggtcctcggcgaagccgtccccttcggagaagtaggagccctctcccagctcaaacagcaccggcaggtcgttgctcccggtgtccacggagccggggtccagcaggaacagcggctgcgctgtgtagtgcaccagctgcttccctg

SEQ ID NO: 4876 - DNA, 4174 bp, Homo sapiens
caggccccgcctcaggtcggccgcggactacaaatggacgagagaggcggccgtccattagttagcggctccggagcaacgcagccgttgtccttgaggccgacgggcctgacgcgggcgggttgaacgcgctggtgaggcggtcacccgggctacggcggccggcagggggcagtggcggccgttgtctagggcccggaggtggggccgcgcgcctcgggcgctacgaacccggcaggcccacgcttggctgcggccgggtgcgggctgaggccatgggcgaccgcggcagctcccggcgccggaggacagggtcgcggccctcgagccacggcggcggcgggcctgcggcggcggaagaggaggtgcgggacgccgctgcgggccccgacgtgggagccgcgggggacgcgccagccccggcccccaacaaggacggagacgccggcgtgggcagcggccactgggagctgaggtgccatcgcctgcaggattctttattcagctctgacagtggcttcagcaactaccgtggcatcctgaactggtgtgtggtgatgctgatcttgagcaatgcccggttatttctggagaacctcatcaagtatggcatcctggtggaccccatccaggtggtttctctgttcctgaaggatccctatagctggcccgccccatgcctggttattgcggccaatgtctttgctgtggctgcattccaggttgagargcgcctggcggtgggtgccctgacggagcaggcgggactgctgctgcacgtggccaacctggccaccattctgtgtttcccagcggctgtggtcttactggttgagtctatcactccagtgggctccctgctggcgctgatggcgcacaccatcctcttcctcaagctcttctcctaccgcgacgtcaactcatggtgccgcagggccagggccaaggctgcctctgcagggaagaaggccagcagtgctgctgccccgcacaccgtgagctacccggacaatctgacctaccgcgatctctactacttcctcttcgcccccaccttgtgctacgagctcaactttccccgctctccccgcatccggaagcgctttctgctgcgacggatccttgagatgctgttcttcacccagctccaggtggggctgatccagcagtggatggtccccaccatccagaactccatgaagcccttcaaggacatggactactcacgcatcatcgagcgcctcctgaagctggcggtccccaatcacctcatctggctcatcttcttctactggctcttccactcctgcctgaatgccgtggctgagctcatgcagtttggagaccgggagttctaccgggactggtggaactccgagtctgtcacctacttctggcagaactggaasatccctgtgcacaagtggtgcatcagacacttctacaagcccatgcttcgacggggcagcagcaagtggatggccaggacaggggtgttcctggcctcggccttcttccacgagtacctggtgagcgtccctctgcgaatgttccgcctctgggcgttcacgggcatgatggctcagatcccactggcctggttcgtgggccgctttttccagggcaactatggcaacgcagctgtgtggctgtcgctcatcatcggacagccaatwgccgtcctcatgtacgtccacgactactacgtgctcaactatgaggccccagcggcagaggcctgagctgcacctgagggcctggcttctcactgccacctcamacccgctgccagagcccacctctcctcctaggcctcgagtgctggggatgggcctggctgcacagcatcctcctctggtcccagggaggcctctctgcccctatggggctctgtcctgcacccctcagggatggcgacagcaggccagacacagtctgatgccagctgggagtcttgctgaccctgccccgggtccgagggtgtcaataaagtgctgtccagtgacctcttcagcctgccaggggcctggggcctggtggggggtatggccacacccacaagggcgagtgccagagctgtgtggacagctgtcccaggacctgccggggagcagcagctccactgcagcagggcgggcatggccggtagggggagtgcaaggccaggcagacgcccccattccccacactcccctacctagaaaagctcagctcaggcgtcctctcctggtgctactcctgctgggtgtgcgggaatcggcactctggccctcagtgcaggatggtcaacttgcacccaccgtgctcagcttcagcttgggaagaggtcggccctgggtttgcgggaagtgggctccagccaggatggcccagggatgggcagtccacagggcctttctggtgtgggtctggtgagccgaggggctacggtacacaatggctatgtccatggctattcgccttggggcagggctcggtttggcagcctctttccttcacttggaacctgggcagccaggtgggctggtggctctcagctgccctccacgaggttggggcacccctgatccccaggcctgccttgccctctgctcttctggcaccaggctgggcagtgcagacagcgcagccctgcagccttcaggacaccttgttcccaggccctgcaatccaccaagctggatagatggggccccccttgatggtagcgggaggtcaggggtaaccccagggccctgctgctgccttaccttgctggggtgactgcttgattaaagaccccaagactggaccaggccctggtgtccccagacctgcagctatggcccaacaaggcaggtgtttgaggaggccctgcacagggtcccaggactgcaccaggggcctcatcagcaacctgctgaactggtggtgtgaggggagggtgggctcccttggtggtatcctccctctaccccagtgggggctggtgggccctgagatggaggcatctccttgggccctgctgaggatggcagtagtgggtgagctcctggtggggggatgggtgtggggccgactcctccatcccacatgggctcctgtgcctctccctatcagttggccagtggagctcgagaacaaactgttgctgccagataaagcagcaaagcctgctccactgcccagcgcargcccccttcccttcctccaccaggctgagtggagaaccctaaagctacgggacaggctcccgttccccgtgcctacacagggtgctggctctggcagaaagacagtgtgcccgccccgcatcacctgtccgagtgcgaacaccttgggaagggggttcctggtggtcctgtgacaaccagagacccccagggccaaggtgaggcgcccacccctggtccctcaataaagaactgcaagcacatgctggtcctggggagtcgggcaggcacggagctagctgcaagcatccgtcttcccccaggaggccactgcagccyggcccttctgtgccctgggcccctcctcattgcagcaccacccaccgcaccaccctgggacagaggaaacacatggaggccatagcatagagcctgtctgtttatagatctctgcctgtcttgtccgtccatccactgkgtgtatatatctgtgtatctctgtggagcggggaacgggacagttgtgtaaaaatccaaaatacaattctgactatgaacaacctgcagggtcagtccaggtgtggctgtgaagccccaaccaaaccacaggacacggggttgggggaaggcagactggcaggccagggtgaccctcctgaccagaggtgctgcccagacccgagcccgtttgtcctactggggctatggcggccgacccaccagtgcccaagaccgcgaggctgccctgcctccccaagaccagccctgcactgggggtgggggtgggcggctggcccagctcctccggggcctctaggagacagtggggtccttggctttgggaggctccgagcctgtcagcagggagatggtggggtcctcggcgaagccgtccccttcggagaagtaggagccctctcccagctcaaacagcaccggcaggtcgttgctcccggtgtccacggagccggggtccagcaggaacagcggctgcgctgtgtagtgcaccagctgcttccctg

SEQ ID NO: 4877 - DNA, 3995 bp, Homo sapiens
caggccccgcctcaggtcggccgcggactacaaatggacgagagaggcggccgtccattagttagcggctccggagcaacgcagccgttgtccttgaggccgacgggcctgacgcgggcgggttgaacgcgctggtgaggcggtcacccgggctacggcggccggcagggggcagtggcggccgttgtctagggcccggaggtggggccgcgcgcctcgggcgctacgaacccggcaggcccacgcttggctgcggccgggtgcgggctgaggccatgggcgaccgcggcagctcccggcgccggaggacagggtcgcggccctcgagccacggcggcggcgggcctgcggcggcggaagaggaggtgcgggacgccgctgcgggccccgacgtgggagccgcgggggacgcgccagccccggcccccaacaaggacggagacgccggcgtgggcagcggccactgggagctgaggtgccatcgcctgcaggattctttattcagctctgacagtggcttcagcaactaccgtggcatcctgaactggtgtgtggtgatgctgatcttgagcaatgcccggttatttctggagaacctcatcaagtatggcatcctggtggaccccatccaggtggtttctctgttcctgaaggatccctatagctggcccgccccatgcctggttattgcggccaatgtctttgctgtggctgcattccaggttgagargcgcctggcggtgggtgccctgacggagcaggcgggactgctgctgcacgtggccaacctggccaccattctgtgtttcccagcggctgtggtcttactggttgagtctatcactccagtgggctccctgctggcgctgatggcgcacaccatcctcttcctcaagctcttctcctaccgcgacgtcaactcatggtgccgcagggccagggccaaggctgcctctgcagggaagaaggccagcagtgctgctgccccgcacaccgtgagctacccggacaatctgacctaccgcgatctctactacttcctcttcgcccccaccttgtgctacgagctcaactttccccgctctccccgcatccggaagcgctttctgctgcgacggatccttgagatgctgttcttcacccagctccaggtggggctgatccagcagtggatggtccccaccatccagaactccatgaagcccttcaaggacatggactactcacgcatcatcgagcgcctcctgaagctggcgacacttctacaagcccatgcttcgacggggcagcagcaagtggatggccaggacaggggtgttcctggcctcggccttcttccacgagtacctggtgagcgtccctctgcgaatgttccgcctctgggcgttcacgggcatgatggctcagatcccactggcctggttcgtgggccgctttttccagggcaactatggcaacgcagctgtgtggctgtcgctcatcatcggacagccaatwgccgtcctcatgtacgtccacgactactacgtgctcaactatgaggccccagcggcagaggcctgagctgcacctgagggcctggcttctcactgccacctcamacccgctgccagagcccacctctcctcctaggcctcgagtgctggggatgggcctggctgcacagcatcctcctctggtcccagggaggcctctctgcccctatggggctctgtcctgcacccctcagggatggcgacagcaggccagacacagtctgatgccagctgggagtcttgctgaccctgccccgggtccgagggtgtcaataaagtgctgtccagtgacctcttcagcctgccaggggcctggggcctggtggggggtatggccacacccacaagggcgagtgccagagctgtgtggacagctgtcccaggacctgccggggagcagcagctccactgcagcagggcgggcatggccggtagggggagtgcaaggccaggcagacgcccccattccccacactcccctacctagaaaagctcagctcaggcgtcctctcctggtgctactcctgctgggtgtgcgggaatcggcactctggccctcagtgcaggatggtcaacttgcacccaccgtgctcagcttcagcttgggaagaggtcggccctgggtttgcgggaagtgggctccagccaggatggcccagggatgggcagtccacagggcctttctggtgtgggtctggtgagccgaggggctacggtacacaatggctatgtccatggctattcgccttggggcagggctcggtttggcagcctctttccttcacttggaacctgggcagccaggtgggctggtggctctcagctgccctccacgaggttggggcacccctgatccccaggcctgccttgccctctgctcttctggcaccaggctgggcagtgcagacagcgcagccctgcagccttcaggacaccttgttcccaggccctgcaatccaccaagctggatagatggggccccccttgatggtagcgggaggtcaggggtaaccccagggccctgctgctgccttaccttgctggggtgactgcttgattaaagaccccaagactggaccaggccctggtgtccccagacctgcagctatggcccaacaaggcaggtgtttgaggaggccctgcacagggtcccaggactgcaccaggggcctcatcagcaacctgctgaactggtggtgtgaggggagggtgggctcccttggtggtatcctccctctaccccagtgggggctggtgggccctgagatggaggcatctccttgggccctgctgaggatggcagtagtgggtgagctcctggtggggggatgggtgtggggccgactcctccatcccacatgggctcctgtgcctctccctatcagttggccagtggagctcgagaacaaactgttgctgccagataaagcagcaaagcctgctccactgcccagcgcargcccccttcccttcctccaccaggctgagtggagaaccctaaagctacgggacaggctcccgttccccgtgcctacacagggtgctggctctggcagaaagacagtgtgcccgccccgcatcacctgtccgagtgcgaacaccttgggaagggggttcctggtggtcctgtgacaaccagagacccccagggccaaggtgaggcgcccacccctggtccctcaataaagaactgcaagcacatgctggtcctggggagtcgggcaggcacggagctagctgcaagcatccgtcttcccccaggaggccactgcagccyggcccttctgtgccctgggcccctcctcattgcagcaccacccaccgcaccaccctgggacagaggaaacacatggaggccatagcatagagcctgtctgtttatagatctctgcctgtcttgtccgtccatccactgkgtgtatatatctgtgtatctctgtggagcggggaacgggacagttgtgtaaaaatccaaaatacaattctgactatgaacaacctgcagggtcagtccaggtgtggctgtgaagccccaaccaaaccacaggacacggggttgggggaaggcagactggcaggccagggtgaccctcctgaccagaggtgctgcccagacccgagcccgtttgtcctactggggctatggcggccgacccaccagtgcccaagaccgcgaggctgccctgcctccccaagaccagccctgcactgggggtgggggtgggcggctggcccagctcctccggggcctctaggagacagtggggtccttggctttgggaggctccgagcctgtcagcagggagatggtggggtcctcggcgaagccgtccccttcggagaagtaggagccctctcccagctcaaacagcaccggcaggtcgttgctcccggtgtccacggagccggggtccagcaggaacagcggctgcgctgtgtagtgcaccagctgcttccctg

SEQ ID NO: 4878 - DNA, 2801 bp, Homo sapiens
gttgcctggcagcaggcttgtttacatggtccgaccctgcaagaccggacagctccggtttgcagaagtaaatcagtgattgtctggagttggagatcagaatctgctgttcacatcccggctgtgacgtcgtgtccgagcgggaacagcttccacgtgttcgaccagggccagtttgccaaggaggtgctgcccaagtacttcaagcacaacaacatggccagcttcgtgcggcagctcaacatgtatggcttccggaaagtggtccacatcgagcagggcggcctggtcaagccagagagagacgacacggagttccagcacccatgcttcctgcgtggccaggagcagctccttgagaacatcaagaggaaagtgaccagtgtgtccaccctgaagagtgaagacataaagatccgccaggacagcgtcaccaagctgctgacggacgtgcagctgatgaaggggaagcaggagtgcatggactccaagctcctggccatgaagcatgagaatgaggctctgtggcgggaggtggccagccttcggcagaagcatgcccagcaacagaaagtcgtcaacaagctcattcagttcctgatctcactggtgcagtcaaaccggatcctgggggtgaagagaaagatccccctgatgctgaacgacagtggctcagcacattccatgcccaagtatagccggcagttctccctggagcacgtccacggctcgggcccctactcggccccctccccagcctacagcagctccagcctctacgcccctgatgctgtggccagctctggacccatcatctccgacatcaccgagctggctcctgccagccccatggcctcccccggcgggagcatagacgagaggcccctatccagcagccccctggtgcgtgtcaaggaggagccccccagcccgcctcagagcccccgggtagaggaggcgagtcccgggcgcccatcttccgtggacaccctcttgtccccgaccgccctcattgactccatcctgcgggagagtgaacctgcccccgcctccgtcacagccctcacggacgccaggggccacacggacaccgagggccggcctccctcccccccgcccacctccacccctgaaaagtgcctcagcgtagcctgcctggacaagaatgagctcagtgaccacttggatgctatggactccaacctggataacctgcagaccatgctgagcagccacggcttcagcgtggacaccagtgccctgctggacctgttcagcccctcggtgaccgtgcccgacatgagcctgcctgaccttgacagcagcctggccagtatccaagagctcctgtctccccaggagccccccaggcctcccgaggcagagaacagcagcccggattcagggaagcagctggtgcactacacagcgcagccgctgttcctgctggaccccggctccgtggacaccgggagcaacgacctgccggtgctgtttgagctgggagagggctcctacttctccgaaggggacggcttcgccgaggaccccaccatctccctgctgacaggctcggagcctcccaaagccaaggaccccactgtctcctagaggccccggaggagctgggccagccgcccacccccacccccagtgcagggctggtcttggggaggcagggcagcctcgcggtcttgggcactggtgggtcggccgccatagccccagtaggacaaacgggctcgggtctgggcagcacctctggtcaggagggtcaccctggcctgccagtctgccttcccccaaccccgtgtcctgtggtttggttggggcttcacagccacacctggactgaccctgcaggttgttcatagtcagaattgtattttggatttttacacaactgtcccgttccccgctccacagagatacacagatatatacacmcagtggatggacggacaagacaggcagagatctataaacagacaggctctatgctatggcctccatgtgtttcctctgtcccagggtggtgcggtgggtggtgctgcaatgaggaggggcccagggcacagaagggccrggctgcagtggcctcctgggggaagacggatgcttgcagctagctccgtgcctgcccgactccccaggaccagcatgtgcttgcagttctttattgagggaccaggggtgggcgcctcaccttggccctgggggtctctggttgtcacaggaccaccaggaacccccttcccaaggtgttcgcactcggacaggtgatgcggggcgggcacactgtctttctgccagagccagcaccctgtgtaggcacggggaacgggagcctgtcccgtagctttagggttctccactcagcctggtggaggaagggaagggggcytgcgctgggcagtggagcaggctttgctgctttatctggcagcaacagtttgttctcgagctccactggccaactgatagggagaggcacaggagcccatgtgggatggaggagtcggccccacacccatccccccaccaggagctcacccactactgccatcctcagcagggcccaaggagatgcctccatctcagggcccaccagcccccactggggtagagggaggataccaccaagggagcccaccctcccctcacaccaccagttcagcaggttgctgatgaggcccctggtgcagtcctgggaccctgtgcagggcctcctcaaacacctgccttgttgggccatagctgcaggtctggggacaccagggcctggtccagtcttggggtct

SEQ ID NO: 4879 - DNA, 2643 bp, Homo sapiens
gctgggcgggcgggcggctgctccggtccaggggtggaggtcggggccctgacccgacgcagccaggcggaagcgcggctgccattggaggctgcttttacctgcgcggggcccggggcgcaaagtccgaggcgccggggggaggaggcggcggacggcagcgcaggtgggcccgcgctctcggccctgcaagatgcccctgaagctgcgggggaagaagaaggccaagtccaaggagaccgccgggctggtggagggcgagccgacgggcgcgggcggcgggagcctctcagcgtcccgggctcccgcacgcaggctggtcttccacgcgcagctggcgcacggtagtgccacgggccgagtggagggcttctccagcatccaggagctctacgcccagatcgcgggcgcgtttgaaatctcgccgtcggagatcttatattgcactttaaacacacctaaaattgacatggaaagactcttaggaggacaactaggactagaagatttcatatttgcccatgtgaaaggaatcgaaaaagaagtgaatgtgtataaatctgaggattcacttggtctcaccattacagataatggtgttggctatgcttttataaagagaattaaagatggtggtgttattgactcagttaaaacaatctgtgttggggatcatattgaatccataaatggagaaaatattgttgggtggcgtcactatgatgttgctaagaagttaaaggaattaaaaaaggaggaactctttactatgaagttaatagaacctaagaaggcatttgaaatagagcygaggtcaaaggctggaaagtcatcaggagaaaaaattggttgtggaagggcaacacttcgcctgagatcaaaaggtcctgccaccgtggaagaaatgccttctgaaaccaaagcaaaggcaattgaaaagattgatgatgttcttgagttgtacatgggaattcgagatattgatttagccaccacaatgtttgaagctggaaaggacaaagtaaatccagatgaatttgctgtggcacttgacgaaactcttggagactttgcgttcccagacgaatttgtctttgatgtttggggagtcattggtgatgccaaacgragaggattatgatgtgtacactccatctctgaagaaacaacccatcgttcttttttttctcttttttaaaaagtcctataagatctgtttttggacacctttactaactctggtttaatttcatgtgtatggaatatattctttgaaatataattttggtaattttgatttctgggcactttttaacattgctgatgtagtatgcttaagagaaatgacctaaataaggatcaattgtaatattcattcaaaaggtttttaaaagtaagttttaaggagtatttctcgacagatgattttcttctccattaatacccatgctttgtttttcacatataaatagatgatttcaatagctttgtagttttttttcaaaatcttaatgtaaactaggattggagtatgatttacctcatagtatcttcactgtgttatcctagtttgaacaggatatgttcaggaaatgaaaggtgaattatgccccttattggtctagaagcattggtttttttttgatcctctgagtaagggaaggaagattcctgtggcatgttgatttctatggccaactttctctctttgtaaaacaaagattgattgattttcttgtatgcttctttatacatgctcttaaaacttgtggttgaaatctgtgctgtgtgtgtgtgtctctgcatgtgtaaaagaagggtaaaaaagagatgggtagggtagaactacttgcatttgatttttttttcagtccttaaaacattatttctttttttcactcatagccacttttatgttaccttttataagcactccagggaagattttatatttttttgtagagtttttggaaagatatttactcaaaataactatgctttagaacttttttttttttttttttttttggttaaacagcagcactttttagttccctaaactttagaagaaatgctatcagaaatagatttccttccagtggaaagaaaggaggaagggagaattgagaaaatatattagtctattattttagagttctaatacactctaaattawagagaaaattgagagtaaatgactgtcttwtcactcttatttgacatttcgtaggtgtaagagaaatggaaatgaatggtttcaacaaagatcatttaatacagcagagcatggcatgaccaagcatctttgtaaagtgttagatggaaaatgctgtgtgctgccatggtaatcagaaataataacctgttagggatgtattctaggaaatcagaagtagttctcttttcttgctggattattgcttagataactcttgttttctggtaaaactttagttgtattgccatccactcctttttcaaatgagtttaatgccataaagctgatattctttgtccgattaatttgaaatctgcacagaagctgttttagtcattaatgtgtaacaaaagtagcttatagaatatggactgccttattgctgttgcttatcatttgaaaataaaatccagctcaggttgtaa

SEQ ID NO: 4880 - DNA, 2508 bp, Homo sapiens
tacgcagcgttgacagccgcccgccaccgagagatcagctgtcagagatcagaggaagaggaaggggcggagctgctttgcggccggccgcggagcagtcagccgactacagagaagggtaatcgggtgtccccggcgccgcccggggccctgagggctggctagggtccaggccgsgggggacgggacagacgaaccagccccgtgtaggaagcgcgacaatgccccgctacggagcgtcactccgccagagctgccccaggtccggccgggagcagggayaagacgggaccgccggagcccccggactcctttggatgggcctggyyctggcgctggcgctggcgctggcgctggcgctggctctgtctgactctcgggttctctgggctccggcagaggctcaccctctttctccccaaggccatcctgccaggttacatcgcatagtgccccggctccgagatgtctttgggtgggggaacctcacctgcccaatctgcaaaggtctattcaccgccatcaacctcgggctgaagaaggaacccaatgtggctcgcgtgggctccgtggccatcaagctgtgcaatctgctgaagatagcaccacctgccgtgtgccaatccattgtccaccyctttgaggatgacatggtggaggtgtggagacgctcagtgctgagcccatctgaggccygtggcctgctcctgggctccacctgtgggcactgggacattttctcatcttgraacatctctttgcctactgtgccgaagccgccccccaaaccccctagccccccagccccaggtscccctgtcagcygcatcctcttcctcactgacctgcactgggatcatgactacctggagggcacggaccctgactgtgcagacccamtgtgctgcygccggggttctgrcctgccgcccgcrtcccrgccaggtgccrgatactggrgcgaatacmgmaagtgtgacctgcccctgaggaccctgkagagcctgtwgagtgggctgggcccagcyggcccttttgatatggtgtactggacaggagacatccccgcacatgatgtctggcaccagactcrtcaggacmaactgcrggccctgaccaccrtcacagcacytgtgaggaagttcctggggccagtgccagtgtaccctgctgtgggtaacyatgaaagcayasctgtcaatagcttccctccccscttcattgagggcaaccactcctcccgctggcyctatgaagcgatggccaaggcttgggagccctggctgcctgccgaagmcctgcgcaccctcagaattggggggttctatgctctttccccataccccggtctccdcctcatcyctctcaatatrartttttgttcccgtgagamcttckggctcttgatcaactccacggatcccgcaggacagctccagtggctggtgggggarcttcaggctgytgaggatcgaggagacaaagtgyatataattggccacattcccccagggcactgtctgaagagctggagctggaattattacygaattgtagccaggtrtgagaacaccctggctgytcagttctttggccacactcatgtggatgaatytgaggtcttctatgatgaagagactctgagcyggcygctggctgtagccttmctggcacccagtgcaactaccwacatcggccttaatcctrgttacyktgtgtaccaaatagatggaaactactccrggagctctcacgtggtcctggaccakgwgacctacatcctgaatctgacccaggcaaacataccggsagccataccgcacyggcagcttctcyacagggctcgagaaacctatgggctgcccaacacacygcctaccgcctggcacaacctggtatatcgcatgcggggcgacatgcaacttttcyagaccttctggtttctctaccataasrgccacccaccctcrgagccctgtggcaygccctgccgtctggctactctttgtgcccagctctctgcccvtgctgacagccctgctctgtgccgccacctgatgccagatgggagcctcccagaggcccagagcctgtggccaaggccactgttttgctagggccccagggcccacatttgggaaagttcttgatgtwggaaaggrtgaaaaagcccaaatgctgctgtggttcmaccaggcaagatcatccggtgaaagaaccagtccctgggccccaaggatrccggggaaacaggaccttctcctttcctggagctggtttagctggatatgggagggggtttggctgcctgtgcccaggagctagactgccttgaggctgctgtcctttcacagccatggagtagaggcctaagttgacactgccctgggcagacaagacaggagctgtcgccccaggcctgtgctgcccagccaggaaccctgtactgctgctgcgacctgatgctgccagtctgttaaaataaagataagagacttggactccaga

SEQ ID NO: 4881 - DNA, 2376 bp, Homo sapiens
tacgcagcgttgacagccgcccgccaccgagagatcagctgtcagagatcagaggaagaggaaggggcggagctgctttgcggccggccgcggagcagtcagccgactacagagaagggtaatcgggtgtccccggcgccgcccggggccctgagggctggctagggtccaggccgsgggggacgggacagacgaaccagccccgtgtaggaagcgcgacaatgccccgctacggagcgtcactccgccagagctgccccaggtccggccgggagcagggayaagacgggaccgccggagcccccggactcctttggatgggcctggyyctggcgctggcgctggcgctggcgctggcgctggctctgtctgactctcgggttctctgggctccggcagaggctcaccctctttctccccaaggccatcctgccaggttacatcgcatagtgccccggctccgagatgtctttgggtgggggaacctcacctgcccaatctgcaaaggtctattcaccgccatcaacctcgggctgaagaaggaacccaatgtggctcgcgtgggctccgtggccatcaagctgtgcaatctgctgaagatagcaccacctgccgtgtgccaatccattgtccaccyctttgaggatgacatggtggaggtgtggagacgctcagtgctgagcccatctgaggccygtggcctgctcctgggctccacctgtgggcactgggacattttctcatcttgraacatctctttgcctactgtgccgaagccgccccccaaaccccctagccccccagccccaggtscccctgtcagcygcatcctcttcctcactgacctgcactgggatcatgactacctggagggcacggaccctgactgtgcagacccamtgtgctgcygccggggttctgrcctgccgcccgcrtcccrgccaggtgccrgatactggrgcgaatacmgmaagtgtgacctgcccctgaggaccctgkagagcctgtwgagtgggctgggcccagcyggcccttttgatatggtgtactggacaggagacatccccgcacatgatgtctggcaccagactcrtcaggacmaactgcrggccctgaccaccrtcacagcacytgtgaggaagttcctggggccagtgccagtgtaccctgctgtgggtaacyatgaaagcayasctgtcaatagcttccctccccscttcattgagggcaaccactcctcccgctggcyctatgaagcgatggccaaggcttgggagccctggctgcctgccgaagmcctgcgcaccctcaggtacttatcgtccgtggaaacccaggaagggaaaagaaaggtgyatataattggccacattcccccagggcactgtctgaagagctggagctggaattattacygaattgtagccaggtrtgagaacaccctggctgytcagttctttggccacactcatgtggatgaatytgaggtcttctatgatgaagagactctgagcyggcygctggctgtagccttmctggcacccagtgcaactaccwacatcggccttaatcctrgttacyktgtgtaccaaatagatggaaactactccrggagctctcacgtggtcctggaccakgwgacctacatcctgaatctgacccaggcaaacataccggsagccataccgcacyggcagcttctcyacagggctcgagaaacctatgggctgcccaacacacygcctaccgcctggcacaacctggtatatcgcatgcggggcgacatgcaacttttcyagaccttctggtttctctaccataasrgccacccaccctcrgagccctgtggcaygccctgccgtctggctactctttgtgcccagctctctgcccvtgctgacagccctgctctgtgccgccacctgatgccagatgggagcctcccagaggcccagagcctgtggccaaggccactgttttgctagggccccagggcccacatttgggaaagttcttgatgtwggaaaggrtgaaaaagcccaaatgctgctgtggttcmaccaggcaagatcatccggtgaaagaaccagtccctgggccccaaggatrccggggaaacaggaccttctcctttcctggagctggtttagctggatatgggagggggtttggctgcctgtgcccaggagctagactgccttgaggctgctgtcctttcacagccatggagtagaggcctaagttgacactgccctgggcagacaagacaggagctgtcgccccaggcctgtgctgcccagccaggaaccctgtactgctgctgcgacctgatgctgccagtctgttaaaataaagataagagacttggactccaga

SEQ ID NO: 4882 - DNA, 1955 bp, Homo sapiens
ctgaagatagcaccacctgccgtgtgccaatccattgtccaccyctttgaggatgacatggtggaggtgtggagacgctcagtgctgagcccatctgaggccygtggcctgctcctgggctccacctgtgggcactgggacattttctcatcttgraacatctctttgcctactgtgccgaagccgccccccaaaccccctagccccccagccccaggtscccctgtcagcygcatcctcttcctcactgacctgcactgggatcatgactacctggagggcacggaccctgactgtgcagacccamtgtgctgcygccggggttctgrcctgccgcccgcrtcccrgccaggtgccrgatactggrgcgaatacmgmaagtgtgacctgcccctgaggaccctgkagagcctgtwgagtgggctgggcccagcyggcccttttgatatggtgtactggacaggagacatccccgcacatgatgtctggcaccagactcrtcaggacmaactgcrggccctgaccaccrtcacagcacytgtgaggaagttcctggggccagtgccagtgtaccctgctgtgggtaacyatgaaagcayasctgtcaatagcttccctccccscttcattgagggcaaccactcctcccgctggcyctatgaagcgatggccaaggcttgggagccctggctgcctgccgaagmcctgcgcaccctcaggtacttatcgtccgtggaaacccaggaagggaaaagaaagaattggggggttctatgctctttccccataccccggtctccdcctcatcyctctcaatatrartttttgttcccgtgagamcttckggctcttgatcaactccacggatcccgcaggacagctccagtggctggtgggggarcttcaggctgytgaggatcgaggagacaaagtgyatataattggccacattcccccagggcactgtctgaagagctggagctggaattattacygaattgtagccaggtrtgagaacaccctggctgytcagttctttggccacactcatgtggatgaatytgaggtcttctatgatgaagagactctgagcyggcygctggctgtagccttmctggcacccagtgcaactaccwacatcggccttaatcctrgttacyktgtgtaccaaatagatggaaactactccrggagctctcacgtggtcctggaccakgwgacctacatcctgaatctgacccaggcaaacataccggsagccataccgcacyggcagcttctcyacagggctcgagaaacctatgggctgcccaacacacygcctaccgcctggcacaacctggtatatcgcatgcggggcgacatgcaacttttcyagaccttctggtttctctaccataasrgccacccaccctcrgagccctgtggcaygccctgccgtctggctactctttgtgcccagctctctgcccvtgctgacagccctgctctgtgccgccacctgatgccagatgggagcctcccagaggcccagagcctgtggccaaggccactgttttgctagggccccagggcccacatttgggaaagttcttgatgtwggaaaggrtgaaaaagcccaaatgctgctgtggttcmaccaggcaagatcatccggtgaaagaaccagtccctgggccccaaggatrccggggaaacaggaccttctcctttcctggagctggtttagctggatatgggagggggtttggctgcctgtgcccaggagctagactgccttgaggctgctgtcctttcacagccatggagtagaggcctaagttgacactgccctgggcagacaagacaggagctgtcgccccaggcctgtgctgcccagccaggaaccctgtactgctgctgcgacctgatgctgccagtctgttaaaataaagataagagacttggactccaga

SEQ ID NO: 4883 - DNA, 3924 bp, Homo sapiens
gacgccttgctgagtctgggctctgtcatcgacatttcaggcctgcaacgtgctgtcaaggaggccctgtcagctgtgctcccccgagtggaaactgtctacacctacctactggatggtgagtcccagctggtgtgtgaggaccccccacatgagctgccccaggaggggaaagtccgggaggctatcatctcccagaagcggctgggctgcaatgggctgggcttctcagacctgccagggaagcccttggccaggctggtggctccactggctcctgatacccaagtgctggtcatgccgctagcggacaaggaggctggggccgtggcagctgtcatcttggtgcactgtggccagctgagtgataatgaggaatggagcctgcaggcggtggagaagcataccctggtcgccctgcggagggtgcaggtcctgcagcagcgcgggcccagggaggctccccgagccgtccagaaccccccggaggggacggcggaagaccagaagggcggggcggcgtacaycgaccgcgaccgcaagatcctccaactgtgcggggaactctacgacctggatgcctcttccctgcagctcaaagtgctccaatacctgcagcaggagacccgggcatcccgctgctgcctcctgctggtgtcggaggacaatctccagctttcttgcaaggtcatcggagacaaagtgctcggggaagaggtcagctttcccttgacaggatgcctgggccaggtggtggaagacaagaagtccatccagctgaaggacctcacctccgaggatgtacaacagctgcagagcatgttgggctgtgagctgcaggccatgctctgtgtccctgtcatcagccgggccactgaccaggtggtggccttggcctgcgccttcaacaagctagaaggagacttgttcaccgacgaggacgagcatgtgatccagcactgcttccactacaccagcaccgtgctcaccagcaccctggccttccagaaggaacagaaactcaagtgtgagtgccaggctcttctccaagtggcaaagaacctcttcacccacctggatgacgtctctgtcctgctccaggagatcatcacggaggccagaaacctcagcaacgcagagatctgctctgtgttcctgctggatcagaatgagctggtggccaaggtgttcgacgggggcgtggtggatgatgagagctatgagatccgcatcccggccgatcagggcatcgcgggacacgtggcgaccacgggccagatcctgaacatccctgacgcatatgcccatccgcttttctaccgcggcgtggacgacagcaccggcttccgcacgcgcaacatcctctgcttccccatcaagaacgagaaccaggaggtcatcggtgtggccgagctggtgaacaagatcaatgggccatggttcagcaagttcgacgaggacctggcgacggccttctccatctactgcggcatcagcatcgcccattctctcctatacaaaaaagtgaatgaggctcagtatcgcagccacctggccaatgagatgatgatgtaccacatgaaggtctccgaygatgagtataccaaacttctccatgatgggatccagcctgtggctgccattgactccaattttgcaagtttcacctatacccctcgttccctgcccgaggatgacacgtccatggccatcctgagcatgctgcaggacatgaatttcatcaacaactacaaaattgactgcccgaccctggcccggttctgtttgatggtgaagaagggctaccgggatcccccctaccacaactggatgcacgccttttctgtctcccacttctgctacctgctctacaagaacctggagctcaccaactacctcgaggacatcgagatctttgccttgtttatttcctgcatgtgtcatgacctggaccacagaggcacaaacaactctttccaggtggcctcgaaatctgtgctggctgcgctctacagctctgagggctccgtcatggagaggcaccactttgctcaggccatygccatcctcaacacccacggctgcaacatctttgatcatttctcccggaaggactatcagcgcatgctggatctgatgcgggacatcatcttggccacagacctggcccaccatctccgcatcttcaaggacctccagaagatggctgaggtgggctacgaccgaaacaacaagcagcaccacagacttctcctctgcctcctcatgacctcctgtgacctctctgaccagaccaagggctggaagactacgagaaagatcgcggagctgatctacaaagaattcttctcccagggagacctggagaaggccatgggcaacaggccgatggagatgatggaccgggagaaggcctatatccctgagctgcaaatcagcttcatggagcacattgcratgcccatctacaagctgttgcaggacctgttccccaaagcggcagagctgtaygagcgcgtggcctccaaccgtgagcactggaccaaggtgtcccacaagttcaccatccgcggcctcccaagtaacaactcgctggacttcctggatgaggagtacgaggtgcctgatctggatggcactagggcccccatcaatggctgctgcagccttgatgctgagtgatcccctccagggacacttccctgcccaggccacctyccacagccctccactggtctggccagatgcactgggaacagagccacgggtcctgggtcctagaccaggacttcctgtgtgaccctggacaagtactaccttcctgggcctcagctttctcgtctgtataatggaagcaagacttccaacctcacggagactttgtaatttgttytctgagagcacaggggtgaccaatgagcagtgggccctactctgcacctctgaccacaccttggcaagtctttcccaagccattctttgtctgagcagcttgatggtttctccttgccccatttctgccccaccagatctttgctcctttccctttgaggactcccaccctttggggtctccaggatcctcatggaaggggaaggtgagacatctgagtgagsagagtgtggcatcttggaaacagtccttagttctgtgggaggactagaaacagccgcggggcgaaggccccctgaggaccactactatactgatggtgggattgggacctgggggatacaggggccccaggaagaagctgccagaggggcagctcagtgctctgcagagaggggccctggggagaagcaggatgggattgatgggcaggagggatccccgcactgggagacaggcccaggtatgaatgagccagccatgcttcctcctgcctgtgtgacgctgggcgagtctcttcccctgtctgggccaaacagggagcgggtaagacaatccatgctctaagatccattttagatcaatgtctaaaatagctctatsgctctgcggagtcccagcagaggctatggaatgtttctgcaaccctaaggcacagagagcccaaccctgagtgtctcagaggccccctgagtgttccccttggcctgagccccttacccattcctgcagccagtgagagacctggcctcagccctggcagggctctctcttcaaggccatatccacctgtgccctggggcttgggagaccccatagggccgggactcttgggtcagcccggccactggcttctctctttttctcygtttcattctgtgtgcgttgtggggtgggggagggggtccacctgccttacctttctgagttgcctttagagagatgcgtttttctaggactctgtgcaactgtcgtatatggtcccgtgggctgaccgctttgtacatgagaataaatctatttctttctacc

SEQ ID NO: 4884 - DNA, 2248 bp, Homo sapiens
gaggctcagagtggtctagggactcaccctgggtcacacagagggttgaaacagagctcagaaagggaactggggcccctgactccccctttctgactgctctgctkacctgggggctggagctggacgaggcccctgcttcctctcttggggtcaatggtaagggagcccatctgccccagctgggcccccatcactcctctccccccagaggcaccactttgctcaggccatygccatcctcaacacccacggctgcaacatctttgatcatttctcccggaaggtgatggggttgggggtggggtggggattgagggggagctgggagctggctggaggtgggataaggagccaaggagtggaggctcactgggatgggcaaatgggtgggggtgtccagtaggagggcatgacacccctgccctcgcctcaggactatcagcgcatgctggatctgatgcgggacatcatcttggccacagacctggcccaccatctccgcatcttcaaggacctccagaagatggctgaggtgggctacgaccgaaacaacaagcagcaccacagacttctcctctgcctcctcatgacctcctgtgacctctctgaccagaccaagggctggaagactacgagaaagatcgcggagctgatctacaaagaattcttctcccagggagacctggagaaggccatgggcaacaggccgatggagatgatggaccgggagaaggcctatatccctgagctgcaaatcagcttcatggagcacattgcratgcccatctacaagctgttgcaggacctgttccccaaagcggcagagctgtaygagcgcgtggcctccaaccgtgagcactggaccaaggtgtcccacaagttcaccatccgcggcctcccaagtaacaactcgctggacttcctggatgaggagtacgaggtgcctgatctggatggcactagggcccccatcaatggctgctgcagccttgatgctgagtgatcccctccagggacacttccctgcccaggccacctyccacagccctccactggtctggccagatgcactgggaacagagccacgggtcctgggtcctagaccaggacttcctgtgtgaccctggacaagtactaccttcctgggcctcagctttctcgtctgtataatggaagcaagacttccaacctcacggagactttgtaatttgttytctgagagcacaggggtgaccaatgagcagtgggccctactctgcacctctgaccacaccttggcaagtctttcccaagccattctttgtctgagcagcttgatggtttctccttgccccatttctgccccaccagatctttgctcctttccctttgaggactcccaccctttggggtctccaggatcctcatggaaggggaaggtgagacatctgagtgagsagagtgtggcatcttggaaacagtccttagttctgtgggaggactagaaacagccgcggggcgaaggccccctgaggaccactactatactgatggtgggattgggacctgggggatacaggggccccaggaagaagctgccagaggggcagctcagtgctctgcagagaggggccctggggagaagcaggatgggattgatgggcaggagggatccccgcactgggagacaggcccaggtatgaatgagccagccatgcttcctcctgcctgtgtgacgctgggcgagtctcttcccctgtctgggccaaacagggagcgggtaagacaatccatgctctaagatccattttagatcaatgtctaaaatagctctatsgctctgcggagtcccagcagaggctatggaatgtttctgcaaccctaaggcacagagagcccaaccctgagtgtctcagaggccccctgagtgttccccttggcctgagccccttacccattcctgcagccagtgagagacctggcctcagccctggcagggctctctcttcaaggccatatccacctgtgccctggggcttgggagaccccatagggccgggactcttgggtcagcccggccactggcttctctctttttctcygtttcattctgtgtgcgttgtggggtgggggagggggtccacctgccttacctttctgagttgcctttagagagatgcgtttttctaggactctgtgcaactgtcgtatatggtcccgtgggctgaccgctttgtacatgagaataaatctatttctttctacc

SEQ ID NO: 4885 - DNA, 4283 bp, Homo sapiens
agagccagccgagcagcagaggcagtggcagcgggagaggcgggagcagcggggcagcagagctggattggggtgttgagtccaggctgagtagggggcagcccactgctcttggtccctgtgcctgctgggggtgccctgccctgaactccaggcagcggggacagggcgaggtgccaccttagtctggctggggaggcggacgatgaggagtgatggggcaggcatgcggccactccatcctctgcaggagccagcagtacccggcagcgcgaccggctgagccgcggggccagcaggtcttcctcaagccggacgagccgccgccgccgccgcagccatgcgccgacagcctgcaggacgccttgctgagtctgggctctgtcatcgacatttcaggcctgcaacgtgctgtcaaggaggccctgtcagctgtgctcccccgagtggaaactgtctacacctacctactggatggtgagtcccagctggtgtgtgaggaccccccacatgagctgccccaggaggggaaagtccgggaggctatcatctcccagaagcggctgggctgcaatgggctgggcttctcagacctgccagggaagcccttggccaggctggtggctccactggctcctgatacccaagtgctggtcatgccgctagcggacaaggaggctggggccgtggcagctgtcatcttggtgcactgtggccagctgagtgataatgaggaatggagcctgcaggcggtggagaagcataccctggtcgccctgcggagggtgcaggtcctgcagcagcgcgggcccagggaggctccccgagccgtccagaaccccccggaggggacggcggaagaccagaagggcggggcggcgtacaycgaccgcgaccgcaagatcctccaactgtgcggggaactctacgacctggatgcctcttccctgcagctcaaagtgctccaatacctgcagcaggagacccgggcatcccgctgctgcctcctgctggtgtcggaggacaatctccagctttcttgcaaggtcatcggagacaaagtgctcggggaagaggtcagctttcccttgacaggatgcctgggccaggtggtggaagacaagaagtccatccagctgaaggacctcacctccgaggatgtacaacagctgcagagcatgttgggctgtgagctgcaggccatgctctgtgtccctgtcatcagccgggccactgaccaggtggtggccttggcctgcgccttcaacaagctagaaggagacttgttcaccgacgaggacgagcatgtgatccagcactgcttccactacaccagcaccgtgctcaccagcaccctggccttccagaaggaacagaaactcaagtgtgagtgccaggctcttctccaagtggcaaagaacctcttcacccacctggatgacgtctctgtcctgctccaggagatcatcacggaggccagaaacctcagcaacgcagagatctgctctgtgttcctgctggatcagaatgagctggtggccaaggtgttcgacgggggcgtggtggatgatgagagctatgagatccgcatcccggccgatcagggcatcgcgggacacgtggcgaccacgggccagatcctgaacatccctgacgcatatgcccatccgcttttctaccgcggcgtggacgacagcaccggcttccgcacgcgcaacatcctctgcttccccatcaagaacgagaaccaggaggtcatcggtgtggccgagctggtgaacaagatcaatgggccatggttcagcaagttcgacgaggacctggcgacggccttctccatctactgcggcatcagcatcgcccattctctcctatacaaaaaagtgaatgaggctcagtatcgcagccacctggccaatgagatgatgatgtaccacatgaaggtctccgaygatgagtataccaaacttctccatgatgggatccagcctgtggctgccattgactccaattttgcaagtttcacctatacccctcgttccctgcccgaggatgacacgtccatggccatcctgagcatgctgcaggacatgaatttcatcaacaactacaaaattgactgcccgaccctggcccggttctgtttgatggtgaagaagggctaccgggatcccccctaccacaactggatgcacgccttttctgtctcccacttctgctacctgctctacaagaacctggagctcaccaactacctcgaggacatcgagatctttgccttgtttatttcctgcatgtgtcatgacctggaccacagaggcacaaacaactctttccaggtggcctcgaaatctgtgctggctgcgctctacagctctgagggctccgtcatggagaggcaccactttgctcaggccatygccatcctcaacacccacggctgcaacatctttgatcatttctcccggaaggactatcagcgcatgctggatctgatgcgggacatcatcttggccacagacctggcccaccatctccgcatcttcaaggacctccagaagatggctgaggtgggctacgaccgaaacaacaagcagcaccacagacttctcctctgcctcctcatgacctcctgtgacctctctgaccagaccaagggctggaagactacgagaaagatcgcggagctgatctacaaagaattcttctcccagggagacctggagaaggccatgggcaacaggccgatggagatgatggaccgggagaaggcctatatccctgagctgcaaatcagcttcatggagcacattgcratgcccatctacaagctgttgcaggacctgttccccaaagcggcagagctgtaygagcgcgtggcctccaaccgtgagcactggaccaaggtgtcccacaagttcaccatccgcggcctcccaagtaacaactcgctggacttcctggatgaggagtacgaggtgcctgatctggatggcactagggcccccatcaatggctgctgcagccttgatgctgagtgatcccctccagggacacttccctgcccaggccacctyccacagccctccactggtctggccagatgcactgggaacagagccacgggtcctgggtcctagaccaggacttcctgtgtgaccctggacaagtactaccttcctgggcctcagctttctcgtctgtataatggaagcaagacttccaacctcacggagactttgtaatttgttytctgagagcacaggggtgaccaatgagcagtgggccctactctgcacctctgaccacaccttggcaagtctttcccaagccattctttgtctgagcagcttgatggtttctccttgccccatttctgccccaccagatctttgctcctttccctttgaggactcccaccctttggggtctccaggatcctcatggaaggggaaggtgagacatctgagtgagsagagtgtggcatcttggaaacagtccttagttctgtgggaggactagaaacagccgcggggcgaaggccccctgaggaccactactatactgatggtgggattgggacctgggggatacaggggccccaggaagaagctgccagaggggcagctcagtgctctgcagagaggggccctggggagaagcaggatgggattgatgggcaggagggatccccgcactgggagacaggcccaggtatgaatgagccagccatgcttcctcctgcctgtgtgacgctgggcgagtctcttcccctgtctgggccaaacagggagcgggtaagacaatccatgctctaagatccattttagatcaatgtctaaaatagctctatsgctctgcggagtcccagcagaggctatggaatgtttctgcaaccctaaggcacagagagcccaaccctgagtgtctcagaggccccctgagtgttccccttggcctgagccccttacccattcctgcagccagtgagagacctggcctcagccctggcagggctctctcttcaaggccatatccacctgtgccctggggcttgggagaccccatagggccgggactcttgggtcagcccggccactggcttctctctttttctcygtttcattctgtgtgcgttgtggggtgggggagggggtccacctgccttacctttctgagttgcctttagagagatgcgtttttctaggactctgtgcaactgtcgtatatggtcccgtgggctgaccgctttgtacatgagaataaatctatttctttctacc

SEQ ID NO: 4886 - DNA, 3017 bp, Homo sapiens
gggcgcgggctggggtcgccaggcggtgcgttctgcccgcgcggggctgagagttaggggccggggccggatccggggccgggggtcgcgccgctagccgccagcagcgcagtccgggccgccaccctgcaccctccgccctgtttctgcacccgtctgggttcttgtgccgccgcccgcaagccttcccgagctcagggtggtgagctgcggagacccgtgataattcgttaactaattcaacaaacgggacccttctgtgtgccagaaaccgcaagcagttgctaacccagtgggacaggcggattggaagagcgggaaggtcctggcccagagcagtgtgacacttccctctgtgaccatgaaactctgggtgtctgcattgctgatggcctggtttggtgtcctgagctgtgtgcaggccgaattcttcacctctattgggcacatgactgacctgatttatgcagagaaagagctggtgcagtctctgaaagagtacatccttgtggaggaagccaagctttccaagattaagagctgggccaacaaaatggaagccttgactagcaagtcagctgctgatkctgagggctacctggctcaccctgtgaatgcctacaaactggtgaagcggctaaacacagactggcctgcgctggaggaccttgtcctgcaggactcagctgcaggttttatygccaacctctctgtgcagcggcagttcttccccactgatgaggacgagataggagctgccaaagccctgatgagacttcaggacacatacaggctggacccaggcacaatttccagaggggaacttccaggaaccaagtaccaggcaatgctgagtgtggatgactgctttgggatgggccgctcggcctacaatgaaggggactattatcatacggtgttgtggatggagcaggtgctaaagcagcttgatgccggggaggaggccaccacaaccaagtcacaggtgctggactacctcagctatgctgtcttccagttgggtgatctgcaccgtgccctggagctcacccgccgcctgctctcccttgacccaagccacgaacgagctggagggaatctgcggtactttgagcagttattggaggaagagagagaaaaaacgttaacaaatcagacagaagctgagctagcaaccccagaaggcatctatgagaggcctgtggactacctgcctgagagggatgtttacgagagcctctgtcgtggggagggtgtcaaactgacaccccgtagacagaagaggcttttctgtaggtaccaccatggcaacagggccccacagctgctcattgcccccttcaaagaggaggacgagtgggacagcccgcacatcgtcaggtactacgatgtcatgtctgatgaggaaatcgagaggatcaaggagatcgcaaaacctaaacttgcacgagccaccgttcgtgatcccaagacaggagtcctcactgtcgccagctaccgggtttccaaaagctcctggctagaggaagatgatgaccctgttgtggcccgagtaaatcgtcggatgcagcatatcacagggttaacagtaaagactgcagaattgttacaggttgcaaattatggagtgggaggacagtatgaaccgcacttcgacttctctaggcgaccttttgacagcggcctcaaaacagaggggaataggttagcgacgtttcttaactacatgagtgatgtagaagctggtggtgccaccgtcttccctgatctgggggctgcaatttggcctaagaagggtacagctgtgttctggtacaacctcttgcggagcggggaaggtgactaccgaacaagacatgctgcctgccctgtgcttgtgggctgcaagtgggtctccaataagtggttccatgaacgaggacaggagttcttgagaccttgtggatcaacagaagttgactgacatccttttctgtccttccccttcctggtccttcagcccatgtcaacgtgacagacacctttgtatgttcctttgtatgttcctatcaggctgatttttggagaaatgaawgtttgtctggagcagagggagaccatactagggcgactcctgtgtgactgaagtcccagcccttccattcagcctgtgccatccctggccccaaggctaggatcaaagtggctgcagcagagttagctgtctagcgcctagcaaggtgcctttgtacctcaggtgttttaggtgtgagatgtttcagtgaaccaaagttctgataccttgtttacatgtttgtttttatggcatttctatctattgtggctttaccaaaaaataaaatgtccctaccagaagccttaaagagccttacttggagtatttttaagactggaagcttttaccaggttcatcatttcctatgcatcacmttcatgcaggcagagtctggataatgaatgctttagcagcaaaaaagcatcttgggtcttggatttcagacctggtttcaacmcttgtgttccctctaagtgtcagtgtccttttctggaaagtagggtaaatagtttctctttgtctcccagagaacatagcacatgtgttcatgattgtaatgctgttataatgtgtacttcatttttaaattttgagataagaattgttcatgatacacagatgtatacttaaaaaaatatgaaggtgagcaggagcacctgtgtcaacaccaagttagaaaagagaacgttttcaagtcagtacctcaggagccccttgggaacccctcctagatcacatctccttcactgcccccagcactttggagataaatcattgtctcatgatgtgtggtactcattcctttgcttgtctttatagttttaccatctatgattagatccctaaataagtagttattctgttttccctgattttgaacttttactaatagaatragagtaaatatttttgggtatgtggcttcttttgttcaacattgttttaagattcatccgtgttg

SEQ ID NO: 4887 - DNA, 2774 bp, Homo sapiens
gttgtgaaaatcggaaatgaaaagacagttggtgacaaactcctttctccatcacctccttattggacagaaacgacccaggaatgcgcctcgcacacttccctctgtgaccatgaaactctgggtgtctgcattgctgatggcctggtttggtgtcctgagctgtgtgcaggccgaattcttcacctctattgggcacatgactgacctgatttatgcagagaaagagctggtgcagtctctgaaagagtacatccttgtggaggaagccaagctttccaagattaagagctgggccaacaaaatggaagccttgactagcaagtcagctgctgatkctgagggctacctggctcaccctgtgaatgcctacaaactggtgaagcggctaaacacagactggcctgcgctggaggaccttgtcctgcaggactcagctgcaggttttatygccaacctctctgtgcagcggcagttcttccccactgatgaggacgagataggagctgccaaagccctgatgagacttcaggacacatacaggctggacccaggcacaatttccagaggggaacttccaggaaccaagtaccaggcaatgctgagtgtggatgactgctttgggatgggccgctcggcctacaatgaaggggactattatcatacggtgttgtggatggagcaggtgctaaagcagcttgatgccggggaggaggccaccacaaccaagtcacaggtgctggactacctcagctatgctgtcttccagttgggtgatctgcaccgtgccctggagctcacccgccgcctgctctcccttgacccaagccacgaacgagctggagggaatctgcggtactttgagcagttattggaggaagagagagaaaaaacgttaacaaatcagacagaagctgagctagcaaccccagaaggcatctatgagaggcctgtggactacctgcctgagagggatgtttacgagagcctctgtcgtggggagggtgtcaaactgacaccccgtagacagaagaggcttttctgtaggtaccaccatggcaacagggccccacagctgctcattgcccccttcaaagaggaggacgagtgggacagcccgcacatcgtcaggtactacgatgtcatgtctgatgaggaaatcgagaggatcaaggagatcgcaaaacctaaacttgcacgagccaccgttcgtgatcccaagacaggagtcctcactgtcgccagctaccgggtttccaaaagctcctggctagaggaagatgatgaccctgttgtggcccgagtaaatcgtcggatgcagcatatcacagggttaacagtaaagactgcagaattgttacaggttgcaaattatggagtgggaggacagtatgaaccgcacttcgacttctctaggaatgatgagcgagatactttcaagcatttagggacggggaatcgtgtggctactttcttaaactacatgagtgatgtagaagctggtggtgccaccgtcttccctgatctgggggctgcaatttggcctaagaagggtacagctgtgttctggtacaacctcttgcggagcggggaaggtgactaccgaacaagacatgctgcctgccctgtgcttgtgggctgcaagtgggtctccaataagtggttccatgaacgaggacaggagttcttgagaccttgtggatcaacagaagttgactgacatccttttctgtccttccccttcctggtccttcagcccatgtcaacgtgacagacacctttgtatgttcctttgtatgttcctatcaggctgatttttggagaaatgaawgtttgtctggagcagagggagaccatactagggcgactcctgtgtgactgaagtcccagcccttccattcagcctgtgccatccctggccccaaggctaggatcaaagtggctgcagcagagttagctgtctagcgcctagcaaggtgcctttgtacctcaggtgttttaggtgtgagatgtttcagtgaaccaaagttctgataccttgtttacatgtttgtttttatggcatttctatctattgtggctttaccaaaaaataaaatgtccctaccagaagccttaaagagccttacttggagtatttttaagactggaagcttttaccaggttcatcatttcctatgcatcacmttcatgcaggcagagtctggataatgaatgctttagcagcaaaaaagcatcttgggtcttggatttcagacctggtttcaacmcttgtgttccctctaagtgtcagtgtccttttctggaaagtagggtaaatagtttctctttgtctcccagagaacatagcacatgtgttcatgattgtaatgctgttataatgtgtacttcatttttaaattttgagataagaattgttcatgatacacagatgtatacttaaaaaaatatgaaggtgagcaggagcacctgtgtcaacaccaagttagaaaagagaacgttttcaagtcagtacctcaggagccccttgggaacccctcctagatcacatctccttcactgcccccagcactttggagataaatcattgtctcatgatgtgtggtactcattcctttgcttgtctttatagttttaccatctatgattagatccctaaataagtagttattctgttttccctgattttgaacttttactaatagaatragagtaaatatttttgggtatgtggcttcttttgttcaacattgttttaagattcatccgtgttg

SEQ ID NO: 4888 - DNA, 3242 bp, Homo sapiens
acatccttgtggaaccagcgttgtttttccttggcagctgcggagacccgtgataattcgttaactaattcaacaaacgggacccttctgtgtgccagaaaccgcaagcagttgctaacccagtgggacaggcggattggaagagcgggaaggtcctggcccagagcagtgtggtgagcgctgtgctggaagggaatgcgggcagtgggtacttggtagagcactgactgcctccggccagaggacttcccggaggaggtgacccatgagctggagtggtcagaggaaggctggcaaaagggcatcgtggacagaggaacagcctatgtgagtgggagcagagaccttggccaatgccattccttatggccttgtagtggaagcaaggtgatggggaaggaacactgtaggggatagctgtccacggacgctgtctacaagaccctggagtgagataacgtgcctggtactgtgccctgcatgtgtaagatgcccagttgaccttcgcagcaggagcctggatcagggcacttcctgcctcaggtattgctggacagcccagacacttccctctgtgaccatgaaactctgggtgtctgcattgctgatggcctggtttggtgtcctgagctgtgtgcaggccgaattcttcacctctattgggcacatgactgacctgatttatgcagagaaagagctggtgcagtctctgaaagagtacatccttgtggaggaagccaagctttccaagattaagagctgggccaacaaaatggaagccttgactagcaagtcagctgctgatkctgagggctacctggctcaccctgtgaatgcctacaaactggtgaagcggctaaacacagactggcctgcgctggaggaccttgtcctgcaggactcagctgcaggttttatygccaacctctctgtgcagcggcagttcttccccactgatgaggacgagataggagctgccaaagccctgatgagacttcaggacacatacaggctggacccaggcacaatttccagaggggaacttccaggaaccaagtaccaggcaatgctgagtgtggatgactgctttgggatgggccgctcggcctacaatgaaggggactattatcatacggtgttgtggatggagcaggtgctaaagcagcttgatgccggggaggaggccaccacaaccaagtcacaggtgctggactacctcagctatgctgtcttccagttgggtgatctgcaccgtgccctggagctcacccgccgcctgctctcccttgacccaagccacgaacgagctggagggaatctgcggtactttgagcagttattggaggaagagagagaaaaaacgttaacaaatcagacagaagctgagctagcaaccccagaaggcatctatgagaggcctgtggactacctgcctgagagggatgtttacgagagcctctgtcgtggggagggtgtcaaactgacaccccgtagacagaagaggcttttctgtaggtaccaccatggcaacagggccccacagctgctcattgcccccttcaaagaggaggacgagtgggacagcccgcacatcgtcaggtactacgatgtcatgtctgatgaggaaatcgagaggatcaaggagatcgcaaaacctaaacttgcacgagccaccgttcgtgatcccaagacaggagtcctcactgtcgccagctaccgggtttccaaaagctcctggctagaggaagatgatgaccctgttgtggcccgagtaaatcgtcggatgcagcatatcacagggttaacagtaaagactgcagaattgttacaggttgcaaattatggagtgggaggacagtatgaaccgcacttcgacttctctaggaatgatgagcgagatactttcaagcatttagggacggggaatcgtgtggctactttcttaaactacatgagtgatgtagaagctggtggtgccaccgtcttccctgatctgggggctgcaatttggcctaagaagggtacagctgtgttctggtacaacctcttgcggagcggggaaggtgactaccgaacaagacatgctgcctgccctgtgcttgtgggctgcaagtgggtctccaataagtggttccatgaacgaggacaggagttcttgagaccttgtggatcaacagaagttgactgacatccttttctgtccttccccttcctggtccttcagcccatgtcaacgtgacagacacctttgtatgttcctttgtatgttcctatcaggctgatttttggagaaatgaawgtttgtctggagcagagggagaccatactagggcgactcctgtgtgactgaagtcccagcccttccattcagcctgtgccatccctggccccaaggctaggatcaaagtggctgcagcagagttagctgtctagcgcctagcaaggtgcctttgtacctcaggtgttttaggtgtgagatgtttcagtgaaccaaagttctgataccttgtttacatgtttgtttttatggcatttctatctattgtggctttaccaaaaaataaaatgtccctaccagaagccttaaagagccttacttggagtatttttaagactggaagcttttaccaggttcatcatttcctatgcatcacmttcatgcaggcagagtctggataatgaatgctttagcagcaaaaaagcatcttgggtcttggatttcagacctggtttcaacmcttgtgttccctctaagtgtcagtgtccttttctggaaagtagggtaaatagtttctctttgtctcccagagaacatagcacatgtgttcatgattgtaatgctgttataatgtgtacttcatttttaaattttgagataagaattgttcatgatacacagatgtatacttaaaaaaatatgaaggtgagcaggagcacctgtgtcaacaccaagttagaaaagagaacgttttcaagtcagtacctcaggagccccttgggaacccctcctagatcacatctccttcactgcccccagcactttggagataaatcattgtctcatgatgtgtggtactcattcctttgcttgtctttatagttttaccatctatgattagatccctaaataagtagttattctgttttccctgattttgaacttttactaatagaatragagtaaatatttttgggtatgtggcttcttttgttcaacattgttttaagattcatccgtgttg

SEQ ID NO: 4889 - DNA, 3141 bp, Homo sapiens
gcgccgagctgaccgggcgacgccgcgggaggttctggaaacgccgggagctgcgagtgtccagacacttccctctgtgaccatgaaactctgggtgtctgcattgctgatggcctggtttggtgtcctgagctgtgtgcaggccgaattcttcacctctattgggcacatgactgacctgatttatgcagagaaagagctggtgcagtctctgaaagagtacatccttgtggaggaagccaagctttccaagattaagaggtgtcctaagtccccaaccatccttagttggccttccttcccttctgcccctcaaggaacaaggaagccatccagggtgcctataagaggaaacctttgagaggktgatgtggggctggcctggttacttcatgccagtgcttgagaggagctaagtacatgggctaaggagtcactgtttattttctatttaagacctwttcccttacattgggggtcccagctgttatctagattaagggrctagaagtatctgtggggagttactgtattcatttttcattgcctcttgatgaaaagggccccagaacctggcaccagggaattctcactaggaaaattgtcacaggtcaagacctatgtgggtggacgcattagtcttccttttcctctggttccacagctgggccaacaaaatggaagccttgactagcaagtcagctgctgatkctgagggctacctggctcaccctgtgaatgcctacaaactggtgaagcggctaaacacagactggcctgcgctggaggaccttgtcctgcaggactcagctgcaggttttatygccaacctctctgtgcagcggcagttcttccccactgatgaggacgagataggagctgccaaagccctgatgagacttcaggacacatacaggctggacccaggcacaatttccagaggggaacttccaggaaccaagtaccaggcaatgctgagtgtggatgactgctttgggatgggccgctcggcctacaatgaaggggactattatcatacggtgttgtggatggagcaggtgctaaagcagcttgatgccggggaggaggccaccacaaccaagtcacaggtgctggactacctcagctatgctgtcttccagttgggtgatctgcaccgtgccctggagctcacccgccgcctgctctcccttgacccaagccacgaacgagctggagggaatctgcggtactttgagcagttattggaggaagagagagaaaaaacgttaacaaatcagacagaagctgagctagcaaccccagaaggcatctatgagaggcctgtggactacctgcctgagagggatgtttacgagagcctctgtcgtggggagggtgtcaaactgacaccccgtagacagaagaggcttttctgtaggtaccaccatggcaacagggccccacagctgctcattgcccccttcaaagaggaggacgagtgggacagcccgcacatcgtcaggtactacgatgtcatgtctgatgaggaaatcgagaggatcaaggagatcgcaaaacctaaacttgcacgagccaccgttcgtgatcccaagacaggagtcctcactgtcgccagctaccgggtttccaaaagctcctggctagaggaagatgatgaccctgttgtggcccgagtaaatcgtcggatgcagcatatcacagggttaacagtaaagactgcagaattgttacaggttgcaaattatggagtgggaggacagtatgaaccgcacttcgacttctctaggcgaccttttgacagcggcctcaaaacagaggggaataggttagcgacgtttcttaactacatgagtgatgtagaagctggtggtgccaccgtcttccctgatctgggggctgcaatttggcctaagaagggtacagctgtgttctggtacaacctcttgcggagcggggaaggtgactaccgaacaagacatgctgcctgccctgtgcttgtgggctgcaagtgggtctccaataagtggttccatgaacgaggacaggagttcttgagaccttgtggatcaacagaagttgactgacatccttttctgtccttccccttcctggtccttcagcccatgtcaacgtgacagacacctttgtatgttcctttgtatgttcctatcaggctgatttttggagaaatgaawgtttgtctggagcagagggagaccatactagggcgactcctgtgtgactgaagtcccagcccttccattcagcctgtgccatccctggccccaaggctaggatcaaagtggctgcagcagagttagctgtctagcgcctagcaaggtgcctttgtacctcaggtgttttaggtgtgagatgtttcagtgaaccaaagttctgataccttgtttacatgtttgtttttatggcatttctatctattgtggctttaccaaaaaataaaatgtccctaccagaagccttaaagagccttacttggagtatttttaagactggaagcttttaccaggttcatcatttcctatgcatcacmttcatgcaggcagagtctggataatgaatgctttagcagcaaaaaagcatcttgggtcttggatttcagacctggtttcaacmcttgtgttccctctaagtgtcagtgtccttttctggaaagtagggtaaatagtttctctttgtctcccagagaacatagcacatgtgttcatgattgtaatgctgttataatgtgtacttcatttttaaattttgagataagaattgttcatgatacacagatgtatacttaaaaaaatatgaaggtgagcaggagcacctgtgtcaacaccaagttagaaaagagaacgttttcaagtcagtacctcaggagccccttgggaacccctcctagatcacatctccttcactgcccccagcactttggagataaatcattgtctcatgatgtgtggtactcattcctttgcttgtctttatagttttaccatctatgattagatccctaaataagtagttattctgttttccctgattttgaacttttactaatagaatragagtaaatatttttgggtatgtggcttcttttgttcaacattgttttaagattcatccgtgttg

SEQ ID NO: 4890 - DNA, 2869 bp, Homo sapiens
gagctgaccgggcgacgccgcgggaggttctggaaacgccgggagctgcgagtgtccagctgcggagacccgtgataattcgttaactaattcaacaaacgggacccttctgtgtgccagaaaccgcaagcagttgctaacccagtgggacaggcggattggaagagcgggaaggtcctggcccagagcagtgtgacacttccctctgtgaccatgaaactctgggtgtctgcattgctgatggcctggtttggtgtcctgagctgtgtgcaggccgaattcttcacctctattgggcacatgactgacctgatttatgcagagaaagagctggtgcagtctctgaaagagtacatccttgtggaggaagccaagctttccaagattaagagctgggccaacaaaatggaagccttgactagcaagtcagctgctgatkctgagggctacctggctcaccctgtgaatgcctacaaactggtgaagcggctaaacacagactggcctgcgctggaggaccttgtcctgcaggactcagctgcaggttttatygccaacctctctgtgcagcggcagttcttccccactgatgaggacgagataggagctgccaaagccctgatgagacttcaggacacatacaggctggacccaggcacaatttccagaggggaacttccaggaaccaagtaccaggcaatgctgagtgtggatgactgctttgggatgggccgctcggcctacaatgaaggggactattatcatacggtgttgtggatggagcaggtgctaaagcagcttgatgccggggaggaggccaccacaaccaagtcacaggtgctggactacctcagctatgctgtcttccagttgggtgatctgcaccgtgccctggagctcacccgccgcctgctctcccttgacccaagccacgaacgagctggagggaatctgcggtactttgagcagttattggaggaagagagagaaaaaacgttaacaaatcagacagaagctgagctagcaaccccagaaggcatctatgagaggcctgtggactacctgcctgagagggatgtttacgagagcctctgtcgtggggagggtgtcaaactgacaccccgtagacagaagaggcttttctgtaggtaccaccatggcaacagggccccacagctgctcattgcccccttcaaagaggaggacgagtgggacagcccgcacatcgtcaggtactacgatgtcatgtctgatgaggaaatcgagaggatcaaggagatcgcaaaacctaaacttgcacgagccaccgttcgtgatcccaagacaggagtcctcactgtcgccagctaccgggtttccaaaagctcctggctagaggaagatgatgaccctgttgtggcccgagtaaatcgtcggatgcagcatatcacagggttaacagtaaagactgcagaattgttacaggttgcaaattatggagtgggaggacagtatgaaccgcacttcgacttctctaggcgaccttttgacagcggcctcaaaacagaggggaataggttagcgacgtttcttaactacatgagtgatgtagaagctggtggtgccaccgtcttccctgatctgggggctgcaatttggcctaagaagggtacagctgtgttctggtacaacctcttgcggagcggggaaggtgactaccgaacaagacatgctgcctgccctgtgcttgtgggctgcaagtgggtctccaataagtggttccatgaacgaggacaggagttcttgagaccttgtggatcaacagaagttgactgacatccttttctgtccttccccttcctggtccttcagcccatgtcaacgtgacagacacctttgtatgttcctttgtatgttcctatcaggctgatttttggagaaatgaawgtttgtctggagcagagggagaccatactagggcgactcctgtgtgactgaagtcccagcccttccattcagcctgtgccatccctggccccaaggctaggatcaaagtggctgcagcagagttagctgtctagcgcctagcaaggtgcctttgtacctcaggtgttttaggtgtgagatgtttcagtgaaccaaagttctgataccttgtttacatgtttgtttttatggcatttctatctattgtggctttaccaaaaaataaaatgtccctaccagaagccttaaagagccttacttggagtatttttaagactggaagcttttaccaggttcatcatttcctatgcatcacmttcatgcaggcagagtctggataatgaatgctttagcagcaaaaaagcatcttgggtcttggatttcagacctggtttcaacmcttgtgttccctctaagtgtcagtgtccttttctggaaagtagggtaaatagtttctctttgtctcccagagaacatagcacatgtgttcatgattgtaatgctgttataatgtgtacttcatttttaaattttgagataagaattgttcatgatacacagatgtatacttaaaaaaatatgaaggtgagcaggagcacctgtgtcaacaccaagttagaaaagagaacgttttcaagtcagtacctcaggagccccttgggaacccctcctagatcacatctccttcactgcccccagcactttggagataaatcattgtctcatgatgtgtggtactcattcctttgcttgtctttatagttttaccatctatgattagatccctaaataagtagttattctgttttccctgattttgaacttttactaatagaatragagtaaatatttttgggtatgtggcttcttttgttcaacattgttttaagattcatccgtgttg

SEQ ID NO: 4891 - DNA, 2768 bp, Homo sapiens
gttgtgaaaatcggaaatgaaaagacagttggtgacaaactcctttctccatcacctccttattggacagaaacgacccaggaatgcgcctcgcacacttccctctgtgaccatgaaactctgggtgtctgcattgctgatggcctggtttggtgtcctgagctgtgtgcaggccgaattcttcacctctattgggcacatgactgacctgatttatgcagagaaagagctggtgcagtctctgaaagagtacatccttgtggaggaagccaagctttccaagattaagagctgggccaacaaaatggaagccttgactagcaagtcagctgctgatkctgagggctacctggctcaccctgtgaatgcctacaaactggtgaagcggctaaacacagactggcctgcgctggaggaccttgtcctgcaggactcagctgcaggttttatygccaacctctctgtgcagcggcagttcttccccactgatgaggacgagataggagctgccaaagccctgatgagacttcaggacacatacaggctggacccaggcacaatttccagaggggaacttccaggaaccaagtaccaggcaatgctgagtgtggatgactgctttgggatgggccgctcggcctacaatgaaggggactattatcatacggtgttgtggatggagcaggtgctaaagcagcttgatgccggggaggaggccaccacaaccaagtcacaggtgctggactacctcagctatgctgtcttccagttgggtgatctgcaccgtgccctggagctcacccgccgcctgctctcccttgacccaagccacgaacgagctggagggaatctgcggtactttgagcagttattggaggaagagagagaaaaaacgttaacaaatcagacagaagctgagctagcaaccccagaaggcatctatgagaggcctgtggactacctgcctgagagggatgtttacgagagcctctgtcgtggggagggtgtcaaactgacaccccgtagacagaagaggcttttctgtaggtaccaccatggcaacagggccccacagctgctcattgcccccttcaaagaggaggacgagtgggacagcccgcacatcgtcaggtactacgatgtcatgtctgatgaggaaatcgagaggatcaaggagatcgcaaaacctaaacttgcacgagccaccgttcgtgatcccaagacaggagtcctcactgtcgccagctaccgggtttccaaaagctcctggctagaggaagatgatgaccctgttgtggcccgagtaaatcgtcggatgcagcatatcacagggttaacagtaaagactgcagaattgttacaggttgcaaattatggagtgggaggacagtatgaaccgcacttcgacttctctaggcgaccttttgacagcggcctcaaaacagaggggaataggttagcgacgtttcttaactacatgagtgatgtagaagctggtggtgccaccgtcttccctgatctgggggctgcaatttggcctaagaagggtacagctgtgttctggtacaacctcttgcggagcggggaaggtgactaccgaacaagacatgctgcctgccctgtgcttgtgggctgcaagtgggtctccaataagtggttccatgaacgaggacaggagttcttgagaccttgtggatcaacagaagttgactgacatccttttctgtccttccccttcctggtccttcagcccatgtcaacgtgacagacacctttgtatgttcctttgtatgttcctatcaggctgatttttggagaaatgaawgtttgtctggagcagagggagaccatactagggcgactcctgtgtgactgaagtcccagcccttccattcagcctgtgccatccctggccccaaggctaggatcaaagtggctgcagcagagttagctgtctagcgcctagcaaggtgcctttgtacctcaggtgttttaggtgtgagatgtttcagtgaaccaaagttctgataccttgtttacatgtttgtttttatggcatttctatctattgtggctttaccaaaaaataaaatgtccctaccagaagccttaaagagccttacttggagtatttttaagactggaagcttttaccaggttcatcatttcctatgcatcacmttcatgcaggcagagtctggataatgaatgctttagcagcaaaaaagcatcttgggtcttggatttcagacctggtttcaacmcttgtgttccctctaagtgtcagtgtccttttctggaaagtagggtaaatagtttctctttgtctcccagagaacatagcacatgtgttcatgattgtaatgctgttataatgtgtacttcatttttaaattttgagataagaattgttcatgatacacagatgtatacttaaaaaaatatgaaggtgagcaggagcacctgtgtcaacaccaagttagaaaagagaacgttttcaagtcagtacctcaggagccccttgggaacccctcctagatcacatctccttcactgcccccagcactttggagataaatcattgtctcatgatgtgtggtactcattcctttgcttgtctttatagttttaccatctatgattagatccctaaataagtagttattctgttttccctgattttgaacttttactaatagaatragagtaaatatttttgggtatgtggcttcttttgttcaacattgttttaagattcatccgtgttg

SEQ ID NO: 4892 - DNA, 6487 bp, Homo sapiens
ttgggaagcgccatccgtcacaggtcttggtctccccttccaaaagtcagtgcctctccaggctgcccatccccagcaaagatccggaagtccgctgcccctggcaacagcacccagcacctagccctctgcttcgccgtaccgcacccggaagtcggagctgcgcacgcaccgcgggactctgatttcccggcgtgccccaggagagcggcgtggacgcgtgcgggcctagaggcccacgtgatccgcagggcggccgaggcaggaagctgtgagtgcgcggttgcggggtcgcattgtggctacggctttgcgtccccggcgggcagccccaggctggtccccgcctccgctctccccaccggcggggaaagcagctggtgtgggaggaaaggctccatcccccgccccctctctcccgctgttggctggcaggatcttttggcagtcctgtggcctcgctccccgcccggatcctcctgaccctgagattcgcgggtctcacgtcccgtgcacgccttgcttcggcctcagttaagcctttgtggrctccaggtccctggtgagattagaaacgtttgcaaacatgtcccggatcgaaaagatgagcattctgggcgtgcggagttttggaatagaggacaaagataagcaaattatcactttcttcagcccccttacaattttggttggacccaatggggcgggaaagacgaccatcattgaatgtctaaaatatatttgtactggagatttccctcctggaaccaaaggaaatacatttgtacacgatcccaaggttgctcaagaaacagatgtgagagcccagattcgtctgcaatttcgtgatgtcaatggagaacttatagctgtgcaaagatctatggtgtgtactcagaaaagcaaaaagacagaatttaaaactctggaaggagtcattactagaacaaagcatggtgaaaaggtcagtctgagctctaagtgtgcagaaattgaccgagaaatgatcagttctcttggggtttccaaggctgtgctaaataatgtcattttctgtcatcaagaagattctaattggcctttaagtgaaggaaaggctttgaagcaaaagtttgatgagattttttcagcaacaagatacattaaagccttagaaacacttcggcaggtacgtcagacacaaggtcagaaagtaaaagaatatcaaatggaactaaaatatctgaagcaatataaggaaaaagcttgtgagattcgtgatcagattacaagtaaggaagcccagttaacatcttcaaaggaaattgtcaaatcctatgagaatgaacttgatccattgaagaatcgtctaaaagaaattgaacataatctctctaaaataatgaaacttgacaatgaaattaaagccttggatagccgaaagaagcaaatggagaaagataatagtgaactggaagagaaaatggaaaaggtttttcaagggactgatgagcaactaaatgacttatatcacaatcaccagagaacagtaagggagaaagaaaggaaattggtagactgtcatcgtgaactggaaaaactaaataaagaatctaggcttctcaatcaggaaaaatcagaactgcttgttgaacagggtcgtctacagctgcaagcagatcgccatcaagaacatatccgagctagagattcattaattcagtctttggcaacacagctagaattggatggctttgagcgtggaccattcagtgaaagacagattaaaaattttcacaaacttgtgagagagagacaagaaggggaagcaaaaactgccaaccaactgatgaatgactttgcagaaaaagagactctgaaacaaaaacagatagatgagataagagataagaaaactggactgggaagaataattgagttaaaatcagaaatcctaagtaagaagcagaatgagctgaaaaatgtgaagtatgaattacagcagttggaaggatcttcagacaggattcttgaactggaccaggagctcataaaagctgaacgtgagttaagcaaggctgagaaaaacagcaatgtagaaaccttaaaaatggaagtaataagtctccaaaatgaaaaagcagacttagacaggaccctgcgtaaacttgaccaggagatggagcagttaaaccatcatacaacaacacgtacccaaatggagatgctgaccaaagacaaagctgacaaagatgaacaaatcagaaaaataaaatctaggcacagtgatgaattaacctcactgttgggatattttcccaacaaaaaacagcttgaagactggctacatagtaaatcaaaagaaattaatcagaccagggacagacttgccaaattgaacaaggaactagcttcatctgagcagaataaaaatcatataaataatgaactaraaagaaaggaagagcagttgtccagttacgaagacaagctgtttgatgtttgtggtagccaggattttgaaagtgatttagacaggcttaaagaggaaattgaaaaatcatcaaaacagcgagccatgctggctggagccacagcagtttactcccagttcattactcagctaacagaygaaaaccagtcatgttgccccgtttgtcagagagtttttcagacagaggctgagttacaagaagyyatcagtgatttgcagtctaaactgcgacttgctccagataaactcaagtcaacagaatcagagctaaaaaaaaaggaaaagcggcgtgatgaaatgctgggacttgtgcccatgaggcaaagcataattgatttgaaggagaaggaaataccagaattaagaaacaaactgcagaatgtcaatagagacatacagcgcctaaagaacgacatagaagaacaagaaacactcttgggtacaataatgcctgaagaagaaagtgccaaagtatgcctgacagatgttacaattatggagaggttccagatggaacttaaagatgttgaaagaaaaattgcacaacaagcagctaagctacaaggaatagacttagatcgaactgtccaacaagtcaaccaggagaaacaagagaaacagcacaagttagacacagtttctagtaagattgaattgaatcgtaagcttatacaggaccagcaggaacagattcaacatctaaaaagtacaacaaatgagctaaaatctgagaaacttcagatatccactaatttgcaacgtcgtcagcaactggaggagcagactgtggaattatccactgaagttcagtctttgtacagagagataaaggatgctaaagagcaggtaagccctttggaaacaacattggaaaagttccagcaagaaaaagaagaattaatcaacaaaaaaaatacaagcaacaaaatagcacaggataaactgaatgatattaaagagaaggttaaaaatattcatggctatatgaaagacattgagaattatattcaagatgggaaagacgactataagaagcaaaaagaaactgaacttaataaagtaatagctcaactaagtgaatgcgagaaacacaaagaaaagataaatgaagatatgagactcatgagacaagatattgatacacagaagatacaagaaaggtggctacaagataaccttactttaagaaaaagaaatgaggaactaaaagaagttgaagaagaargaaaacaacatttgaaggaaatgggtcaaatgcaggttttrcaaatgaaaagtgaacatcagaagttggaagagaacatagacaatataaaaagaaatcataatttggcattagggcgacagaaaggttatgaagaagaaattattcattttaagaaagaacttcgagaaccacaatttcgggatgctgaggaaaagtatagagaaatgatgattgttatgaggacaacagaacttgtgaacaaggatctggatatttattataagactcttgaccaagcaataatgaaatttcacagtatgaaaatggaagaaatcaataaaattatacgtgacctgtggcgaagtacctatcgtggacaagatattgaatacatagaaatacggtctgatgccgatgaaaatgtatcagcttctgataaaaggcggaattataactaccgagtggtgatgctgaagggagacacagccttggatatgcgaggacgatgcagtgctggacaaaaggtattagcctcactcatcattcgcctggccctggctgaaacgttctgcctcaactgtggcatcattgccttggatgagccaacaacaaatcttgaccgagaaaacattgaatctcttgcacatgctctggttgagataataaaaagtcgctcacagcagcgtaacttccagcttctggtaatcactcatgatgaagattttgtggagcttttaggacgttctgaataygtggagaaattctacaggattaaaaagaacatcgatcagtgctcagagattgtgaaatgcagtgttagctccctgggattcaatgttcattaaaaatatccaagatttaaatgccatagaaatgtaggtcctcagaaagtgtataataagaaacttatttctcatatcaacttagtcaataagaaaatatattctttcaaagkaacattgtgtctaggattttggatgttgagaggttctaaaatcatgaaacttgtttcactgaaaattggacagattgcctgtttctgatttgctgctcttcatcccattccaggcagcctctgtcaggccttcagggttcagcagtacagccgagactcgactctgtgcctccctccccagtgcaaatgcatgcttcttctcaaagcactgttgagaaggagataattactgccttgaaaatttatggttttggtatttttttaaatcatagttaaatgttacctctgaatttacttccttgcatgtggtttgaaaaactgagtattaatatctgaggatgaccagaaatggtgagatgtatgtttggctctgcttttaactttataaatccagtgacctctctctctgggacttggtttccccaactaaaatttgaagtagttgaatggggtctcaaagtttgacaggaaccttaagtaatcatctaagtcagtacccaccaccttcttctcctacatatcccttccagatggtcatccagactcagagctctctctacagagaggaaattctccactgtgcacacccacctttggaaagctctgaccacttgaggcctgatctgcccatcgtgaagaagcctgtaacactcctctgcgtctatcctgtgtagcatactggcttcaccatcaatcctgattcctctctaagtgggcattgccatgtggaaggcaagccaggctcactcacagagtcaaggcctgctccctgtagggtccaaccagacctggaagaacaggcctctccatttgctcttcagatgccacttctaagaaaagcctaatcacagtttttcctggaattgccagctgacatcttgaatccttccattccacacagaatgcaaccaagtcacacgcttttgaattatgctttgtagagttttgtcattcagagtcagccaggaccataccgggtcttgattcagtcacatggcatggttttgtgccatctgtagctataatgagcatgtttgcctagacagcttttctcaactgggtccagaagagaattaagccctaaggtcctaaggcatctatctgtgctaggttaaatggttggcccccaaagatagacaggtcctgatttctagaacccgtgactgttactttatacagcaaaggaaactttgcagatgtgattaaagctaaggaccttaagacagagtatcctgggggtggtggtggggtgggggggggtcctaaatgtaatcacgagtaagattaagagcaaatcaattctagtcatatattaaacatccacaataaccaagatatttttatcccaagaatgcaagatttcagaaaatgaaaaatctgttgataaatccatcactataataaaaccgaaggtgaaaaaaattctgaaaaaattctagcagctatatttgataaaattcaacatctcctagctttagcaaactcacagttttgcaaataatattttcttaatgttatctgttgctaaatcaaaattaaacagtcatcttaactgcaaaataaaacatttctcagtaaatattaaagccagttaccttctatcaacatgttaatgaaagtgctagttgttgcagcaaagaataacaaaggcaatacacgatcaatataggcagtgaaacaaaagtatcatttgcaagttaaaacagacttcccaattttaaatctggtttccccctgaatatgtggcatccttggcagcacttctgagagtggctgctttcattccaagaagcccatgggtttggaggtgggataggtgcctttctggcttctcattgctgcttctagatca

SEQ ID NO: 4893 - DNA, 6623 bp, Homo sapiens
ccaggagagcggcgtggacgcgtgcgggcctagaggcccacgtgatccgcagggcggccgaggcaggaagctgtgagtgcgcggttgcggggtcgcattgtggctacggctttgcgtccccggcgggcagccccaggctggtccccgcctccgctctccccaccggcggggaaagcagctggtgtgggaggaaaggctccatcccccgccccctctctcccgctgttggctggcaggatcttttggcagtcctgtggcctcgctccccgcccggatcctcctgaccctgagattcgcgggtctcacgtcccgtgcacgccttgcttcggcctcagttaagcctttgtggrctccaggtccctggtgagattagaaacgtttgcaaacatgtcccggatcgaaaagatgagcattctgggcgtgcggagttttggaatagaggacaaagataagcaaattatcactttcttcagcccccttacaattttggttggacccaatggggcgggaaagacgaccatcattgaatgtctaaaatatatttgtactggagatttccctcctggaaccaaaggaaatacatttgtacacgatcccaaggttgctcaagaaacagatgtgagagcccagattcgtctgcaatttcgtgatgtcaatggagaacttatagctgtgcaaagatctatggtgtgtactcagaaaagcaaaaagacagaatttaaaactctggaaggagtcattactagaacaaagcatggtgaaaaggtcagtctgagctctaagtgtgcagaaattgaccgagaaatgatcagttctcttggggtttccaaggctgtgctaaataatgtcattttctgtcatcaagaagattctaattggcctttaagtgaaggaaaggctttgaagcaaaagtttgatgagattttttcagcaacaagatacattaaagccttagaaacacttcggcaggtacgtcagacacaaggtcagaaagtaaaagaatatcaaatggaactaaaatatctgaagcaatataaggaaaaagcttgtgagattcgtgatcagattacaagtaaggaagcccagttaacatcttcaaaggaaattgtcaaatcctatgagaatgaacttgatccattgaagaatcgtctaaaagaaattgaacataatctctctaaaataatgaaacttgacaatgaaattaaagccttggatagccgaaagaagcaaatggagaaagataatagtgaactggaagagaaaatggaaaaggtttttcaagggactgatgagcaactaaatgacttatatcacaatcaccagagaacagtaagggagaaagaaaggaaattggtagactgtcatcgtgaactggaaaaactaaataaagaatctaggcttctcaatcaggaaaaatcagaactgcttgttgaacagggtcgtctacagctgcaagcagatcgccatcaagaacatatccgagctagagattcattaattcagtctttggcaacacagctagaattggatggctttgagcgtggaccattcagtgaaagacagattaaaaattttcacaaacttgtgagagagagacaagaaggggaagcaaaaactgccaaccaactgatggcaaaaaaagagactctgaaacaaaaacagatagatgagataagagataagaaaactggactgggaagaataattgagttaaaatcagaaatcctaagtaagaagcagaatgagctgaaaaatgtgaagtatgaattacagcagttggaaggatcttcagacaggattcttgaactggaccaggagctcataaaagctgaacgtgagttaagcaaggctgagaaaaacagcaatgtagaaaccttaaaaatggaagtaataagtctccaaaatgaaaaagcagacttagacaggaccctgcgtaaacttgaccaggagatggagcagttaaaccatcatacaacaacacgtacccaaatggagatgctgaccaaagacaaagctgacaaagatgaacaaatcagaaaaataaaatctaggcacagtgatgaattaacctcactgttgggatattttcccaacaaaaaacagcttgaagactggctacatagtaaatcaaaagaaattaatcagaccagggacagacttgccaaattgaacaaggaactagcttcatctgagcagaataaaaatcatataaataatgaactaraaagaaaggaagagcagttgtccagttacgaagacaagctgtttgatgtttgtggtagccaggattttgaaagtgatttagacaggcttaaagaggaaattgaaaaatcatcaaaacagcgagccatgctggctggagccacagcagtttactcccagttcattactcagctaacagaygaaaaccagtcatgttgccccgtttgtcagagagtttttcagacagaggctgagttacaagaagyyatcagtgatttgcagtctaaactgcgacttgctccagataaactcaagtcaacagaatcagagctaaaaaaaaaggaaaagcggcgtgatgaaatgctgggacttgtgcccatgaggcaaagcataattgatttgaaggagaaggaaataccagaattaagaaacaaactgcagaatgtcaatagagacatacagcgcctaaagaacgacatagaagaacaagaaacactcttgggtacaataatgcctgaagaagaaagtgccaaagtatgcctgacagatgttacaattatggagaggttccagatggaacttaaagatgttgaaagaaaaattgcacaacaagcagctaagctacaaggaatagacttagatcgaactgtccaacaagtcaaccaggagaaacaagagaaacagcacaagttagacacagtttctagtaagattgaattgaatcgtaagcttatacaggaccagcaggaacagattcaacatctaaaaagtacaacaaatgagctaaaatctgagaaacttcagatatccactaatttgcaacgtcgtcagcaactggaggagcagactgtggaattatccactgaagttcagtctttgtacagagagataaaggatgctaaagagcaggtaagccctttggaaacaacattggaaaagttccagcaagaaaaagaagaattaatcaacaaaaaaaatacaagcaacaaaatagcacaggataaactgaatgatattaaagagaaggttaaaaatattcatggctatatgaaagacattgagaattatattcaagatgggaaagacgactataagaagcaaaaagaaactgaacttaataaagtaatagctcaactaagtgaatgcgagaaacacaaagaaaagataaatgaagatatgagactcatgagacaagatattgatacacagaagatacaagaaaggtggctacaagataaccttactttaagaaaaagaaatgaggaactaaaagaagttgaagaagaargaaaacaacatttgaaggaaatgggtcaaatgcaggttttrcaaatgaaaagtgaacatcagaagttggaagagaacatagacaatataaaaagaaatcataatttggcattagggcgacagaaaggttatgaagaagaaattattcattttaagaaagaacttcgagaaccacaatttcgggatgctgaggaaaagtatagagaaatgatgattgttatgaggacaacagaacttgtgaacaaggatctggatatttattataagactcttgaccaagcaataatgaaatttcacagtatgaaaatggaagaaatcaataaaattatacgtgacctgtggcgaagtacctatcgtggacaagatattgaatacatagaaatacggtctgatgccgatgaaaatgtatcagcttctgataaaaggcggaattataactaccgagtggtgatgctgaagggagacacagccttggatatgcgaggacgatgcagtgctggacaaaaggcaggggcttttttccaggtattagcctcactcatcattcgcctggccctggctgaaacgttctgcctcaactgtggcatcattgccttggatgagccaacaacaaatcttgaccgagaaaacattgaatctcttgcacatgctctggttgagataataaaaagtcgctcacagcagcgtaacttccagcttctggtaatcactcatgatgaagattttgtggagcttttaggacgttctgaataygtggagaaattctacaggattaaaaagaacatcgatcagtgctcagagattgtgaaatgcagtgttagctccctgggattcaatgttcattaaaaatatccaagatttaaatgccatagaaatgtaggtcctcagaaagtgtataataagaaacttatttctcatatcaacttagtcaataagaaaatatattctttcaaagkaacattgtgtctaggattttggatgttgagaggttctaaaatcatgaaacttgtttcactgaaaattggacagattgcctgtttctgatttgctgctcttcatcccattccaggcagcctctgtcaggccttcagggttcagcagtacagccgagactcgactctgtgcctccctccccagtgcaaatgcatgcttcttctcaaagcactgttgagaaggagataattactgccttgaaaatttatggttttggtatttttttaaatcatagttaaatgttacctctgaatttacttccttgcatgtggtttgaaaaactgagtattaatatctgaggatgaccagaaatggtgagatgtatgtttggctctgcttttaactttataaatccagtgacctctctctctgggacttggtttccccaactaaaatttgaagtagttgaatggggtctcaaagtttgacaggaaccttaagtaatcatctaagtcagtacccaccaccttcttctcctacatatcccttccagatggtcatccagactcagagctctctctacagagaggaaattctccactgtgcacacccacctttggaaagctctgaccacttgaggcctgatctgcccatcgtgaagaagcctgtaacactcctctgcgtctatcctgtgtagcatactggcttcaccatcaatcctgattcctctctaagtgggcattgccatgtggaaggcaagccaggctcactcacagagtcaaggcctgctccctgtagggtccaaccagacctggaagaacaggcctctccatttgctcttcagatgccacttctaagaaaagcctaatcacagtttttcctggaattgccagctgacatcttgaatccttccattccacacagaatgcaaccaagtcacacgcttttgaattatgctttgtagagttttgtcattcagagtcagccaggaccataccgggtcttgattcagtcacatggcatggttttgtgccatctgtagctataatgagcatgtttgcctagacagcttttctcaactgggtccagaagagaattaagccctaaggtcctaaggcatctatctgtgctaggttaaatggttggcccccaaagatagacaggtcctgatttctagaacccgtgactgttactttatacagcaaaggaaactttgcagatgtgattaaagctaaggaccttaagacagagtatcctgggggtggtggtggggtgggggggggtcctaaatgtaatcacgagtaagattaagagcaaatcaattctagtcatatattaaacatccacaataaccaagatatttttatcccaagaatgcaagatttcagaaaatgaaaaatctgttgataaatccatcactataataaaaccgaaggtgaaaaaaattctgaaaaaattctagcagctatatttgataaaattcaacatctcctagctttagcaaactcacagttttgcaaataatattttcttaatgttatctgttgctaaatcaaaattaaacagtcatcttaactgcaaaataaaacatttctcagtaaatattaaagccagttaccttctatcaacatgttaatgaaagtgctagttgttgcagcaaagaataacaaaggcaatacacgatcaatataggcagtgaaacaaaagtatcatttgcaagttaaaacagacttcccaattttaaatctggtttccccctgaatatgtggcatccttggcagcacttctgagagtggctgctttcattccaagaagcccatgggtttggaggtgggataggtgcctttctggcttctcattgctgcttctagatcaagtactggtaaaggtaaatatataggtaatataaaagtataaatgtattttgggggctgggagcagtggctcatgcctgtaatcccaacactttgagaggccgaggtgggcggatcacctgaggtcaggagtttgagaccagcctgcccaacatggtgaaaccctgtctctactaaaaatacaaaaaatcagccaggcgttgtggtgggcgcctgtaatcccagctactcaggaggctgaggcaggagaatctcttgaacccaggaggcggaggttgcggtgagctgagatcacgccactgcactccagccttggtgacaagagca

SEQ ID NO: 4894 - DNA, 6422 bp, Homo sapiens
ttgggaagcgccatccgtcacaggtcttggtctccccttccaaaagtcagtgcctctccaggctgcccatccccagcaaagatccggaagtccgctgcccctggcaacagcacccagcacctagccctctgcttcgccgtaccgcacccggaagtcggagctgcgcacgcaccgcgggactctgatttcccggcgtgccccaggagagcggcgtggacgcgtgcgggcctagaggcccacgtgatccgcagggcggccgaggcaggaagctgtgagtgcgcggttgcggggtcgcattgtggctacggctttgcgtccccggcgggcagccccaggctggtccccgcctccgctctccccaccggcggggaaagcagctggtgtgggaggaaaggctccatcccccgccccctctctcccgctgttggctggcaggatcttttggcagtcctgtggcctcgctccccgcccggatcctcctgaccctgagattcgcgggtctcacgtcccgtgcacgccttgcttcggcctcagttaagcctttgtggrctccaggtccctggtgagattagaaacgtttgcaaacatgtcccggatcgaaaagatgagcattctgggcgtgcggagttttggaatagaggacaaagataagcaaattatcactttcttcagcccccttacaattttggttggacccaatggggcgggaaagacgaccatcattgaatgtctaaaatatatttgtactggagatttccctcctggaaccaaaggaaatacatttgtacacgatcccaaggttgctcaagaaacagatgtgagagcccagattcgtctgcaatttcgtgatgtcaatggagaacttatagctgtgcaaagatctatggcatggtgaaaaggtcagtctgagctctaagtgtgcagaaattgaccgagaaatgatcagttctcttggggtttccaaggctgtgctaaataatgtcattttctgtcatcaagaagattctaattggcctttaagtgaaggaaaggctttgaagcaaaagtttgatgagattttttcagcaacaagatacattaaagccttagaaacacttcggcaggtacgtcagacacaaggtcagaaagtaaaagaatatcaaatggaactaaaatatctgaagcaatataaggaaaaagcttgtgagattcgtgatcagattacaagtaaggaagcccagttaacatcttcaaaggaaattgtcaaatcctatgagaatgaacttgatccattgaagaatcgtctaaaagaaattgaacataatctctctaaaataatgaaacttgacaatgaaattaaagccttggatagccgaaagaagcaaatggagaaagataatagtgaactggaagagaaaatggaaaaggtttttcaagggactgatgagcaactaaatgacttatatcacaatcaccagagaacagtaagggagaaagaaaggaaattggtagactgtcatcgtgaactggaaaaactaaataaagaatctaggcttctcaatcaggaaaaatcagaactgcttgttgaacagggtcgtctacagctgcaagcagatcgccatcaagaacatatccgagctagagattcattaattcagtctttggcaacacagctagaattggatggctttgagcgtggaccattcagtgaaagacagattaaaaattttcacaaacttgtgagagagagacaagaaggggaagcaaaaactgccaaccaactgatgaatgactttgcagaaaaagagactctgaaacaaaaacagatagatgagataagagataagaaaactggactgggaagaataattgagttaaaatcagaaatcctaagtaagaagcagaatgagctgaaaaatgtgaagtatgaattacagcagttggaaggatcttcagacaggattcttgaactggaccaggagctcataaaagctgaacgtgagttaagcaaggctgagaaaaacagcaatgtagaaaccttaaaaatggaagtaataagtctccaaaatgaaaaagcagacttagacaggaccctgcgtaaacttgaccaggagatggagcagttaaaccatcatacaacaacacgtacccaaatggagatgctgaccaaagacaaagctgacaaagatgaacaaatcagaaaaataaaatctaggcacagtgatgaattaacctcactgttgggatattttcccaacaaaaaacagcttgaagactggctacatagtaaatcaaaagaaattaatcagaccagggacagacttgccaaattgaacaaggaactagcttcatctgagcagaataaaaatcatataaataatgaactaraaagaaaggaagagcagttgtccagttacgaagacaagctgtttgatgtttgtggtagccaggattttgaaagtgatttagacaggcttaaagaggaaattgaaaaatcatcaaaacagcgagccatgctggctggagccacagcagtttactcccagttcattactcagctaacagaygaaaaccagtcatgttgccccgtttgtcagagagtttttcagacagaggctgagttacaagaagyyatcagtgatttgcagtctaaactgcgacttgctccagataaactcaagtcaacagaatcagagctaaaaaaaaaggaaaagcggcgtgatgaaatgctgggacttgtgcccatgaggcaaagcataattgatttgaaggagaaggaaataccagaattaagaaacaaactgcagaatgtcaatagagacatacagcgcctaaagaacgacatagaagaacaagaaacactcttgggtacaataatgcctgaagaagaaagtgccaaagtatgcctgacagatgttacaattatggagaggttccagatggaacttaaagatgttgaaagaaaaattgcacaacaagcagctaagctacaaggaatagacttagatcgaactgtccaacaagtcaaccaggagaaacaagagaaacagcacaagttagacacagtttctagtaagattgaattgaatcgtaagcttatacaggaccagcaggaacagattcaacatctaaaaagtacaacaaatgagctaaaatctgagaaacttcagatatccactaatttgcaacgtcgtcagcaactggaggagcagactgtggaattatccactgaagttcagtctttgtacagagagataaaggatgctaaagagcaggtaagccctttggaaacaacattggaaaagttccagcaagaaaaagaagaattaatcaacaaaaaaaatacaagcaacaaaatagcacaggataaactgaatgatattaaagagaaggttaaaaatattcatggctatatgaaagacattgagaattatattcaagatgggaaagacgactataagaagcaaaaagaaactgaacttaataaagtaatagctcaactaagtgaatgcgagaaacacaaagaaaagataaatgaagatatgagactcatgagacaagatattgatacacagaagatacaagaaaggtggctacaagataaccttactttaagaaaaagaaatgaggaactaaaagaagttgaagaagaargaaaacaacatttgaaggaaatgggtcaaatgcaggttttrcaaatgaaaagtgaacatcagaagttggaagagaacatagacaatataaaaagaaatcataatttggcattagggcgacagaaaggttatgaagaagaaattattcattttaagaaagaacttcgagaaccacaatttcgggatgctgaggaaaagtatagagaaatgatgattgttatgaggacaacagaacttgtgaacaaggatctggatatttattataagactcttgaccaagcaataatgaaatttcacagtatgaaaatggaagaaatcaataaaattatacgtgacctgtggcgaagtacctatcgtggacaagatattgaatacatagaaatacggtctgatgccgatgaaaatgtatcagcttctgataaaaggcggaattataactaccgagtggtgatgctgaagggagacacagccttggatatgcgaggacgatgcagtgctggacaaaaggtattagcctcactcatcattcgcctggccctggctgaaacgttctgcctcaactgtggcatcattgccttggatgagccaacaacaaatcttgaccgagaaaacattgaatctcttgcacatgctctggttgagataataaaaagtcgctcacagcagcgtaacttccagcttctggtaatcactcatgatgaagattttgtggagcttttaggacgttctgaataygtggagaaattctacaggattaaaaagaacatcgatcagtgctcagagattgtgaaatgcagtgttagctccctgggattcaatgttcattaaaaatatccaagatttaaatgccatagaaatgtaggtcctcagaaagtgtataataagaaacttatttctcatatcaacttagtcaataagaaaatatattctttcaaagkaacattgtgtctaggattttggatgttgagaggttctaaaatcatgaaacttgtttcactgaaaattggacagattgcctgtttctgatttgctgctcttcatcccattccaggcagcctctgtcaggccttcagggttcagcagtacagccgagactcgactctgtgcctccctccccagtgcaaatgcatgcttcttctcaaagcactgttgagaaggagataattactgccttgaaaatttatggttttggtatttttttaaatcatagttaaatgttacctctgaatttacttccttgcatgtggtttgaaaaactgagtattaatatctgaggatgaccagaaatggtgagatgtatgtttggctctgcttttaactttataaatccagtgacctctctctctgggacttggtttccccaactaaaatttgaagtagttgaatggggtctcaaagtttgacaggaaccttaagtaatcatctaagtcagtacccaccaccttcttctcctacatatcccttccagatggtcatccagactcagagctctctctacagagaggaaattctccactgtgcacacccacctttggaaagctctgaccacttgaggcctgatctgcccatcgtgaagaagcctgtaacactcctctgcgtctatcctgtgtagcatactggcttcaccatcaatcctgattcctctctaagtgggcattgccatgtggaaggcaagccaggctcactcacagagtcaaggcctgctccctgtagggtccaaccagacctggaagaacaggcctctccatttgctcttcagatgccacttctaagaaaagcctaatcacagtttttcctggaattgccagctgacatcttgaatccttccattccacacagaatgcaaccaagtcacacgcttttgaattatgctttgtagagttttgtcattcagagtcagccaggaccataccgggtcttgattcagtcacatggcatggttttgtgccatctgtagctataatgagcatgtttgcctagacagcttttctcaactgggtccagaagagaattaagccctaaggtcctaaggcatctatctgtgctaggttaaatggttggcccccaaagatagacaggtcctgatttctagaacccgtgactgttactttatacagcaaaggaaactttgcagatgtgattaaagctaaggaccttaagacagagtatcctgggggtggtggtggggtgggggggggtcctaaatgtaatcacgagtaagattaagagcaaatcaattctagtcatatattaaacatccacaataaccaagatatttttatcccaagaatgcaagatttcagaaaatgaaaaatctgttgataaatccatcactataataaaaccgaaggtgaaaaaaattctgaaaaaattctagcagctatatttgataaaattcaacatctcctagctttagcaaactcacagttttgcaaataatattttcttaatgttatctgttgctaaatcaaaattaaacagtcatcttaactgcaaaataaaacatttctcagtaaatattaaagccagttaccttctatcaacatgttaatgaaagtgctagttgttgcagcaaagaataacaaaggcaatacacgatcaatataggcagtgaaacaaaagtatcatttgcaagttaaaacagacttcccaattttaaatctggtttccccctgaatatgtggcatccttggcagcacttctgagagtggctgctttcattccaagaagcccatgggtttggaggtgggataggtgcctttctggcttctcattgctgcttctagatca

SEQ ID NO: 4895 - DNA, 2124 bp, Homo sapiens
gacagtcacctgacagtgtggtgcccagccaaccagctatacctcttttgaagattttaagaacttagcctcctgaacagtcttcttcgaaagtgaaaagtggtaacagctgatgagtatcaagaaattattttctgcaaaggggcagagttaattgtatttggaacccatgacagcacctactggggaaagacttctaagtgaggagaaacggctctacaggtcatgaaactatggaaatgagatggtttttgtcaaagattcaggatgacttcagaggtggaaaaattaacctagaaaaaactcagaggttacttgaaaaattagatattcggtgcagttatattcatgtgaaacagatttttaagtaggacaatgacaggctgaaacaaggaagaatcaccatagaagaatttagagcaatttatcgaattatcacgcacagagaagaaattattgagattttcaacacatattctgaaaaccggaaaattcttttagcaagtaatctggctcaatttctgacacaagaacaatatgcagctgagatgagtaaagctattgcttttgagatcattcagaaatacgagcctatcgaagaagttaggaaagcacaccaaatgtcattagaaggttttacaagatacatggattcaygtgaatgtctactgtttaaaaatgaatgtagaaaagtttatcaagatatgactcatccattaaatgattattttatttcatcttcacataacacatatttggtatctgatcaattattgggaccaagtgacctttggggatatgtaagtgcccttgtgaaaggatgccgttgtttggagattgactgctgggatggagcacaaaatgaacctgttgtatatcatggctacacactcacaagcaaacttctgtttaaaactgttatccaagctatacacaagtatgcattcatgacatctgactacccagtggtgctctctttagaaaatcactgctccactgcccaacaagaagtaatggcagacaatttgcaggctacttttggagagtccttgctttctgatatgcttgatgattttcctgatactctaccatcaccagaggcactaaaattcaaaatattagttaaaaataagaaaataggaaccttaaaggaaacccatgaaagaaaaggttctgataagcgtggagacaatcaagacaaggaaacaggggtaaaaaagttacctggagtaatgcttttcaagaaaaagaagaccaggaagctaaaaattgctctggccttatctgatcttgtcatttatacgaaagctgagaaattcaaaagctttcaacattcaagattatatcagcaatttaatgaaaataattctattggggagacacaagcccgaaaactttcaaaattgcgagtccatgagtttatttttcacaccaggaagttcattaccagaatatatcccaaagcaacaagagcagactcttctaattttaatccccaagaattttggaatataggttgtcaaatggtggctttaaatttccagacccctggtctgcccatggatctgcaaaatgggaaatttttggataatggtggttctggatatattttgaaaccacatttcttaagagagagtaaatcatactttaacccaagtaacataaaagagggtatgccaattacacttacaataaggctcatcagtggtatccagttgcctcttactcattcatyatctaacaaaggtgattcattagtaattatagaagtttttggtgttccaaatgatcaaatgaagcagcagactcgtgtaattaaaaaaaatgcttttagtccaagatggaatgaaacattcacatttattattcatgtcccagaattggcattgatacgttttgttgttgaaggtcaaggtttaatagcaggaaatgaatttcttgggcaatatactttgccacttctatgcatgaacaaaggttatcgtcgtattcctctgttttccagaatgggtgagagccttgagcctgcttcactgtttgtttatgtttggtacgtcagataayagctaatgataaatgacatatcattagctatgcatcgcaataaaacagccaaaatgaatg

SEQ ID NO: 4896 - DNA, 2206 bp, Homo sapiens
gacagtcacctgacagtgtggtgcccagccaaccagctatacctcttttgaagattttaagaacttagcctcctgaacagtcttcttcgaaagtgaaaagtggtaacagctgatgagtatcaagaaattattttctgcaaaggggcagagttaattgtatttggaacccatgacagcacctactggggaaagacttctaagtgaggagaaacggctctacagattcaggatgacttcagaggtggaaaaattaacctagaaaaaactcagaggttacttgaaaaattagatattcggtgcagttatattcatgtgaaacagatttttaaggacaatgacaggctgaaacaaggaagaatcaccatagaagaatttagagcaatttatcgaattatcacgcacagagaagaaattattgagattttcaacacatattctgaaaaccggaaaattcttttagcaagtaatctggctcaatttctgacacaagaacaatatgcagctgagatgagtaaagctattgcttttgagatcattcagaaatacgagcctatcgaagaagttaggaaagcacaccaaatgtcattagaaggttttacaagatacatggattcaygtgaatgtctactgtttaaaaatgaatgtagaaaagtttatcaagatatgactcatccattaaatgattattttatttcatcttcacataacacatatttggtatctgatcaattattgggaccaagtgacctttggggatatgtaagtgcccttgtgaaaggatgccgttgtttggagattgactgctgggatggagcacaaaatgaacctgttgtatatcatggctacacactcacaagcaaacttctgtttaaaactgttatccaagctatacacaagtatgcattcatgacatctgactacccagtggtgctctctttagaaaatcactgctccactgcccaacaagaagtaatggcagacaatttgcaggctacttttggagagtccttgctttctgatatgcttgatgattttcctgatactctaccatcaccagaggcactaaaattcaaaatattagttaaaaataagaaaataggaaccttaaaggaaacccatgaaagaaaaggttctgataagcgtggtaaggtggaggaatgggaagaagaagtggcagatggagaggaggaggaggaggaggaggaggaggaggaggaggaggaggaggataaattcaaagaatcagaagtattggaatctgttttaggagacaatcaagacaaggaaacaggggtaaaaaagttacctggagtaatgcttttcaagaaaaagaaggtgaggaagctaaaaattgctctggccttatctgatcttgtcatttatacgaaagctgagaaattcaaaagctttcaacattcaagattatatcagcaatttaatgaaaataattctattggggagacacaagcccgaaaactttcaaaattgcgagtccatgagtttatttttcacaccaggaagttcattaccagaatatatcccaaagcaacaagagcagactcttctaattttaatccccaagaattttggaatataggttgtcaaatggtggctttaaatttccagacccctggtctgcccatggatctgcaaaatgggaaatttttggataatggtggttctggatatattttgaaaccacatttcttaagagagagtaaatcatactttaacccaagtaacataaaagagggtatgccaattacacttacaataaggctcatcagtggtatccagttgcctcttactcattcatyatctaacaaaggtgattcattagtaattatagaagtttttggtgttccaaatgatcaaatgaagcagcagactcgtgtaattaaaaaaaatgcttttagtccaagatggaatgaaacattcacatttattattcatgtcccagaattggcattgatacgttttgttgttgaaggtcaaggtttaatagcaggaaatgaatttcttgggcaatatactttgccacttctatgcatgaacaaaggttatcgtcgtattcctctgttttccagaatgggtgagagccttgagcctgcttcactgtttgtttatgtttggtacgtcagataayagctaatgataaatgacatatcattagctatgcatcgcaataaaacagccaaaatgaatg

SEQ ID NO: 4897 - DNA, 1973 bp, Homo sapiens
gacagtcacctgacagtgtggtgcccagccaaccagctatacctcttttgaagattttaagaacttagcctcctgaacagtcttcttcgaaagtgaaaagtggtaacagctgatgagtatcaagaaattattttctgcaaaggggcagagttaattgtatttggaacccatgacagcacctactggggaaagacttctaagtgaggagaaacggctctacagattcaggatgacttcagaggtggaaaaattaacctagaaaaaactcagaggttacttgaaaaattagatattcggtgcagttatattcatgtgaaacagatttttaaggacaatgacaggctgaaacaaggaagaatcaccatagaagaatttagagcaatttatcgaattatcacgcacagagaagaaattattgagattttcaacacatattctgaaaaccggaaaattcttttagcaagtaatctggctcaatttctgacacaagaacaatatgcagctgagatgagtaaagctattgcttttgagatcattcagaaatacgagcctatcgaagaagttaggaaagcacaccaaatgtcattagaaggttttacaagatacatggattcaygtgaatgtctactgtttaaaaatgaatgtagaaaagtttatcaagatatgactcatccattaaatgattattttatttcatcttcacataacacatatttggtatctgatcaattattgggaccaagtgacctttggggatatgtaagtgcccttgtgaaaggatgccgttgtttggagattgactgctgggatggagcacaaaatgaacctgttgtatatcatggctacacactcacaagcaaacttctgtttaaaactgttatccaagctatacacaagtatgcattcatgacatctgactacccagtggtgctctctttagaaaatcactgctccactgcccaacaagaagtaatggcagacaatttgcaggctacttttggagagtccttgctttctgatatgcttgatgattttcctgatactctaccatcaccagaggcactaaaattcaaaatattagttaaaaataagaaaataggaaccttaaaggaaacccatgaaagaaaaggttctgataagcgtggtaaggtggaggaatgggaagaagaagtggcagatggagaggaggaggaggaggaggaggaggaggaggaggaggaggaggaggataaattcaaagaatcagaagtattggaatctgttttaggagacaatcaagacaaggaaacaggggtaaaaaagttacctggagtaatgcttttcaagaaaaagaaggtgaggaagctaaaaattgctctggccttatctgatcttgtcatttatacgaaagctgagaaattcaaaagctttcaacattcaagattatatcagcaatttaatgaaaataattctattggggagacacaagcccgaaaactttcaaaattgcgagtccatgagtttatttttcacaccaggaagttcattaccagaatatatcccaaagcaacaagagcagactcttctaattttaatccccaagaattttggaatataggttgtcaaatggtggctttaaatttccagacccctggtctgcccatggatctgcaaaatgggaaatttttggataatggtggttctggatatattttgaaaccacatttcttaagagagagtaaatcatactttaacccaagtaacataaaagagggtatgccaattacacttacaataaggctcatcagtggtatccagttgcctcttactcattcatyatctaacaaaggttatcgtcgtattcctctgttttccagaatgggtgagagccttgagcctgcttcactgtttgtttatgtttggtacgtcagataayagctaatgataaatgacatatcattagctatgcatcgcaataaaacagccaaaatgaa

SEQ ID NO: 4898 - DNA, 1085 bp, Homo sapiens
agagccctttgctcctccctcagaatgaatggagatcaaaaatcagatgcttatgcccaagaaaaacaggatttcattcagcacttctcccggattgttagggtgctgactgaggatgagatggggcacccagagacaggagatgctatcgcccagctcaaggaggtcctggagtacaatgccatcggaggcaagttatcaccggggtttgacggtgcttagcattccgggagctggtggagccaaggaaacaggatgctgatagtttccagcgggccctgatggtgggttggtgtgtggaactgctgcaagctttcttcctcrtggtagatgacatcacggattcatccctcacccactggggacagatctgctggtatcagaagctgggygtgggtttggatgctgtcaatgatgctatgcttctggaagcatgtatctactgcctgctgaagctctgttgttgggagcagccctattacctgaacctgattgagctcttcctgcagagttcctatcagactgagattgggcagaccctggaccccatcacagcacccccagggcaatgtggatcttsgcagattcaasgaaaagaattacaaattgtcaagtacaagacagttttctactctttctaccttcctatagctgcagccatgcatatggcaggcattgatggtgagaaggcayacaccaatgccaagaagatcctgctggagatgggagagttctttaagattcaggatgatcactttgacctctttggggactccactgtgactgacaaagttggcactgccatctaggacaacaaatgcagctggctggtggttcagtgtctgcaatgggccactccaraacagtaccagatcctgaaggagaattaggggcagaaggaggccaagaaggtggtccaggagaaggcactatatgaggagctagatctgctggccgtgttcttgcagtatgaggatgacagttacagccacagccacattatgggtctcattgaacagtatgcaatgcccctgctcccagccatctttctggggctggcgtgcaaaatctacaagcggaaaaag

SEQ ID NO: 4899 - DNA, 1710 bp, Homo sapiens
tgccgcgtsggggagtggagtgggacaggtatataaaggaagtacagggcctggggaagaggccctgtctaggtagctggcaccaggagccgtgggcaagggaagaggccacaccctgccctgctctgctgcagccagaatgggtgtgaaggcgtctcaaacaggctttgtggtcctggtgctgctccagtgctgctctgcatacaaactggtctgctactacaccagctggtcccagtaccgggaaggcgatgggagctgcttcccagatgcccttgaccgcttcctctgtacccacatcatctacagctttgccaatataagcaacgatcacatcgacacctgggagtggaatgatgtgacgctctacggcatgctcaacacactcaagaacaggaaccccaacctgaagactctcttgtctgtcggaggatggaactttgggtctcaaagattttccaagatagcctccaacacccagagtcgccggactttcatcaagtcagtaccgccattyctgcgcacccatggctttgatgggctggaccttgcctggctctaccctggacggrgagacaaacagcattttaccaccctaatcaaggaaatgaaggccgaatttataaaggaagcccagccagggaaaaagcagctcctgctcagcgcagcactgtctgcggggaaggtcaccattgacagcagctatgacattgccaagatatcccaacacctggatttcattagcatcatgacctacgattttcatggagcctggcgtgggaccacaggccatcacagtcccctgttccgaggtcaggaggatgcaagtcctgacagattcagcaacactgactatgctgtggggtacatgttgaggctgggggctcctgccagtaagctggtgatgggcatccccaccttcgggaggagcttcactctggcttcttctgagactggtgttggagccccaatctcaggaccgggaattccaggccsgttcaccaaggaggcagggacccttgcctactatgagatctgtgacttcctccgcggagccacagtccatagaatcctcggccagcaggtcccctatgccaccaagggcaaccagtgggtaggatacgacgaccaggaaagcgtcaaaagcaaggtgcagtacctgaaggacaggcagctggcgggcgccatggtatgggccctggacctggatgacttccagggctccttctgyggccaggatctgcgcttccctctcaccaatgccatcaaggatgcactcgctgcaacgtagccctctgttctgcacacagcacgggggccaaggatgccccgtccccctctggctccagctggccgggagcctgatcacctgccctgctgagtcccaggctgagcctcagtctccctcccttggggcctatgcagaggtccacaacacacagatttgagctcagccctggtgggcagagagatccccaagcctggcaagggaatttyttcaactccctgcccccyagccctccttatcaaaggacaccattttggcaagctctatcaccaaggagccaaacatsctacaagacacagtgaccatactaattatacccyctgcaaagcccagcttgaaaccttcacttaggaaygtaatcgtgtcccctatcctacttccccttcctaattccacagctgctcaataaagtacaagagctt

SEQ ID NO: 4900 - DNA, 1934 bp, Homo sapiens
tgccgcgtsggggagtggagtgggacaggtatataaaggaagtacagggcctggggaagaggccctgtctaggtagctggcaccaggagccgtgggcaagggaagaggccacaccctgccctgctctgctgcagccagaatgggtgtgaaggcgtctcaaacaggctttgtggtcctggtgctgctccagtgctgctctgcatacaaactggtctgctactacaccagctggtcccagtaccgggaaggcgatgggagctgcttcccagatgcccttgaccgcttcctctgtacccacatcatctacagctttgccaatataagcaacgatcacatcgacacctgggagtggaatgatgtgacgctctacggcatgctcaacacactcaagaacaggaaccccaacctgaagactctcttgtctgtcggaggatggaactttgggtctcaaagattttccaagatagcctccaacacccagagtcgccggactttcatcaagtcagtaccgccattyctgcgcacccatggctttgatgggctggaccttgcctggctctaccctggacggrgagacaaacagcattttaccaccctaatcaaggaaatgaaggccgaatttataaaggaagcccagccagggaaaaagcagctcctgctcagcgcagcactgtctgcggggaaggtcaccattgacagcagctatgacattgccaagatatcccaacacctggatttcattagcatcatgacctacgattttcatggagcctggcgtgggaccacaggccatcacagtcccctgttccgaggtcaggaggatgcaagtcctgacagattcagcaacactgactatgctgtggggtacatgttgaggctgggggctcctgccagtaagctggtgatgggcatccccaccttcgggaggagcttcactctggcttcttctgagactggtgttggagccccaatctcaggaccgggaattccaggccsgttcaccaaggaggcagggacccttgcctactatgagatctgtgacttcctccgcggagccacagtccatagaatcctcggccagcaggtcccctatgccaccaagggcaaccagtgggtaggatacgacgaccaggaaagcgtcaaaagcaaggtgcagtacctgaaggacaggcagctggcgggcgccatggtatgggccctggacctggatgacttccagggctccttctgyggccaggatctgcgcttccctctcaccaatgccatcaaggatgcactcgctgcaacgtagccctctgttctgcacacagcacgggggccaaggatgccccgtccccctctggctccagctggccgggagcctgatcacctgccctgctgagtcccaggctgagcctcagtctccctcccttggggcctatgcagaggtccacaacacacagatttgagctcagccctggtgggcagagaggtagggatggggctgtggggatagtgaggcatygcaatgtaagactcgggattagtacacacttgttgattaatggaaatgtttacagatccccaagcctggcaagggaatttyttcaactccctgcccccyagccctccttatcaaaggacaccattttggcaagctctatcaccaaggagccaaacatsctacaagacacagtgaccatactaattatacccyctgcaaagcccagcttgaaaccttcacttaggaaygtaatcgtgtcccctatcctacttccccttcctaattccacagctgctcaataaagtacaagagcttaacagtgtgttggygctttgctttggtctatctttgagcgcccactagacccactggactcacctcccccatctcttctgggttccttcctctgagccttgggacccctgagcttgcagagatgaggccrccatgt

SEQ ID NO: 4901 - DNA, 327 bp, Homo sapiens
atggcttccaycgctttggcaaaacctcagatgtgtggtcttctggccaaatgtctgcaatttcatattgttggagcctttattgtatccctgggggttgcagctgtctgtaagattgctgtggctgaaccaagaaagaagacatatgcagatttctacagaaattatgattccgtgaaagatttggaggagatggggaaggctgatgatgctcttgcacttgagatgacatcttcttgcagcaagagtgctgatatcccaagaggagagattcatggttttgatcatttccttctgaactgcctgcattttctgaggaaggccttc

SEQ ID NO: 4902 - DNA, 2416 bp, Homo sapiens
gaaaccgcccccccttgcagctccgcggccaacgccttcgcccaggggtagttggagcggtgcaggttcccaggctccaggtactgggcgccttacgagctgggaggtggtgcctctcacccagctaattgctctctagcccttggccttcacaggtgttggtgcctgccgtgaacgcattctgacctgggccgtatctgtctcccaagactttgtgcctatggttggggacagagtgaggtcgttgccttgacgacgacagcatgcggcccgtggtcctcctaagtgtgagcttgcggcggaccgaggcccacctgcctccctgcctgcttcgccctggactcgtgactgcgtccgcagaagaaatcacaacagcgctggaattgctagtttgctaggcagcatcttttggacctgcgaaccatatgcatttcacctcaaatttgtttccaagttgaaaacctttgggtctttctatgcgaacggattgaagaaacgcaaaaagtttctacggactttaaattaaaatggaaaaatatgaaaacctgggtttggttggagaagggagttatggaatggtgatgaagtgtaggaataaagatactggaagaattgtggccataaagaagttcttagaaagtgacgatgacaaaatggttaaaaagattgcaatgcgagaaatcaagttactaaagcaacttaggcatgaaaacttggtgaatctcttggaagtgtgtaagaaaaaaaaacgatggtmcctagtctttgaatttgttgaccacacaattcttgatgacttggagctctttccaaatggactagactaccaagtagttcaaaagtatttgtttcagattattaatggaattggattttgtcacagtcacaatatcatacacagagatataaagccagagaatatattagtctcccagtctggcgttgtcaagctatgcgattttggatttgcgcgaacattggcagctcctggggaggtttatactgattatgtggcaacccgatggtacagagctccagaactattggttggtgatgtcaagtatggcaaggctgttgatgtgtgggccattggttgtctggtaactgaaatgttcatgggggaacccctatttcctggagattctgatattgatcagctatatcatattatgatgtgtttaggtaatctaattccaaggcatcaggagctttttaataaaaatcctgtgtttgctggagtaaggttgcctgaaatcaaggaaagagaacctcttgaaagacgctatcctaagctctctgaagtggtgatagatttagcaaagaaatgcttacatattgaccccgacaaaagacccttctgtgctgagctcctacaccatgatttctttcaaatggatggatttgctgagaggttttcccaagaactacagttaaaagtacagaaagatgccagaaatgtttctttatctaaaaaatcccaaaacagaaagaaggaaaaagaaaaagatgattccttagttgaagaaagaaaaacacttgtggtacaggataccaatgctgatcccaaaattaaggattataaactatttaaaataaaaggctcaaaaattgatggagaaaaagctgaaaaaggcaatagagcttcaaatgccagctgtctccatgacagtaggacaagccacaacaaaatagtgccttcaacaagcctcaaagactgcagcaatgtcagcgtggaccacacaaggaatccaagcgtggcaattcccccacttacacacaatctttctgcagttgctcccagcattaattctggaatggggactgagactataccaattcagggttacagagtggatgagaaaactaagaagtgttctattccatttgttaaaccgaacagacattccccatcaggcatttataacattaatgtgaccacattagtatcaggacctcccctgtcagatgattcaggggctgatttgcctcaaatggaacaccagcactgagaaccattttggttctgaactggatgatgctcttgcacttgagatgacatcttcttgcagcaagagtgctgatatcccaagaggagagattcatggttttgatcatttccttctgaactgcctgcattttctgaggaaggccttctagaagaaggaaagacaaagacttccaaatgtttcaaaggaagattgaacaaatggccctccccaactgttatcccattacctttcacgtccaccgatgctatttcaagacatatccagtggaataacagtgatatggttcttgttacatgaatgtgtatttactgttaggagattgtatattttaagttaccatgattaaaagtgtgtaaaaaagggggacagagagaaatactataaaaggccatgttactcatgcattg

SEQ ID NO: 4903 - DNA, 2567 bp, Homo sapiens
ggccggcctgcgccctggggctcgcagtggtttgtttgcgctgtggatggagtggcggtgcggtcccctgtggagcgcaaacaaggcgcttggttggcgcgggcgcctggctgccttcctcgtggtggggccttcggagcaatcgtcctggttctggcgatggttgagacgcctcgattgcggcgtrtaacgaacaccttccaccatgaccacctcagcaagttcccacttaaataaaggcatcaagcaggtgtacatgtccctgcctcagggtgagaaagtccaggccatgtatatctggatcgatggtactggagaaggactgcgctgcaagacccggaccctggacagtgagcccaagtgtgtggaagagttgcctgagtggaatttcgatggctcyagtactttacagtctgagggttccaacagtgacatgtatctcgtgcctgctgccatgtttcgggaccccttccgtaaggaccctaacaagctggtgttatgtgaagttttcaagtacaatcgaaggcctgcagagaccaatttgaggcacacctgtaaacggataatggacatggtgagcaaccagcacccctggtttggcatggagcaggagtataccctcatggggacagatgggcacccctttggttggccttccaacggcttcccagggccccagggtccatattactgtggtgtgggagcagacagagcctatggcagggacatcgtggaggcccattaccgggcctgcttgtatgctggagtcaagattgcggggactaatgccgaggtcatgcctgcccagtgggaatttcagattggaccttgtgaaggaatcagcatgggagatcatctctgggtggcccgtttcatcttgcatcgtgtgtgtgaagactttggagtgatagcaacctttgatcctaagcccattcctgggaactggaatggtgcaggctgccataccaacttcagcaccaaggccatgcgggaggagaatggtctgaagtacatcgaggaggccattgaraaactaagcaagcggcaccagtaccacatccgtgcctatgatcccaagggaggcctggacaatgcccgacgtctaactggattccatgaaacctccaacatcaacgacttttctgctggtgtagccaatcgtagcgccagcatacgcattccccggactgttggccaggagaagaagggttactttgaagatcgtcgcccctctgccaactgcgaccccttttcggtgacagaagccctcatccgcacgtgtcttctcaatgaaaccggcgatgagcccttccagtacaaaatccaactcttccccctctcccagttgtcccgattgtaactcaaagggtggaatatcaaggtcgtttttttcattccatgtgcccagttaatcttgctttctttgtttggctgggatagaggggtcaagttattaatttcttcacacctaccctcctttttttccctatcactgaagctttttagtgcattagtggggaggagggtggggagacataaccactgcttccatttaatggggtgcacctgtccaataggcgtagctatccggacagagcacgtttgcagaagggggwctcttcttccaggtagctgaaaggggaagacctgacgtactctggttaggttaggacttgccctcgtggtggaaacttttcttaaaaagttataaccaacttttctattaaaagtgggaattaggagagaagggactagcctggcttgggactaaatgccctgctctgaacacgaagcttagtataaactgatggatatccctaccttgaaagaagaaaaggttcttactgcttggtccttgatttatcacacaaagcagaatagtatttttatatttaaatgtaaagacaaaaaactatatgtatggttttgtggattatgtgtgttttgctaaaggaaaaaaccatccaggtcacggggcaccaaatttgagacaaatagtcggattagaaataaagcatctcattttgagtagagagcaagggaagtgrttcttagatggtgatctgggattaggccctcaagacccttttgggtttctgccctgcccaccctctggagaaggtgggcactggattagttaacagacracrcgttactagcagtcacttgatctccgtggctttggtttaaaagacacacttgtccacataggtttagagataagagttggctggtcaacttgagcatgttactgacagagggggtattggggttattttctggtaggaatagcatgtcactaaagcaggccttttgatattaaattttttaaaaagcaaaattatagaagtttagattttaatcaaatttgtagggtttctaggtaatttttacagaattgcttgtttgcttcaactgtctcctacctctgctcttggaggagatggggacagggctggagtcaaaacacttgtaattttgtatcttgatgtctttgttaagactgctgaagaattattttttttcttttataataaggaataaaccccmcctttattccttcattt

SEQ ID NO: 4904 - DNA, 3167 bp, Homo sapiens
ggccggcctgcgccctggggctcgcagtggtttgtttgcgctgtggatggagtggcggtgcggtcccctgtggagcgcaaacaaggcgcttggttggcgcgggcgcctggctgccttcctcgtggtggggccttcggagcaatcgtcctggttctggcgatggttgagacgcctcgattgcggcgtrtaacgaacaccttccaccatgaccacctcagcaagttcccacttaaataaaggcatcaagcaggtgtacatgtccctgcctcagggtgagaaagtccaggccatgtatatctggatcgatggtactggagaaggactgcgctgcaagacccggaccctggacagtgagcccaagtgtgtggaagagttgcctgagtggaatttcgatggctcyagtactttacagtctgagggttccaacagtgacatgtatctcgtgcctgctgccatgtttcgggaccccttccgtaaggaccctaacaagctggtgttatgtgaagttttcaagtacaatcgaaggcctgcagagaccaatttgaggcacacctgtaaacggataatggacatggtgagcaaccagcacccctggtttggcatggagcaggagtataccctcatggggacagatgggcacccctttggttggccttccaacggcttcccagggccccagggtccatattactgtggtgtgggagcagacagagcctatggcagggacatcgtggaggcccattaccgggcctgcttgtatgctggagtcaagattgcggggactaatgccgaggtcatgcctgcccagtgggaatttcagattggaccttgtgaaggaatcagcatgggagatcatctctgggtggcccgtttcatcttgcatcgtgtgtgtgaagactttggagtgatagcaacctttgatcctaagcccattcctgggaactggaatggtgcaggctgccataccaacttcagcaccaaggccatgcgggaggagaatggtctgaagtacatcgaggaggccattgaraaactaagcaagcggcaccagtaccacatccgtgcctatgatcccaagggaggcctggacaatgcccgacgtctaactggattccatgaaacctccaacatcaacgacttttctgctggtgtagccaatcgtagcgccagcatacgcattccccggactgttggccaggagaagaagggttactttgaagatcgtcgcccctctgccaactgcgaccccttttcggtgacagaagccctcatccgcacgtgtcttctcaatgaaaccggcgatgagcccttccagtacaaaaattaagtggactagacctccagctgttgagcccctcctagttcttcatcccactccaactcttccccctctcccagttgtcccgattgtaactcaaagggtggaatatcaaggtcgtttttttcattccatgtgcccagttaatcttgctttctttgtttggctgggatagaggggtcaagttattaatttcttcacacctaccctcctttttttccctatcactgaagctttttagtgcattagtggggaggagggtggggagacataaccactgcttccatttaatggggtgcacctgtccaataggcgtagctatccggacagagcacgtttgcagaagggggwctcttcttccaggtagctgaaaggggaagacctgacgtactctggttaggttaggacttgccctcgtggtggaaacttttcttaaaaagttataaccaacttttctattaaaagtgggaattaggagagaaggtaggggttgggaatcagagagaatggctttggtctcttgcttgtgggactagcctggcttgggactaaatgccctgctctgaacacgaagcttagtataaactgatggatatccctaccttgaaagaagaaaaggttcttactgcttggtccttgatttatcacacaaagcagaatagtatttttatatttaaatgtaaagacaaaaaactatatgtatggttttgtggattatgtgtgttttgctaaaggaaaaaaccatccaggtcacggggcaccaaatttgagacaaatagtcggattagaaataaagcatctcattttgagtagagagcaagggaagtgrttcttagatggtgatctgggattaggccctcaagacccttttgggtttctgccctgcccaccctctggagaaggtgggcactggattagttaacagacracrcgttactagcagtcacttgatctccgtggctttggtttaaaagacacacttgtccacataggtttagagataagagttggctggtcaacttgagcatgttactgacagagggggtattggggttattttctggtaggaatagcatgtcactaaagcaggccttttgatattaaattttttaaaaagcaaaattatagaagtttagattttaatcaaatttgtagggtttctaggtaatttttacagaattgcttgtttgcttcaactgtctcctacctctgctcttggaggagatggggacagggctggagtcaaaacacttgtaattttgtatcttgatgtctttgttaagactgctgaagaattattttttttcttttataataaggaataaaccccmcctttattccttcatttcatctaccattttytggttcttgtgttggctgtggcaggccagctgtggttttyttttgccatgacaacttytaattgccatgtacagtatgttcaaagtcaaataactcctcattgtaaacaaactgtgtaactgcccaaagcagcacttataaatcagcctaacataagatctctctgatgtgtttgtgattctttcaaatccctatgtgccattatatttctttatttcctaaaacaggcaaaataagctcaagtttatgtactctgagtttttaaaacactggagtgatgttgctgaccagccgtttcctgtacctctctaagttgggtatttgggacttaagggattaagtttttcacctagacttagttacacacaatcttggcatttcctagcctagaggtttgtagcagggtacaagccccactcctcccccttcctttgctcccctgagtttggttttggcttaccataacattgttttgaccattcctagc

SEQ ID NO: 4905 - DNA, 3095 bp, Homo sapiens
ggcyctgcagagtcgagagtgggagaagagcggagcgtgtgagcagtactgcggcctcctctcckctcctaacctcgctctcgcggcctasctttacccgcccgcctgctcggcgaccagaacaccttccaccatgaccacctcagcaagttcccacttaaataaaggcatcaagcaggtgtacatgtccctgcctcagggtgagaaagtccaggccatgtatatctggatcgatggtactggagaaggactgcgctgcaagacccggaccctggacagtgagcccaagtgtgtggaagagttgcctgagtggaatttcgatggctcyagtactttacagtctgagggttccaacagtgacatgtatctcgtgcctgctgccatgtttcgggaccccttccgtaaggaccctaacaagctggtgttatgtgaagttttcaagtacaatcgaaggcctgcagagaccaatttgaggcacacctgtaaacggataatggacatggtgagcaaccagcacccctggtttggcatggagcaggagtataccctcatggggacagatgggcacccctttggttggccttccaacggcttcccagggccccagggtccatattactgtggtgtgggagcagacagagcctatggcagggacatcgtggaggcccattaccgggcctgcttgtatgctggagtcaagattgcggggactaatgccgaggtcatgcctgcccagtgggaatttcagattggaccttgtgaaggaatcagcatgggagatcatctctgggtggcccgtttcatcttgcatcgtgtgtgtgaagactttggagtgatagcaacctttgatcctaagcccattcctgggaactggaatggtgcaggctgccataccaacttcagcaccaaggccatgcgggaggagaatggtctgaagtacatcgaggaggccattgaraaactaagcaagcggcaccagtaccacatccgtgcctatgatcccaagggaggcctggacaatgcccgacgtctaactggattccatgaaacctccaacatcaacgacttttctgctggtgtagccaatcgtagcgccagcatacgcattccccggactgttggccaggagaagaagggttactttgaagatcgtcgcccctctgccaactgcgaccccttttcggtgacagaagccctcatccgcacgtgtcttctcaatgaaaccggcgatgagcccttccagtacaaaaattaagtggactagacctccagctgttgagcccctcctagttcttcatcccactccaactcttccccctctcccagttgtcccgattgtaactcaaagggtggaatatcaaggtcgtttttttcattccatgtgcccagttaatcttgctttctttgtttggctgggatagaggggtcaagttattaatttcttcacacctaccctcctttttttccctatcactgaagctttttagtgcattagtggggaggagggtggggagacataaccactgcttccatttaatggggtgcacctgtccaataggcgtagctatccggacagagcacgtttgcagaagggggwctcttcttccaggtagctgaaaggggaagacctgacgtactctggttaggttaggacttgccctcgtggtggaaacttttcttaaaaagttataaccaacttttctattaaaagtgggaattaggagagaaggtaggggttgggaatcagagagaatggctttggtctcttgcttgtgggactagcctggcttgggactaaatgccctgctctgaacacgaagcttagtataaactgatggatatccctaccttgaaagaagaaaaggttcttactgcttggtccttgatttatcacacaaagcagaatagtatttttatatttaaatgtaaagacaaaaaactatatgtatggttttgtggattatgtgtgttttgctaaaggaaaaaaccatccaggtcacggggcaccaaatttgagacaaatagtcggattagaaataaagcatctcattttgagtagagagcaagggaagtgrttcttagatggtgatctgggattaggccctcaagacccttttgggtttctgccctgcccaccctctggagaaggtgggcactggattagttaacagacracrcgttactagcagtcacttgatctccgtggctttggtttaaaagacacacttgtccacataggtttagagataagagttggctggtcaacttgagcatgttactgacagagggggtattggggttattttctggtaggaatagcatgtcactaaagcaggccttttgatattaaattttttaaaaagcaaaattatagaagtttagattttaatcaaatttgtagggtttctaggtaatttttacagaattgcttgtttgcttcaactgtctcctacctctgctcttggaggagatggggacagggctggagtcaaaacacttgtaattttgtatcttgatgtctttgttaagactgctgaagaattattttttttcttttataataaggaataaaccccmcctttattccttcatttcatctaccattttytggttcttgtgttggctgtggcaggccagctgtggttttyttttgccatgacaacttytaattgccatgtacagtatgttcaaagtcaaataactcctcattgtaaacaaactgtgtaactgcccaaagcagcacttataaatcagcctaacataagatctctctgatgtgtttgtgattctttcaaatccctatgtgccattatatttctttatttcctaaaacaggcaaaataagctcaagtttatgtactctgagtttttaaaacactggagtgatgttgctgaccagccgtttcctgtacctctctaagttgggtatttgggacttaagggattaagtttttcacctagacttagttacacacaatcttggcatttcctagcctagaggtttgtagcagggtacaagccccactcctcccccttcctttgctcccctgagtttggttttggcttaccataacattgttttgaccattcctagc

SEQ ID NO: 4906 - DNA, 2263 bp, Homo sapiens
ggccggcctgcgccctggggctcgcagtggtttgtttgcgctgtggatggagtggcggtgcggtcccctgtggagcgcaaacaaggcgcttggttggcgcgggcgcctggctgccttcctcgtggtggggccttcggagcaatcgtcctggttctggcgatggttgagacgcctcgattgcggcgtrtaacgaacaccttccaccatgaccacctcagcaagttcccacttaaataaaggcatcaagcaggtgtacatgtccctgcctcagggtgagaaagtccaggccatgtatatctggatcgatggtactggagaaggactgcgctgcaagacccggaccctggacagtgagcccaagtgtgtggaagagttgcctgagtggaatttcgatggctcyagtactttacagtctgagggttccaacagtgacatgtatctcgtgcctgctgccatgtttcgggaccccttccgtaaggaccctaacaagctggtgttatgtgaagttttcaagtacaatcgaaggcctgcagagaccaatttgaggcacacctgtaaacggataatggacatggtgagcaaccagcacccctggtttggcatggagcaggagtataccctcatggggacagatgggcacccctttggttggccttccaacggcttcccagggccccagggtccatattactgtggtgtgggagcagacagagcctatggcagggacatcgtggaggcccattaccgggcctgcttgtatgctggagtcaagattgcggggactaatgccgaggtcatgcctgcccaggtaaattggaccttgtgaaggaatcagcatgggagatcatctctgggtggcccgtttcatcttgcatcgtgtgtgtgaagactttggagtgatagcaacctttgatcctaagcccattcctgggaactggaatggtgcaggctgccataccaacttcagcaccaaggccatgcgggaggagaatggtctgaagtacatcgaggaggccattgaraaactaagcaagcggcaccagtaccacatccgtgcctatgatcccaagggaggcctggacaatgcccgacgtctaactggattccatgaaacctccaacatcaacgacttttctgctggtgtagccaatcgtagcgccagcatacgcattccccggactgttggccaggagaagaagggttactttgaagatcgtcgcccctctgccaactgcgaccccttttcggtgacagaagccctcatccgcacgtgtcttctcaatgaaaccggcgatgagcccttccagtacaaaatccaactcttccccctctcccagttgtcccgattgtaactcaaagggtggaatatcaaggtcgtttttttcattccatgtgcccagttaatcttgctttctttgtttggctgggatagaggggtcaagttattaatttcttcacacctaccctcctttttttccctatcactgaagctttttagtgcattagtggggaggagggtggggagacataaccactgcttccatttaatggggtgcacctgtccaataggcgtagctatccggacagagcacgtttgcagaagggggwctcttcttccaggtagctgaaaggggaagacctgacgtactctggttaggttaggacttgccctcgtggtggaaacttttcttaaaaagttataaccaacttttctattaaaagtgggaattaggagagaagggactagcctggcttgggactaaatgccctgctctgaacacgaagcttagtataaactgatggatatccctaccttgaaagaagaaaaggttcttactgcttggtccttgatttatcacacaaagcagaatagtatttttatatttaaatgtaaagacaaaaaactatatgtatggttttgtggattatgtgtgttttgctaaaggaaaaaaccatccaggtcacggggcaccaaatttgagacaaatagtcggattagaaataaagcatctcattttgagtagagagcaagggaagtgrttcttagatggtgatctgggattaggccctcaagacccttttgggtttctgccctgcccaccctctggagaaggtgggcactggattagttaacagacracrcgttactagcagtcacttgatctccgtggctttggtttgagcatgttactgacagagggggtattggggttattttctggtaggaatagcatgtcactaaagcaggccttttgatattaaa

SEQ ID NO: 4907 - DNA, 3048 bp, Homo sapiens
tcgagagtgggagaagagcggagcgtgtgagcagtactgcggcctcctctcckctcctaacctcgctctcgcgaacaccttccaccatgaccacctcagcaagttcccacttaaataaaggcatcaagcaggtgtacatgtccctgcctcagggtgagaaagtccaggccatgtatatctggatcgatggtactggagaaggactgcgctgcaagacccggaccctggacagtgagcccaagtgtgtggaagagttgcctgagtggaatttcgatggctcyagtactttacagtctgagggttccaacagtgacatgtatctcgtgcctgctgccatgtttcgggaccccttccgtaaggaccctaacaagctggtgttatgtgaagttttcaagtacaatcgaaggcctgcagagaccaatttgaggcacacctgtaaacggataatggacatggtgagcaaccagcacccctggtttggcatggagcaggagtataccctcatggggacagatgggcacccctttggttggccttccaacggcttcccagggccccagggtccatattactgtggtgtgggagcagacagagcctatggcagggacatcgtggaggcccattaccgggcctgcttgtatgctggagtcaagattgcggggactaatgccgaggtcatgcctgcccagtgggaatttcagattggaccttgtgaaggaatcagcatgggagatcatctctgggtggcccgtttcatcttgcatcgtgtgtgtgaagactttggagtgatagcaacctttgatcctaagcccattcctgggaactggaatggtgcaggctgccataccaacttcagcaccaaggccatgcgggaggagaatggtctgaagtacatcgaggaggccattgaraaactaagcaagcggcaccagtaccacatccgtgcctatgatcccaagggaggcctggacaatgcccgacgtctaactggattccatgaaacctccaacatcaacgacttttctgctggtgtagccaatcgtagcgccagcatacgcattccccggactgttggccaggagaagaagggttactttgaagatcgtcgcccctctgccaactgcgaccccttttcggtgacagaagccctcatccgcacgtgtcttctcaatgaaaccggcgatgagcccttccagtacaaaaattaagtggactagacctccagctgttgagcccctcctagttcttcatcccactccaactcttccccctctcccagttgtcccgattgtaactcaaagggtggaatatcaaggtcgtttttttcattccatgtgcccagttaatcttgctttctttgtttggctgggatagaggggtcaagttattaatttcttcacacctaccctcctttttttccctatcactgaagctttttagtgcattagtggggaggagggtggggagacataaccactgcttccatttaatggggtgcacctgtccaataggcgtagctatccggacagagcacgtttgcagaagggggwctcttcttccaggtagctgaaaggggaagacctgacgtactctggttaggttaggacttgccctcgtggtggaaacttttcttaaaaagttataaccaacttttctattaaaagtgggaattaggagagaaggtaggggttgggaatcagagagaatggctttggtctcttgcttgtgggactagcctggcttgggactaaatgccctgctctgaacacgaagcttagtataaactgatggatatccctaccttgaaagaagaaaaggttcttactgcttggtccttgatttatcacacaaagcagaatagtatttttatatttaaatgtaaagacaaaaaactatatgtatggttttgtggattatgtgtgttttgctaaaggaaaaaaccatccaggtcacggggcaccaaatttgagacaaatagtcggattagaaataaagcatctcattttgagtagagagcaagggaagtgrttcttagatggtgatctgggattaggccctcaagacccttttgggtttctgccctgcccaccctctggagaaggtgggcactggattagttaacagacracrcgttactagcagtcacttgatctccgtggctttggtttaaaagacacacttgtccacataggtttagagataagagttggctggtcaacttgagcatgttactgacagagggggtattggggttattttctggtaggaatagcatgtcactaaagcaggccttttgatattaaattttttaaaaagcaaaattatagaagtttagattttaatcaaatttgtagggtttctaggtaatttttacagaattgcttgtttgcttcaactgtctcctacctctgctcttggaggagatggggacagggctggagtcaaaacacttgtaattttgtatcttgatgtctttgttaagactgctgaagaattattttttttcttttataataaggaataaaccccmcctttattccttcatttcatctaccattttytggttcttgtgttggctgtggcaggccagctgtggttttyttttgccatgacaacttytaattgccatgtacagtatgttcaaagtcaaataactcctcattgtaaacaaactgtgtaactgcccaaagcagcacttataaatcagcctaacataagatctctctgatgtgtttgtgattctttcaaatccctatgtgccattatatttctttatttcctaaaacaggcaaaataagctcaagtttatgtactctgagtttttaaaacactggagtgatgttgctgaccagccgtttcctgtacctctctaagttgggtatttgggacttaagggattaagtttttcacctagacttagttacacacaatcttggcatttcctagcctagaggtttgtagcagggtacaagccccactcctcccccttcctttgctcccctgagtttggttttggcttaccataacattgttttgaccattcctagc

SEQ ID NO: 4908 - DNA, 1539 bp, Homo sapiens
cacggacaagagcggaggcctgggtgagcgcggcccgcgacggcacgggctaggacagacggacgcagacggcccgacgacctgggcgttcgggcggaggggcgctggggcctgactcgcggaaggggaaactgaagcagaaagaggttacttaatgggctcaaggtcacctacctgacctaccagcagctcaatggccttcccaaagaagaaacttcagggtcttgtggctgcaaccatcacgccaatgactgagaatgggctggatcaggtgataattcacgtaggagcactgagcttgaaggagtcacaggaactggcccaacatgcagcagaaataggagctgatggcatcgctgtcattgcaccgttcttcctcaagccrtggaccaaagatatcctgattaatttyctaaaggaagtggctgctgccgcccctgccctgccattttattactatcacattcctgccttgacaggggtaaagattcgtgctgaggagttgttggatgggattctggataagatccccaccttccaagggctgaaattcagtgatacagatctcttagacttcgggcaatgtgttgatcagaatcgccagcaacagtttgctttcctttttggggtggatgagcaaytgttgagtgctctggtgatgggagcaactggagcagtgggcagtacctataactacctgggaaaaaagacaaaccagatgttggaggcttttgaacaaaaggacttctctttagccctgaactatcagttttgtatccagagatttatcaactttgttgtcaaactaggttttggagtgtcacagaccaaagccatcatgactctggtctctgggattccaatgggcccaccccggcttccactgcagaaagcctccagggagtttactgatagtgctgaagctaaactgaagagcctggatttcctttctttcactgatttaaaggatggaaacttggaagctggtagctagtgcctctctatcaaatcagggtttgcaccttgagacayaatctaccttaaatagtgcatttttttctcagggaattttagatgaacttgaataaactctcctagcaaatgaaatctcacaataagcattgaggtaccttttgtgagccttaaaaagtcttattttgtgaaggggcaaaaactctaggagtcacaactctcagtcattcatttcacagatttttttgtggagaaatttctgtttatatggatgaaatggaatcaagaggaaaattgtaattgattaattccatctgtctttaggagctctcattatctcggtctctggttcctaatcctattttaaagttgtctaattttaaaccactataatatgtcttcattttaataaatattcatttggaatctaggaaaactctgagctactgcatttaggcaggcactttaataccaaactgtaacatgtctcaactgtatacaactcaaaatacaccagctcatttggctgctcagtctaactctagaatggatgcttttgaattcatt

SEQ ID NO: 4909 - DNA, 1555 bp, Homo sapiens
gttacttaatgggctcaaggtcacctacctgacctaccagcagctcaatggccttcccaaagaagaaacttcagggtcttgtggctgcaaccatcacgccaatgactgagaatggagaaatcaacttttcagtaattggtcagtatgtggattatcttgtgaaagaacagggagtgaagaacatttttgtgaatggcacaacaggagaaggcctgtccctgagcgtctcagagcgtcgccaggttgcagaggagtgggtgacaaaagggaaggacaagctggatcaggtgataattcacgtaggagcactgagcttgaaggagtcacaggaactggcccaacatgcagcagaaataggagctgatggcatcgctgtcattgcaccgttcttcctcaagccrtggaccaaagatatcctgattaatttyctaaaggaagtggctgctgccgcccctgccctgccattttattactatcacattcctgccttgacaggggtaaagattcgtgctgaggagttgttggatgggattctggataagatccccaccttccaagggctgaaattcagtgatacagatctcttagacttcgggcaatgtgttgatcagaatcgccagcaacagtttgctttcctttttggggtggatgagcaaytgttgagtgctctggtgatgggagcaactggagcagtgggcagtacctataactacctgggaaaaaagacaaaccagatgttggaggcttttgaacaaaaggacttctctttagccctgaactatcagttttgtatccagagatttatcaactttgttgtcaaactaggttttggagtgtcacagaccaaagccatcatgactctggtctctgggattccaatgggcccaccccggcttccactgcagaaagcctccagggagtttactgatagtgctgaagctaaactgaagagcctggatttcctttctttcactgatttaaaggatggaaacttggaagctggtagctagtgcctctctatcaaatcagggtttgcaccttgagacayaatctaccttaaatagtgcatttttttctcagggaattttagatgaacttgaataaactctcctagcaaatgaaatctcacaataagcattgaggtaccttttgtgagccttaaaaagtcttattttgtgaaggggcaaaaactctaggagtcacaactctcagtcattcatttcacagatttttttgtggagaaatttctgtttatatggatgaaatggaatcaagaggaaaattgtaattgattaattccatctgtctttaggagctctcattatctcggtctctggttcctaatcctattttaaagttgtctaattttaaaccactataatatgtcttcattttaataaatattcatttggaatctaggaaaactctgagctactgcatttaggcaggcactttaataccaaactgtaacatgtctcaactgtatacaactcaaaatacaccagctcatttggctgctcagtctaactctagaatggatgcttttgaattcatt

SEQ ID NO: 4910 - DNA, 1312 bp, Homo sapiens
cctgggtgagcgcggcccgcgacggcacgggctaggacagacggacgcagacggcccgacgacctgggcgttcgggcggaggggcgctggggcctgactcgcgggttacttaatgggctcaaggtcacctacctgacctaccagcagctcaatggccttcccaaagaagaaacttcagggtcttgtggctgcaaccatcacgccaatgactgagaatggagaaatcaacttttcagtaattggtcagtatgtggattatcttgtgaaagaacagggagtgaagaacatttttgtgaatggcacaacaggagaaggcctgtccctgagcgtctcagagcgtcgccaggttgcagaggagtgggtgacaaaagggaaggacaagctggatcaggtgataattcacgtaggagcactgagcttgaaggagtcacaggaactggcccaacatgcagcagaaataggagctgatggcatcgctgtcattgcaccgttcttcctcaagccrtggaccaaagatatcctgattaatttyctaaaggaagtggctgctgccgcccctgccctgccattttattactatcacattcctgccttgacaggggtaaagattcgtgctgaggagttgttggatgggattctggataagatccccaccttccaagggctgaaattcagtgatacagatctcttagacttcgggcaatgtgttgatcagaatcgccagcaacagtttgctttcctttttggggtggatgagttttgtatccagagatttatcaactttgttgtcaaactaggttttggagtgtcacagaccaaagccatcatgactctggtctctgggattccaatgggcccaccccggcttccactgcagaaagcctccagggagtttactgatagtgctgaagctaaactgaagagcctggatttcctttctttcactgatttaaaggatggaaacttggaagctggtagctagtgcctctctatcaaatcagggtttgcaccttgagacayaatctaccttaaatagtgcatttttttctcagggaattttagatgaacttgaataaactctcctagcaaatgaaatctcacaataagcattgaggtaccttttgtgagccttaaaaagtcttattttgtgaaggggcaaaaactctaggagtcacaactctcagtcattcatttcacagatttttttgtggagaaatttctgtttatatggatgaaatggaatcaagaggaaaattgtaattgattaattccatctgtctttaggagctctcattatctcggtctctggttc

SEQ ID NO: 4911 - DNA, 660 bp, Homo sapiens
atggctatttctgtggctgcttctaaagccaaacaagccccattgacacacccatacaagccagaatttccagaagtgactctcatacccrgttacgcrttcttcacagtgaatggaacagactcttgtccacctgtggacagaccttttactggaacacaatggagtctgcagggctggtgcagcggcgtcaacccgaagagacctgaacgccgatgggcagttgggattctccgtacgcctcggaaacagcagcccaaacctcacaacgcagaaccacgagatagtggggattgcagagccctgcgcaagagaaggaaaattaagacgcagcggagcccaggaggtgcccgcacgcgggaaggactggcgtgcagacgaggcagggggaggtttgcactcggcgtggcgcgggacagacggacgcagacggcccgacgacctgggcgttcgggcggaggggcgctggggcctgactcgcgggtgggtgagacgttgacggacccggaggaaagagggaaggcagatacgctgggaaacggatctggggaaggtgtgaatgcgaaaagtgtagggacagacgggggcagaagaacttactcccccggattgtttgcagacagcatatctgccgggtctccaaaggtcctttcctcaaaa

SEQ ID NO: 4912 - DNA, 1659 bp, Homo sapiens
cctgggtgagcgcggcccgcgacggcacgggctaggacagacggacgcagacggcccgacgacctgggcgttcgggcggaggggcgctggggcctgactcgcgggttacttaatgggctcaaggtcacctacctgacctaccagcagctcaatggccttcccaaagaagaaacttcagggtcttgtggctgcaaccatcacgccaatgactgagaatggagaaatcaacttttcagtaattggtcagtatgtggattatcttgtgaaagaacagggagtgaagaacatttttgtgaatggcacaacaggagaaggcctgtccctgagcgtctcagagcgtcgccaggttgcagaggagtgggtgacaaaagggaaggacaagctggatcaggtgataattcacgtaggagcactgagcttgaaggagtcacaggaactggcccaacatgcagcagaaataggagctgatggcatcgctgtcattgcaccgttcttcctcaagccrtggaccaaagatatcctgattaatttyctaaaggaagtggctgctgccgcccctgccctgccattttattactatcacattcctgccttgacaggggtaaagattcgtgctgaggagttgttggatgggattctggataagatccccaccttccaagggctgaaattcagtgatacagatctcttagacttcgggcaatgtgttgatcagaatcgccagcaacagtttgctttcctttttggggtggatgagcaaytgttgagtgctctggtgatgggagcaactggagcagtgggcagtacctataactacctgggaaaaaagacaaaccagatgttggaggcttttgaacaaaaggacttctctttagccctgaactatcagttttgtatccagagatttatcaactttgttgtcaaactaggttttggagtgtcacagaccaaagccatcatgactctggtctctgggattccaatgggcccaccccggcttccactgcagaaagcctccagggagtttactgatagtgctgaagctaaactgaagagcctggatttcctttctttcactgatttaaaggatggaaacttggaagctggtagctagtgcctctctatcaaatcagggtttgcaccttgagacayaatctaccttaaatagtgcatttttttctcagggaattttagatgaacttgaataaactctcctagcaaatgaaatctcacaataagcattgaggtaccttttgtgagccttaaaaagtcttattttgtgaaggggcaaaaactctaggagtcacaactctcagtcattcatttcacagatttttttgtggagaaatttctgtttatatggatgaaatggaatcaagaggaaaattgtaattgattaattccatctgtctttaggagctctcattatctcggtctctggttcctaatcctattttaaagttgtctaattttaaaccactataatatgtcttcattttaataaatattcatttggaatctaggaaaactctgagctactgcatttaggcaggcactttaataccaaactgtaacatgtctcaactgtatacaactcaaaatacaccagctcatttggctgctcagtctaactctagaatggatgcttttgaattcatt

SEQ ID NO: 4913 - DNA, 1634 bp, Homo sapiens
cgtgggagatgctatctgtaccattgctgctgctacctgctttccagagcctttcrtcaatgaaggaaagcrrctgggctatatccatcgaaattttgctggaaacagattttctgatcacgtagcccttttatcagtattccaagcctgggatgatgctagaatgggtggagaagaagcagagatacgtttttgtgagcacaaaagacttaatatggctacactaagaatgacytgggaagccaaagttcagctcaaagagattttgattaattctgggtttccagaagattgtttgttgacacaagtgtttactaacactggaccagataataatttggatgttgttatctccctcctggcctttgtagccaagacatgaagtacccatctcccttctttgtatttggtgaaaagattcgaactcgagccatctctgctaaaggcatgactttagtcacccccctgcagttgcttctctttgcctccaagaaagtccaatctgatgggcagattgtgcttgtagatgactggattaaactgcaaatatctcatgaagctgctgcctgtatcactggtctccgggcagccatggaggctttggttgttgaagtaaccaaacaacctgctatcatcagccagttggaccccgtaaatgaacgtatgctgaacatgatccgtcagatctctagaccctcagctgctggtatcaaccttatgattggcagtacacggtatggagatggtccacgtcctcccaagatggcccgatacgacaatggaagcggatatagaaggggaggttctagttacagtggtggaggctatggcggtggctatagcagtggaggctatggtagcggaggctatggtggcagcgccaactcctttcgggcaggatatggtgcaggtgttggtggaggctatagaggagtttcccgaggtggctttagaggcaactctggaggagactacagagggcctagtggaggctacagaggatctgggggattccagcgaggaggtggtaggggggcctatggaactggctactttggacagggaagaggaggtggcggctattaaaacttggttatgtcagttcctgtgtgtagacagtaaggaaaaaaaggcatgctatgtgttacgtrttttttccagtatgtwtatttgccaccaaaaagtaaatgcattttcacccattctgkggttcattgtagtttaaggaaaccaagcatatagatgcattagtgattktgtwtatattatgtaaaatataacgatctcttaaaaataccacagtttgtatttttycttwaaggagtaaagatttgccttwaaataacttggtattttcctggctttcgtttaatacaatagaaaataaagtattacmccgaatacttgccgtgtagtttgtttgttgacctcgtatgttagaaaattttacaatgccagctacatctgttgattttaaatgtcagagaagttgtaccctgtttcaaaagtatactaagtgatactacttgtaatagaataaatcatcttggaattgaattgttaccttttgaagtaaatactggcaagtgcacaagccacataaacctgaataaaacttttgacctagggttgaa

SEQ ID NO: 4914 - DNA, 4508 bp, Homo sapiens
agcgccgcggtcggagccatttcgccgattcctccatgcgagttgctgtgcgtttctctgttgtctcggtagaaggccagagtcacacacggtcctaagagctgggcaccaggaagcgaaggctgatctgaagaagacacttgaatcatgggtgacgttaaaaattttctgtatgcctggtgtggcaaaaggaagatgaccccatcctatgaaattagagcagtggggaacaaaaacaggcagaaattcatgtgtgaggttcaggtggaaggttataattacactggcatgggaaattccaccaataaaaaagatgcacaaagcaatgctgccagagactttgttaactatttggttcgaataaatgaaataaagagtgaagaagttccagcttttggggtagcatctccgcccccacttactgatactcctgacactacagcaaatgctgaaggagatttaccaacaaccatgggaggacctcttcctccacatctggctctcaaagcagaaaataattctgaggtaggggcctctggctatggtgttcctgggcccacctgggaccgaggagccaacttgaaggattactactcaagaaaggaagaacaagaagtgcaagcgactctagaatcagaagaagtggatttaaatgctgggcttcatggaaactggaccttggaaaatgctaaagctcgtctaawccaatattttcagaaagaaaagatccaaggagaatataagtacacccaagtgggtcctgatcacaacaggagctttattgcagaaatgaccatttatatcaagcagctgggcagaaggatttttgcacgagaacatggatcaaataagaaattggcagcacagtcctgtgccctgtcacttgtcagacaactgtaccatcttggagtggttgaagcttactccggacttacaaagaagaaggaaggagagacagtggagccttacaaagtaaacctctctcaagatttagagcatcagctgcaaaacatcattcaagagctaaatcttgagattttgcccccgcctgaagatccttctgtgccagttgcactcaacattggcaaattggctcagttcgaaccatctcagcgacaaaaccaagtgggtgtggttccttggtcacctccacaatccaactggaatccttggactagtagcaacattgatgaggggcctctggcttttgctactccagagcaaataagcatggacctcaagaatgaattgatgtaccagttggaacaggatcatgatttgcaagcaatcttgcaggagagagagttactgcctgtgaagaaatttgaaagtgagattctggaagcaatcagccaaaattcagttgtcattattagaggggctactggatgtgggaaaaccacacaggttccccagttcattctagatgactttatccagaatgaccgagcagcagagtgtaacatcgtagtaactcagcccagaagaatcagtgcggtttctgtggcagagcgagttgcatttgaaagaggagaagagcctggaaaaagctgtggctacagcgttcgatttgagtctrtacttcctcktcctcatgccagtataatgttttgtactgtaggtgtgctcctgagaaaattagaagcaggcattcgaggaatcagtcatgtaattgtagatgaaatacatgaaagagatattaatactgacttccttttggtagtactgcgtgatgttgttcaggcttatcctgaagttcgcattgttcttatgtctgctactattgataccagcatgttttgtgaatatttcttcaattgccccatcattgaagtttatgggaggacttacccagttcaagaatattttctggaagactgcattcagatgacycactttgttcctccaccaaaagacaaaaagaagaaggataaggatgatgatggtggtgaggatgatgatgcaaattgcaacttgatctgtggtgatgaatatggtccagaaacaaggttgagcatgtctcaattgaacgaaaaggaaactccttttgaactcatcgaggctctacttaagtacattgaaacccttaatgttcctggagctgtgttggtttttttgcctggytggaatctgatttatactatgcagaagcatttggaaatgaatccacattttggaagccatcggtatcagattctacccctgcattctcagattcctcgagaggaacagcgcaaagtgtttgatccagtaccagttggagtaaccaaggttattttgtccacaaatattgctgaaacaagcattaccataaaygatgttgtttatgtcattgactcctgcaagcagaaagtgaaactcttcactgctcacaacaatatgaccaactatkctaccgtatgggcatcaaaaacaaaccttgagcaacggaaagggcgagctggccgagtacggcctggattctgctttcacctgtgcagccgagctcgttttgagagacttgaaacccacatgacaccagagatgttccgaacaccattgcatgaaattgctcttagcataaaacttctgcgtctaggaggaattggccaatttctggccaaagcaattgaacctccccctttggatgctgtgattgaagcagaacacactcttagagagcttgatgcattagatgccaatgatgagttgactcctttgggacgaatcctggctaaactccccattgagcctcgttttggcaaaatgatgataatggggtgtattttctacgtgggagatgctatctgtaccattgctgctgctacctgctttccagagcctttcrtcaatgaaggaaagcrrctgggctatatccatcgaaattttgctggaaacagattttctgatcacgtagcccttttatcagtattccaagcctgggatgatgctagaatgggtggagaagaagcagagatacgtttttgtgagcacaaaagacttaatatggctacactaagaatgacytgggaagccaaagttcagctcaaagagattttgattaattctgggtttccagaagattgtttgttgacacaagtgtttactaacactggaccagataataatttggatgttgttatctccctcctggcctttggtgtgtaccccaatgtatgctatcataaggaaaagaggaagattctcaccactgaagggcgtaatgcacttatccacaaatcatctgttaattgtccttttagtagccaagacatgaagtacccatctcccttctttgtatttggtgaaaagattcgaactcgagccatctctgctaaaggcatgactttagtcacccccctgcagttgcttctctttgcctccaagaaagtccaatctgatgggcagattgtgcttgtagatgactggattaaactgcaaatatctcatgaagctgctgcctgtatcactggtctccgggcagccatggaggctttggttgttgaagtaaccaaacaacctgctatcatcagccagttggaccccgtaaatgaacgtatgctgaacatgatccgtcagatctctagaccctcagctgctggtatcaaccttatgattggcagtacacggtatggagatggtccacgtcctcccaagatggcccgatacgacaatggaagcggatatagaaggggaggttctagttacagtggtggaggctatggcggtggctatagcagtggaggctatggtagcggaggctatggtggcagcgccaactcctttcgggcaggatatggtgcaggtgttggtggaggctatagaggagtttcccgaggtggctttagaggcaactctggaggagactacagagggcctagtggaggctacagaggatctgggggattccagcgaggaggtggtaggggggcctatggaactggctactttggacagggaagaggaggtggcggctattaaaacttggttatgtcagttcctgtgtgtagacagtaaggaaaaaaaggcatgctatgtgttacgtrttttttccagtatgtwtatttgccaccaaaaagtaaatgcattttcacccattctgkggttcattgtagtttaaggaaaccaagcatatagatgcattagtgattktgtwtatattatgtaaaatataacgatctcttaaaaataccacagtttgtatttttycttwaaggagtaaagatttgccttwaaataacttggtattttcctggctttcgtttaatacaatagaaaataaagtattacmccgaatacttgccgtgtagtttgtttgttgacctcgtatgttagaaaattttacaatgccagctacatctgttgattttaaatgtcagagaagttgtaccctgtttcaaaagtatactaagtgatactacttgtaatagaataaatcatcttggaattgaattgttaccttttgaagtaaatactggcaagtgcacaagccacataaacctgaataaaacttttgacctagggttgaa

SEQ ID NO: 4915 - DNA, 4444 bp, Homo sapiens
agcgccgcggtcggagccatttcgccgattcctccatgcgagttgctgtgcgtttctctgttgtctcggtagaaggccagagtcacacacggtcctaagagctgggcaccaggaagcgaaggctgatctgaagaagacacttgaatcatgggtgacgttaaaaattttctgtatgcctggtgtggcaaaaggaagatgaccccatcctatgaaattagagcagtggggaacaaaaacaggcagaaattcatgtgtgaggttcaggtggaaggttataattacactggcatgggaaattccaccaataaaaaagatgcacaaagcaatgctgccagagactttgttaactatttggttcgaataaatgaaataaagagtgaagaagttccagcttttggggtagcatctccgcccccacttactgatactcctgacactacagcaaatgctgaaggagatttaccaacaaccatgggaggacctcttcctccacatctggctctcaaagcagaaaataattctgaggtaggggcctctggctatggtgttcctgggcccacctgggaccgaggagccaacttgaaggattactactcaagaaaggaagaacaagaagtgcaagcgactctagaatcagaagaagtggatttaaatgctgggcttcatggaaactggaccttggaaaatgctaaagctcgtctaawccaatattttcagaaagaaaagatccaaggagaatataagtacacccaagtgggtcctgatcacaacaggagctttattgcagaaatgaccatttatatcaagcagctgggcagaaggatttttgcacgagaacatggatcaaataagaaattggcagcacagtcctgtgccctgtcacttgtcagacaactgtaccatcttggagtggttgaagcttactccggacttacaaagaagaaggaaggagagacagtggagccttacaaagtaaacctctctcaagatttagagcatcagctgcaaaacatcattcaagagctaaatcttgagattttgcccccggtaagcataaagctgtttagtkcacatttacatccttctgtgccagttgcactcaacattggcaaattggctcagttcgaaccatctcagcgacaaaaccaagtgggtgtggttccttggtcacctccacaatccaactggaatccttggactagtagcaacattgatgaggggcctctggcttttgtgagtgcaatattgtttttgagatcagagtcttgtgttttactcttgagactatatttgattagtatgtctagtgtgacttttctaatgcagatcttgcaggagagagagttactgcctgtgaagaaatttgaaagtgagattctggaagcaatcagccaaaattcagttgtcattattagaggggctactggatgtgggaaaaccacacaggttccccagttcattctagatgactttatccagaatgaccgagcagcagagtgtaacatcgtagtaactcagcccagaagaatcagtgcggtttctgtggcagagcgagttgcatttgaaagaggagaagagcctggaaaaagctgtggctacagcgttcgatttgagtctrtacttcctcktcctcatgccagtataatgttttgtactgtaggtgtgctcctgagaaaattagaagcaggcattcgaggaatcagtcatgtaattgtagatgaaatacatgaaagagatattaatactgacttccttttggtagtactgcgtgatgttgttcaggcttatcctgaagttcgcattgttcttatgtctgctactattgataccagcatgttttgtgaatatttcttcaattgccccatcattgaagtttatgggaggacttacccagttcaagaatattttctggaagactgcattcagatgacycactttgttcctccaccaaaagacaaaaagaagaaggataaggatgatgatggtggtgaggatgatgatgcaaattgcaacttgatctgtggtgatgaatatggtccagaaacaaggttgagcatgtctcaattgaacgaaaaggaaactccttttgaactcatcgaggctctacttaagtacattgaaacccttaatgttcctggagctgtgttggtttttttgcctggytggaatctgatttatactatgcagaagcatttggaaatgaatccacattttggaagccatcggtatcagattctacccctgcattctcagattcctcgagaggaacagcgcaaagtgtttgatccagtaccagttggagtaaccaaggttattttgtccacaaatattgctgaaacaagcattaccataaaygatgttgtttatgtcattgactcctgcaagcagaaagtgaaactcttcactgctcacaacaatatgaccaactatkctaccgtatgggcatcaaaaacaaaccttgagcaacggaaagggcgagctggccgagtacggcctggattctgctttcacctgtgcagccgagctcgttttgagagacttgaaacccacatgacaccagagatgttccgaacaccattgcatgaaattgctcttagcataaaacttctgcgtctaggaggaattggccaatttctggccaaagcaattgaacctccccctttggatgctgtgattgaagcagaacacactcttagagagcttgatgcattagatgccaatgatgagttgactcctttgggacgaatcctggctaaactccccattgagcctcgttttggcaaaatgatgataatggggtgtattttctacgtgggagatgctatctgtaccattgctgctgctacctgctttccagagcctttcrtcaatgaaggaaagcrrctgggctatatccatcgaaattttgctggaaacagattttctgatcacgtagcccttttatcagtattccaagcctgggatgatgctagaatgggtggagaagaagcagagatacgtttttgtgagcacaaaagacttaatatggctacactaagaatgacytgggaagccaaagttcagctcaaagagattttgattaattctgggtttccagaagattgtttgttgacacaagtgtttactaacactggaccagataataatttggatgttgttatctccctcctggcctttgtagccaagacatgaagtacccatctcccttctttgtatttggtgaaaagattcgaactcgagccatctctgctaaaggcatgactttagtcacccccctgcagttgcttctctttgcctccaagaaagtccaatctgatgggcagattgtgcttgtagatgactggattaaactgcaaatatctcatgaagctgctgcctgtatcactggtctccgggcagccatggaggctttggttgttgaagtaaccaaacaacctgctatcatcagccagttggaccccgtaaatgaacgtatgctgaacatgatccgtcagatctctagaccctcagctgctggtatcaaccttatgattggcagtacacggtatggagatggtccacgtcctcccaagatggcccgatacgacaatggaagcggatatagaaggggaggttctagttacagtggtggaggctatggcggtggctatagcagtggaggctatggtagcggaggctatggtggcagcgccaactcctttcgggcaggatatggtgcaggtgttggtggaggctatagaggagtttcccgaggtggctttagaggcaactctggaggagactacagagggcctagtggaggctacagaggatctgggggattccagcgaggaggtggtaggggggcctatggaactggctactttggacagggaagaggaggtggcggctattaaaacttggttatgtcagttcctgtgtgtagacagtaaggaaaaaaaggcatgctatgtgttacgtrttttttccagtatgtwtatttgccaccaaaaagtaaatgcattttcacccattctgkggttcattgtagtttaaggaaaccaagcatatagatgcattagtgattktgtwtatattatgtaaaatataacgatctcttaaaaataccacagtttgtatttttycttwaaggagtaaagatttgccttwaaataacttggtattttcctggctttcgtttaatacaatagaaaataaagtattacmccgaatacttgccgtgtagtttgtttgttgacctcgtatgttagaaaattttacaatgccagctacatctgttgattttaaatgtcagagaagttgtaccctgtttcaaaagtatactaagtgatactacttgtaatagaataaatcatcttggaattgaattgttaccttttgaagtaaatactggcaagtgcacaagccacataaacctgaataaaacttttgacctagggttgaa

SEQ ID NO: 4916 - DNA, 3841 bp, Homo sapiens
gaccagagagaagcgtggggaagagtgggctgagggactccactagaggctgtccatctggattccctgcctccctaggagcccaacagagcaaagcaagtgggcacaaggagtatggttctaacgtgattggggtcatgaagacgttgctgttggacttggctttgtggtcactgctcttccagcccgggtggctgtcctttagttcccaggtgagtcagaactgccacaatggcagctatgaaatcagcgtcctgatgatgggcaactcagcctttgcagagcccctgaaaaacttggaagatgcggtgaatgaggggctggaaatagtgagaggacgtctgcaaaatgctggcctaaatgtgactgtgaacgctactttcatgtattcggatggtctgattcataactcaggcgactgccggagtagcacctgtgaaggcctcgacctactcaggaaaatttcaaatgcacaacggatgggctgtgtcctcatagggccctcatgtacatactccaccttccagatgtaccttgacacagaattgagctaccccatgatctcagctggaagttttggattgtcatgtgactataaagaaaccttaaccaggctgatgtctccagctagaaagttgatgtacttcttggttaacttttggaaaaccaacgatctgcccttcaaaacttattcctggagcacttcrtatgtttacaagaatggtacagaaactgaggactgtttctggtaccttaatgctctggaggctagcgtttcctatttctcccacgaactcggctttaaggtggtgttaagacaagataaggagtttcaggatatcttaakggaccacaacaggaaaagcaatgtgattattatgtgtggtggtccagagttcctctacaagctgaagggtgaccgagcagtggckgaagacattgtcattattctagtggatcttttcaatgaccagtacttkgaggacaatgtcacagcccctgactatatgaaaaatgtccttgttctgacgctgtctcctgggaattcccttctaaatagctctttctccaggaatctatcaccaacaaaacgagactttgctcttgcctatttgaatggaatcctgctctttggacatatgctgaagatatttcttgaaaatggagaaaatattaccacccccaaatttgctcatgctttcaggaatctcacttttgaagggtatgacggtccagtgaccttggatgactggggggatgttgacagtaccatggtgcttctgtatacctctgtggacaccaagaaatacaaggttcttttgacctatgatacccacgtaaataagacctatcctgtggatatgagccccacattcacttggaagaactctaaactkcctaatgatattacaggccggggccctcagatcctgatgattgcagtcttcaccctcactggagctgtggtgctgctcctgctcgtcgctctcctgatgctcagaaaatatagaaaagattatgaacttcgtcagaaaaaatggtcccacattcctcctgaaaatatctttcctctggagaccaatgagaccaatcatgttagcctcaagatcgatgatgacaaaagacgagatacaatccagagactacgrcagtgcaaatacgacaaaaagcgagtgattctcaaagatctcaagcacaatgatggtaatttcactgaaaaacagaagatagaattgaacaagttgcttcagattgactattacaacctgaccaagttctacggcacagtgaaacttgataccatgatcttcggggtgatagaatactgtgagagaggatccctccgggaagttttaaatgacacaatttcctaccctgatggcacattcatggattgggartttaagatctctgtcttgtatgacattgctaagggaatgtcatatctgcactccagtaagacagaagtccatggtcgtctgaaatctaccaactgcgtagtggacagtagaatggtggtgaagatcactgattttggctgcaattccattttacctccaaaaaaggacctgtggacagctccagagcacctccgccaagccaacatctctcagaaaggagatgtgtacagctatgggatcatcgcacaggagatcatyctgcggaaagaaaccttctacactttgagctgtcgggaccggaatgagaagattttcagagtggaaaattccaatggaatgaaacccttccgcccagatttattcttggaaacagcagaggaaaaagagctagaagtrtacctacttgtaaaaaactgttgggaggaagatccagaaaagagaccagatttcaaaaaaattgagactacacttgccaagatatttggactttttcatgaccaaaaaaatgaaagctatatggataccttgatccgacgtctacagctatattctcgaaacctggaacatctggtagaggaaaggacacagctgtacaaggcagagagggacagggctgacagacttaactttatgttgcttccaaggctagtggtaaagtctctgaaggagaaaggctttgtggagccggaactatatgaggaagttacaatctacttcagtgacattgtaggtttcactactatctgcaaatacagcacccccatggaagtggtggacatgcttaatgacatctataagagttttgaccacattgttgatcatcatgatgtctacaaggtggaaaccatcggtgatgcgtacatggtggctagtggtttgcctaagagaaatggcaatcggcatgcaatagacattgccaagatggccttggaaatcctcagcttcatggggacctttgagctggagcatcttcctggcctcccaatatggattcgcattggagttcactctggtccctgtgctgctggagttgtgggaatcaagatgcctcgttattgtctatttggagatacggtcaacacagcctctaggatggaatccactggcctccctttgagaattcacgtgagtggctccaccatagccatcctgaagagaactgagtgccagttcctttatgaagtgagaggagaaacatacttaaagggaagaggaaatgagactacctactggctgactgggatgaaggaccagaaattcaacctgccaacccctcctactgtggagaatcaacagcgtttgcaagcagaattttcagacatgattgccaactctttacagaaaagacaggcagcagggataagaagccaaaaacccagacgggtagccagctataaaaaaggcactctggaatacttgcagctgaataccacagacaaggagagcacctatttttaaacctaaatgaggtataaggactcacacaaattaaaatacagctgcactgaggcagcgacctcaagtgtcctgaaagcttacattttcctgagacctcaatgaagcagaaatgtacttaggcttggctgccctgtctggaacatggactttcttgcatgaatcagatgtgtgttctcagtgaaataactaccttccactctggaaccttattccagcagttgttccagggagcttctacctggaaaagaaaagaaatgaatagactatctagaacttgagaagattttattcttatttcatttattttttgtttgtttatttttatcgtttttgtttactggctttccttctgtattcataagattttttaaattgtcataattatattttaaatacccatcttcattaaagtatatttaactcataatttttgcagaaaatatgctatatattaggcaagaataaaagctaaaggtttccca

SEQ ID NO: 4917 - DNA, 2093 bp, Homo sapiens
tgggattacaggtatgagccaccacgcccggcctgtgctttrgttctttacatgaaactccctttctaccttgtgttgcctggcaaaatcttacttacccagractctgctccggcatcctccgcaggaagaacactttcattgaaccctagcattgtccctaatacccttaatatgtattgtcatagcaccctrtgaatttttctatatcactttccatcttatatttaaataatctttttacttgcccatctctcccmctgataatctaagctggcagaggctggatcagatcataattatctttctattcttagcrctaggatcaatgcctggcatagcatatttacattttttatttaaataaactgacctgactttcttctggttggwtawgttctgagtccctattactaaccttggtcttttatctcagaagttgaaggctcccctggagccagctgcaaagttcccaaagccctaacaaccccacagccaatcagctacagagtaggctgccctgagtcggcctccccaacacaaagtccagggttggagcaggagcaggagagggacaatggaagctgccccgtccaggttcatgttcctcttatttctcctcacgtgtgagctggctgcagaagttgctgcagaagttgagaaatcctcagatggtcctggtrctgcccaggaacccacgtggctcacagatgtcccagctgccatggaaytcattgctgccactgaggtggctgtcataggcttcttccaggatttagaaataccagcagtgcccatactccatagcatggtgcaaaaattcccaggcgtgtcatttgggatcagcactgattctgaggttctgacacactacaacatcactgggaacaccatctgcctctttcgcctggtagacaatgaacaactgaatttagaggacraagacattgaaagcattgatgccaccaaattgagccgtttcattgagatcaacagcctccacatggtgacagagtacaaccctgtgactgtgattgggttattcaacagcgtaattcagattcatctcctcctgataatgaacaaggcctccccwgagtatgaagagaacatgcacagataccagaaggcagccaagctcttccaggggaagattctctttattctggtggacagtggtatgaaagaaaatgggaaggtgatatcatttttcaaactaaaggagtctcaactgccagctttggcaatttaccagactctagatgacgagtgggatacactgcccacagcagaagtttccgtagagcatgtgcaaaacttttgtgatggattcctaagtggaaaattgttgaaagaaaatcgtgaatcagaaggaaagactccaaaggtggaactctgacttctccttggaactacatatggccaagtatctactttatgcaaagtaaaaaggcacaactcaaatctcagagacactaaacaacaggatcactaggcctgccaaccacacacacacgcacgtgcacacacgcacgcacgcgtgcacacacacacgsrcacacacacacacacacagagcttcatttcctgtcttaaaatctcgttttctcttcttccttcttttaaatttcatatcctcactccctatccaatttccttcttatcgtgcattcatactctgtaagcccatctgtaacacacctagatcaaggctttaagagactcactgtgatgcctctatgaaagagaggcattcctagagaaagattgttccaatttgtcatttaatatcaagtttgtatactgcacatgacttacacacaacatagttcctgctcttttaaggttacctaagggttgaaactctaccttctttcataagcacatgtccgtctctgactcaggatcaaaaaccaaaggatggttttaaacacctttgtgaaattgtctttttgccagaagttaaaggctgtctccaagtccctgaactcagcagaaatagaccatgtgaaaactccatgcttggttagcatctccaactccctatgtaaatcaacaacctgcataataaataaaaggcaatcatgttatag

SEQ ID NO: 4918 - DNA, 2214 bp, Homo sapiens
agggggcggcggcgacagcggcggccgcaagggacgcgtccggggcccgcgctcagggggagcggtagcggcttggcagctgctccccgcgcccccgcggcctagccaggggagggggcgcagcgccggggccatggatccgcgtcaggccgctgcttcccgccggcgggcccggggcggggcggacccgtccccgtccccgtccccgtccccgtccccgtccccatccccacgtcccatcccccacgcagccttcgccctccctgctccttcccgcgccgtcttcccttcccgcgttccccgggagaaacatggccgggagcagcgaggaggcgccagactacgggcgaggcgtcgtgattatggatgattggccagggtatgacttgaatttattcacgtacccacagcactattatggagacttggagtatgtcctcatccctcatggtatcattgtggacagaattgagcggctggccaaggatattatgaaagacataggatatagtgacatcatggtcctgtgtgtgcttaaaggaggttacaaattctgtgctgatctcgtagaacaccttaagaacatcagccgaaattcagatcgatttgtctcaatgaaggttgatttcatcagactaaaaagttacaggtccatgggtgagatgcagataatcggaggcgatgatctttcaacgctggctggaaagaatgttctcattgttgaggatgttgtcggaactgggaggaccatgaaagcactactcagcaatatagagaaatacaagcccaacatgattaaggtagccagtttgttggtgaagagaacatccagaagtgacggctttagacctgactatgctggatttgagattccaaacttatttgtggtgggatatgccttagattacaatgaatacttcagagatctgaatcacatatgygtcatcaatgagcacggtaaagaaaaatatcgagtctaaagacatgaattctcaccactaaagtcccagatagcatcatatttacgcctgtacttgggaagccagctrtcaagtttgtccccccaggcatcttcactcagcaggatataaaagaaaaaaatgttcaaatgagagagctttcttttctgaggttaatataaagagtatcaaaggttcctaaggaaaagaaagcagtgcttttatttgacttgttccaaattaaacactccgccttgtgactcagcaatgctatctaccttcacactcctgagctccgccttcctttgttttgatacagtcattatatttgattagtattcccaggaatacccccacctagttactcaaatatttttcacttaactttttatactcttattttggtaataagcttacaatattaagaagctggggacttttttttaactgaagacttgagtcccctataccgggaatgcagctattaatagattcccatattttaaaaggagggaaaggacaatttaatataaatttctgtttgtgcatttctgacaggccattattatctgctttgacaaagcctttctgaaacgcagtgtacaatgaatcttaatgatgttatgaaacgagctttgctcggggctcttgattggagcttccggtatgtgatgacggtatgtcatgtatgcatggatgtactcaactgtgtttaatactctgaattttaattagaaaaaaatacaatagcagcaaggccctggtttctaagctgtatccttttattcatgtgggacatgagcaaatggcagaattaggggcgagtgctttcaatgctcgaaactaagcaagtataawtttttcctcttatttgcatgaaaggacaagacactgttatgccctgtcctaaatgtgaagacagaggttgaattttttaaaaaatatctttaaaagactgatcacaaaatccaaggtgctacaggaaacaagcacactcaagaaagtttttttctgaataacakttttttccaatttctccgttttataagacatttcctaatttatggggattttaattgaaaataaacttgagtcccaatagagctgtttttttctcacttcctacaaaatgcaaatgcaaaataaataactaagcagcttttgtttggttctgaaccgtatgtggcgtattgttattaggttctagcttcctttaaactaataaagaataagaaaacttgttatgttttatcac

SEQ ID NO: 4919 - DNA, 2223 bp, Homo sapiens
agggggcggcggcgacagcggcggccgcaagggacgcgtccggggcccgcgctcagggggagcggtagcggcttggcagctgctccccgcgcccccgcggcctagccaggggagggggcgcagcgccggggccatggatccgcgtcaggccgctgcttcccgccggcgggcccggggcggggcggacccgtccccgtccccgtccccgtccccgtccccgtccccatccccacgtcccatcccccacgcagccttcgccctccctgctccttcccgcgccgtcttcccttcccgcgttccccgggagaaacatggccgggagcagcgaggaggcgccagactacgggcgaggcgtcgtgattatggatgattggccagggtatgacttgaatttattcacgtacccacagcactattatggagacttggagtatgtcctcatccctcatggtatcattgtggacagaattgagcggctggccaaggatattatgaaagacataggatatagtgacatcatggtcctgtgtgtgcttaaaggaggttacaaattctgtgctgatctcgtagaacaccttaagaacatcagccgaaattcagatcgatttgtctcaatgaaggttgatttcatcagactaaaaagttacaggaatgaccagtccatgggtgagatgcagataatcggaggcgatgatctttcaacgctggctggaaagaatgttctcattgttgaggatgttgtcggaactgggaggaccatgaaagcactactcagcaatatagagaaatacaagcccaacatgattaaggtagccagtttgttggtgaagagaacatccagaagtgacggctttagacctgactatgctggatttgagattccaaacttatttgtggtgggatatgccttagattacaatgaatacttcagagatctgaatcacatatgygtcatcaatgagcacggtaaagaaaaatatcgagtctaaagacatgaattctcaccactaaagtcccagatagcatcatatttacgcctgtacttgggaagccagctrtcaagtttgtccccccaggcatcttcactcagcaggatataaaagaaaaaaatgttcaaatgagagagctttcttttctgaggttaatataaagagtatcaaaggttcctaaggaaaagaaagcagtgcttttatttgacttgttccaaattaaacactccgccttgtgactcagcaatgctatctaccttcacactcctgagctccgccttcctttgttttgatacagtcattatatttgattagtattcccaggaatacccccacctagttactcaaatatttttcacttaactttttatactcttattttggtaataagcttacaatattaagaagctggggacttttttttaactgaagacttgagtcccctataccgggaatgcagctattaatagattcccatattttaaaaggagggaaaggacaatttaatataaatttctgtttgtgcatttctgacaggccattattatctgctttgacaaagcctttctgaaacgcagtgtacaatgaatcttaatgatgttatgaaacgagctttgctcggggctcttgattggagcttccggtatgtgatgacggtatgtcatgtatgcatggatgtactcaactgtgtttaatactctgaattttaattagaaaaaaatacaatagcagcaaggccctggtttctaagctgtatccttttattcatgtgggacatgagcaaatggcagaattaggggcgagtgctttcaatgctcgaaactaagcaagtataawtttttcctcttatttgcatgaaaggacaagacactgttatgccctgtcctaaatgtgaagacagaggttgaattttttaaaaaatatctttaaaagactgatcacaaaatccaaggtgctacaggaaacaagcacactcaagaaagtttttttctgaataacakttttttccaatttctccgttttataagacatttcctaatttatggggattttaattgaaaataaacttgagtcccaatagagctgtttttttctcacttcctacaaaatgcaaatgcaaaataaataactaagcagcttttgtttggttctgaaccgtatgtggcgtattgttattaggttctagcttcctttaaactaataaagaataagaaaacttgttatgttttatcac

SEQ ID NO: 4920 - DNA, 7433 bp, Homo sapiens
gttacctagggtatgaattaatacagacttggaaactctgaaagaacttagaatcagcattttgagagcagaagcttgggcatgctgtgattttccaataaactgctatcacaatgtcaaaatgcagttcagacaagagcaacacagagatctcaaacattaaaacgtaagctgtgctagaacaaaaatgcaatgaaagaaacactggatgaatgaaaagccmtgctttgcaacccctcagcatggcaggcctgcagctcatgacccctgcttcctcaccaatgggtcctttctktggactgccatggcaacaagaagcaattcatgataacatttatacgccaagaaaatatcaggttgaactgcttgaagcagctctggatcataataccatcgtctgtttaaacactggctcagggaagacatttattgcagtactactcactaaagagctgtcctatcagatcaggggagacttcagcagaaatggaaaaaggacggtgttcttggtcaactctgcaaaccaggttgctcaacaagtgtcagctgtcagaactcattcagatctcaaggttggggaatactcaaacctagaagtaaatgcatcttggacaaaagagagatggaaccaagagtttactaagcaccaggttctcattatgacttgctatgtcgccttgaatgttttgaaaaatggttacttatcactgtcagacattaaccttttggtgtttgatgagtgtcatcttgcaatcctagaccacccctatcgagaaattatgaagctctgtgaaaattgtccatcatgtcctcgcattttgggactaactgcttccattttaaatgggaaatgtgatccagaggaattggaagaaaagattcagaaactagagaaaattcttaagagtaatgctgaaactgcaactgacctggtggtcttagacaggtatacttctcagccatgtgagattgtggtggattgtggaccatttactgacagaagtgggctttatgaaagactgctgatggaattagaagaagcacttaattttatcaatgattgtaatatatctgtacattcaaaagaaagagattctactttaatttcgaaacagatactatcagactgtcgtgccgtattggtagttctgggaccctggtgtgcagataaagtagctggaatgatggtaagagaactacagaaatacatcaaacatgagcaagaggagctgcacaggaaatttttattgtttacagacactttcctaaggaaaatacatgcactatgtgaagagcacttctcacctgcctcacttgacctgaaatttgtaactcctaaagtaatcaaactgctcgaaatcttacgcaaatataaaccatatgagcgacagcagtttgaaagcgttgagtggtataataatagaaatcaggataattatgtgtcatggagtgattctgaggatgatgatgaggatgaagaaattgaagaaaaagagaagccagagacaaattttccttctccttttaccaacattttgtgcggaattatttttgtggaaagaagatacacagcagttgtcttaaacagattgataaaggaagctggcaaacaagatccagagctggcttatatcagtagcaatttcataactggacatggcattgggaagaatcagcctcgcaacaaacagatggaagcagaattcasaaaacaggaagaggtacttaggaaatttcgagcacatgagaccaacctgcttattgcaacaagtattgtagaagagggtgttgatataccaaaatgcaacttggtggttcgttttgatttgcccacagaatatcgatcctatgttcaatctaaaggaagagcaagggcacccatctctaattatataatgttagcggatacagacaaaataaaaagttttgaagaagaccttaaaacctacaaagctattgaaaagatcttgagaaacaagtgttccaagtcggttgatactggtgagactgacattgatcctgtcatggatgatgatgacgttttcccaccatatgtgttgaggcctgacgatggtggtccacgagtcacaatcaacacggccattggacacatcaatagatactgtgctagattaccaagtgatccgtttactcatctagctcctaaatgcagaacccgagagttgcctgatggtacattttattcaactctttatctgccaattaactcwcctcttcgagcctccattgttggtccaccaatgagctgtgtacgattggctgaaagagttgtagctctcatttgctgtgagaaactgcacaaaattggcgaactggatgaccatttgatgccagttgggaaagagactgttaaatatgaagaggagcttgatttgcatgatgaagaagagaccagtgttccaggaagaccaggttccacgaaacgaaggcagtgctacccaaaagcaattccagagtgtttgagggatagttatcccagacctgatcagccctgttacctgtatgtgataggaatggttttaactacacctttacctgatgaactcaactttagaaggcggaagctctatcctcctgaagataccacaagatgctttggaatactgacggccaaacccatacctcagattccacactttcctgtgtacacacgctctggagaggttaccatatccattgagttgaagaagtctggtttcatgttgtctctacaaatgcttgagttgattacaagacttcaccagtatrtattctcacatattcttcggcttgaaaaacctgcactagaatttaaacctacagacgctgattcagcatactgtgttctacctcttaatgttgrtaatgactccagcactttggatattgactttaaattcatggaagatattgagaagtctgaagctcgcataggcattcccagtacaaagtatacaaaagaaacaccctttgtttttaaattagaagattaccaagatgccgttatcattccaagatatcgcaattttgatcagcctcatcgattttatgtagctgatgtgtacactgatcttaccccactcagtaaatttccttcccctgagtatgaaacttttgcagaatattataaaacaaagtacaaccttgacctaaccaatctcaaccagccactgctggatgtggaccacacatcttcaagacttaatctkttgacacctcgacatttgaatcagaaggggaaagcrcttcctttaagcagtgctgagaagaggaaagccaaatgggaaagtctgcagaataaacagatactggttccagaactctgtgctatacatccaattccagcatcactgtggagaaaagctgtttgtctccccagcatactttatcgccttcactgccttttgactgcagaggagctaagagcccagactgccagcgatgctggcgtgggagtcagatcacttcctgcggattttagataccctaacttagacttcgggtggaaaaaatctattgacagcaaatctttcatctcaatttctaactcctcttcagctgaaaatgataattactgtaagcacagcacaattgtccctgaaaatgctgcacatcaaggtgctaatagaacctcctctctagaaaatcatgaccaaatgtctgtgaactgcagaacgttgctcagcgagtcccctggtaagctccacgttgaagtttcagcagatcttacagcaattaatggtctttcttacaatcaaaatctcgccaatggcagttatgatttagctaacagagacttttgccaaggaaatcagctaaattactacaagcaggaaatacccgtgcaaccaactacctcatattccattcagaatttatacagttacgagaaccagccccagcccagcgatgaatgtactctcctgagtaataaataccttgatggaaatgctaacaaatctacctcagatggaagtcctgtgatggccgtaatgcctggtacgacagacactattcaagtgctcaagggcaggatggattctgagcagagcccttctattgggtactcctcaaggactcttggccccaatcctggacttattcttcaggctttgactctgtcaaacgctagtgatggatttaacctggagcggcttgaaatgcttggcgactcctttttaaagcatgccatcaccacatatctattttgcacttaccctgatgcgcatgagggccgcctttcatatatgagaagcaaaaaggtcagcaactgtaatctgtatcgccttggaaaaaagaagggactacccagccgcatggtggtgtcaatatttgatccccctgtgaattggcttcctcctggttatgtagtaaatcaagacaaaagcaacacagataaatgggaaaaagatgaaatgacaaaagactgcatgctggcgaatggcaaactggatgaggattacgaggaggaggatgaggaggaggagagcctgatgtggagggctccgaaggaagaggctgactatgaagatgatttcctggagtatgatcaggaacatatcagatttatagataatatgttaatggggtcaggagcttttgtaaagaaaatctctctttctcctttttcaaccactgattctgcatatgaatggaaaatgcccaaaaaatcctccttaggtagtatgccattttcatcagattttgaggattttgactacagctcttgggatgcaatgtgctatctggatcctagcaaagctgttgaagaagatgactttgtggtggggttctggaatccatcagaagaaaactgtggtgttgacacgggaaagcagtccatttcttacgacttgcacactgagcagtgtattgctgacaaaagcatagcrgactgtgtggaagccctgctgggctgctatttaaccagctgtggggagagggctgctcagcttttcctctgttcactggggctgaaggtgctcccggtaattaaaaggactgatcgggaaaaggccctgtgccctactcgggagaatttcaacagccaacaaaagaacctttcagtgagctgtgctgctgcttctgtggccagttcacgctcttctgtattgaaagactcggaatatggttgtttgaagattccaccaagatgtatgtttgatcatccagatgcagataaaacactgaatcaccttatatcggggtttgaaaattttgaaaagaaaatcaactacagattcaagaataaggcttaccttctccaggcttttacacatgcctcctaccactacaatactatcactgattgttaccagcgcttagaattcctgggagatgcgattttggactacctcataaccaagcacctttatgaagacccgcggcagcactccccgggggtcctgacagacctgcggtctgccctggtcaacaacaccatctttgcatcgctggctgtaaagtacgactaccacaagtacttcaaagctgtctctcctgagctcttccatgtcattgatgactttgtgcagtttcagcttgagaagaatgaaatgcaaggaatggattctgagcttaggagatctgaggaggatgaagagaaagaagaggatattgaagttccaaaggccatgggggatatttttgagtcgcttgctggtgccatttacatggatagtgggatgtcactggagacagtctggcaggtgtactatcccatgatgcggccactaatagaaaagttttctgcaaatgtaccccgttcccctgtgcgagaattgcttgaaatggaaccagaaactgccaaatttagcccggctgagagaacttacgacgggaaggtcagagtcactgtggaagtagtaggaaaggggaaatttaaaggtgttggtcgaagttacaggattgccaaatctgcagcagcaagaagagccctccgaagcctcaaagctaatcaacctcaggttcccaatagctgaaaccgctttttaaaattcaaaacaagaaacaaaacaaaaaaaattaaggggaaaattatttaaatcggaaaggaagacttaaagttgwtagtgagtggaatgaattgaaggcagaatttaaagtttggttgataacaggatagataacagaataaaacatttaacatatgtataaaattttggaactaattgtagttttagttttttgcgcaaacacaatcttatcttctttcctcacttctgctttgtttaaatcacaagagtgctttaatgatgacatttagcaagtgctcaaaataattgacaggttttgttttttttttttgagtttatgtcagctttgcttagtgttagaaggccatggagcttaaacctccagcagtccctaggatgatgtagattcttctccatctctccgtgtgtgcagtagtgccagtcctgcagtagttrataagctgaataraaagataaggttttcgagaggagaagtgcgccaatgttgtcttttctttccacgttatactgtgtaaggtgatgttcccggtcgctgttgcacctgatagtaagggacagatttttaatgaacattggctggcatgttggtgaatcacattttagttttctgatgccacatagtcttgcataaaaaagggttcttgccttaaaagtgaaaccttcatggatagtctttaatctctgatctttttggaacaaactgttttacattcctttcattttattatgcattagacgttgagacagcgtgatacttacaactcactagtatagttgtaacttattacaggatcatactaaaatttctgtcatatgtatactgaagacattttaaaaaccagaatatgtagtctacggatattttttatcataaaaatgatctttggctaaacaccccattttactaaagtcctcctgccaggtagttcccactgatggaaatgtttatggcaaataattttgccttctaggctgttgctctaacaaaataaaccttagacatatcacacctaaaatatgctgcagattttataattgattggttacttatttaagaagcaaaacacagcacctttacccttagtctcctcacataaatttcttactatacttttcataatgttgcatgcatatttcacctaccaaagctgtgctgttaatgccgtgaaagtttaacgtttgcgataaactgccgtaattttgatacatctgtgatttaggtcattaatttagataaactagctcattatttccatctttggaaaaggaaaaaaaaaaaaacttctttaggcatttgcctaagtttctttaattagacttgtaggcactcttcacttaaatacctcagttcttcttttcttttgcatgcatttttcccctgtttggtgctatgtttatgtattatgcttgaaattttaatttttttttttttgcact

SEQ ID NO: 4921 - DNA, 7498 bp, Homo sapiens
gtgggtgtttgttatttccccaaatgcggaggcccctgcaccactaacgcgaggaaacgcaggttacctagggtatgaattaatacagacttggaaactctgaaagaacttagaatcagcattttgagagcagaagcttgggcatgctgtgattttccaataaactgctatcacaatgtcaaaatgcagttcagacaagagcaacacagagatctcaaacattaaaacgtaagctgtgctagaacaaaaatgcaatgaaagaaacactggatgaatgaaaagccmtgctttgcaacccctcagcatggcaggcctgcagctcatgacccctgcttcctcaccaatgggtcctttctktggactgccatggcaacaagaagcaattcatgataacatttatacgccaagaaaatatcaggttgaactgcttgaagcagctctggatcataataccatcgtctgtttaaacactggctcagggaagacatttattgcagtactactcactaaagagctgtcctatcagatcaggggagacttcagcagaaatggaaaaaggacggtgttcttggtcaactctgcaaaccaggttgctcaacaagtgtcagctgtcagaactcattcagatctcaaggttggggaatactcaaacctagaagtaaatgcatcttggacaaaagagagatggaaccaagagtttactaagcaccaggttctcattatgacttgctatgtcgccttgaatgttttgaaaaatggttacttatcactgtcagacattaaccttttggtgtttgatgagtgtcatcttgcaatcctagaccacccctatcgagaaattatgaagctctgtgaaaattgtccatcatgtcctcgcattttgggactaactgcttccattttaaatgggaaatgtgatccagaggaattggaagaaaagattcagaaactagagaaaattcttaagagtaatgctgaaactgcaactgacctggtggtcttagacaggtatacttctcagccatgtgagattgtggtggattgtggaccatttactgacagaagtgggctttatgaaagactgctgatggaattagaagaagcacttaattttatcaatgattgtaatatatctgtacattcaaaagaaagagattctactttaatttcgaaacagatactatcagactgtcgtgccgtattggtagttctgggaccctggtgtgcagataaagtagctggaatgatggtaagagaactacagaaatacatcaaacatgagcaagaggagctgcacaggaaatttttattgtttacagacactttcctaaggaaaatacatgcactatgtgaagagcacttctcacctgcctcacttgacctgaaatttgtaactcctaaagtaatcaaactgctcgaaatcttacgcaaatataaaccatatgagcgacagcagtttgaaagcgttgagtggtataataatagaaatcaggataattatgtgtcatggagtgattctgaggatgatgatgaggatgaagaaattgaagaaaaagagaagccagagacaaattttccttctccttttaccaacattttgtgcggaattatttttgtggaaagaagatacacagcagttgtcttaaacagattgataaaggaagctggcaaacaagatccagagctggcttatatcagtagcaatttcataactggacatggcattgggaagaatcagcctcgcaacaaacagatggaagcagaattcasaaaacaggaagaggtacttaggaaatttcgagcacatgagaccaacctgcttattgcaacaagtattgtagaagagggtgttgatataccaaaatgcaacttggtggttcgttttgatttgcccacagaatatcgatcctatgttcaatctaaaggaagagcaagggcacccatctctaattatataatgttagcggatacagacaaaataaaaagttttgaagaagaccttaaaacctacaaagctattgaaaagatcttgagaaacaagtgttccaagtcggttgatactggtgagactgacattgatcctgtcatggatgatgatgacgttttcccaccatatgtgttgaggcctgacgatggtggtccacgagtcacaatcaacacggccattggacacatcaatagatactgtgctagattaccaagtgatccgtttactcatctagctcctaaatgcagaacccgagagttgcctgatggtacattttattcaactctttatctgccaattaactcwcctcttcgagcctccattgttggtccaccaatgagctgtgtacgattggctgaaagagttgtagctctcatttgctgtgagaaactgcacaaaattggcgaactggatgaccatttgatgccagttgggaaagagactgttaaatatgaagaggagcttgatttgcatgatgaagaagagaccagtgttccaggaagaccaggttccacgaaacgaaggcagtgctacccaaaagcagttagtattgagtgtttgagggatagttatcccagacctgatcagccctgttacctgtatgtgataggaatggttttaactacacctttacctgatgaactcaactttagaaggcggaagctctatcctcctgaagataccacaagatgctttggaatactgacggccaaacccatacctcagattccacactttcctgtgtacacacgctctggagaggttaccatatccattgagttgaagaagtctggtttcatgttgtctctacaaatgcttgagttgattacaagacttcaccagtatrtattctcacatattcttcggcttgaaaaacctgcactagaatttaaacctacagacgctgattcagcatactgtgttctacctcttaatgttgrtaatgactccagcactttggatattgactttaaattcatggaagatattgagaagtctgaagctcgcataggcattcccagtacaaagtatacaaaagaaacaccctttgtttttaaattagaagattaccaagatgccgttatcattccaagatatcgcaattttgatcagcctcatcgattttatgtagctgatgtgtacactgatcttaccccactcagtaaatttccttcccctgagtatgaaacttttgcagaatattataaaacaaagtacaaccttgacctaaccaatctcaaccagccactgctggatgtggaccacacatcttcaagacttaatctkttgacacctcgacatttgaatcagaaggggaaagcrcttcctttaagcagtgctgagaagaggaaagccaaatgggaaagtctgcagaataaacagatactggttccagaactctgtgctatacatccaattccagcatcactgtggagaaaagctgtttgtctccccagcatactttatcgccttcactgccttttgactgcagaggagctaagagcccagactgccagcgatgctggcgtgggagtcagatcacttcctgcggattttagataccctaacttagacttcgggtggaaaaaatctattgacagcaaatctttcatctcaatttctaactcctcttcagctgaaaatgataattactgtaagcacagcacaattgtccctgaaaatgctgcacatcaaggtgctaatagaacctcctctctagaaaatcatgaccaaatgtctgtgaactgcagaacgttgctcagcgagtcccctggtaagctccacgttgaagtttcagcagatcttacagcaattaatggtctttcttacaatcaaaatctcgccaatggcagttatgatttagctaacagagacttttgccaaggaaatcagctaaattactacaagcaggaaatacccgtgcaaccaactacctcatattccattcagaatttatacagttacgagaaccagccccagcccagcgatgaatgtactctcctgagtaataaataccttgatggaaatgctaacaaatctacctcagatggaagtcctgtgatggccgtaatgcctggtacgacagacactattcaagtgctcaagggcaggatggattctgagcagagcccttctattgggtactcctcaaggactcttggccccaatcctggacttattcttcaggctttgactctgtcaaacgctagtgatggatttaacctggagcggcttgaaatgcttggcgactcctttttaaagcatgccatcaccacatatctattttgcacttaccctgatgcgcatgagggccgcctttcatatatgagaagcaaaaaggtcagcaactgtaatctgtatcgccttggaaaaaagaagggactacccagccgcatggtggtgtcaatatttgatccccctgtgaattggcttcctcctggttatgtagtaaatcaagacaaaagcaacacagataaatgggaaaaagatgaaatgacaaaagactgcatgctggcgaatggcaaactggatgaggattacgaggaggaggatgaggaggaggagagcctgatgtggagggctccgaaggaagaggctgactatgaagatgatttcctggagtatgatcaggaacatatcagatttatagataatatgttaatggggtcaggagcttttgtaaagaaaatctctctttctcctttttcaaccactgattctgcatatgaatggaaaatgcccaaaaaatcctccttaggtagtatgccattttcatcagattttgaggattttgactacagctcttgggatgcaatgtgctatctggatcctagcaaagctgttgaagaagatgactttgtggtggggttctggaatccatcagaagaaaactgtggtgttgacacgggaaagcagtccatttcttacgacttgcacactgagcagtgtattgctgacaaaagcatagcrgactgtgtggaagccctgctgggctgctatttaaccagctgtggggagagggctgctcagcttttcctctgttcactggggctgaaggtgctcccggtaattaaaaggactgatcgggaaaaggccctgtgccctactcgggagaatttcaacagccaacaaaagaacctttcagtgagctgtgctgctgcttctgtggccagttcacgctcttctgtattgaaagactcggaatatggttgtttgaagattccaccaagatgtatgtttgatcatccagatgcagataaaacactgaatcaccttatatcggggtttgaaaattttgaaaagaaaatcaactacagattcaagaataaggcttaccttctccaggcttttacacatgcctcctaccactacaatactatcactgattgttaccagcgcttagaattcctgggagatgcgattttggactacctcataaccaagcacctttatgaagacccgcggcagcactccccgggggtcctgacagacctgcggtctgccctggtcaacaacaccatctttgcatcgctggctgtaaagtacgactaccacaagtacttcaaagctgtctctcctgagctcttccatgtcattgatgactttgtgcagtttcagcttgagaagaatgaaatgcaaggaatggattctgagcttaggagatctgaggaggatgaagagaaagaagaggatattgaagttccaaaggccatgggggatatttttgagtcgcttgctggtgccatttacatggatagtgggatgtcactggagacagtctggcaggtgtactatcccatgatgcggccactaatagaaaagttttctgcaaatgtaccccgttcccctgtgcgagaattgcttgaaatggaaccagaaactgccaaatttagcccggctgagagaacttacgacgggaaggtcagagtcactgtggaagtagtaggaaaggggaaatttaaaggtgttggtcgaagttacaggattgccaaatctgcagcagcaagaagagccctccgaagcctcaaagctaatcaacctcaggttcccaatagctgaaaccgctttttaaaattcaaaacaagaaacaaaacaaaaaaaattaaggggaaaattatttaaatcggaaaggaagacttaaagttgwtagtgagtggaatgaattgaaggcagaatttaaagtttggttgataacaggatagataacagaataaaacatttaacatatgtataaaattttggaactaattgtagttttagttttttgcgcaaacacaatcttatcttctttcctcacttctgctttgtttaaatcacaagagtgctttaatgatgacatttagcaagtgctcaaaataattgacaggttttgttttttttttttgagtttatgtcagctttgcttagtgttagaaggccatggagcttaaacctccagcagtccctaggatgatgtagattcttctccatctctccgtgtgtgcagtagtgccagtcctgcagtagttrataagctgaataraaagataaggttttcgagaggagaagtgcgccaatgttgtcttttctttccacgttatactgtgtaaggtgatgttcccggtcgctgttgcacctgatagtaagggacagatttttaatgaacattggctggcatgttggtgaatcacattttagttttctgatgccacatagtcttgcataaaaaagggttcttgccttaaaagtgaaaccttcatggatagtctttaatctctgatctttttggaacaaactgttttacattcctttcattttattatgcattagacgttgagacagcgtgatacttacaactcactagtatagttgtaacttattacaggatcatactaaaatttctgtcatatgtatactgaagacattttaaaaaccagaatatgtagtctacggatattttttatcataaaaatgatctttggctaaacaccccattttactaaagtcctcctgccaggtagttcccactgatggaaatgtttatggcaaataattttgccttctaggctgttgctctaacaaaataaaccttagacatatcacacctaaaatatgctgcagattttataattgattggttacttatttaagaagcaaaacacagcacctttacccttagtctcctcacataaatttcttactatacttttcataatgttgcatgcatatttcacctaccaaagctgtgctgttaatgccgtgaaagtttaacgtttgcgataaactgccgtaattttgatacatctgtgatttaggtcattaatttagataaactagctcattatttccatctttggaaaaggaaaaaaaaaaaaacttctttaggcatttgcctaagtttctttaattagacttgtaggcactcttcacttaaatacctcagttcttcttttcttttgcatgcatttttcccctgtttggtgctatgtttatgtattatgcttgaaattttaatttttttttttttgcact

SEQ ID NO: 4922 - DNA, 7495 bp, Homo sapiens
gtgggtgtttgttatttccccaaatgcggaggcccctgcaccactaacgcgaggaaacgcaggttacctagggtatgaattaatacagacttggaaactctgaaagaacttagaatcagcattttgagagcagaagcttgggcatgctgtgattttccaataaactgctatcacaatgtcaaaatgcagttcagacaagagcaacacagagatctcaaacattaaaacgtaagctgtgctagaacaaaaatgcaatgaaagaaacactggatgaatgaaaagccmtgctttgcaacccctcagcatggcaggcctgcagctcatgacccctgcttcctcaccaatgggtcctttctktggactgccatggcaacaagaagcaattcatgataacatttatacgccaagaaaatatcaggttgaactgcttgaagcagctctggatcataataccatcgtctgtttaaacactggctcagggaagacatttattgcagtactactcactaaagagctgtcctatcagatcaggggagacttcagcagaaatggaaaaaggacggtgttcttggtcaactctgcaaaccaggttgctcaacaagtgtcagctgtcagaactcattcagatctcaaggttggggaatactcaaacctagaagtaaatgcatcttggacaaaagagagatggaaccaagagtttactaagcaccaggttctcattatgacttgctatgtcgccttgaatgttttgaaaaatggttacttatcactgtcagacattaaccttttggtgtttgatgagtgtcatcttgcaatcctagaccacccctatcgagaaattatgaagctctgtgaaaattgtccatcatgtcctcgcattttgggactaactgcttccattttaaatgggaaatgtgatccagaggaattggaagaaaagattcagaaactagagaaaattcttaagagtaatgctgaaactgcaactgacctggtggtcttagacaggtatacttctcagccatgtgagattgtggtggattgtggaccatttactgacagaagtgggctttatgaaagactgctgatggaattagaagaagcacttaattttatcaatgattgtaatatatctgtacattcaaaagaaagagattctactttaatttcgaaacagatactatcagactgtcgtgccgtattggtagttctgggaccctggtgtgcagataaagtagctggaatgatggtaagagaactacagaaatacatcaaacatgagcaagaggagctgcacaggaaatttttattgtttacagacactttcctaaggaaaatacatgcactatgtgaagagcacttctcacctgcctcacttgacctgaaatttgtaactcctaaagtaatcaaactgctcgaaatcttacgcaaatataaaccatatgagcgacagcagtttgaaagcgttgagtggtataataatagaaatcaggataattatgtgtcatggagtgattctgaggatgatgatgaggatgaagaaattgaagaaaaagagaagccagagacaaattttccttctccttttaccaacattttgtgcggaattatttttgtggaaagaagatacacagcagttgtcttaaacagattgataaaggaagctggcaaacaagatccagagctggcttatatcagtagcaatttcataactggacatggcattgggaagaatcagcctcgcaacaaacagatggaagcagaattcasaaaacaggaagaggtacttaggaaatttcgagcacatgagaccaacctgcttattgcaacaagtattgtagaagagggtgttgatataccaaaatgcaacttggtggttcgttttgatttgcccacagaatatcgatcctatgttcaatctaaaggaagagcaagggcacccatctctaattatataatgttagcggatacagacaaaataaaaagttttgaagaagaccttaaaacctacaaagctattgaaaagatcttgagaaacaagtgttccaagtcggttgatactggtgagactgacattgatcctgtcatggatgatgatgacgttttcccaccatatgtgttgaggcctgacgatggtggtccacgagtcacaatcaacacggccattggacacatcaatagatactgtgctagattaccaagtgatccgtttactcatctagctcctaaatgcagaacccgagagttgcctgatggtacattttattcaactctttatctgccaattaactcwcctcttcgagcctccattgttggtccaccaatgagctgtgtacgattggctgaaagagttgtagctctcatttgctgtgagaaactgcacaaaattggcgaactggatgaccatttgatgccagttgggaaagagactgttaaatatgaagaggagcttgatttgcatgatgaagaagagaccagtgttccaggaagaccaggttccacgaaacgaaggcagtgctacccaaaagcaattccagagtgtttgagggatagttatcccagacctgatcagccctgttacctgtatgtgataggaatggttttaactacacctttacctgatgaactcaactttagaaggcggaagctctatcctcctgaagataccacaagatgctttggaatactgacggccaaacccatacctcagattccacactttcctgtgtacacacgctctggagaggttaccatatccattgagttgaagaagtctggtttcatgttgtctctacaaatgcttgagttgattacaagacttcaccagtatrtattctcacatattcttcggcttgaaaaacctgcactagaatttaaacctacagacgctgattcagcatactgtgttctacctcttaatgttgrtaatgactccagcactttggatattgactttaaattcatggaagatattgagaagtctgaagctcgcataggcattcccagtacaaagtatacaaaagaaacaccctttgtttttaaattagaagattaccaagatgccgttatcattccaagatatcgcaattttgatcagcctcatcgattttatgtagctgatgtgtacactgatcttaccccactcagtaaatttccttcccctgagtatgaaacttttgcagaatattataaaacaaagtacaaccttgacctaaccaatctcaaccagccactgctggatgtggaccacacatcttcaagacttaatctkttgacacctcgacatttgaatcagaaggggaaagcrcttcctttaagcagtgctgagaagaggaaagccaaatgggaaagtctgcagaataaacagatactggttccagaactctgtgctatacatccaattccagcatcactgtggagaaaagctgtttgtctccccagcatactttatcgccttcactgccttttgactgcagaggagctaagagcccagactgccagcgatgctggcgtgggagtcagatcacttcctgcggattttagataccctaacttagacttcgggtggaaaaaatctattgacagcaaatctttcatctcaatttctaactcctcttcagctgaaaatgataattactgtaagcacagcacaattgtccctgaaaatgctgcacatcaaggtgctaatagaacctcctctctagaaaatcatgaccaaatgtctgtgaactgcagaacgttgctcagcgagtcccctggtaagctccacgttgaagtttcagcagatcttacagcaattaatggtctttcttacaatcaaaatctcgccaatggcagttatgatttagctaacagagacttttgccaaggaaatcagctaaattactacaagcaggaaatacccgtgcaaccaactacctcatattccattcagaatttatacagttacgagaaccagccccagcccagcgatgaatgtactctcctgagtaataaataccttgatggaaatgctaacaaatctacctcagatggaagtcctgtgatggccgtaatgcctggtacgacagacactattcaagtgctcaagggcaggatggattctgagcagagcccttctattgggtactcctcaaggactcttggccccaatcctggacttattcttcaggctttgactctgtcaaacgctagtgatggatttaacctggagcggcttgaaatgcttggcgactcctttttaaagcatgccatcaccacatatctattttgcacttaccctgatgcgcatgagggccgcctttcatatatgagaagcaaaaaggtcagcaactgtaatctgtatcgccttggaaaaaagaagggactacccagccgcatggtggtgtcaatatttgatccccctgtgaattggcttcctcctggttatgtagtaaatcaagacaaaagcaacacagataaatgggaaaaagatgaaatgacaaaagactgcatgctggcgaatggcaaactggatgaggattacgaggaggaggatgaggaggaggagagcctgatgtggagggctccgaaggaagaggctgactatgaagatgatttcctggagtatgatcaggaacatatcagatttatagataatatgttaatggggtcaggagcttttgtaaagaaaatctctctttctcctttttcaaccactgattctgcatatgaatggaaaatgcccaaaaaatcctccttaggtagtatgccattttcatcagattttgaggattttgactacagctcttgggatgcaatgtgctatctggatcctagcaaagctgttgaagaagatgactttgtggtggggttctggaatccatcagaagaaaactgtggtgttgacacgggaaagcagtccatttcttacgacttgcacactgagcagtgtattgctgacaaaagcatagcrgactgtgtggaagccctgctgggctgctatttaaccagctgtggggagagggctgctcagcttttcctctgttcactggggctgaaggtgctcccggtaattaaaaggactgatcgggaaaaggccctgtgccctactcgggagaatttcaacagccaacaaaagaacctttcagtgagctgtgctgctgcttctgtggccagttcacgctcttctgtattgaaagactcggaatatggttgtttgaagattccaccaagatgtatgtttgatcatccagatgcagataaaacactgaatcaccttatatcggggtttgaaaattttgaaaagaaaatcaactacagattcaagaataaggcttaccttctccaggcttttacacatgcctcctaccactacaatactatcactgattgttaccagcgcttagaattcctgggagatgcgattttggactacctcataaccaagcacctttatgaagacccgcggcagcactccccgggggtcctgacagacctgcggtctgccctggtcaacaacaccatctttgcatcgctggctgtaaagtacgactaccacaagtacttcaaagctgtctctcctgagctcttccatgtcattgatgactttgtgcagtttcagcttgagaagaatgaaatgcaaggaatggattctgagcttaggagatctgaggaggatgaagagaaagaagaggatattgaagttccaaaggccatgggggatatttttgagtcgcttgctggtgccatttacatggatagtgggatgtcactggagacagtctggcaggtgtactatcccatgatgcggccactaatagaaaagttttctgcaaatgtaccccgttcccctgtgcgagaattgcttgaaatggaaccagaaactgccaaatttagcccggctgagagaacttacgacgggaaggtcagagtcactgtggaagtagtaggaaaggggaaatttaaaggtgttggtcgaagttacaggattgccaaatctgcagcagcaagaagagccctccgaagcctcaaagctaatcaacctcaggttcccaatagctgaaaccgctttttaaaattcaaaacaagaaacaaaacaaaaaaaattaaggggaaaattatttaaatcggaaaggaagacttaaagttgwtagtgagtggaatgaattgaaggcagaatttaaagtttggttgataacaggatagataacagaataaaacatttaacatatgtataaaattttggaactaattgtagttttagttttttgcgcaaacacaatcttatcttctttcctcacttctgctttgtttaaatcacaagagtgctttaatgatgacatttagcaagtgctcaaaataattgacaggttttgttttttttttttgagtttatgtcagctttgcttagtgttagaaggccatggagcttaaacctccagcagtccctaggatgatgtagattcttctccatctctccgtgtgtgcagtagtgccagtcctgcagtagttrataagctgaataraaagataaggttttcgagaggagaagtgcgccaatgttgtcttttctttccacgttatactgtgtaaggtgatgttcccggtcgctgttgcacctgatagtaagggacagatttttaatgaacattggctggcatgttggtgaatcacattttagttttctgatgccacatagtcttgcataaaaaagggttcttgccttaaaagtgaaaccttcatggatagtctttaatctctgatctttttggaacaaactgttttacattcctttcattttattatgcattagacgttgagacagcgtgatacttacaactcactagtatagttgtaacttattacaggatcatactaaaatttctgtcatatgtatactgaagacattttaaaaaccagaatatgtagtctacggatattttttatcataaaaatgatctttggctaaacaccccattttactaaagtcctcctgccaggtagttcccactgatggaaatgtttatggcaaataattttgccttctaggctgttgctctaacaaaataaaccttagacatatcacacctaaaatatgctgcagattttataattgattggttacttatttaagaagcaaaacacagcacctttacccttagtctcctcacataaatttcttactatacttttcataatgttgcatgcatatttcacctaccaaagctgtgctgttaatgccgtgaaagtttaacgtttgcgataaactgccgtaattttgatacatctgtgatttaggtcattaatttagataaactagctcattatttccatctttggaaaaggaaaaaaaaaaaaacttctttaggcatttgcctaagtttctttaattagacttgtaggcactcttcacttaaatacctcagttcttcttttcttttgcatgcatttttcccctgtttggtgctatgtttatgtattatgcttgaaattttaatttttttttttttgcact

SEQ ID NO: 4923 - DNA, 1337 bp, Homo sapiens
gagaagtgactgacggcctgcaccaacttagacrgtcacagtcatgaaaagtgcacaggtgggattgcccgagttggccatgaattaccgtgatggatccatttggaaatgaagttggttgtgacatttcttcaagttttgtttcgcttgaagcttgactggtagatggagaattttggccttatgtatcttatgtgacttgcattacccagtccagtcctctgccattaatctaaggtccgcaatgyatcaggtattttactgagaatcttgcttacctaattctcacaaaaaaaaaaaaaccttgggagatgagggtggaaacaggatgagaggtcaggtgacttgtctgagggcygacggtttgtaattggaagagtcagggcctaaccactggtctctttgacacaaaaactcatgctcttagtggcaagcacagtgttctcaagattgggggaagccagggagggacagtgggttgtctgctactrgtgggtcaaaattacatatttagtcatgaatggttcagcttttaccatttaaataacaaataaatgttctttctccataggcattaaagaytattccaactggcccaccatcccgcaagtgtacctcaatggcgagtttgtagggggctgtgacattcttctgcagatgcaccagaatggggacttggtggaagaactgaaaaagctggggatccactccrcccttttagatgaaaagaaagaccaagactccaagtgagggcggccaagtcctcgctgagcagagagggarccgttcatgtcagagactcactgccagaaaagccttacccattttggttttcactattgagaccgcaactgcttgcactgatcattttggttcrtgagcagttggtgattttagttggtctggtgttcgggctaagaatattttattgtggacttaattacaaccactgcmctgtaatgattcaatgctgtattatgatattgctgtaaacaaaattcattcttatattgtcacttattctttgcctgattcagaagttaaataggagctttggaatcattattcatgacccctctgcaaatgtgtcagtctccaaagagagtatctccccccaaattttgtgtagcttcttttgttatggaaaatggtgracaaaaaaagaaactgtgataactggggcgttgttttttaaaataaactccagcacagggatrctgtgcatgcctgagttgattccgaagtgcatatgtctgtaaggatttggagtgcctgcagtgttttatgtgtgggaagtaagggtgagtctcatattcttctattaaatttgccacaag

SEQ ID NO: 4924 - DNA, 1085 bp, Homo sapiens
gtgggctccggcttgcgtgcggagatgagcgggtccctcggccgagctgcggcggctctgctccgctgggggcgcggcgcgggcggcggtggcctttggggtccgggcgtgcgggcggcgggctcgggcgcgggcggcggcggctcggcggagcagttggacgcgctggtgaagaaggacaaggtggtggtcttcctcaaggggacgccggagcagccccagtgcggcttcagcaacgccgtggtgcagatcctgcggctgcacggcgtccgcgattacgcggcctacaacgtgctggacgacccggagctccgacaaggcattaaagaytattccaactggcccaccatcccgcaagtgtacctcaatggcgagtttgtagggggctgtgacattcttctgcagatgcaccagaatggggacttggtggaagaactgaaaaagctggggatccactccrcccttttagatgaaaagaaagaccaagactccaagtgagggcggccaagtcctcgctgagcagagagggarccgttcatgtcagagactcactgccagaaaagccttacccattttggttttcactattgagaccgcaactgcttgcactgatcattttggttcrtgagcagttggtgattttagttggtctggtgttcgggctaagaatattttattgtggacttaattacaaccactgcmctgtaatgattcaatgctgtattatgatattgctgtaaacaaaattcattcttatattgtcacttattctttgcctgattcagaagttaaataggagctttggaatcattattcatgacccctctgcaaatgtgtcagtctccaaagagagtatctccccccaaattttgtgtagcttcttttgttatggaaaatggtgracaaaaaaagaaactgtgataactggggcgttgttttttaaaataaactccagcacagggatrctgtgcatgcctgagttgattccgaagtgcatatgtctgtaaggatttggagtgcctgcagtgttttatgtgtgggaagtaagggtgagtctcatattcttctattaaatttgccacaag

SEQ ID NO: 4925 - DNA, 501 bp, Homo sapiens
atggagtcgatattggggtcagcttcatgcacggagccttcttcagctttagaggtgaacagccccccctcccagcccccccagcccgtcgtccctgctaagcccgtgcaatgcgtccatcatgtgtccactcaacccagctgcccaggacggggcaagatgtccaagctgctgaacccagaggagatgacctcgagagattattacttcgactcctatgcccactttgggatccacgaggaaatgctgaaggatgaggtgcggactctcacttaccggaactccatgtaccacaacaagcacgtgttcaaggacaaagtggtactggatgtggggagtggtactgggatcctttccatgttcgctgccaaggcaggggccaagaaggtgtttggggtgccctcacccttcctcaaggcgtggccagaggcgtcagaaactccctcagtgcccctttgcgagtacttctcaagggaatggtccctgccygaggcctggggg

SEQ ID NO: 4926 - DNA, 2366 bp, Homo sapiens
aggagttggcggctgcctccggccggccggactttgcgagcagcctggagaggatccgcgaccgccgccgccgccgccgcggaggcttcggggctgcttccctcgagcttagcccgcagcgcgggtggagaggggcggggagggggtcgggggcacgagaagaacttgaaaccgtgtgaaggaatccggagcagatgagaagggaggaaaataaaagaaagtggagactgcagaacagactccgctgtggctgactgtgccggccgacgctccagctgaggggctgggttggatttttttttttctcccatcctctcgctctctcttttaaagcgacaccagctctctctcctcctctactatctcggtatcaccaaacccttgccggctcttatgggcatgaaacactcctcccgctgcctgctcctgaggaggaaaatggcggagaacgcggccgagagcaccgaggtgaacagccccccctcccagcccccccagcccgtcgtccctgctaagcccgtgcaatgcgtccatcatgtgtccactcaacccagctgcccaggacggggcaagatgtccaagctgctgaacccagaggagatgacctcgagagattattacttcgactcctatgcccactttgggatccacgaggaaatgctgaaggatgaggtgcggactctcacttaccggaactccatgtaccacaacaagcacgtgttcaaggacaaagtggtactggatgtggggagtggtactgggatcctttccatgttcgctgccaaggcaggggccaagaaggtgtttgggatcgaatgctccagtatttctgactactcagagaagatcattaaggccaaccacttggacaacatcatcaccatatttaagggtaaagtggaagaggtggagctgcctgtggagaaggtggacatcatcatcagcgagtggatgggctactgtctgttctatgagtccatgctcaacacggtgatctttgccagggacaagtggctgaaacctggagggcttatgtttccagaccgggcagctttgtacgtggtagcgattgaagacagacagtacaaggacttcaaaatccactggtgggagaatgtctatggctttgacatgacctgcatccgggacgtggccatgaaggagcctctagtggacatcgtggatccaaagcaagtggtgaccaatgcctgtttgataaaggaggtggacatttacacagtgaagacggaagagctatcgttcacatctgcattctgcctgcagatacagcgcaacgactacgtccacgccctggtcacctattttaatattgaatttaccaagtgccacaagaaaatggggttttccacagcccctgatgctccctacacccactggaagcagaccgtcttctacttggaagattacctcactgtccgraggggggaggaaatctacgggaccatatccatgaagccaaatgccaaaaatgtgcgagacctcgatttcacagtagacttggattttaagggacagctgtgtgaaacatctgtatctaatgactacaaaatgcgttagcacacgtgggaagctgcagagagcaacgagaaaaggaactctcacctcgatctgccgtgccgtcccaaagaataccstttgcaggactacacacttgaaaaccagagttttcaactctgccttgaagattggtgaactccccagggctcccgtgggctctgccactggacagaaggcctccagctcctccgctctgccctggtagcccttcacgaaggctttgtgttgccaacaaagagcgacctggcgtgctgtggctgggccccgagggtggaaacgtattcgcgtctccccgtctcctccttaactgtgactctccgggtcttctgagttttgcatgctgcgggtgtctaggacagattgcttccactagaacctggagacatagcatctttgatagcataagccagattatctgtgtgtgcggtggtgtgcgtgtgmgtgcatgtgtgaatgtgagcagcatagttgatatttacccacaaacacctgtatatgcgtgcatatacaaccaagtgggtagacctaggtgttctctcagaggggtgtgtgtgtgtgtgcgtgcgygtgtgcctagaatatatattactctcagaggagattctgttgcttttgaataggaatttgttttgtgattagttcgccccttccccaccccttaccagatgttaagcagctatgaaacattctctgtactagttctggtctccttttgactggactgtggctctgaaccttgagcatagtaccacggactccgtgggcgctcaataaacacacatgagaac

SEQ ID NO: 4927 - DNA, 1367 bp, Homo sapiens
ggtcagcctagcactctgacctagcagtcaayatgaaggctctcattgttctggggcttgtcctcctttctgttacggtccagggcaaggtctttgaaaggtgtgagttggccagaactctgaaaagattgggaatggatggctacaggggaatcagcctagcaaactggatgtgtttggccaaatgggagagtggttacaacacacgagctacaaactacaatgctggagacagaagcactgattatgggayatttcagatcaatagccgctacyggtgtaatsatggcaaaamcccaggagcagttaatgcctgtcatttatcctgcagtgctttgctgcaagataacatcgctgatgctgtagcttgtgcaaagagggttgtccgtgatccacaaggcattagagcatgggtggcatggagaaatcgttgtcaaaacagagatgtccgtcagtatgttcaaggttgtggagtgtaactccagaattttccttcttcagctcattttgtctctctcacattaagggagtaggaattaagtgaaaggtcacactaccattatttccccttcaaacaaataatatttttacagaagcaggagcaaaatatggcctttcttctaagagatataatgttcactaatgtggttattttayattaagcctacaacatttttyagtttgcaaatagaactaatactggtgaaaatttacctaaaaccttggttatcaaatacatctccagtacattccgttctttttttttagacagtctcgctctgtcgcccaggctggagtgcagtggcgcaatctcggctcactgcaacctccacctcccgggttcacgccattctcctgcctcagcctcccgagtagctgggattacgggcgcccgccaccacgcccggctaattttttgtatttttagtagagacagggtttcaccgtgttgttcttatcaaagaaataacccagacttaatcttgaatgatacgattatgcccaatattaagtaaaaaatataagaaaakgttatcttaaatagatcttaggcaaaataccagctgatgaaggcatctgatgccttcatctgttcagtcatctccaaaamcagtaaaaataaccaytttttgttgggcaatatgaaatttttaaaggagtagaataccaaatgatagaaacagactgcctgaatgtgtttctttctaaattgctgttccttaatttgattaatttaattcatgtattatgattaaatctgaggcagatgagcttacaagtattgaaataattactaattaatcacaaatgtgaagttatgcatgatgtaaaaaatacaaacattctaattaaaggctttgcaacac

SEQ ID NO: 4928 - DNA, 1467 bp, Homo sapiens
ggtcagcctagcactctgacctagcagtcaayatgaaggctctcattgttctggggcttgtcctcctttctgttacggtccagggcaaggtctttgaaaggtgtgagttggccagaactctgaaaagattgggaatggatggctacaggggaatcagcctagcaaactggatgtgtttggccaaatgggagagtggttacaacacacgagctacaaactacaatgctggagacagaagcactgattatgggayatttcagatcaatagccgctacyggtgtaatsatggcaaaamcccaggagcagttaatgcctgtcatttatcctgcagtgctttgctgcaagataacatcgctgatgctgtagcttgtgcaaagagggttgtccgtgatccacaaggcattagagcatgggtggcatggagaaatcgttgtcaaaacagagatgtccgtcagtatgttcaaggttgtggagtgtaactccagaattttccttcttcagctcattttgtctctctcacattaagggagtaggaattaagtgaaaggtcacactaccattatttccccttcaaacaaataatatttttacagaagcaggagcaaaatatggcctttcttctaagagatataatgttcactaatgtggttattttayattaagcctacaacatttttyagtttgcaaatagaactaatactggtgaaaatttacctaaaaccttggttatcaaatacatctccagtacattccgttcttttttttgagacagtctcgctctgtcgcccaggctggagtgcagtggcgcaatctcggctcactgcaacctccacctcccgggttcacgccattctcctgcctcagcctcccgagtagctgggattacgggcgcccgccaccacgcccggctaattttttgtatttttagtagagacagggtttcaccgtgttagccaggatggtctcgatctcctgaccttgtgatccacccacctcggcctcccaaagtgctgggattacaggcgtgagccactgcgcccggccacattcagttcttatcaaagaaataacccagacttaatcttgaatgatacgattatgcccaatattaagtaaaaaatataagaaaakgttatcttaaatagatcttaggcaaaataccagctgatgaaggcatctgatgccttcatctgttcagtcatctccaaaamcagtaaaaataaccaytttttgttgggcaatatgaaatttttaaaggagtagaataccaaatgatagaaacagactgcctgaatgtgtttctttctaaattgctgttccttaatttgattaatttaattcatgtattatgattaaatctgaggcagatgagcttacaagtattgaaataattactaattaatcacaaatgtgaagttatgcatgatgtaaaaaatacaaacattctaattaaaggctttgcaacac

SEQ ID NO: 4929 - DNA, 1504 bp, Homo sapiens
ggtcagcctagcactctgacctagcagtcaayatgaaggctctcattgttctggggcttgtcctcctttctgttacggtccagggcaaggtctttgaaaggtgtgagttggccagaactctgaaaagattgggaatggatggctacaggggaatcagcctagcaaactggatgtgtttggccaaatgggagagtggttacaacacacgagctacaaactacaatgctggagacagaagcactgattatgggayatttcagatcaatagccgctacyggtgtaatsatggcaaaamcccaggagcagttaatgcctgtcatttatcctgcagtgctttgctgcaagataacatcgctgatgctgtagcttgtgcaaagagggttgtccgtgatccacaaggcattagagcatgggtggcatggagaaatcgttgtcaaaacagagatgtccgtcagtatgttcaaggttgtggagtgtaactccagaattttccttcttcagctcattttgtctctctcacattaagggagtaggaattaagtgaaaggtcacactaccattatttccccttcaaacaaataatatttttacagaagcaggagcaaaatatggcctttcttctaagagatataatgttcactaatgtggttattttayattaagcctacaacatttttyagtttgcaaatagaactaatactggtgaaaatttacctaaaaccttggttatcaaatacatctccagtacattccgttctttttttttttttttttttttgagacagtctcgctctgtcgcccaggctggagtgcagtggcgcaatctcggctcactgcaacctccacctcccgggttcacgccattctcctgcctcagcctcccgagtagctgggattacgggcgcccgccaccacgcccggctaattttttgtatttttagtagagacagggtttcaccgtgttagccaggatggtctcgatctcctgaccttgtgatccacccacctcggcctcccaaagtgctgggattacaggcgtgagccactgcgcccggccacattcagttcttatcaaagaaataacccagacttaatcttgaatgatacgattatgcccaatattaagtaaaaaatataagaaaakgttatcttaaatagatcttaggcaaaataccagctgatgaaggcatctgatgccttcatctgttcagtcatctccaaaamcagtaaaaataaccaytttttgttgggcaatatgaaatttttaaaggagtagaataccaaatgatagaaacagactgcctgaattgagaattttgatttyttaaagtgtgtttctttctaaattgctgttccttaatttgattaatttaattcatgtattatgattaaatctgaggcagatgagcttacaagtattgaaataattactaattaatcacaaatgtgaagttatgcatgatgtaaaaaatacaaacattctaattaaaggctttgcaacaca

SEQ ID NO: 4930 - DNA, 1767 bp, Homo sapiens
  misc_feature (1)...(1767): n = A,T,C or G
cagacactgggctctggccacgcgtcttagactccaaatctcggctcactggtccctttgaggaggtcgcctggtgttcccgtagccctccaccccaccgtaggagagcgcctgccacgagctccgcgcctcgctaagtgctttgctacgtgaactcttagttttcccaacatccctaagccgccgatacattatcacccacgtattgcggacgagagaaccgcctcggagaagctggctggctcgcttggagttttgcagctagtggcggagcgagcattccgagcagataagctccacaaacccaaagctacacagactgaggtcaaaccatctgtgaggtttaacctccgcacctccaaggacccagagcatgaaggatgctacctctccgtcggccacagccagcycttagaagactgcagtttcaacatgacagctaaaacctttttcatcattcacggatggacgatgagcggtatctttgaaaactggctgcacaaactcgtgtcagccctgcacanaagagagaaagacgccaatgtagttgtggttgactggctccccctggcccaccagctttacacggatgcggtcaataataccagggtggtgggacacagcattgccaggatgctcgactggctgcaggagaaggacgatttttctctcgggaatgtccacttgatcggctacagcctcggagcgcacgtggccgggtatgcaggcaacttcgtgaaaggaacggtgggccgaatcacaggtttggatcctgccgggcccatgtttgaaggggccgacatccacaagaggctctctccggacgatgcagattttgtggatgtcctccacacctacacgcgttccttcggcttgagcattggtattcagatgcctgtgggccacattgacatctaccccaatgggggtgacttccagccaggctgtggactcaacgatgtcttgggatcaattgcatatggaacaatcacagaggtggtaaaatgtgagcatgagcgagccgtccacctctttgttgactctctggtgaatcaggacaagccgagttttgccttccagtgcastgactccaatcgcttcaaaaaggggatctgtctgagctgccgcaagaaccgttgtaatagcattggctacaatgccaagaaaatgaggaacaagaggaacagcaaaatgtacctaaaaacccgggcaggcatgcctttcagagtttaccattatcagatgaaaatccatgtcttcagttacaagaacatgggagaaattgagcccaccttttacgtcaccctttatggcactaatgcagattcccagactctgccactggaaatagtggagcggatcgagcagaatgccaccaacaccttcctggtctacaccgaggaggacttgggagacctcttgaagatccagctcacctgggagggggcctctcagtcttggtacaacctgtggaaggagtttcgcagctacctgtctcaaccccgcaaccccggacgggagctgaatatcaggcgcatccgggtgaagtctggggaaacccagcggaaactgacattttgtacagaagaccctgagaacaccagcatatccccaggccgggagctctggtttcgcaagtgtcgggatggctggaggatgaaaaacgaaaccagaagtggacagcaattcactaaagaaccagaacaagaacatcatttcactgaagacgagaagaaaaattatttcaattgtagcagcttgaaggcc

SEQ ID NO: 4931 - DNA, 4136 bp, Homo sapiens
  misc_feature (1)...(4136): n = A,T,C or G
agcagcgagtccttgcctcccggcggctcaggacgagggcagatctcgttctggggcaagccgttgacactcgctccctgccaccgcccgggctccgtgccgccaagttttcattttccaccttctctgcctccagtcccccagcccctggccgagagaagggtcttaccggccgggattgctggaaacaccaagaggtggtttttgttttttaaaacttctgtttctkgggagggggtgtggcggggcaggatgagcaactcmgttcctctgctctgtttctggagcctctgctattgctttgctgcggggagycccgtaccttttrgtccagagggacggctggaagataagctccacaaacccaaagctacacagactgaggtcaaaccatctgtgaggtttaacctccgcacctccaaggacccagagcatgaaggatgctacctctccgtcggccacagccagcycttagaagactgcagtttcaacatgacagctaaaacctttttcatcattcacggatggacgatgagcggtatctttgaaaactggctgcacaaactcgtgtcagccctgcacanaagagagaaagacgccaatgtagttgtggttgactggctccccctggcccaccagctttacacggatgcggtcaataataccagggtggtgggacacagcattgccaggatgctcgactggctgcaggagaaggacgatttttctctcgggaatgtccacttgatcggctacagcctcggagcgcacgtggccgggtatgcaggcaacttcgtgaaaggaacggtgggccgaatcacaggtttggatcctgccgggcccatgtttgaaggggccgacatccacaagaggctctctccggacgatgcagattttgtggatgtcctccacacctacacgcgttccttcggcttgagcattggtattcagatgcctgtgggccacattgacatctaccccaatgggggtgacttccagccaggctgtggactcaacgatgtcttgggatcaattgcatatggaacaatcacagaggtggtaaaatgtgagcatgagcgagccgtccacctctttgttgactctctggtgaatcaggacaagccgagttttgccttccagtgcastgactccaatcgcttcaaaaaggggatctgtctgagctgccgcaagaaccgttgtaatagcattggctacaatgccaagaaaatgaggaacaagaggaacagcaaaatgtacctaaaaacccgggcaggcatgcctttcagagtttaccattatcagatgaaaatccatgtcttcagttacaagaacatgggagaaattgagcccaccttttacgtcaccctttatggcactaatgcagattcccagactctgccactggaaatagtggagcggatcgagcagaatgccaccaacaccttcctggtctacaccgaggaggacttgggagacctcttgaagatccagctcacctgggagggggcctctcagtcttggtacaacctgtggaaggagtttcgcagctacctgtctcaaccccgcaaccccggacgggagctgaatatcaggcgcatccgggtgaagtctggggaaacccagcggaaactgacattttgtacagaagaccctgagaacaccagcatatccccaggccgggagctctggtttcgcaagtgtcgggatggctggaggatgaaaaacgaaaccagtcccactgtggagcttccctgagggtgcccgggcaagtcttgccagcaaggcagcaagacttcctgctatccaagcccatggaggaaagttactgctgaggacccacccaatggaaggattcttctcagccttgaccctggagcactgggaacaactggtctcctgtgatggctgggactcctcgcgggaggggactgcgctgctatagctcttgctgcctctcttgaatagctctaactccaaacctctgtccacacctccagagcaccaagtccagatttgtgtgtaagcagctgggtgccyggggcctctcgtgcacactggattggtttctcagttgctgggcgagcctgtactctgcctgacgaggaacgctggctcygaagaggccctgtgtagaaggctgtcagctgctcagcctgctttgagcctcagtgagaagtccttccgacaggagctgactcatgtcaggatggcaggcctggtatcttgctcgggccctrgytgttggggttctcatgggttgcactgaccatactgcttacgtcttagccattccgtcctgctccccagctcactctctgaagcacacatcattggctttcctatttttctgttcattttttaattgagcaaatgtctattgaacacttaaaattaattagaatgtggtaatggacatattactgagcctctccatttggaacccagtggagttgggatttctagaccctctttctgtttggatggtgtatgtgtatatgcatggggaaaggcacctggggcctgggggaggctataggatataagcattagggaccctgaggctttaagtggtttctatttcttcttagttattatgtgccaccttcttagttattatgtgccacctcccctatgagtgacgtgtttgatcactagcagaatagcaagcagagtatcattcatgctggggccagaatgatggccggttgccagatataactgctttggagcaaatctcttctgtttagagagatagaagttatgacatatgtratacacatctgtgtacacagaaaccggcacctgccagacagagctggttctaagatttaatacagtgctwtttttcctctttgaaatattttactttaataccagtgccttttcttgttgaacttcttggaaaagccaccaattctagatcttgatttgaattaatacacacaatatctgagacacttacacttttcaaaagatttgtgtatgcattgcctaattagagtagggggagaagggcaactattattatccctattttacaaaactgaggcttagtgaggttcagccacatgcctagacttayatactagttagtggtgcagccagggagaggactcagatttcctggaggcaaagtctatctctgaaactccatgaagacttttgcagccagttcccaccaatatgccccagacgtgagacaaacaaggacttttttttttatatagagccatccataaaatcctaagcccttttattaaygtataaccaggagaacatctgtgccaacggttggactttttatggctgagattcgggaggaagtgtgacaccaagcaggagaggaagaatgattttctttgtacttaggttttctaaggacattgttttaatctgtatcgtgccaaagttgtatcactgttaaacttctgaagacataaccagttgagtcttatttcaagatatgttctcaagccaattgtgtgcttctcttgtttctgtgattgctttctagccaaagcgaagcttgtacaggttgagtatcccttatccaaaatgcttggaaccagaagtgtttcaaattttagattattttcagattttggaatgtttgcatatacataatgagatattttgggaataggacccgagcctaaacacaaaattcattgatgtgtcagttacaccttatccacatagcctgagggtaattttatacgatattttaaatagttgtgtacatgaagcatggtttgtggtaacttatgtgaggggttttcccatttkttgtcttgttggtgctcaaaaagttttggattttggagcatttcggattttggatttttggattagggttgctcaacccatattattggctgtacatcctggtcacttctgacttctgtttttactaatggaagctttgcaaattgaattctcagtgagttgtatatttatacacctggcttgaagccttaattgtatataatgatgctttttaaaaaatgctatttggaagactatttatttctcgtgtatataatgtatataaaaaaatatggttagtgtttacctaaggttaaccaatttcaagattaaaatttttaaatagtaaaataataaaaaattataaagtt

SEQ ID NO: 4932 - DNA, 1997 bp, Homo sapiens
  misc_feature (1)...(1997): n = A,T,C or G
agcagcgagtccttgcctcccggcggctcaggacgagggcagatctcgttctggggcaagccgttgacactcgctccctgccaccgcccgggctccgtgccgccaagttttcattttccaccttctctgcctccagtcccccagcccctggccgagagaagggtcttaccggccgggattgctggaaacaccaagaggtggtttttgttttttaaaacttctgtttctkgggagggggtgtggcggggcaggatgagcaactcmgttcctctgctctgtttctggagcctctgctattgctttgctgcggggagycccgtaccttttrgtccagagggacggctggaagataagctccacaaacccaaagctacacagactgaggtcaaaccatctgtgaggtttaacctccgcacctccaaggacccagagcatgaaggatgctacctctccgtcggccacagccagcycttagaagactgcagtttcaacatgacagctaaaacctttttcatcattcacggatggacgatgagcggtatctttgaaaactggctgcacaaactcgtgtcagccctgcacanaagagagaaagacgccaatgtagttgtggttgactggctccccctggcccaccagctttacacggatgcggtcaataataccagggtggtgggacacagcattgccaggatgctcgactggctgcaggagaaggacgatttttctctcgggaatgtccacttgatcggctacagcctcggagcgcacgtggccgggtatgcaggcaacttcgtgaaaggaacggtgggccgaatcacaggtttggatcctgccgggcccatgtttgaaggggccgacatccacaagaggctctctccggacgatgcagattttgtggatgtcctccacacctacacgcgttccttcggcttgagcattggtattcagatgcctgtgggccacattgacatctaccccaatgggggtgacttccagccaggctgtggactcaacgatgtcttgggatcaattgcatatggaacaatcacagaggtggtaaaatgtgagcatgagcgagccgtccacctctttgttgactctctggtgaatcaggacaagccgagttttgccttccagtgcastgactccaatcgcttcaaaaaggggatctgtctgagctgccgcaagaaccgttgtaatagcattggctacaatgccaagaaaatgaggaacaagaggaacagcaaaatgtacctaaaaacccgggcaggcatgcctttcagagtttaccattatcagatgaaaatccatgtcttcagttacaagaacatgggagaaattgagcccaccttttacgtcaccctttatggcactaatgcagattcccagactctgccactggaaatagtggagcggatcgagcagaatgccaccaacaccttcctggtctacaccgaggaggacttgggagacctcttgaagatccagctcacctgggagggggcctctcagtcttggtacaacctgtggaaggagtttcgcagctacctgtctcaaccccgcaaccccggacgggagctgaatatcaggcgcatccgggtgaagtctggggaaacccagcggaaactgacattttgtacagaagaccctgagaacaccagcatatccccaggccgggagctctggtttcgcaagtgtcgggatggctggaggatgaaaaacgaaaccagtcccactgtggagcttccctgagggtgcccgggcaagtcttgccagcaaggcagcaagacttcctgctatccaacccttttattaaygtataaccaggagaacatctgtgccaacggttggactttttatggctgagattcgggaggaagtgtgacaccaagcaggagaggaagaatgattttctttgtacttaggttttctaaggacattgttttaatctgtatcgtgccaaagttgtatcactgttaaacttctgaagacat

SEQ ID NO: 4933 - DNA, 3656 bp, Homo sapiens
gcccttcttcacctgccgtccaggtatcatcctagtcttccctccgtctctgggatgggaaactcttgtctagtgatgtgactcattacgtgatcccagactggaaagttgttcaagattatcttgagatccttgagtttcctgagttgaagggaattattttcatgcagacagcttgtcaagctgtgcagcatcaaagaggcaggaggagcatatacaacgcagctgtttggtactatcatcactgccaggacaggatgccaattgttatggtgacagaagatgaagaggcaattcagcagtatggaagtgaaacagaaggagtattcgtgattactttcaagaattacctggacaatttctggcctgatttaaaagctgcccacgagctttgtgattctatccttcagtctcgacgggagagagagaatgagagtcaggagagccatgggaaggagtacccagaacatcttcccctggaagtgttagaagctgggattaaatctggacgctatatccagggaattctgaatgtcaacaaacacagagcccaaatagaagcttttgttcgacttcaaggagccagcagtaaagattcagatttagtcagtgacatcctaatccacgggatgaaggctcgaaaccgctcaattcatggagatgtggtagttgtggagctgcttcctaaaaatgaatggaaaggaagaaccgtagccctgtgtgagaatgactgtgacgacaaggcttcgggcgagtccccaagtgagcccatgcctacaggtcgagtggtgggcatacttcagaagaactggcgggattatgtggtgacatttccgtccaaagaagaggtccaatctcagggcaaaaatgctcagaaaatcctggttacaccttgggattacagaattcccaaaattcgaattagcactcagcaagcagaaaccctccaggacttcagggtggtcgtgcgcatcgattcctgggagtcaacatctgtgtatccaaayggacattttgtgcgtgttttaggaagaatcggagatctggaaggggaaattgcaaccatcctggtggaaaacagtatttcagttattcctttctcagaagctcagatgtgtgagatgccagtaaacacaccagaaagtccctggaaggtgagtcctgaagaggaacaaaaacgtaaagacttgaggaaaagccatstcgtattcagcattgaccccaaaggttgtgaagatgtggatgacacactctcagtcagaaccttaaataatggcaacctggaacttggggtccacatcgcagatgtaacacactttgtggcaccaaattcttacrttgatattgaagctagaacaagggccaccacttattatctagcagatcgtcgctatgacatgctgccttccgtcctcagtgcagatttgtgttcccttctgggaggcgttgataggtatgctgtaagcatcatgtgggaactggataaagcctcttatgaaattaagaaagtgtggtatggcagaaccattattcgatcagcatacaaactgttctatgaagcagcccaagaactactggatggaaacttaagcgttgttgatgatattccagaattcaaagacttggrtgagaagagcagacaagccaagctggaggagttggtgtgggcaattggaaagctgaccgacatagctcgccatgtcagagctaaacgagacggatgtggtgccctggaactggaaggggtagaggtttgcgtacagctagatgacaaaaagaacattcacgacctcatccccaagcagcccctggaagtccacgagacagtggctgaatgcatgatcctggccaaccactgggtcgccaaaaagatctgggagagcttccctcatcaggccttgctgcgccagcaccctcctccacaccaggagttcttttcagaactccgggaatgtgctaaagccaaaggcttcttcatagatacacggtccaataaaacactggctgattctctggataatgcgarcgacccccacgatcccattgtgaacaggctactgcrctccatggccacgcaggccatgtcgaatgctctgtacttctccaccggatcctgtgcggaggaggagttccatcattacggtcttgcattasataaatatacccactttacttctccaataagaagatattcagatattgtagtacaccgcttgttaatggcagccatttcaaaagataagaaaatggaaattaagggaaatctgttcagcaacaaagatcttgaggaattatgcagacatatcaacaacagaaaccaagcagcacagcattctcagaagcagtctactgagctcttccagtgcatgtacttcaaagacaaagaccctgccaccgaggagcgttgcatatctgacggagttatttattcaattagaacaaatggtgtgcttctatttataccaaggtttgggattaaaggtgctgcttatctaaaaaataaagatggtttagtcatctcatgtggcccagatagctgttctgaatggaaaccaggatcccttcaacgatttcaaaacaaaattacctctactacaacagatggggaatctgttacgttccatttgtttgaccatgtaaccgtaagaatatccatacaggcctcacgttgccattctgatacaatcagacttgaaataattagtaacaaaccatacaagataccaaatacagaacttattcatcagagttcccccttgctgaagagtgarttagtgaaagaagtaactaaatctgtggaagaagctcagcttgcccaagaagtcaaagtaaacatcattcaggaggaatatcaagaatatcgccaaacaaagggaaggagcctatacacacttctagaggagatacgggacctagctctcctggatgtttcaaacaattatggaatatgagaggctcttacttcactaagagctgtcatatgtgaatgttttacagtcttttcaaacttaacatttaatgtgtgtcactcagtgctctagtcgatcaggactgggtagctatttcgcatatatgtaaaatgttctcagccgggcacggtggctcacgcctgtaaccccagcactttgggaggctgaggcgggcggatcacgaggtcaggagattgagaccatcctggctaacacggtgaaacccagtctctactaaaaatacaaaaattagcccggcgtggtggcatgcgcctgtagtcccagctacttgggaggctgaagcaggagaattgcctgaacccaggaagaggaggttgcagtgagccgagatcgcaccactgcattccagcctgggcaacagagcgagactccatctcaaaaaaaaaaaaaaaaaaaaaaaaagttctctcattcattaaagttgcattaaataaagtataattaggtcactatggaaacagagttttcagtaatgagtggacagtaagtggtggctctgcagatggcccctttctaataagtttaataaacccgaaattactggttatctcgtctccaatcagttctttcaaatgttttatttttccagtaattacgtttgggtcataggcccctctgacatttgtcaggtaattttcagtcactttcagataataagacttagtc

SEQ ID NO: 4934 - DNA, 3785 bp, Homo sapiens
gcccttcttcacctgccgtccaggtatcatcctagtcttccctccgtctctgggatgggaaactcttgtctagtgatgtgactcattacgtgatcccagactggaaagttgttcaagattatcttgagatccttgagtttcctgagttgaagggaattattttcatgcagacagcttgtcaagctgtgcagcatcaaagaggcaggagacagtataacaaactgcgaaacctgctgaaggatgcgcgtcatgattgcattctctttgctaatgaattccagcaatgctgctatctgccacgggaaagaggagagtccatggagaagtggcagaccaggagcatatacaacgcagctgtttggtactatcatcactgccaggacaggatgccaattgttatggtgacagaagatgaagaggcaattcagcagtatggaagtgaaacagaaggagtattcgtgattactttcaagaattacctggacaatttctggcctgatttaaaagctgcccacgagctttgtgattctatccttcagtctcgacgggagagagagaatgagagtcaggagagccatgggaaggagtacccagaacatcttcccctggaagtgttagaagctgggattaaatctggacgctatatccagggaattctgaatgtcaacaaacacagagcccaaatagaagcttttgttcgacttcaaggagccagcagtaaagattcagatttagtcagtgacatcctaatccacgggatgaaggctcgaaaccgctcaattcatggagatgtggtagttgtggagctgcttcctaaaaatgaatggaaaggaagaaccgtagccctgtgtgagaatgactgtgacgacaaggcttcgggcgagtccccaagtgagcccatgcctacaggtcgagtggtgggcatacttcagaagaactggcgggattatgtggtgacatttccgtccaaagaagaggtccaatctcagggcaaaaatgctcagaaaatcctggttacaccttgggattacagaattcccaaaattcgaattagcactcagcaagcagaaaccctccaggacttcagggtggtcgtgcgcatcgattcctgggagtcaacatctgtgtatccaaayggacattttgtgcgtgttttaggaagaatcggagatctggaaggggaaattgcaaccatcctggtggaaaacagtatttcagttattcctttctcagaagctcagatgtgtgagatgccagtaaacacaccagaaagtccctggaaggtgagtcctgaagaggaacaaaaacgtaaagacttgaggaaaagccatstcgtattcagcattgaccccaaaggttgtgaagatgtggatgacacactctcagtcagaaccttaaataatggcaacctggaacttggggtccacatcgcagatgtaacacactttgtggcaccaaattcttacrttgatattgaagctagaacaagggccaccacttattatctagcagatcgtcgctatgacatgctgccttccgtcctcagtgcagatttgtgttcccttctgggaggcgttgataggtatgctgtaagcatcatgtgggaactggataaagcctcttatgaaattaagaaagtgtggtatggcagaaccattattcgatcagcatacaaactgttctatgaagcagcccaagaactactggatggaaacttaagcgttgttgatgatattccagaattcaaagacttggrtgagaagagcagacaagccaagctggaggagttggtgtgggcaattggaaagctgaccgacatagctcgccatgtcagagctaaacgagacggatgtggtgccctggaactggaaggggtagaggtttgcgtacagctagatgacaaaaagaacattcacgacctcatccccaagcagcccctggaagtccacgagacagtggctgaatgcatgatcctggccaaccactgggtcgccaaaaagatctgggagagcttccctcatcaggccttgctgcgccagcaccctcctccacaccaggagttcttttcagaactccgggaatgtgctaaagccaaaggcttcttcatagatacacggtccaataaaacactggctgattctctggataatgcgarcgacccccacgatcccattgtgaacaggctactgcrctccatggccacgcaggccatgtcgaatgctctgtacttctccaccggatcctgtgcggaggaggagttccatcattacggtcttgcattasataaatatacccactttacttctccaataagaagatattcagatattgtagtacaccgcttgttaatggcagccatttcaaaagataagaaaatggaaattaagggaaatctgttcagcaacaaagatcttgaggaattatgcagacatatcaacaacagaaaccaagcagcacagcattctcagaagcagtctactgagctcttccagtgcatgtacttcaaagacaaagaccctgccaccgaggagcgttgcatatctgacggagttatttattcaattagaacaaatggtgtgcttctatttataccaaggtttgggattaaaggtgctgcttatctaaaaaataaagatggtttagtcatctcatgtggcccagatagctgttctgaatggaaaccaggatcccttcaacgatttcaaaacaaaattacctctactacaacagatggggaatctgttacgttccatttgtttgaccatgtaaccgtaagaatatccatacaggcctcacgttgccattctgatacaatcagacttgaaataattagtaacaaaccatacaagataccaaatacagaacttattcatcagagttcccccttgctgaagagtgarttagtgaaagaagtaactaaatctgtggaagaagctcagcttgcccaagaagtcaaagtaaacatcattcaggaggaatatcaagaatatcgccaaacaaagggaaggagcctatacacacttctagaggagatacgggacctagctctcctggatgtttcaaacaattatggaatatgagaggctcttacttcactaagagctgtcatatgtgaatgttttacagtcttttcaaacttaacatttaatgtgtgtcactcagtgctctagtcgatcaggactgggtagctatttcgcatatatgtaaaatgttctcagccgggcacggtggctcacgcctgtaaccccagcactttgggaggctgaggcgggcggatcacgaggtcaggagattgagaccatcctggctaacacggtgaaacccagtctctactaaaaatacaaaaattagcccggcgtggtggcatgcgcctgtagtcccagctacttgggaggctgaagcaggagaattgcctgaacccaggaagaggaggttgcagtgagccgagatcgcaccactgcattccagcctgggcaacagagcgagactccatctcaaaaaaaaaaaaaaaaaaaaaaaaagttctctcattcattaaagttgcattaaataaagtataattaggtcactatggaaacagagttttcagtaatgagtggacagtaagtggtggctctgcagatggcccctttctaataagtttaataaacccgaaattactggttatctcgtctccaatcagttctttcaaatgttttatttttccagtaattacgtttgggtcataggcccctctgacatttgtcaggtaattttcagtcactttcagataataagacttagtc

SEQ ID NO: 4935 - DNA, 3549 bp, Homo sapiens
catgcagacagcttgtcaagctgtgcagcatcaaagaggcaggagcaatgctgctatctgccacgggaaagaggagagtccatggagaagtggcagaccaggagcatatacaacgcagctgtttggtactatcatcactgccaggacaggatgccaattgttatggtgacagaagatgaagaggcaattcagcagtatggaagtgaaacagaaggagtattcgtgattactttcaagaattacctggacaatttctggcctgatttaaaagctgcccacgagctttgtgattctatccttcagtctcgacgggagagagagaatgagagtcaggagagccatgggaaggagtacccagaacatcttcccctggaagtgttagaagctgggattaaatctggacgctatatccagggaattctgaatgtcaacaaacacagagcccaaatagaagcttttgttcgacttcaaggagccagcagtaaagattcagatttagtcagtgacatcctaatccacgggatgaaggctcgaaaccgctcaattcatggagatgtggtagttgtggagctgcttcctaaaaatgaatggaaaggaagaaccgtagccctgtgtgagaatgactgtgacgacaaggcttcgggcgagtccccaagtgagcccatgcctacaggtcgagtggtgggcatacttcagaagaactggcgggattatgtggtgacatttccgtccaaagaagaggtccaatctcagggcaaaaatgctcagaaaatcctggttacaccttgggattacagaattcccaaaattcgaattagcactcagcaagcagaaaccctccaggacttcagggtggtcgtgcgcatcgattcctgggagtcaacatctgtgtatccaaayggacattttgtgcgtgttttaggaagaatcggagatctggaaggggaaattgcaaccatcctggtggaaaacagtatttcagttattcctttctcagaagctcagatgtgtgagatgccagtaaacacaccagaaagtccctggaaggtgagtcctgaagaggaacaaaaacgtaaagacttgaggaaaagccatstcgtattcagcattgaccccaaaggttgtgaagatgtggatgacacactctcagtcagaaccttaaataatggcaacctggaacttggggtccacatcgcagatgtaacacactttgtggcaccaaattcttacrttgatattgaagctagaacaagggccaccacttattatctagcagatcgtcgctatgacatgctgccttccgtcctcagtgcagatttgtgttcccttctgggaggcgttgataggtatgctgtaagcatcatgtgggaactggataaagcctcttatgaaattaagaaagtgtggtatggcagaaccattattcgatcagcatacaaactgttctatgaagcagcccaagaactactggatggaaacttaagcgttgttgatgatattccagaattcaaagacttggrtgagaagagcagacaagccaagctggaggagttggtgtgggcaattggaaagctgaccgacatagctcgccatgtcagagctaaacgagacggatgtggtgccctggaactggaaggggtagaggtttgcgtacagctagatgacaaaaagaacattcacgacctcatccccaagcagcccctggaagtccacgagacagtggctgaatgcatgatcctggccaaccactgggtcgccaaaaagatctgggagagcttccctcatcaggccttgctgcgccagcaccctcctccacaccaggagttcttttcagaactccgggaatgtgctaaagccaaaggcttcttcatagatacacggtccaataaaacactggctgattctctggataatgcgarcgacccccacgatcccattgtgaacaggctactgcrctccatggccacgcaggccatgtcgaatgctctgtacttctccaccggatcctgtgcggaggaggagttccatcattacggtcttgcattasataaatatacccactttacttctccaataagaagatattcagatattgtagtacaccgcttgttaatggcagccatttcaaaagataagaaaatggaaattaagggaaatctgttcagcaacaaagatcttgaggaattatgcagacatatcaacaacagaaaccaagcagcacagcattctcagaagcagtctactgagctcttccagtgcatgtacttcaaagacaaagaccctgccaccgaggagcgttgcatatctgacggagttatttattcaattagaacaaatggtgtgcttctatttataccaaggtttgggattaaaggtgctgcttatctaaaaaataaagatggtttagtcatctcatgtggcccagatagctgttctgaatggaaaccaggatcccttcaacgatttcaaaacaaaattacctctactacaacagatggggaatctgttacgttccatttgtttgaccatgtaaccgtaagaatatccatacaggcctcacgttgccattctgatacaatcagacttgaaataattagtaacaaaccatacaagataccaaatacagaacttattcatcagagttcccccttgctgaagagtgarttagtgaaagaagtaactaaatctgtggaagaagctcagcttgcccaagaagtcaaagtaaacatcattcaggaggaatatcaagaatatcgccaaacaaagggaaggagcctatacacacttctagaggagatacgggacctagctctcctggatgtttcaaacaattatggaatatgagaggctcttacttcactaagagctgtcatatgtgaatgttttacagtcttttcaaacttaacatttaatgtgtgtcactcagtgctctagtcgatcaggactgggtagctatttcgcatatatgtaaaatgttctcagccgggcacggtggctcacgcctgtaaccccagcactttgggaggctgaggcgggcggatcacgaggtcaggagattgagaccatcctggctaacacggtgaaacccagtctctactaaaaatacaaaaattagcccggcgtggtggcatgcgcctgtagtcccagctacttgggaggctgaagcaggagaattgcctgaacccaggaagaggaggttgcagtgagccgagatcgcaccactgcattccagcctgggcaacagagcgagactccatctcaaaaaaaaaaaaaaaaaaaaaaaaagttctctcattcattaaagttgcattaaataaagtataattaggtcactatggaaacagagttttcagtaatgagtggacagtaagtggtggctctgcagatggcccctttctaataagtttaataaacccgaaattactggttatctcgtctccaatcagttctttcaaatgttttatttttccagtaattacgtttgggtcataggcccctctgacatttgtcaggtaattttcagtcactttcagataataagacttagtc

SEQ ID NO: 4936 - DNA, 1689 bp, Homo sapiens
cagcctcagctgccttgcacagcctcgcaatgagctgccacaactgctccgacccccaggtcctttgcagctccgggcagctsttcctgcagcccctctgggaccacctgaggagctgggaggccctcctacagtcgcccttcttcccggtcatcttctccatcaccacatacgtgggcttttgcctgcccttcgtggtcctggatatcctgtgctcctgggtgcccgccctgcggcgctacaagatccaccctgacttctcgccatccgcgcagcagctgctaccttgcctggggcagaccctctaccagcatgtgatgtttgtgttccccgtgacgctgctgcattgggcccgcagcccggccctcctgccccacgaagctcccgagctgctcctgctgctgcaccacatcctgttctgcctgctactcttcgacatggagttcttcgtgtggcacctgctgcaccacaaggtgccctggctgtaccgcaccttccacaaggtgcaccaccagaactcgtcctcgttcgcrctggcaacgcagtatatgagcgtctgggaactgttttctttgggcttcttcgacatgatgaacgtcacactgctcgggtgccacccgctcaccaccctgaccttccacgtggtcaacatctggctttccgtggaggaccactccggctacaayttcccttggtccactcacagactggtgcccttcgggtggtacgggggtgtggtgcaccacgacctgcatcactctcactttaactgcaacttcgctccgtactttacacactgggacaaaatactgggaacgctgcggactgcatctgtcccagcgcggtgatgtggctgcggtgggtgcccctaagactcgggactgctgtgcctttcacacttgaatgaagagaaacacctgagctatatatttttttaaagcaactaacttattgctttatgtttatctatgaaaaccatagataaaatctgatgcatttttgtaatctgacaaagtaatttacatactgtttgtgtatcaatacaattttgtgttcttggtattcttagtctagctcacctcaatagccttgaatcctgcatatgaattagacattcatcactggcatatttagaatatctctaaaaggacttgtttgtagaataaggaattttctatgtttcaaagtgttctaaaacctggctaaaagaatgtatttttgtggatggtgttgacttctgactctaaaagcaatcaaacatgtttctgctggacagtgaccaagaattatagtaccttcttatatttttttatagaactgtatatttattttgaaagaaatgttattcgtgctttaaaaaggaaaaaaaaccatgaatcaaataagtattgacttccgtttcactggtattttgactgataaaaaagggaagagggagcgggcataccaagtgtccttctaagcctccatcagcctcaccatggaaagagaggaatctgggtgtagggtgttctgttgggggttgttagagaaaaggaggcaggagaaggggctctgtttgttgtgctctagcaatttcatggaggaaaaacacgctaatattcttaatgcttttcagctgatttctgtataacaggcaaatgataggattactctgtaaagtttcatagaaagattaacgctgagcag

SEQ ID NO: 4937 - DNA, 1481 bp, Homo sapiens
attgtcagctcctgattctgcagaaaacaygaaactgagctgtacaaagatgctgatgaggggctgcagcatgcaattcacttcaccagcagtcactaagaatgaaaatgcggttcttggggttggtggtctgtttggttctctggmccctgcattctgaggggtctrgagggaaactgacagctgtggatcctgaaacaaacatgaatgtgagtgaaattatctcttastggggattccctagtgaggaatacctagttgagacagaagatggatatattctgtgccttaaccgaattcctcatgggaggaagaaccattctgacaaaggtcccaaaccagttgtcttcctgcaacatggcttgctggcagattctagtaacwgggtcacaaaccttgccaacagcagcctgggcttcattcttgctgatgctggttttgacgtgtrgatgggcaacagcagaggaaatacctggtctcggaaacvtaagacactctcagtttctcaggatgaattctgggctttcagttatgawgagatggcaaaatatgacctaccagcttccattaacttcattctgaataaaactggccaagaacaagtgtattatgtgggtcattctcaaggcaccactataggttttatagcattttcacagatccctgagctggctaaaaggattaaaatgttttttgcccygggtcytgtggcttccgtcgccttctgtactagccctatggccaaattaggacgattaccagatcatctcattaaggacttatttggagacaaagaatttcttccccagagtgcgtttttgaagtggctgggtacccacgtttgcactcatgtcatactgaaggagctctgtggaaatctctgttttcttctgtgtggatttaatgagagaaatttaaatatgtctagagtggatgtatatacaacacattctcctgctggaacttctgtgcaaaacatgttacactggagccaggctgttaaattccaaaagtttcaagcctttgactggggaagcagtgccaagaattattttcattacaaccagagttawcctcccacatacaatgtgaaggacatgcttgtgccgactgcagtctggagcrggggtcacgactggcttgcagatgtctacgacgtcaatatcttacygactcagatcaccaacttggtgttccatgagagcattccggaatgggagcatcttgacttcatttggggcctggatgccccttggaggctttataataaaattattaatctaatgaggaaatatcagtgaaagctggacttgagctgtgtaccaccaagtcaatgattatgtcatgtgaaaatgtgtttgcttcatttctgtaaaacacttgtttttctttcccaggtcttttgtttttttatatccaagaaactattttttctttaattagggctggaataggaagccagtgtctcaaccatagtattg

SEQ ID NO: 4938 - DNA, 2537 bp, Homo sapiens
ccggcccctgagagctggcactgcgactcgagacagcggcccggcaggacagctccagactgttttattatacagaatgaaaatgcggttcttggggttggtggtctgtttggttctctggmccctgcattctgaggggtctrgagggaaactgacagctgtggatcctgaaacaaacatgaatgtgagtgaaattatctcttastggggattccctagtgaggaatacctagttgagacagaagatggatatattctgtgccttaaccgaattcctcatgggaggaagaaccattctgacaaaggtcccaaaccagttgtcttcctgcaacatggcttgctggcagattctagtaacwgggtcacaaaccttgccaacagcagcctgggcttcattcttgctgatgctggttttgacgtgtrgatgggcaacagcagaggaaatacctggtctcggaaacvtaagacactctcagtttctcaggatgaattctgggctttcagttatgawgagatggcaaaatatgacctaccagcttccattaacttcattctgaataaaactggccaagaacaagtgtattatgtgggtcattctcaaggcaccactataggttttatagcattttcacagatccctgagctggctaaaaggattaaaatgttttttgcccygggtcytgtggcttccgtcgccttctgtactagccctatggccaaattaggacgattaccagatcatctcattaaggacttatttggagacaaagaatttcttccccagagtgcgtttttgaagtggctgggtacccacgtttgcactcatgtcatactgaaggagctctgtggaaatctctgttttcttctgtgtggatttaatgagagaaatttaaatatgtctagagtggatgtatatacaacacattctcctgctggaacttctgtgcaaaacatgttacactggagccaggctgttaaattccaaaagtttcaagcctttgactggggaagcagtgccaagaattattttcattacaaccagagttawcctcccacatacaatgtgaaggacatgcttgtgccgactgcagtctggagcrggggtcacgactggcttgcagatgtctacgacgtcaatatcttacygactcagatcaccaacttggtgttccatgagagcattccggaatgggagcatcttgacttcatttggggcctggatgccccttggaggctttataataaaattattaatctaatgaggaaatatcagtgaaagctggacttgagctgtgtaccaccaagtcaatgattatgtcatgtgaaaatgtgtttgcttcatttctgtaaaacacttgtttttctttcccaggtcttttgtttttttatatccaagaaaatgataactttgaagatgcccagttcactctagtttcaattagaaacatactagctattttttctttaattagggctggaataggaagccagtgtctcaaccatagtattgtctctttaagtcttttaaatatcactgatgtgtaaaaaggtcattatatccattctgtttttaaaatttaaaatatattgactttttgcccttcataggacaaagtaatatatgtgttggaattttaaaattgtgttgtcattggtaaatctgtcactgacttaagcgaggtataaaagtacgcagttttcatgtccttgccttaaagagctctctagtctaacggtcttgtagttagagatctaaatgacattttatcatgttttcctgcagcaggtgcatagtcaaatccagaaatatcacagctgtgccagtaataaggatgctaacaattaattttatcaaacctaactgtgacagctgtgatttgacacgttttaattgctcaggttaaatgaaatagttttccggcgtcttcaaaaacaaattgcactgataaaacaaaaacaaaagtatgttttaaatgctttgaagactgatacactcaaccatctatattcatgagctctcaatttcatggcaggccatagttctacttatctgagaagcaaatccctgtggagactataccactattttttctgagattaatgtactcttggagcccgctactgtcgttattgatcacatctgtgtgaagccaaagccccgtggttgcccatgagaagtgtcctwgttcattttcacccaaatgaagtgtgaacgtgatgttttcggatgcaaactcagctcagggattcattttgtgtcttagttttatatgcatccttatttttaatacacctgcttcacgtccctatgttgggaagtccatatttgtctgcttttcttgcagcatcatttccttacaatactgtcyggtggacaaaatgacaattgatatgtttttctgatataattactttagctgcactaacagtacaatgcttgttaatggttaatataggcagggcgaatactactttgtaacttttaaagtcttaaacttttcaataaaattgagtgagacttataggcccaaagaatt

SEQ ID NO: 4939 - DNA, 2786 bp, Homo sapiens
atgcgtaggcgacgcgctggtagagctgtggacctgccagcctgcgaggcggaggacgggctccatctcttagaaacgcctacggcgcatgctctatggggtcaactggggggctggcaagcggcmgcgctggtctrgggcggagtctccgaggcacttcccggtggctggctgctctgattggctgaacaaatagtccgagggtggtgggcatccgccctcccgacaaggcagaccaggccccctgcaggtcccctatccgcaccccggcccctgagagctggcactgcgactcgagacagcggcccggcaggacagctccagaatgaaaatgcggttcttggggttggtggtctgtttggttctctggmccctgcattctgaggggtctrgagggaaactgacagctgtggatcctgaaacaaacatgaatgtgagtgaaattatctcttastggggattccctagtgaggaatacctagttgagacagaagatggatatattctgtgccttaaccgaattcctcatgggaggaagaaccattctgacaaaggtcccaaaccagttgtcttcctgcaacatggcttgctggcagattctagtaacwgggtcacaaaccttgccaacagcagcctgggcttcattcttgctgatgctggttttgacgtgtrgatgggcaacagcagaggaaatacctggtctcggaaacvtaagacactctcagtttctcaggatgaattctgggctttcagttatgawgagatggcaaaatatgacctaccagcttccattaacttcattctgaataaaactggccaagaacaagtgtattatgtgggtcattctcaaggcaccactataggttttatagcattttcacagatccctgagctggctaaaaggattaaaatgttttttgcccygggtcytgtggcttccgtcgccttctgtactagccctatggccaaattaggacgattaccagatcatctcattaaggacttatttggagacaaagaatttcttccccagagtgcgtttttgaagtggctgggtacccacgtttgcactcatgtcatactgaaggagctctgtggaaatctctgttttcttctgtgtggatttaatgagagaaatttaaatatgtctagagtggatgtatatacaacacattctcctgctggaacttctgtgcaaaacatgttacactggagccaggctgttaaattccaaaagtttcaagcctttgactggggaagcagtgccaagaattattttcattacaaccagagttawcctcccacatacaatgtgaaggacatgcttgtgccgactgcagtctggagcrggggtcacgactggcttgcagatgtctacgacgtcaatatcttacygactcagatcaccaacttggtgttccatgagagcattccggaatgggagcatcttgacttcatttggggcctggatgccccttggaggctttataataaaattattaatctaatgaggaaatatcagtgaaagctggacttgagctgtgtaccaccaagtcaatgattatgtcatgtgaaaatgtgtttgcttcatttctgtaaaacacttgtttttctttcccaggtcttttgtttttttatatccaagaaaatgataactttgaagatgcccagttcactctagtttcaattagaaacatactagctattttttctttaattagggctggaataggaagccagtgtctcaaccatagtattgtctctttaagtcttttaaatatcactgatgtgtaaaaaggtcattatatccattctgtttttaaaatttaaaatatattgactttttgcccttcataggacaaagtaatatatgtgttggaattttaaaattgtgttgtcattggtaaatctgtcactgacttaagcgaggtataaaagtacgcagttttcatgtccttgccttaaagagctctctagtctaacggtcttgtagttagagatctaaatgacattttatcatgttttcctgcagcaggtgcatagtcaaatccagaaatatcacagctgtgccagtaataaggatgctaacaattaattttatcaaacctaactgtgacagctgtgatttgacacgttttaattgctcaggttaaatgaaatagttttccggcgtcttcaaaaacaaattgcactgataaaacaaaaacaaaagtatgttttaaatgctttgaagactgatacactcaaccatctatattcatgagctctcaatttcatggcaggccatagttctacttatctgagaagcaaatccctgtggagactataccactattttttctgagattaatgtactcttggagcccgctactgtcgttattgatcacatctgtgtgaagccaaagccccgtggttgcccatgagaagtgtcctwgttcattttcacccaaatgaagtgtgaacgtgatgttttcggatgcaaactcagctcagggattcattttgtgtcttagttttatatgcatccttatttttaatacacctgcttcacgtccctatgttgggaagtccatatttgtctgcttttcttgcagcatcatttccttacaatactgtcyggtggacaaaatgacaattgatatgtttttctgatataattactttagctgcactaacagtacaatgcttgttaatggttaatataggcagggcgaatactactttgtaacttttaaagtcttaaacttttcaataaaattgagtgagacttataggcccaaagaatt

SEQ ID NO: 4940 - DNA, 2665 bp, Homo sapiens
ggtagtttgtaaagtgtaccttccccacaggacgctgtgggatgtaaatttgtaggtcgagtttacagctggtttttcttgactgaagctcattcaactggttacttctttgtgggtgtctttaatgaagcttataaatggcaaaaagcaaacattcccatggtttggcatggacatcggtggaacgctggttaaattggtgtatttcgagccgaaggatattacagccgaagaggagcaagaggaagtggagaacctgaagagcatccggaagtatttgacttctaatactgcttatgggaaaactgggatccgagacgtccacctggaactgaaaaacctgaccatgtgtggacgcaaagggaacctgcacttcatccgctttcccagctgtgctatgcacaggttcattcagatgggcagcgagaagaacttctctagccttcacaccaccctctgtgccacaggaggcggggctttcaaattcgaagaggacttcagaatgattgctgacctgcagctgcataaactggatgaactggactgtctgattcagggcctgctttatgtcgactctgttggcttcaacggcaagccagaatgttactattttgaaaatcccacaaatcctgaattgtgtcaaaaaaagccrtactgccttgataacccataccctatgttgctggttaacatgggctcaggtgtcagcattctagccgtgtactccaaggacaactataaaagagttacagggaccagtcttggaggtggaacattcctaggcctatgttgcttgctgactggttgtgagacctttgaagaagctctggaaatggcagctaaaggcgacagcaccaatgttgataaactggtgaaggacatttacggaggagactatgaacgatttggccttcaaggatctgctgtagcatcaagctttggcaacatgatgagtaaagaaaagcgagattccatcagcaaggaagacctcgcccgggccacattggtcaccatcaccaacaacattggctccattgctcggatgtgygcgttgaatgagaacatagacagagttgtgtttgttggaaattttctcagaatcaatatggtctccatgaagctgctggcatatgccatggatttttggtccaaaggacaactgaaagctctgtttttggaacatgagggttattttggagccgttggggcactgttggaactgttcaaaatgactgatgayaagtagagacgagcagtggaggaaacagcctcccaaaaggacagagaactaaaaaattgctgctggagaaggtgaaagtcgctttgggacggaagccaagccattatggcagatgaacctgctggatttgtaaataatttaaaatccttccagatgatcttttactcttaggttttgagctaatgattcaaaacgggggaatataaaaggttttttttctgtatactgtatttttttaaaaaaatggtgcagcgtggccaaacctaccaattgtatgcattaactttgaaaagttgtttgatgtttaagaaggacctgatatgtaagcgctggtcatttttcttctggggtttactgatcagtgtggtgattttaacttcatttagtaattactctaggagattttaccttgacttatatttttcatgacgtttcatgatttgctgttggtttcaaatgaaactacaaatctggcatgttttactgtgaacacttttgttatttgttttgtacccttttttgtcttgtttttctgttttagttgtcttctgaaaaaagagtygttccctctgtttctgtcctcagatgatgtccctccccctacctgtaacctttctttgacataattgttcatatcaatgaaggtgctgaccagctcaatacaaagttaagcacaagatctaaagctcttgaaaatgcccgtgaagagaagactgaatgtgttaatgaatttaatgagtctggcaaaagttgcaaattatatgcaagtttgtcctatcgcttataaatgtagtgtttcattggatttattttatgctaggttatattaagttgaaatagtctgtgattaaatgtcctcatccatgcacagaatatgaatggcagcaaatctttgtgcaagaaatttgaaacttattgggaaaagcctcccagtagattaattgttcatatcaggagatttagggtaagtcatgggttgaggtgtcagatagtaatatctatttgttttgtacatgtatatatctaggaactttgtaacaacacatctttaataatgttaaaggttttttcatttttaatattttaaactaaaaactgtacttcaatctcagtttctaaaattaaaaataatttatactgatctatatattttttctttttgaaagatttcattaagactgatgggtaactttcaaatgagggtcatgtacaaatattgggatgcatgagatcccatgatcttgtgtattgagcttattgttgaaagggatttttgaaggacagaacaattactccatgatgaatcttcctttctctgccttctgagcaccgtctttaatttccatatcttcaagtcttgaagaagttgatgttaattgaagaattcacttgtctggttgaaataaagcctgtttctgttgtgat

SEQ ID NO: 4941 - DNA, 2488 bp, Homo sapiens
ggtagtttgtaaagtgtaccttccccacaggacgctgtgggatgtaaatttgtaggtcgagtttacagctggtttttcttgactgaagctcattcaactggttacttctttgtgggtgtctttaatgaagcttataaatggcaaaaagcaaacattcccatggtttggcatggacatcggtggaacgctggttaaattggtgtatttcgagccgaaggatattacagccgaagaggagcaagaggaagtggagaacctgaagagcatccggaagtatttgacttctaatactgcttatgggaaaactgggatccgagacgtccacctggaactgaaaaacctgaccatgtgtggacgcaaagggaacctgcacttcatccgctttcccagctgtgctatgcacaggttcattcagatgggcagcgagaagaacttctctagccttcacaccaccctctgtgccacaggaggcggggctttcaaattcgaagaggacttcagaatgattgctgacctgcagctgcataaactggatgaactggactgtctgattcagggcctgctttatgtcgactctgttggcttcaacggcaagccagaatgttactattttgaaaatcccacaaatcctgaattgtgtcaaaaaaagccrtactgccttgataacccataccctatgttgctggttaacatgggctcaggtgtcagcattctagccgtgtactccaaggacaactataaaagagttacagggaccagctttggcaacatgatgagtaaagaaaagcgagattccatcagcaaggaagacctcgcccgggccacattggtcaccatcaccaacaacattggctccattgctcggatgtgygcgttgaatgagaacatagacagagttgtgtttgttggaaattttctcagaatcaatatggtctccatgaagctgctggcatatgccatggatttttggtccaaaggacaactgaaagctctgtttttggaacatgagggttattttggagccgttggggcactgttggaactgttcaaaatgactgatgayaagtagagacgagcagtggaggaaacagcctcccaaaaggacagagaactaaaaaattgctgctggagaaggtgaaagtcgctttgggacggaagccaagccattatggcagatgaacctgctggatttgtaaataatttaaaatccttccagatgatcttttactcttaggttttgagctaatgattcaaaacgggggaatataaaaggttttttttctgtatactgtatttttttaaaaaaatggtgcagcgtggccaaacctaccaattgtatgcattaactttgaaaagttgtttgatgtttaagaaggacctgatatgtaagcgctggtcatttttcttctggggtttactgatcagtgtggtgattttaacttcatttagtaattactctaggagattttaccttgacttatatttttcatgacgtttcatgatttgctgttggtttcaaatgaaactacaaatctggcatgttttactgtgaacacttttgttatttgttttgtacccttttttgtcttgtttttctgttttagttgtcttctgaaaaaagagtygttccctctgtttctgtcctcagatgatgtccctccccctacctgtaacctttctttgacataattgttcatatcaatgaaggtgctgaccagctcaatacaaagttaagcacaagatctaaagctcttgaaaatgcccgtgaagagaagactgaatgtgttaatgaatttaatgagtctggcaaaagttgcaaattatatgcaagtttgtcctatcgcttataaatgtagtgtttcattggatttattttatgctaggttatattaagttgaaatagtctgtgattaaatgtcctcatccatgcacagaatatgaatggcagcaaatctttgtgcaagaaatttgaaacttattgggaaaagcctcccagtagattaattgttcatatcaggagatttagggtaagtcatgggttgaggtgtcagatagtaatatctatttgttttgtacatgtatatatctaggaactttgtaacaacacatctttaataatgttaaaggttttttcatttttaatattttaaactaaaaactgtacttcaatctcagtttctaaaattaaaaataatttatactgatctatatattttttctttttgaaagatttcattaagactgatgggtaactttcaaatgagggtcatgtacaaatattgggatgcatgagatcccatgatcttgtgtattgagcttattgttgaaagggatttttgaaggacagaacaattactccatgatgaatcttcctttctctgccttctgagcaccgtctttaatttccatatcttcaagtcttgaagaagttgatgttaattgaagaattcacttgtctggttgaaataaagcctgtttctgttgtgat

SEQ ID NO: 4942 - DNA, 3216 bp, Homo sapiens
atgttgaaactcgtcggtggcggtggcgggcaggactgggcatgctcagtggcggggaccagtctgggaggcgaggaagccgcgtttgaagtcgcgcggcctggggatcaggggaaggcgggcggcgggagccccggctgggggtgcgcggggatccccgattccgcgcccggggctggcgtgctccaggccggcgccgtggggccggcgcgcggggggcagggcgcggaggaggtgggggagtcggcaggaggaggggaggagcgccgggttcgccatccccaggcgccggctctgcggctgctgaatcggaagccgcagggaggatccggggaaataaagacgccggagaatgacctccagcgaggccgcctgagccggggcccgcgcacagccccgccagcccccggcatgggcgaccgcagcgggcagcaggagcgctcggtcccgcactctccaggggcccccgtgggcaccagcgccgccgctgtgaacgggctgctgcacaacggcttccatccgccgccagtccagccgccgcacgtctgcagccggggtccagtgggcggcagcgacgcggcgccccagcgcctcccgctcctgccggagctscagccgcagccactgctccctcagcatgactccccggccaagaaatgccggctgcggaggaggatggactcggggagaaagaacaggccgccattcccatggtttggcatggacatcggtggaacgctggttaaattggtgtatttcgagccgaaggatattacagccgaagaggagcaagaggaagtggagaacctgaagagcatccggaagtatttgacttctaatactgcttatgggaaaactgggatccgagacgtccacctggaactgaaaaacctgaccatgtgtggacgcaaagggaacctgcacttcatccgctttcccagctgtgctatgcacaggttcattcagatgggcagcgagaagaacttctctagccttcacaccaccctctgtgccacaggaggcggggctttcaaattcgaagaggacttcagaatgattgctgacctgcagctgcataaactggatgaactggactgtctgattcagggcctgctttatgtcgactctgttggcttcaacggcaagccagaatgttactattttgaaaatcccacaaatcctgaattgtgtcaaaaaaagccrtactgccttgataacccataccctatgttgctggttaacatgggctcaggtgtcagcattctagccgtgtactccaaggacaactataaaagagttacagggaccagtcttggaggtggaacattcctaggcctatgttgcttgctgactggttgtgagacctttgaagaagctctggaaatggcagctaaaggcgacagcaccaatgttgataaactggtgaaggacatttacggaggagactatgaacgatttggccttcaaggatctgctgtagcatcaagctttggcaacatgatgagtaaagaaaagcgagattccatcagcaaggaagacctcgcccgggccacattggtcaccatcaccaacaacattggctccattgctcggatgtgygcgttgaatgagaacatagacagagttgtgtttgttggaaattttctcagaatcaatatggtctccatgaagctgctggcatatgccatggatttttggtccaaaggacaactgaaagctctgtttttggaacatgagggttattttggagccgttggggcactgttggaactgttcaaaatgactgatgayaagtagagacgagcagtggaggaaacagcctcccaaaaggacagagaactaaaaaattgctgctggagaaggtgaaagtcgctttgggacggaagccaagccattatggcagatgaacctgctggatttgtaaataatttaaaatccttccagatgatcttttactcttaggttttgagctaatgattcaaaacgggggaatataaaaggttttttttctgtatactgtatttttttaaaaaaatggtgcagcgtggccaaacctaccaattgtatgcattaactttgaaaagttgtttgatgtttaagaaggacctgatatgtaagcgctggtcatttttcttctggggtttactgatcagtgtggtgattttaacttcatttagtaattactctaggagattttaccttgacttatatttttcatgacgtttcatgatttgctgttggtttcaaatgaaactacaaatctggcatgttttactgtgaacacttttgttatttgttttgtacccttttttgtcttgtttttctgttttagttgtcttctgaaaaaagagtygttccctctgtttctgtcctcagatgatgtccctccccctacctgtaacctttctttgacataattgttcatatcaatgaaggtgctgaccagctcaatacaaagttaagcacaagatctaaagctcttgaaaatgcccgtgaagagaagactgaatgtgttaatgaatttaatgagtctggcaaaagttgcaaattatatgcaagtttgtcctatcgcttataaatgtagtgtttcattggatttattttatgctaggttatattaagttgaaatagtctgtgattaaatgtcctcatccatgcacagaatatgaatggcagcaaatctttgtgcaagaaatttgaaacttattgggaaaagcctcccagtagattaattgttcatatcaggagatttagggtaagtcatgggttgaggtgtcagatagtaatatctatttgttttgtacatgtatatatctaggaactttgtaacaacacatctttaataatgttaaaggttttttcatttttaatattttaaactaaaaactgtacttcaatctcagtttctaaaattaaaaataatttatactgatctatatattttttctttttgaaagatttcattaagactgatgggtaactttcaaatgagggtcatgtacaaatattgggatgcatgagatcccatgatcttgtgtattgagcttattgttgaaagggatttttgaaggacagaacaattactccatgatgaatcttcctttctctgccttctgagcaccgtctttaatttccatatcttcaagtcttgaagaagttgatgttaattgaagaattcacttgtctggttgaaataaagcctgtttctgttgtgat

SEQ ID NO: 4943 - DNA, 2246 bp, Homo sapiens
aggggtcggagtcggcgggggcggagccgagcgggcggggagggtgctgggtcgcgcctggcctggggccgaggcggcgcgcggcgctgacagctgagtcggctcgcggcctcccggccccctcggcgcccggcccgaccctggcctggcctgccctgccccggagccatgagccccgggctgctgctgctcggcagcgccgtcctgctcgccttcggcctctgctgcaccttcgtgcaccgcgctcgcagccgctacgagcacatccccgggccgccgcggcccagtttccttctaggacacctcccctgcttttggaaaaaggatgaggttggtggccgtgtgctccaagatgtgtttttggattgggctaagaagtatggacctgttgtgcgggtcaacgtcttccacaaaacctcagtcatcgtcacgagtcctgagtcggttaagaagttcctgatgtcaaccaagtacaacaaggactccaagatgtaccgtgcgctccagactgtgtttggtgagagactcttcggccaaggcttggtgtccgaatgcaactatgagcgctggcacaagcagcggagagtcatagacctggccttcagccggagctccttggttagcttaatggaaacattcaacgagaaggctgagcagctggtggagattctagaagccaaggcagatgggcagaccccagtgtccatgcaggacatgctgacctacaccgccatggacatcctggccaaggcagcttttgggatggagaccagtatgctgctgggtgcccagaagcctctgtcccaggcagtgaaacttatgttggagggaatcactgcgtcccgcaacactctggcaaagttcctgccagggaagaggaagcagctccgggaggtccgggagagcattcgcttcctgcgccaggtgggcagggactgggtccagcgccgccgggaagccctgaagaggggcgaggaggttcctgccgacatcctcacacagattctgaaagctgaagagggagcccaggacgacgagggtctgctggacaacttcgtcaccttcttcattgctggtcacgagacctctgccaaccacttggcgttcacagtgatggagctgtctcgccagccagagatcgtggcaaggctgcaggccgaggtggatgaggtcattggttctaagaggtacctggatttcgaggacctggggagactgcagtacctgtcccaggtcctcaaagagtcgctgaggctgtacccaccagcatggggcacctttcgcctgctggaagaggagaccttgattgatggggtcagagtccccggcaacaccccgctcttgttcagcacctatgtcatggggcggatggacacatactttgaggacccgctgactttcaaccccgatcgcttcggccctggagcacccaagccacggttcacctacttccccttctccctgggccaccgctcctgcatcgggcagcagtttgctcagatggaggtgaaggtggtcatggcaaagctgctgcagaggctggagttccggctggtgcccgggcagcgcttcgggctgcaggagcaggccacactcaagccactggaccccgtgctgtgcaccctgcggccccgcggytggcagcccgcacccccaccacccccctgctgagggggcctccaggcaggacgagactcctcgggcaagggccgtgcccgcccacctctgctgcccacggccacccacccttctcccctgccccgtcccctgggccacccttcacgctggcttccagcgggccctctgccgaccgcctgcttcacacccctcagcgctccctgtcgcctgcggactccatggcccttcctggactggcccttgcccaactcccagccaccaccactgtccctaccactgagcccttgcacaggccacttgctcagacgagacaccctaactcttgctcactccctaaagccctcttcaggggtcacctcctccaagaagccctccttgccaccccccgccggcaggggcccctcctctgtgctccctcggtcacctgtgctacctctaacaccacactgaccacactgtatcgtgagtgtccrttgacgtgaccaattgccctgccaggctgtcagcgcctcaagggtagggtctgcrtgtgatttgtctctgagccccctgtgcccacccagggcccggcacagagtcgatgctcaataaatgtgtgttgactgcat

SEQ ID NO: 4944 - DNA, 1765 bp, Homo sapiens
cacactttggcaggaagctgttgccagggcagcacctgtgaagccctggcctggcttcagagtctgctggtgagatgacatcaaaacccttcgtgtaggagggtggcagtctccctcccttctggagacaccaccagatgggccagccagaggcagcagcagcctcttcccatggatccaccacgagcgtcccacttgagccctcggaagaagagaccccggcagacgggtgccttgatggcctcctctcctcaagacatcaaatttcaagatttggtcgtcttcattttggagaagaaaatgggaaccacccgcagagcgttcctcatggagctggcccgcaggaaagggttcagggttgaaaatgagctcagtgattctgtcacccacatygtagcagagaacaactcgggttcggatgttctggagtggcttcaagyacagaaagtacaagtcagctcacaaccagagctcctcgatgtctcctggctgatcgaatgcatargagcagggaaaccggtggaaatgacaggaaaacaccagcttgttgtgagaagagactattcagatagcaccaacccaggccccccgaagactccaccaattgctgtacaaaagatctcccagtatgcgtgtcagagaagaaccactttaaacaactgtaaycagatattcacggatgcctttgatatactggctgaaaactgtgagtttagagaaaatgaagactcctgtgtgacatttatgagagcagcttctgtattgaaatctctgccattcacaatcatcagtatgaaggacacagaaggaattccctgcctggggtccaaggtgaagggtatcatagaggagattattgaagatggagaaagttctgaagttaaagctgtgttaaatgatgaacgatatcaatccttcaaactctttacttctgtatttggagtggggctgaagacttctgagaagtggttcaggatgggtttcagaactctgagtaaagtaaggtcgsamaaaagcctgaaatttacacgaatgcagaaagcaggatttctgtattatgaagaccttgtcagctgtgtgaccagggcagamgcagaggccgtcagtgtgctggttaaagaggctgtctgggcatttcttccggatgctttcgtcaccatgacaggagggttccggaggggtaagaagatggggcatgatgtagattttttaattaccagcccaggatcaacagaggatgaagagcaacttttacagaaagtgatgaacttatgggaaaagaagggattacttttatattatgaccttgtggagtcaacatttgaaaagctcaggttgcctagcaggaaggttgatgctttggatcattttcaaaagtgctttctgattttcaaattgcctcgtcaaagagtggacagtgaccagtccagctggcaggaaggaaagacctggaaggccatccgtgtggatttagttctgtgcccctacgagcgtcgtgcctttgccctgttgggatggactggctcccggcagtttgagagagacctccggcgctatgccacacatgagcggaagatgattctggataaccatgctttatatgacaagaccaagaggatattcctcaaagcagaaagtgaagaagaaatttttgcgcatctgggattggattatattgaaccgtgggaaagaaatgcctaggaaagtgttgtcaacawttttttcctattcttttcaagttaaataaattatgcttcatattagt

SEQ ID NO: 4945 - DNA, 3506 bp, Homo sapiens
ggcggtaggagttcggcggaccgagaggttccgcgcccacttcgcggcccagaggactgagcccggcctccggtgcaaggaaaccccagaggccggaactagaattgcaaattttttttcaccccggattccaacggcattctgttataagcaacagagaatgaacgaagacagaaaattggaaccaagaagtgggattttgctgatgacaaatacctgaaaatggggaagcagctttggaactaggttctcactctgttacccagactggagtgcagtgacacgattacagctcattacagcctcaatctcccaggctcaagtgatcttcccacctcagcctcctgagtagctgggactgcaggtacaaaattcagtaggacacsactttctgagtcatatgctggatttgaggagatactgaagccacaagactgaaataacttttaaactgtgggtgatttggctaaaagctactctcatctattatatattcatcttactagttttgctctcagaggaagttcctgtttccaaggacaatgatttaaggcattgaagtggaactgagacacttggatcaaatccctgttctgccacgtgcaagagtctaacgtgaagacattttgctccaagaatatcctagccatccttggcttctcctctatcatagctgtgatagctttgcttgctgtggggttgacccagaacaaagcattgccagaaaacgttaagtatgggattgtgctggatgcgggttcttctcacacaagtttatacatctataagtggccagcagaaaaggagaatgacacaggcgtggtscatcaagtagaagaatgcagggttaaaggtcctggaatctcaaaatttgttcagaaagtaaatgaaataggcatttacctgactgattgcatggaaagagctagggaagtgattccaaggtcccagcaccaagagacacccgtttacctgggagccacggcaggcatgcggttgctcaggatggaaagtgaagagttggcagacagggttctggatgtggtggagaggagcctcagcaactacccctttgacttccagggtgccaggatcattactggccaagaggaaggtgcctatggctggattactatcaactatctgctgggcaaattcagtcagaaaacaaggtggttcagcatagtcccatatgaaaccaataatcaggaaacctttggagctttggaccttgggggagcctctacacaagtcacttttgtaccccaaaaccagactatcgagtccccagataatgctctgcaatttcgcctctatggcaaggactacaatgtctacacacatagcttcttgtgctatgggaaggatcaggcactctggcagaaactggccaaggacattcaggcaagttgcaagtaatgaaattctcagggacccatgctttcatcctggatataagaaggtagtgaacrtaagtgacctttacaagaccccctgcaccaagagatttgagatgactcttccattccagcagtttgaaatccagggtattggaaactatcaacaatgccatcaaagcatcctggagctcttcaacaccagttactgcccttactcccagtgtgccttcaatgggattttcttgccaccactccagggggattttggggcattttcagctttttactttgtgatgaagtttttaaacttgacatcagagaaagtctctcaggaaaaggtgactgagatgatgaaaaagttctgtgctcagccttgggaggagataaaaacatcttacgctggagtaaaggagaagtacctgagtgaatactgcttttctggtacctacattctctccctccttctgcaaggctatcatttcacagctgattcctgggagcacatccatttcattggcaagatccagggcagcgacgccggctggactttgggctacatgctgaacctgaccaacatgatcccagctgagcaaccattgtccacacctctctcccactccacctatgtcttcctcatggttctattctccctggtccttttcacagtggccatcataggcttgcttatctttcacaagccttcatatttctggaaagatatggtatagcaaaagcagctgaaatatgctggctggagtgaggaaaaaaatcgtccagggagcattttcctccatcgcagtgttcaaggccatccttccctgtctgccagggccagtcttgacgagtgtgaagcttccttggcttttactgaagcctttcttttggaggtattcaatatcctttgcctcaaggacttcggcagatactgtctctttcatgagtttttcccagctacacctttctcctttgtactttgtgcttgtataggttttaaagacctgacacctttcataatctttgctttataaaagaacaatattgactttgtctagaagaactgagagtcttgagtcctgtgataggaggctgagctggctgaaagaagaatctcaggaactggttcagttgtactctttaagaacccctttctctctcctgtttgccatccattaagaaagccatatgatgcctttggagaaggcagacacacattccattcccagcctgctctgtgggtaggagaattttctacagtaggcaaatatgtgctaaagccaaagagttttataaggaaatatatgtgctcatgcagtcaatacagttctcaatcccacccaaagcaggtatgtcaataaatcacatattcctaggtgatacccaaatgctacagagtggaacactcagacctgagatttgcaaaaagcagatgtaaatatatgcattcaaacatcagggcttactatgaggtaggtggtatatacatgtcacaaataaaaatacagttacaactcagggtcacaaaaaatgcatcttccaatgcatatttttattatggtaaaatatacataaatataattcaccattttaacatttaattcatattaaatacgtacaaatcagtgacatttagtacattcacagtgttgtgccaccatcaccactatttagttccagaacatttgcatcatcaatacattgtctagagacaagactatcctgggtaggcagaaaccatagatcttttgtgtttacagctatggaaaccaactgtaccataaagatagttcactgagttttaaagccaagccacatsttatttttccaaggtttaatttagtgagagggcagcattagtgtggagtggcatgcttttgccctatcgtggaatttacacatcagaatgtgcaggatccaagtctgaaagtgttgccacccgtcacacaacatgggctttgtttgcttattccatgaagcagcagctatagaccttaccatggaaacatgaagagaccctgcacccctttccttaaggattgctgcaagagttacctgttgagcaggattgactggtgatgtttcattctgaccttgtcccaagctctccat

SEQ ID NO: 4946 - DNA, 1488 bp, Homo sapiens
ggcggtaggagttcggcggaccgagaggttccgcgcccacttcgcggcccagaggactgagcccggcctccggtgcaaggaaaccccagaggccggaactagaattgcaaattttttttcaccccggattccaacggcattctgttataagcaacagagaatgaacgaagacagaaaattggaaccaagaagtgggattttgctgatgacaaatacctgaaaatggggaagcagctttggaactaggttctcactctgttacccagactggagtgcagtgacacgattacagctcattacagcctcaatctcccaggctcaagtgatcttcccacctcagcctcctgagtagctgggactgcaggtacaaaattcagtaggacacsactttctgagtcatatgctggatttgaggagatactgaagccacaagactgaaataacttttaaactgtgggtgatttggctaaaagctactctcatctattatatattcatcttactagttttgctctcagaggaagttcctgtttccaaggacaatgatttaaggcattgaagtggaactgagacacttggatcaaatccctgttctgccacgtgcaagagtctaacgtgaagacattttgctccaagaatatcctagccatccttggcttctcctctatcatagctgtgatagctttgcttgctgtggggttgacccagaacaaagcattgccagaaaacgttaagtatgggattgtgctggatgcgggttcttctcacacaagtttatacatctataagtggccagcagaaaaggagaatgacacaggcgtggtscatcaagtagaagaatgcagggttaaaggtcctggaatctcaaaatttgttcagaaagtaaatgaaataggcatttacctgactgattgcatggaaagagctagggaagtgattccaaggtcccagcaccaagagacacccgtttacctgggagccacggcaggcatgcggttgctcaggatggaaagtgaagagttggcagacagggttctggatgtggtggagaggagcctcagcaactacccctttgacttccagggtgccaggatcattactggccaagaggaaggtgcctatggctggattactatcaactatctgctgggcaaattcagtcagaaaacaaggtggttcagcatagtcccatatgaaaccaataatcaggaaacctttggagctttggaccttgggggagcctctacacaagtcacttttgtaccccaaaaccagactatcgagtccccagataatgctctgcaatttcgcctctatggcaaggactacaatgtctacacacatagcttcttgtgctatgggaaggatcaggcactctggcagaaactggccaaggacattcaggcaagtataactcaatccagacctgccccyttcacatctgcacctccagcccccacatcctgttgttttctgtttcaaattcag

SEQ ID NO: 4947 - DNA, 2986 bp, Homo sapiens
ccttgagaaaggattgctggtcatgggaccagaggctttatggggagggaagaactgttcttgactttcagtttttcgagcgggtttcaagagtctaacgtgaagacattttgctccaagaatatcctagccatccttggcttctcctctatcatagctgtgatagctttgcttgctgtggggttgacccagaacaaagcattgccagaaaacgttaagtatgggattgtgctggatgcgggttcttctcacacaagtttatacatctataagtggccagcagaaaaggagaatgacacaggcgtggtscatcaagtagaagaatgcagggttaaaggtcctggaatctcaaaatttgttcagaaagtaaatgaaataggcatttacctgactgattgcatggaaagagctagggaagtgattccaaggtcccagcaccaagagacacccgtttacctgggagccacggcaggcatgcggttgctcaggatggaaagtgaagagttggcagacagggttctggatgtggtggagaggagcctcagcaactacccctttgacttccagggtgccaggatcattactggccaagaggaaggtgcctatggctggattactatcaactatctgctgggcaaattcagtcagaaaacaaggtggttcagcatagtcccatatgaaaccaataatcaggaaacctttggagctttggaccttgggggagcctctacacaagtcacttttgtaccccaaaaccagactatcgagtccccagataatgctctgcaatttcgcctctatggcaaggactacaatgtctacacacatagcttcttgtgctatgggaaggatcaggcactctggcagaaactggccaaggacattcaggttgcaagtaatgaaattctcagggacccatgctttcatcctggatataagaaggtagtgaacrtaagtgacctttacaagaccccctgcaccaagagatttgagatgactcttccattccagcagtttgaaatccagggtattggaaactatcaacaatgccatcaaagcatcctggagctcttcaacaccagttactgcccttactcccagtgtgccttcaatgggattttcttgccaccactccagggggattttggggcattttcagctttttactttgtgatgaagtttttaaacttgacatcagagaaagtctctcaggaaaaggtgactgagatgatgaaaaagttctgtgctcagccttgggaggagataaaaacatcttacgctggagtaaaggagaagtacctgagtgaatactgcttttctggtacctacattctctccctccttctgcaaggctatcatttcacagctgattcctgggagcacatccatttcattggcaagatccagggcagcgacgccggctggactttgggctacatgctgaacctgaccaacatgatcccagctgagcaaccattgtccacacctctctcccactccacctatgtcttcctcatggttctattctccctggtccttttcacagtggccatcataggcttgcttatctttcacaagccttcatatttctggaaagatatggtatagcaaaagcagctgaaatatgctggctggagtgaggaaaaaaatcgtccagggagcattttcctccatcgcagtgttcaaggccatccttccctgtctgccagggccagtcttgacgagtgtgaagcttccttggcttttactgaagcctttcttttggaggtattcaatatcctttgcctcaaggacttcggcagatactgtctctttcatgagtttttcccagctacacctttctcctttgtactttgtgcttgtataggttttaaagacctgacacctttcataatctttgctttataaaagaacaatattgactttgtctagaagaactgagagtcttgagtcctgtgataggaggctgagctggctgaaagaagaatctcaggaactggttcagttgtactctttaagaacccctttctctctcctgtttgccatccattaagaaagccatatgatgcctttggagaaggcagacacacattccattcccagcctgctctgtgggtaggagaattttctacagtaggcaaatatgtgctaaagccaaagagttttataaggaaatatatgtgctcatgcagtcaatacagttctcaatcccacccaaagcaggtatgtcaataaatcacatattcctaggtgatacccaaatgctacagagtggaacactcagacctgagatttgcaaaaagcagatgtaaatatatgcattcaaacatcagggcttactatgaggtaggtggtatatacatgtcacaaataaaaatacagttacaactcagggtcacaaaaaatgcatcttccaatgcatatttttattatggtaaaatatacataaatataattcaccattttaacatttaattcatattaaatacgtacaaatcagtgacatttagtacattcacagtgttgtgccaccatcaccactatttagttccagaacatttgcatcatcaatacattgtctagagacaagactatcctgggtaggcagaaaccatagatcttttgtgtttacagctatggaaaccaactgtaccataaagatagttcactgagttttaaagccaagccacatsttatttttccaaggtttaatttagtgagagggcagcattagtgtggagtggcatgcttttgccctatcgtggaatttacacatcagaatgtgcaggatccaagtctgaaagtgttgccacccgtcacacaacatgggctttgtttgcttattccatgaagcagcagctatagaccttaccatggaaacatgaagagaccctgcacccctttccttaaggattgctgcaagagttacctgttgagcaggattgactggtgatgtttcattctgaccttgtcccaagctctccat

SEQ ID NO: 4948 - DNA, 3502 bp, Homo sapiens
ggcggtaggagttcggcggaccgagaggttccgcgcccacttcgcggcccagaggactgagcccggcctccggtgcaaggaaaccccagaggccggaactagaattgcaaattttttttcaccccggattccaacggcattctgttataagcaacagagaatgaacgaagacagaaaattggaaccaagaagtgggattttgctgatgacaaatacctgaaaatggggaagcagctttggaactaggttctcactctgttacccagactggagtgcagtgacacgattacagctcattacagcctcaatctcccaggctcaagtgatcttcccacctcagcctcctgagtagctgggactgcaggtacaaaattcagtaggacacsactttctgagtcatatgctggatttgaggagatactgaagccacaagactgaaataacttttaaactgtgggtgatttggctaaaagctactctcatctattatatattcatcttactagttttgctctcagaggaagttcctgtttccaaggacaatgatttaaggcattgaagtggaactgagacacttggatcaaatccctgttctgccacgtgcaagagtctaacgtgaagacattttgctccaagaatatcctagccatccttggcttctcctctatcatagctgtgatagctttgcttgctgtggggttgacccagaacaaagcattgccagaaaacgttaagtatgggattgtgctggatgcgggttcttctcacacaagtttatacatctataagtggccagcagaaaaggagaatgacacaggcgtggtscatcaagtagaagaatgcagggttaaaggtcctggaatctcaaaatttgttcagaaagtaaatgaaataggcatttacctgactgattgcatggaaagagctagggaagtgattccaaggtcccagcaccaagagacacccgtttacctgggagccacggcaggcatgcggttgctcaggatggaaagtgaagagttggcagacagggttctggatgtggtggagaggagcctcagcaactacccctttgacttccagggtgccaggatcattactggccaagaggaaggtgcctatggctggattactatcaactatctgctgggcaaattcagtcagaaaacaaggtggttcagcatagtcccatatgaaaccaataatcaggaaacctttggagctttggaccttgggggagcctctacacaagtcacttttgtaccccaaaaccagactatcgagtccccagataatgctctgcaatttcgcctctatggcaaggactacaatgtctacacacatagcttcttgtgctatgggaaggatcaggcactctggcagaaactggccaaggacattcaggttgcaagtaatgaaattctcagggacccatgctttcatcctggatataagaaggtagtgaacrtaagtgacctttacaagaccccctgcaccaagagatttgagatgactcttccattccagcagtttgaaatccagggtattggaaactatcaacaatgccatcaaagcatcctggagctcttcaacaccagttactgcccttactcccagtgtgccttcaatgggattttcttgccaccactccagggggattttggggcattttcagctttttactttgtgatgaagtttttaaacttgacatcagagaaagtctctcaggaaaaggtgactgagatgatgaaaaagttctgtgctcagccttgggaggagataaaaacatcttacgctggagtaaaggagaagtacctgagtgaatactgcttttctggtacctacattctctccctccttctgcaaggctatcatttcacagctgattcctgggagcacatccatttcattggcaagatccagggcagcgacgccggctggactttgggctacatgctgaacctgaccaacatgatcccagctgagcaaccattgtccacacctctctcccactccacctatgtcttcctcatggttctattctccctggtccttttcacagtggccatcataggcttgcttatctttcacaagccttcatatttctggaaagatatggtatagcaaaagcagctgaaatatgctggctggagtgaggaaaaaaatcgtccagggagcattttcctccatcgcagtgttcaaggccatccttccctgtctgccagggccagtcttgacgagtgtgaagcttccttggcttttactgaagcctttcttttggaggtattcaatatcctttgcctcaaggacttcggcagatactgtctctttcatgagtttttcccagctacacctttctcctttgtactttgtgcttgtataggttttaaagacctgacacctttcataatctttgctttataaaagaacaatattgactttgtctagaagaactgagagtcttgagtcctgtgataggaggctgagctggctgaaagaagaatctcaggaactggttcagttgtactctttaagaacccctttctctctcctgtttgccatccattaagaaagccatatgatgcctttggagaaggcagacacacattccattcccagcctgctctgtgggtaggagaattttctacagtaggcaaatatgtgctaaagccaaagagttttataaggaaatatatgtgctcatgcagtcaatacagttctcaatcccacccaaagcaggtatgtcaataaatcacatattcctaggtgatacccaaatgctacagagtggaacactcagacctgagatttgcaaaaagcagatgtaaatatatgcattcaaacatcagggcttactatgaggtaggtggtatatacatgtcacaaataaaaatacagttacaactcagggtcacaaaaaatgcatcttccaatgcatatttttattatggtaaaatatacataaatataattcaccattttaacatttaattcatattaaatacgtacaaatcagtgacatttagtacattcacagtgttgtgccaccatcaccactatttagttccagaacatttgcatcatcaatacattgtctagagacaagactatcctgggtaggcagaaaccatagatcttttgtgtttacagctatggaaaccaactgtaccataaagatagttcactgagttttaaagccaagccacatsttatttttccaaggtttaatttagtgagagggcagcattagtgtggagtggcatgcttttgccctatcgtggaatttacacatcagaatgtgcaggatccaagtctgaaagtgttgccacccgtcacacaacatgggctttgtttgcttattccatgaagcagcagctatagaccttaccatggaaacatgaagagaccctgcacccctttccttaaggattgctgcaagagttacctgttgagcaggattgactggtgatgtttcattctgaccttgtcccaagctctccat

SEQ ID NO: 4949 - DNA, 3236 bp, Homo sapiens
gagggaagaagggagaaagagagagagatttgaatatacattgcttcaaggatgcaaaaaattacaacctggaaaaggcttcgagtaactttaggaaaatgagctgctggactcctcagtcaatctgtcctttctagtcaatgaaaaagacagggtttgaggttccttccgaaacggggccggctaatttagcccctcccacgagcccaagggtctgttatatctctgtttccttgaggacctctctcacggagacggaccacagcaagcagaggctggrggggggaaagacgaggaaagaggaggaaaacaaaagctgctacttatggaagatacaaaggagtctaacgtgaagacattttgctccaagaatatcctagccatccttggcttctcctctatcatagctgtgatagctttgcttgctgtggggttgacccagaacaaagcattgccagaaaacgttaagtatgggattgtgctggatgcgggttcttctcacacaagtttatacatctataagtggccagcagaaaaggagaatgacacaggcgtggtscatcaagtagaagaatgcagggttaaaggtcctggaatctcaaaatttgttcagaaagtaaatgaaataggcatttacctgactgattgcatggaaagagctagggaagtgattccaaggtcccagcaccaagagacacccgtttacctgggagccacggcaggcatgcggttgctcaggatggaaagtgaagagttggcagacagggttctggatgtggtggagaggagcctcagcaactacccctttgacttccagggtgccaggatcattactggccaagaggaaggtgcctatggctggattactatcaactatctgctgggcaaattcagtcagaaaacaaggtggttcagcatagtcccatatgaaaccaataatcaggaaacctttggagctttggaccttgggggagcctctacacaagtcacttttgtaccccaaaaccagactatcgagtccccagataatgctctgcaatttcgcctctatggcaaggactacaatgtctacacacatagcttcttgtgctatgggaaggatcaggcactctggcagaaactggccaaggacattcaggttgcaagtaatgaaattctcagggacccatgctttcatcctggatataagaaggtagtgaacrtaagtgacctttacaagaccccctgcaccaagagatttgagatgactcttccattccagcagtttgaaatccagggtattggaaactatcaacaatgccatcaaagcatcctggagctcttcaacaccagttactgcccttactcccagtgtgccttcaatgggattttcttgccaccactccagggggattttggggcattttcagctttttactttgtgatgaagtttttaaacttgacatcagagaaagtctctcaggaaaaggtgactgagatgatgaaaaagttctgtgctcagccttgggaggagataaaaacatcttacgctggagtaaaggagaagtacctgagtgaatactgcttttctggtacctacattctctccctccttctgcaaggctatcatttcacagctgattcctgggagcacatccatttcattggcaagatccagggcagcgacgccggctggactttgggctacatgctgaacctgaccaacatgatcccagctgagcaaccattgtccacacctctctcccactccacctatgtcttcctcatggttctattctccctggtccttttcacagtggccatcataggcttgcttatctttcacaagccttcatatttctggaaagatatggtatagcaaaagcagctgaaatatgctggctggagtgaggaaaaaaatcgtccagggagcattttcctccatcgcagtgttcaaggccatccttccctgtctgccagggccagtcttgacgagtgtgaagcttccttggcttttactgaagcctttcttttggaggtattcaatatcctttgcctcaaggacttcggcagatactgtctctttcatgagtttttcccagctacacctttctcctttgtactttgtgcttgtataggttttaaagacctgacacctttcataatctttgctttataaaagaacaatattgactttgtctagaagaactgagagtcttgagtcctgtgataggaggctgagctggctgaaagaagaatctcaggaactggttcagttgtactctttaagaacccctttctctctcctgtttgccatccattaagaaagccatatgatgcctttggagaaggcagacacacattccattcccagcctgctctgtgggtaggagaattttctacagtaggcaaatatgtgctaaagccaaagagttttataaggaaatatatgtgctcatgcagtcaatacagttctcaatcccacccaaagcaggtatgtcaataaatcacatattcctaggtgatacccaaatgctacagagtggaacactcagacctgagatttgcaaaaagcagatgtaaatatatgcattcaaacatcagggcttactatgaggtaggtggtatatacatgtcacaaataaaaatacagttacaactcagggtcacaaaaaatgcatcttccaatgcatatttttattatggtaaaatatacataaatataattcaccattttaacatttaattcatattaaatacgtacaaatcagtgacatttagtacattcacagtgttgtgccaccatcaccactatttagttccagaacatttgcatcatcaatacattgtctagagacaagactatcctgggtaggcagaaaccatagatcttttgtgtttacagctatggaaaccaactgtaccataaagatagttcactgagttttaaagccaagccacatsttatttttccaaggtttaatttagtgagagggcagcattagtgtggagtggcatgcttttgccctatcgtggaatttacacatcagaatgtgcaggatccaagtctgaaagtgttgccacccgtcacacaacatgggctttgtttgcttattccatgaagcagcagctatagaccttaccatggaaacatgaagagaccctgcacccctttccttaaggattgctgcaagagttacctgttgagcaggattgactggtgatgtttcattctgaccttgtcccaagctctccat

SEQ ID NO: 4950 - DNA, 744 bp, Homo sapiens
ctctatccaacccttggcttcccaactscgtatttaaaccccgcccctgttgaacccttcggcttttcttcactcccggcttcctccgtcacgtttggcccggctcagccgccgtgacaggcctttgcgcatgtgcagaagggaaacgtgaagaagcctcccacatgaccaaggacatgttcccggggccctatcctaggaccccagaagaacgggccgccgccgccaagaagtataatatgcgtgtggaagactacgaaccttacccggatgatggcatggggtatggcgactacccgaagctccctgaccgctcacagcatgagagagatccatggtatagctgggaccagccgggcctgaggttgaactggggtgaaccgatgcactggcacctagacatgtacaacaggaaccgtgtggatacatcccccacacctgttycttggcatgtcatgtgtatgcagctcttcggtttcctggctttcatgatattcatgtgctgggtgggggacgtgtaccctgtctaccagcctgtgggaccaaagcagtatccttacaataatctgtacctggaacgaggcggtgatccctccaaagaaccagagcgggtggttcactatgagatctgaggaggcttcgtgggcttttgggtcctctaactaggactccctcattcctagaaatttaaccttaatgaaatccctaataaaactcagtgctgtgtwatttgtgcctcatttc

SEQ ID NO: 4951 - DNA, 733 bp, Homo sapiens
gctcagccgccgtgacaggcctttgcgcatgtgcagaagggaaacgtgaagaaggtgaagatggcggtggccagggccggggtcttgggagtccagtggctgcaaagggcatcccggaacgtgatgccgctgggcgcacggacagcctcccacatgaccaaggacatgttcccggggccctatcctaggaccccagaagaacgggccgccgccgccaagaagtataatatgcgtgtggaagactacgaaccttacccggatgatggcatggggtatggcgactacccgaagctccctgaccgctcacagcatgagagagatccatggtatagctgggaccagccgggcctgaggttgaactggggtgaaccgatgcactggcacctagacatgtacaacaggaaccgtgtggatacatcccccacacctgttycttggcatgtcatgtgtatgcagctcttcggtttcctggctttcatgatattcatgtgctgggtgggggacgtgtaccctgtctaccagcctgtgggaccaaagcagtatccttacaataatctgtacctggaacgaggcggtgatccctccaaagaaccagagcgggtggttcactatgagatctgaggaggcttcgtgggcttttgggtcctctaactaggactccctcattcctagaaatttaaccttaatgaaatccctaataaaactcagtgctgtgtwatttgtgcctcatttc

SEQ ID NO: 4952 - DNA, 1293 bp, Homo sapiens
cgggcggagctggtcccgttgtgctgcggcgccgcgcggcctgcagtcccgggcccgcgccccgcgccgcccgcccgcccgccatggagcccggccccgacggccccgccgcctccggccccgccgccatccgcgagggctggttccgcgagacctgcagcctgtggcccggccaggccctgtcgctgcaggtggagcagctgctccaccaccggcgctcgcgctaccaggacatcctcgtcttccgcagtaagacctatggcaacgtgctggtgttggacggtgtcatccagtgcacggagagagacgagttctcctaccaggagatgatcgccaacctgcctctctgcagccaccccaacccgcgaaaggtgctgatcatcgggggcggagatggaggtgtcctgcgggaggtggtgaagcacccctccgtggagtccgtggtccagtgtgagatcgacgaggatgtcatccaagtctccaagaagttcctgccaggcatggccattggctactctagctcgaagstgaccctacatgtgggtgacggttttgagttcatgaaacagaatcaggatgccttcgacgtgatcatcactgactcctcagaccccatgggccccgccgaaagtctcttcaaggagtcctattaccagctcatgaagacagccctcaaggaagatggtgtcctctgctgccagggcgagtgccagtggctgcacctggacctcatcaaggagatgcggcagttctgccagtccctgttccccgtggtggcctatgcctactgcaccatccccacctaccccagcggccagatcggcttcatgctgtgcagcaagaacccgagcacgaacttccaggagccggtgcagccgctgacacagcagcaggtggcgcagatgcagctgaagtactacaactccgacgtgcaccgcgccgcctttgtgctgcccgagtttgcccgcaagagcgccctcctgactggcctcatgtccctccaggcmctgaatgatgtgagctgagcccaggcgccaccactgatgccacccaggacctcggaccttggagcctgcggggtgcctcggcccctccagccccgggccggacctcctgctggctctcgcccaccaaccaagtgttacaagccccagaatgctgcccggcctgccctgctgggcggactgtctgtgtgtctgtctctctggcgttccacctccaagcctataccagctgtgtacagcgccatctctctgccttctgttgcccctcactcaccaaacacgtgtattt

SEQ ID NO: 4953 - DNA, 1279 bp, Homo sapiens
cgggcggagctggtcccgttgtgctgcggcgccgcgcggcctgcagtcccgggcccgcgccccgcgccgcccgcccgcccgccatggagcccggccccgacggccccgccgcctccggccccgccgccatccgcgagggctggttccgcgagacctgcagcctgtggcccggccaggccctgtcgctgcaggtggagcagctgctccaccaccggcgctcgcgctaccaggacatcctcgtcttccgcagtaagacctatggcaacgtgctggtgttggacggtgtcatccagtgcacggagagagacgagttctcctaccaggagatgatcgccaacctgcctctctgcagccaccccaacccgcgaaaggtgctgatcatcgggggcggagatggaggtgtcctgcgggaggtggtgaagcacccctccgtggagtccgtggtccagtgtgagatcgacgaggatgtcatccaagtctccaagaagttcctgccaggcatggccattggctactctagctcgaagstgaccctacatgtgggtgacggttttgagttcatgaaacagaatcaggatgccttcgacgtgatcatcactgactcctcagaccccatgggccccgccgaaagtctcttcaaggagtcctattaccagctcatgaagacagccctcaaggaagatggtgtcctctgctgccagggcgagtgccagtggctgcacctggacctcatcaaggagatgcggcagttctgccagtccctgttccccgtggtggcctatgcctactgcaccatccccacctaccccagcggccagatcggcttcatgctgtgcagcaagaacccgagcacgaacttccaggagccggtgcagccgctgacacagcagcaggtggcgcagatgcagctgaagtactacaactccgacgtgcaccgcgccgcctttgtgctgcccgagtttgcccgcaaggcmctgaatgatgtgagctgagcccaggcgccaccactgatgccacccaggacctcggaccttggagcctgcggggtgcctcggcccctccagccccgggccggacctcctgctggctctcgcccaccaaccaagtgttacaagccccagaatgctgcccggcctgccctgctgggcggactgtctgtgtgtctgtctctctggcgttccacctccaagcctataccagctgtgtacagcgccatctctctgccttctgttgcccctcactcaccaaacacgtgtatttatagcaaagattggagtcc

SEQ ID NO: 4954 - DNA, 3661 bp, Homo sapiens
tgtttccgggcgggcctccagaggccggcgcacaagatggcggctctggcggcctaaagaaggcggccgcggctcagccgtgggctctaacgcggggctgggggccggagacagacttcgcccaggtgacgggtagtaggggcggcgccgcttggcctcgtggggtgtaagacccacttgctgttgcccccggaccttgccgccacaccagccctgtcctggggcggaaccgaaggaaggtcgggccctgctgccccgccccgtccttcctccttcccgggcggtcackgtgcgtggctcacttttagagtttacttcaaccacgtggagcttccatggcggcctctcaggtcctgggggagaagattaacatcctgtcgggagagactgtcaaagctggggacagggacccgctggggaacgactgtcccgagcaagataggctcccccagcgctcctggaggcagaagtgtgcctcctacgtgttggccctgaggccctggagcttcagtgcctcactcacaccggtggccctgggcagtgcccttgcctacagatcccacggtgtcctggatcccaggctcttggtgggttgtgccgtggctgtcctggctgtgcacggggccggtaatttggtcaacacttactatgacttttccaagggcattgaccacaaaaagagtgaygacaggacacttgtggaccgaatcttggagccgcaggatgtcgtccggttcggagtcttcctctacacgttgggctgcgtctgtgccgcttgcctctactacctgtcccctctgaaactggagcacttggctcttatctactttggaggcctgtctggctcctttctctacacaggaggaattggattcaagtacgtggctctgggagacctcatcatcctcatcacttttggcccgctggctgtgatgttcgcctacgccatccaggtggggtccctggccatcttcccactggtctatgccatccccctcgccctcagcaccgaggccattctccattccaacaacaccagggacatggagtccgaccgggaggctggtatcgtcacgctggccatcctcatcggccccacgttctcctacattctctacaacacactgctcttcctgccctacctggtcttcagcatcctggccacacactgcaccatcagcctggcactccccctgcttaccattcccatggccttctcccttgagagacagtttcgaagccaggccttcaacaaactgccccagaggactgccaagctcaacctcctgctgggacttttctatgtctttggcatcattctggcaccagcaggcagtctgcccaaaatttaaggggacaagtagctccccccacgacatgtctccctttcttagaatatattaaagtcagagtctctgaggaaggaatgtgatttggcagtcagggtactaagcatgggtgggaactcctgccttataaaaattgtttttgtgttcttaragataatatgttgtttttctgttttttgttttttccattttatggggaatttaaaaaccattcttgtatcagaaggtgaattaggcgcatggtctttgttttattaatwatttccactagagggtgttctcaggtcactttgcagtgaagtggacttagttcctccttgttctgtacaaaatgtctccagactttgtaaaggagctgcccagtttggcctcctgtcccgaaaagaccctaataactaggcagagtgttgtcctgctttcttcgtctcgtaggatgtgctatgattggtgccaggcctcactaacacaggggctacctgtctcttattctcagcacctgtgtcctgagatacgctgcctgagacagagagagtccctcattaacagcctgtgtggctgtcagctttttgcctaaattgtgattcagatgcttttgttctctctcctttcacttattgccacagttgaggaaaagtgtcagattaccctgcagcaagacaagccaaggactgggagggaaaaaaaaaccactctggaggcaactgagaaaatcactgcttttggataggaatcagtagggtggctgttttccctttgttgaatctactagagtgacaggaaggactcccagccctttcagtaactatcaggagccctgaaacggtagaggcactgccatccttgtgggatactcaaagcccacagggcttttccctccctattgcatcttctgatgctccccacaccyaccctccacctctccacctctgtggtgttcccatttgtgtgtttcccatctgtggagccagactgagcaatagcttagcagcgagtcagggacagctgccactttccacagagccacaggatgggcagagcagggacccagggaatgaatagccagtggacaaacagtcttgagctctgttcagccagagtgatgggccctgccagttaaggggctgtgtcttcatccttgaagacagatgtgcaatattgaccctgcctctccccagggctttgtggaaagatagttgagggctttagtgagatcacactcagagtggggcaattccagcatttatcctggctgcgtttcattgcattgtctgtgaagtataatttctgggccagaattgctcagttgcatttgatccaggactatagattggaaatgggtcatcattgttttctgttgtgattatagccattctagtaggcgtttaaggtcatggcctgcagaaaatgatgtaagaactagttcttaatctttcagatcaagctaatgatgatatggaaccttgagttcgaattgattggtttacttggaaaaaaacatgtttgaaaattgcaaaagttccgccgggcgcggtggctcatgcctgtaatcccagcactttgggaggccgagacgggcggatcacgaggtcaggagatcgagaccatcttggctaacacggtgaaaccccgtttctactaaaaatacaaaaaattagccaggcgtgttggcgggcgcctgtagtcccagctacctgggcggctgaggcaggagcatggcgtgaacccaggaggcggagcttgcagtgagctgagatcatgccactgcactccaacctgggggacacagcaagactccgtctcaaaaaaaaaaaaagaaaaagaaaattgcaaaagttcctctaaagttaaatcaaaggtggtttgtctagcagagagccagaatcttctaatagtgggcagagcccagagacaaggggaagaaagatgaccttctccccagtccttcccagcaccatttttgtttcacaccaggcttgtggcattttggtgctcacaggggttttgccttctgacctctccttggagtaggccattctcatgcagggctcaccctgaggcaggaggaccaagggctccctgcgtccacggaccacgtatgccttggtggtcactcccatcggggctatcagttctgcactgtgccctggtgcggattttaatgcatatttttatatataaatgttcccaaaggccaaatttgttgccaggttttatacgcaggtcaccataatttgtattatgttccctgagtcaatgaaggttttctttagacttcttaattaaaaagagaagaaagaaaatgttcaccaatg

SEQ ID NO: 4955 - DNA, 8722 bp, Homo sapiens
sctcccggcttagaggacagcggggaaggcgggcggtggggcasggggcctgaagcggcggtaccggtgctggcggcggcagctgaggccttggccgaagccgcgcgaacctcagggcaagatgcttggaaccggacctgccgccgccaccaccgctgccaccacatctagcaatgtgagcgtcctgcagcagtttgccagtggcctaaagagccggaatgaggaaaccagggccaaagccgccaaggagctccagcactatgtcaccatggaactccgagagatgagtcaagaggagtctactcgcttctatgaccaactgaaccatcacatttttgaattggtttccagctcagatgccaatgagaggaaaggtggcatcttggccatagctagcctcataggagtggaaggtgggaatgccacccgaattggcagatttgccaactatcttcggaacctcctcccctccaatgacccagttgtcatggaaatggcatccaaggccattggccgtcttgccatggcaggggacacttttaccgctgagtacgtggaatttgaggtgaagcgagccctggaatggctgggtgctgaccgcaatgagggccggagacatgcagctgtcctggttctccgtgagctggccatcagcgtccctaccttcttcttccagcaagtgcaacccttctttgacaacatttttgtggccgtgtgggaccccaaacaggccatccgtgagggagctgtagccgcccttcgtgcctgtctgattctcacaacccagcgtgagccgaaggagatgcagaagcctcagtggtacaggcacacatttgaagaagcagagaagggatttgatgagaccttggccaaagagaagggcatgaatcgggatgatcggatccatggagccttgttgatccttaacgagctggtccgaatcagcagcatggagggagagcgtctgagagaagaaatggaagaaatcacacagcagcagctggtacacgacaagtactgcaaagatctcatgggcttcggaacaaaacctcgtcacattacccccttcaccagtttccaggctgtacagccccagcagtcaaatgccttggtggggctgctggggtacagctctcaccaaggcctcatgggatttgggacctcccccagtccagctaagtccaccctggtggagagccggtgttgcagagacttgatggaggagaaatttgatcaggtgtgccagtgggtgctgaaatgcaggaatagcaagaactcgctgatccaaatgacaatccttaatttgttgccccgcttggctgcattccgaccttctgccttcacagatacccagtatctccaagataccatgaaccatgtcctaagctgtgtcaagaaggagaaggaacgtacagcggccttccaagccctggggctactttctgtggctgtgaggtctgagtttaaggtctatttgcctcgcgtgctggacatcatccgagcggccctgcccccaaaggacttcgcccataagaggcagaaggcaatgcaggtggaygccacagtcttcacttgcatcagcatgctggctcgagcaatggggccaggcatccagcaggatatcaaggagctgctggagcccatgctggcagtgggactaagccctgccctcactgcagtgctctacgacctgagccgtcagattccacagctaaagaaggacattcaagatgggctactgaaaatgctgtccctggtccttatgcacaaaccccttcgccacccaggcatgcccaagggcctggcccatcagctggcctctcctggcctcacgaccctccctgaggccagcgatgtgggcagcatcactcttgccctccgaacgcttggcagctttgaatttgaaggccactctctgacccaatttgttcgccactgtgcggatcatttcctgaacagtgagcacaaggagatccgcatggaggctgcccgcacctgctcccgcctgctcacaccctccatccacctcatcagtggccatgctcatgtggttagccagaccgcagtgcaagtggtggcagatgtgcttagcaaactgctcgtagttgggataacagatcctgaccctgacattcgctactgtgtcttggcgtccctggacgagcgctttgatgcacacctggcccaggcggagaacttgcaggccttgtttgtggctctgaatgaccaggtgtttgagatccgggagctggccatctgcactgtgggccgactcagtagcatgaaccctgcctttgtcatgcctttcctgcgcaagatgctcatccagattttgacagagttggagcacagtgggattggaagaatcaaagagcagagtgcccgcatgctggggcacctggtctccaatgccccccgactcatccgcccctacatggagcctattctgaaggcattaattttgaaactgaaagatccagaccctgatccaaacccaggtgtgatcaataatgtcctggcaacaataggagaattggcacaggttagtggcctggaaatgaggaaatgggttgatgaactttttattatcatcatggacatgctccaggattcctctttgttggccaaaaggcaggtggctctgtggaccctgggacagttggtggccagcactggctatgtagtagagccctacaggaagtaccctactttgcttgaggtgctactgaattttctgaagactgagcagaaccagggtacacgcagagaggccatccgtgtgttagggcttttaggggctttggatccttacaagcacaaagtgaacattggcatgatagaccagtcccgggatgcctctgctgtcagcctgtcagaatccaagtcaagtcaggattcctctgactatagcactagtgaaatgctggtcaacatgggaaacttgcctctggatgagttctacccagctgtgtccatggtggccctgatgcggatcttccgagaccagtcactctctcatcatcacaccatggttgtccaggccatcaccttcatcttcaagtccctgggactcaaatgtgtgcagttcctgccccaggtcatgcccacgttccttaaygtcattcgagtctgtgatggggccatccgggaatttttgttccagcagctgggaatgttggtgtcctttgtgaagagccacatcagaccttatatggatgaaatagtcaccctcatgagagaattctgggtcatgaacacctcaattcagagcacgatcattcttctcattgagcaaattgtggtagctcttgggggtgaatttaagctctacctgccccagctgatcccacacatgctgcgtgtcttcatgcatgacaacagcccaggccgcattgtctctatcaagttactggctgcaatccagctgtttggcgccaacctggatgactacctgcatttactgctgcctcctattgttaagttgtttgatgcccctgaagctccactgccatctcgaaaggcagcgctagagactgtggaccgcctgacggagtccctggatttcactgactatgcctcccgsatcattcaccctattgttcgaacactggaccagagcccagaactgcgctccacagccatggacacgctgtcttcacttgtttttcagctggggaagaagtaccaaattttcattccaatggtgaataaagttctggtgcgacaccgaatcaatcatcagcgctatgatgtgctcatctgcagaattgtcaagggatacacacttgctgatgaagaggaggatcctttgatttaccagcatcggatgcttaggagtggccaaggggatgcattggctagtggaccagtggaaacaggacccatgaagaaactgcacgtcagcaccatcaacctccaaaaggcctggggcgctgccaggagggtctccaaagatgactggctggaatggctgagacggctgagcctggagctgctgaaggactcatcatcgccctccctgcgctcctgctgggccctggcacaggcctacaacccgatggccagggatctcttcaatgctgcatttgtgtcctgctggtctgaactgaatgaagatcaacaggatgagctcatcagaagcatcgagttggccctcacctcacaagacatcgctgaagtcacacagaccctcttaaacttggctgaattcatggaacacagtgacaagggccccctgccactgagagatgacaatggcattgttctgctgggtgagagagctgccaagtgccgagcatatgccaaagcactacactacaaagaactggagttccagaaaggccccacccctgccattctagaatctctcatcagcattaataataagctacagcagccggaggcagcggccggagtgttagaatatgccatgaaacactttggagagctggagatccaggctacctggtatgagaaactgcacgagtgggaggatgcccttgtggcctatgacaagaaaatggacaccaacaaggacgacccagagctgatgctgggccgcatgcgctgcctcgaggccttgggggaatggggtcaactccaccagcagtgctgtgaaaagtggaccctggttaatgatgagacccaagccaagatggcccggatggctgctgcagctgcatggggtttaggtcagtgggacagcatggaagaatacacctgtatgatccctcgggacacccatgatggggcattttatagagctgtgctggcactgcatcaggacctcttctccttggcacaacagtgcattgacaaggccagggacctgctggatgctgaattaactgcratggcaggagagagttacagtcgggcatatggggccatggtttcttgccacatgctgtccgagctggaggaggttatccagtacaaacttgtccccgagcgacgagagatcatccgccagatctggtgggagagactgcagggctgccagcgtatcgtagaggactggcagaaaatccttatggtgcggtcccttgtggtcagccctcatgaagacatgagaacctggctcaagtatgcaagcctgtgcggcaagagtggcaggctggctcttgctcataaaactttagtgttgctcctgggagttgatccgtctcggcaacttgaccatcctctgccaacagttcaccctcaggtgacctatgcctacatgaaaaacatgtggaagagtgcccgcaagatcgatgccttccagcacatgcagcattttgtccagaccatgcagcaacaggcccagcatgccatcgctactgaggaccagcagcataagcaggaactgcacaagctcatggcccgatgcttcctgaaacttggagagtggcagctgaatctacagggcatcaatgagagcacaatccccaaagtgctgcagtactacagcgccgccacagagcacgaccgcagctggtacaaggcctggcatgcgtgggcagtgatgaacttcgaagctgtgctacactacaaacatcagaaccaagcccgcgatgagaagaagaaactgcgtcatgccagcggggccaacatcaccaacgccaccactgccgccaccacggccgccactgccaccaccactgccagcaccgagggcagcaacagtgagagygaggccgagagcaccgagaacagccccaccccatcgccgctgcagaagaaggtcactgaggatctgtccaaaaccctcctgatgtacacggtgcctgccgtccagggcttcttccgttccatctccttgtcacgaggcaacaacctccaggatacactcagagttctcaccttatggtttgattatggtcactggccagatgtcaatgaggccttagtggagggggtgaaagccatccagattgatacctggctacaggttatacctcagctcattgcaagaattgatacgcccagacccttggtgggacgtctcattcaccagcttctcacagacattggtcggtaccacccccaggccctcatctacccactgacagtggcttctaagtctaccacgacagcccggcacaatgcagccaacaagattctgaagaacatgtgtgagcacagcaacaccctggtccagcaggccatgatggtgagcgaggagctgatccgagtggccatcctctggcatgagatgtggcatgaaggcctggaagaggcatctcgtttgtactttggggaaaggaacgtgaaaggcatgtttgaggtgctggagcccttgcatgctatgatggaacggggcccccagactctgaaggaaacatcctttaatcaggcctatggtcgagatttaatggaggcccaagagtggtgcaggaagtacatgaaatcagggaatgtcaaggacctcacccaagcctgggacctctattatcatgtgttccgacgaatctcaaagcagctgcctcagctcacatccttagagctgcaatatgtttccccaaaacttctgatgtgccgggaccttgaattggctgtgccaggaacatatgaccccaaccagccaatcattcgcattcagtccatagcaccgtctttgcaagtcatcacatccaagcagaggccccggaaattgacacttatgggcagcaacggacatgagtttgttttccttctaaaaggccatgaagatctgcgccaggatgagcgtgtgatgcagctcttcggcctggttaacaccctyctggccaatgacccaacatctcttcggaaaaacctcagcatccagagatacgctgtcatccctttatcgaccaactcgggcctcattggctgggttccccactgtgacacactgcacgccctcatccgggactacagggagaagaagaagatccttctyaacatcgagcatcgcatcatgttgcggatggctccggactatgaccacttgactctgatgcagaaggtggaggtgtttgagcatgccgtcaataatacagctggggacgacctggccaagctgctrtggctgaaaagccccagctccgaggtgtggtttgaccgaagaaccaattatacccgttctttagcggtcatgtcaatggttgggtatattttaggcctgggagatagacacccatccaacctgatgctggaccgtctgagtgggaagatcctgcacattgactttggggactgctttgaggttgctatgacccgagagaagtttccagagaagattccatttagactaacaagaatgttgaccaatgctatggaggttacaggcctggatggcaactacagaatcacatgccacacagtgatggaggtgctgcgagagcacaaggacagtgtcatggccgtgctggaagcctttgtctatgaccccttgctgaactggaggctgatggacacaaataccaaaggcaacaagcgatcccgaacgaggacggattcctactctgctggccagtcagtcgaaattttggacggtgtggaacttggagagccagcccataagaaaacggggaccacagtgccagaatctattcattctttcattggagacggtttggtgaaaccagaggccctaaataagaaagctatccagattattaacagggttcgagataagctcactggtcgggacttctctcatgatgacactttggatgttccaacgcaagttgagctgctcatcaaacaagcgacatcccatgaaaacctctgccagtgctatattggctggtgccctttctggtaactggaggcccagatgtgcccatcacgttttttctgaggcttttgtactttagtaaatgcttccactaaactgaaaccatggtgagaaagtttgactttgttaaatattttgaaatgtaaatgaaaagaastactgtatattaaaagttggtttgaaccaactttctagctgctgttgaagaatatattgwcagaaacacaaggcttgatttggttcccaggacagtgaaacatagtaataccacgtaaatcaagccattcattttggggaacagaagatccataactttagaaatacgggttttgacttaactcacaagagaactcatcataagtacttgctgatggaagaatgacctagttgctcctctcaacatgggtacagcaaactcagcacagccaagaagcctcaggtcgtggagaacatggattaggatcctagactgtaaagacacagaagatgctgacctcacccctgccacctatcccaagacctcactggtctgtggacagcagcagaaatgtttgcaagataggccaaaatgagtacaaaaggtctgtcttccatcagacccagtgatgctgcgactcacacgcttcaattcaagacctgaccgctagtagggaggtttattcagatcgctggcagcctcggctgagcagatgcacagaggggatcactgtgcagtgggaccaccctcactggccttctgcagcagggttctgggatgttttcagtggtcaaaatactctgtttagagcaagggctcagaaaacagaaatactgtcatggaggtgctgaacacagggaaggtctggtacatattggraattatgagcagracaaatactcaactaaatgcacaaagtataaagtgtagccatgtctagacaccatgttgtatcagaataatttttgtgccaataaatgacatcagaattttaaacatat

SEQ ID NO: 4956 - DNA, 8721 bp, Homo sapiens
sctcccggcttagaggacagcggggaaggcgggcggtggggcasggggcctgaagcggcggtaccggtgctggcggcggcagctgaggccttggccgaagccgcgcgaacctcagggcaagatgcttggaaccggacctgccgccgccaccaccgctgccaccacatctagcaatgtgagcgtcctgcagcagtttgccagtggcctaaagagccggaatgaggaaaccagggccaaagccgccaaggagctccagcactatgtcaccatggaactccgagagatgagtcaagaggagtctactcgcttctatgaccaactgaaccatcacatttttgaattggtttccagctcagatgccaatgagaggaaaggtggcatcttggccatagctagcctcataggagtggaaggtgggaatgccacccgaattggcagatttgccaactatcttcggaacctcctcccctccaatgacccagttgtcatggaaatggcatccaaggccattggccgtcttgccatggcaggggacacttttaccgctgagtacgtggaatttgaggtgaagcgagccctggaatggctgggtgctgaccgcaatgagggccggagacatgcagctgtcctggttctccgtgagctggccatcagcgtccctaccttcttcttccagcaagtgcaacccttctttgacaacatttttgtggccgtgtgggaccccaaacaggccatccgtgagggagctgtagccgcccttcgtgcctgtctgattctcacaacccagcgtgagccgaaggagatgcagaagcctcagtggtacaggcacacatttgaagaagcagagaagggatttgatgagaccttggccaaagagaagggcatgaatcgggatgatcggatccatggagccttgttgatccttaacgagctggtccgaatcagcagcatggagggagagcgtctgagagaagaaatggaagaaatcacacagcagcagctggtacacgacaagtactgcaaagatctcatgggcttcggaacaaaacctcgtcacattacccccttcaccagtttccaggctgtacagccccagcagtcaaatgccttggtggggctgctggggtacagctctcaccaaggcctcatgggatttgggacctcccccagtccagctaagtccaccctggtggagagccggtgttgcagagacttgatggaggagaaatttgatcaggtgtgccagtgggtgctgaaatgcaggaatagcaagaactcgctgatccaaatgacaatccttaatttgttgccccgcttggctgcattccgaccttctgccttcacagatacccagtatctccaagataccatgaaccatgtcctaagctgtgtcaagaaggagaaggaacgtacagcggccttccaagccctggggctactttctgtggctgtgaggtctgagtttaaggtctatttgcctcgcgtgctggacatcatccgagcggccctgcccccaaaggacttcgcccataagaggcagaaggcaatgcaggtggaygccacagtcttcacttgcatcagcatgctggctcgagcaatggggccaggcatccagcaggatatcaaggagctgctggagcccatgctggcagtgggactaagccctgccctcactgcagtgctctacgacctgagccgtcagattccacagctaaagaaggacattcaagatgggctactgaaaatgctgtccctggtccttatgcacaaaccccttcgccacccaggcatgcccaagggcctggcccatcagctggcctctcctggcctcacgaccctccctgaggccagcgatgtgggcagcatcactcttgccctccgaacgcttggcagctttgaatttgaaggccactctctgacccaatttgttcgccactgtgcggatcatttcctgaacagtgagcacaaggagatccgcatggaggctgcccgcacctgctcccgcctgctcacaccctccatccacctcatcagtggccatgctcatgtggttagccagaccgcagtgcaagtggtggcagatgtgcttagcaaactgctcgtagttgggataacagatcctgaccctgacattcgctactgtgtcttggcgtccctggacgagcgctttgatgcacacctggcccaggcggagaacttgcaggccttgtttgtggctctgaatgaccaggtgtttgagatccgggagctggccatctgcactgtgggccgactcagtagcatgaaccctgcctttgtcatgcctttcctgcgcaagatgctcatccagattttgacagagttggagcacagtgggattggaagaatcaaagagcagagtgcccgcatgctggggcacctggtctccaatgccccccgactcatccgcccctacatggagcctattctgaaggcattaattttgaaactgaaagatccagaccctgatccaaacccaggtgtgatcaataatgtcctggcaacaataggagaattggcacaggttagtggcctggaaatgaggaaatgggttgatgaactttttattatcatcatggacatgctccaggattcctctttgttggccaaaaggcaggtggctctgtggaccctgggacagttggtggccagcactggctatgtagtagagccctacaggaagtaccctactttgcttgaggtgctactgaattttctgaagactgagcagaaccagggtacacgcagagaggccatccgtgtgttagggcttttaggggctttggatccttacaagcacaaagtgaacattggcatgatagaccagtcccgggatgcctctgctgtcagcctgtcagaatccaagtcaagtcaggattcctctgactatagcactagtgaaatgctggtcaacatgggaaacttgcctctggatgagttctacccagctgtgtccatggtggccctgatgcggatcttccgagaccagtcactctctcatcatcacaccatggttgtccaggccatcaccttcatcttcaagtccctgggactcaaatgtgtgcagttcctgccccaggtcatgcccacgttccttaaygtcattcgagtctgtgatggggccatccgggaatttttgttccagcagctgggaatgttggtgtcctttgtgaagagccacatcagaccttatatggatgaaatagtcaccctcatgagagaattctgggtcatgaacacctcaattcagagcacgatcattcttctcattgagcaaattgtggtagctcttgggggtgaatttaagctctacctgccccagctgatcccacacatgctgcgtgtcttcatgcatgacaacagcccaggccgcattgtctctatcaagttactggctgcaatccagctgtttggcgccaacctggatgactacctgcatttactgctgcctcctattgttaagttgtttgatgcccctgaagctccactgccatctcgaaaggcagcgctagagactgtggaccgcctgacggagtccctggatttcactgactatgcctcccgsatcattcaccctattgttcgaacactggaccagagcccagaactgcgctccacagccatggacacgctgtcttcacttgtttttcagctggggaagaagtaccaaattttcattccaatggtgaataaagttctggtgcgacaccgaatcaatcatcagcgctatgatgtgctcatctgcagaattgtcaagggatacacacttgctgatgaagaggaggatcctttgatttaccagcatcggatgcttaggagtggccaaggggatgcattggctagtggaccagtggaaacaggacccatgaagaaactgcacgtcagcaccatcaacctccaaaagcctggggcgctgccaggagggtctccaaagatgactggctggaatggctgagacggctgagcctggagctgctgaaggactcatcatcgccctccctgcgctcctgctgggccctggcacaggcctacaacccgatggccagggatctcttcaatgctgcatttgtgtcctgctggtctgaactgaatgaagatcaacaggatgagctcatcagaagcatcgagttggccctcacctcacaagacatcgctgaagtcacacagaccctcttaaacttggctgaattcatggaacacagtgacaagggccccctgccactgagagatgacaatggcattgttctgctgggtgagagagctgccaagtgccgagcatatgccaaagcactacactacaaagaactggagttccagaaaggccccacccctgccattctagaatctctcatcagcattaataataagctacagcagccggaggcagcggccggagtgttagaatatgccatgaaacactttggagagctggagatccaggctacctggtatgagaaactgcacgagtgggaggatgcccttgtggcctatgacaagaaaatggacaccaacaaggacgacccagagctgatgctgggccgcatgcgctgcctcgaggccttgggggaatggggtcaactccaccagcagtgctgtgaaaagtggaccctggttaatgatgagacccaagccaagatggcccggatggctgctgcagctgcatggggtttaggtcagtgggacagcatggaagaatacacctgtatgatccctcgggacacccatgatggggcattttatagagctgtgctggcactgcatcaggacctcttctccttggcacaacagtgcattgacaaggccagggacctgctggatgctgaattaactgcratggcaggagagagttacagtcgggcatatggggccatggtttcttgccacatgctgtccgagctggaggaggttatccagtacaaacttgtccccgagcgacgagagatcatccgccagatctggtgggagagactgcagggctgccagcgtatcgtagaggactggcagaaaatccttatggtgcggtcccttgtggtcagccctcatgaagacatgagaacctggctcaagtatgcaagcctgtgcggcaagagtggcaggctggctcttgctcataaaactttagtgttgctcctgggagttgatccgtctcggcaacttgaccatcctctgccaacagttcaccctcaggtgacctatgcctacatgaaaaacatgtggaagagtgcccgcaagatcgatgccttccagcacatgcagcattttgtccagaccatgcagcaacaggcccagcatgccatcgctactgaggaccagcagcataagcaggaactgcacaagctcatggcccgatgcttcctgaaacttggagagtggcagctgaatctacagggcatcaatgagagcacaatccccaaagtgctgcagtactacagcgccgccacagagcacgaccgcagctggtacaaggcctggcatgcgtgggcagtgatgaacttcgaagctgtgctacactacaaacatcagaaccaagcccgcgatgagaagaagaaactgcgtcatgccagcggggccaacatcaccaacgccaccactgccgccaccacggccgccactgccaccaccactgccagcaccgagggcagcaacagtgagagygaggccgagagcaccgagaacagccccaccccatcgccgctgcagaagaaggtcactgaggatctgtccaaaaccctcctgatgtacacggtgcctgccgtccagggcttcttccgttccatctccttgtcacgaggcaacaacctccaggatacactcagagttctcaccttatggtttgattatggtcactggccagatgtcaatgaggccttagtggagggggtgaaagccatccagattgatacctggctacaggttatacctcagctcattgcaagaattgatacgcccagacccttggtgggacgtctcattcaccagcttctcacagacattggtcggtaccacccccaggccctcatctacccactgacagtggcttctaagtctaccacgacagcccggcacaatgcagccaacaagattctgaagaacatgtgtgagcacagcaacaccctggtccagcaggccatgatggtgagcgaggagctgatccgagtggccatcctctggcatgagatgtggcatgaaggcctggaagaggcatctcgtttgtactttggggaaaggaacgtgaaaggcatgtttgaggtgctggagcccttgcatgctatgatggaacggggcccccagactctgaaggaaacatcctttaatcaggcctatggtcgagatttaatggaggcccaagagtggtgcaggaagtacatgaaatcagggaatgtcaaggacctcacccaagcctgggacctctattatcatgtgttccgacgaatctcaaagcagctgcctcagctcacatccttagagctgcaatatgtttccccaaaacttctgatgtgccgggaccttgaattggctgtgccaggaacatatgaccccaaccagccaatcattcgcattcagtccatagcaccgtctttgcaagtcatcacatccaagcagaggccccggaaattgacacttatgggcagcaacggacatgagtttgttttccttctaaaaggccatgaagatctgcgccaggatgagcgtgtgatgcagctcttcggcctggttaacaccctyctggccaatgacccaacatctcttcggaaaaacctcagcatccagagatacgctgtcatccctttatcgaccaactcgggcctcattggctgggttccccactgtgacacactgcacgccctcatccgggactacagggagaagaagaagatccttctyaacatcgagcatcgcatcatgttgcggatggctccggactatgaccacttgactctgatgcagaaggtggaggtgtttgagcatgccgtcaataatacagctggggacgacctggccaagctgctrtggctgaaaagccccagctccgaggtgtggtttgaccgaagaaccaattatacccgttctttagcggtcatgtcaatggttgggtatattttaggcctgggagatagacacccatccaacctgatgctggaccgtctgagtgggaagatcctgcacattgactttggggactgctttgaggttgctatgacccgagagaagtttccagagaagattccatttagactaacaagaatgttgaccaatgctatggaggttacaggcctggatggcaactacagaatcacatgccacacagtgatggaggtgctgcgagagcacaaggacagtgtcatggccgtgctggaagcctttgtctatgaccccttgctgaactggaggctgatggacacaaataccaaaggcaacaagcgatcccgaacgaggacggattcctactctgctggccagtcagtcgaaattttggacggtgtggaacttggagagccagcccataagaaaacggggaccacagtgccagaatctattcattctttcattggagacggtttggtgaaaccagaggccctaaataagaaagctatccagattattaacagggttcgagataagctcactggtcgggacttctctcatgatgacactttggatgttccaacgcaagttgagctgctcatcaaacaagcgacatcccatgaaaacctctgccagtgctatattggctggtgccctttctggtaactggaggcccagatgtgcccatcacgttttttctgaggcttttgtactttagtaaatgcttccactaaactgaaaccatggtgagaaagtttgactttgttaaatattttgaaatgtaaatgaaaagaastactgtatattaaaagttggtttgaaccaactttctagctgctgttgaagaatatattgwcagaaacacaaggcttgatttggttcccaggacagtgaaacatagtaataccacgtaaatcaagccattcattttggggaacagaagatccataactttagaaatacgggttttgacttaactcacaagagaactcatcataagtacttgctgatggaagaatgacctagttgctcctctcaacatgggtacagcaaactcagcacagccaagaagcctcaggtcgtggagaacatggattaggatcctagactgtaaagacacagaagatgctgacctcacccctgccacctatcccaagacctcactggtctgtggacagcagcagaaatgtttgcaagataggccaaaatgagtacaaaaggtctgtcttccatcagacccagtgatgctgcgactcacacgcttcaattcaagacctgaccgctagtagggaggtttattcagatcgctggcagcctcggctgagcagatgcacagaggggatcactgtgcagtgggaccaccctcactggccttctgcagcagggttctgggatgttttcagtggtcaaaatactctgtttagagcaagggctcagaaaacagaaatactgtcatggaggtgctgaacacagggaaggtctggtacatattggraattatgagcagracaaatactcaactaaatgcacaaagtataaagtgtagccatgtctagacaccatgttgtatcagaataatttttgtgccaataaatgacatcagaattttaaacatat

SEQ ID NO: 4957 - DNA, 8575 bp, Homo sapiens
sctcccggcttagaggacagcggggaaggcgggcggtggggcasggggcctgaagcggcggtaccggtgctggcggcggcagctgaggccttggccgaagccgcgcgaacctcagggcaagatgcttggaaccggacctgccgccgccaccaccgctgccaccacatctagcaatgtgagcgtcctgcagcagtttgccagtggcctaaagagccggaatgaggaaaccagggccaaagccgccaaggagctccagcactatgtcaccatggaactccgagagatgagtcaagaggagtctactcgcttctatgaccaactgaaccatcacatttttgaattggtttccagctcagatgccaatgagaggaaaggtggcatcttggccatagctagcctcataggagtggaaggtgggaatgccacccgaattggcagatttgccaactatcttcggaacctcctcccctccaatgacccagttgtcatggaaatggcatccaaggccattggccgtcttgccatggcaggggacacttttaccgctgagtacgtggaatttgaggtgaagcgagccctggaatggctgggtgctgaccgcaatgagggccggagacatgcagctgtcctggttctccgtgagctggccatcagcgtccctaccttcttcttccagcaagtgcaacccttctttgacaacatttttgtggccgtgtgggaccccaaacaggccatccgtgagggagctgtagccgcccttcgtgcctgtctgattctcacaacccagcgtgagccgaaggagatgcagaagcctcagtggtacaggcacacatttgaagaagcagagaagggatttgatgagaccttggccaaagagaagggcatgaatcgggatgatcggatccatggagccttgttgatccttaacgagctggtccgaatcagcagcatggagggagagcgtctgagagaagaaatggaagaaatcacacagcagcagctggtacacgacaagtactgcaaagatctcatgggcttcggaacaaaacctcgtcacattacccccttcaccagtttccaggctgtacagccccagcagtcaaatgccttggtggggctgctggggtacagctctcaccaaggcctcatgggatttgggacctcccccagtccagctaagtccaccctggtggagagccggtgttgcagagacttgatggaggagaaatttgatcaggtgtgccagtgggtgctgaaatgcaggaatagcaagaactcgctgatccaaatgacaatccttaatttgttgccccgcttggctgcattccgaccttctgccttcacagatacccagtatctccaagataccatgaaccatgtcctaagctgtgtcaagaaggagaaggaacgtacagcggccttccaagccctggggctactttctgtggctgtgaggtctgagtttaaggtctatttgcctcgcgtgctggacatcatccgagcggccctgcccccaaaggacttcgcccataagaggcagaaggcaatgcaggtggaygccacagtcttcacttgcatcagcatgctggctcgagcaatggggccaggcatccagcaggatatcaaggagctgctggagcccatgctggcagtgggactaagccctgccctcactgcagtgctctacgacctgagccgtcagattccacagctaaagaaggacattcaagatgggctactgaaaatgctgtccctggtccttatgcacaaaccccttcgccacccaggcatgcccaagggcctggcccatcagctggcctctcctggcctcacgaccctccctgaggccagcgatgtgggcagcatcactcttgccctccgaacgcttggcagctttgaatttgaaggccactctctgacccaatttgttcgccactgtgcggatcatttcctgaacagtgagcacaaggagatccgcatggaggctgcccgcacctgctcccgcctgctcacaccctccatccacctcatcagtggccatgctcatgtggttagccagaccgcagtgcaagtggtggcagatgtgcttagcaaactgctcgtagttgggataacagatcctgaccctgacattcgctactgtgtcttggcgtccctggacgagcgctttgatgcacacctggcccaggcggagaacttgcaggccttgtttgtggctctgaatgaccaggtgtttgagatccgggagctggccatctgcactgtgggccgactcagtagcatgaaccctgcctttgtcatgcctttcctgcgcaagatgctcatccagattttgacagagttggagcacagtgggattggaagaatcaaagagcagagtgcccgcatgctggggcacctggtctccaatgccccccgactcatccgcccctacatggagcctattctgaaggcattaattttgaaactgaaagatccagaccctgatccaaacccaggtgtgatcaataatgtcctggcaacaataggagaattggcacaggttagtggcctggaaatgaggaaatgggttgatgaactttttattatcatcatggacatgctccaggattcctctttgttggccaaaaggcaggtggctctgtggaccctgggacagttggtggccagcactggctatgtagtagagccctacaggaagtaccctactttgcttgaggtgctactgaattttctgaagactgagcagaaccagggtacacgcagagaggccatccgtgtgttagggcttttaggggctttggatccttacaagcacaaagtgaacattggcatgatagaccagtcccgggatgcctctgctgtcagcctgtcagaatccaagtcaagtcaggattcctctgactatagcactagtgaaatgctggtcaacatgggaaacttgcctctggatgagttctacccagctgtgtccatggtggccctgatgcggatcttccgagaccagtcactctctcatcatcacaccatggttgtccaggccatcaccttcatcttcaagtccctgggactcaaatgtgtgcagttcctgccccaggtcatgcccacgttccttaaygtcattcgagtctgtgatggggccatccgggaatttttgttccagcagctgggaatgttggtgtcctttgtgaagagccacatcagaccttatatggatgaaatagtcaccctcatgagagaattctgggtcatgaacacctcaattcagagcacgatcattcttctcattgagcaaattgtggtagctcttgggggtgaatttaagctctacctgccccagctgatcccacacatgctgcgtgtcttcatgcatgacaacagcccaggccgcattgtctctatcaagttactggctgcaatccagctgtttggcgccaacctggatgactacctgcatttactgctgcctcctattgttaagttgtttgatgcccctgaagctccactgccatctcgaaaggcagcgctagagactgtggaccgcctgacggagtccctggatttcactgactatgcctcccgsatcattcaccctattgttcgaacactggaccagagcccagaactgcgctccacagccatggacacgctgtcttcacttgtttttcagctggggaagaagtaccaaattttcattccaatggtgaataaagttctggtgcgacaccgaatcaatcatcagcgctatgatgtgctcatctgcagaattgtcaaggcctggggcgctgccaggagggtctccaaagatgactggctggaatggctgagacggctgagcctggagctgctgaaggactcatcatcgccctccctgcgctcctgctgggccctggcacaggcctacaacccgatggccagggatctcttcaatgctgcatttgtgtcctgctggtctgaactgaatgaagatcaacaggatgagctcatcagaagcatcgagttggccctcacctcacaagacatcgctgaagtcacacagaccctcttaaacttggctgaattcatggaacacagtgacaagggccccctgccactgagagatgacaatggcattgttctgctgggtgagagagctgccaagtgccgagcatatgccaaagcactacactacaaagaactggagttccagaaaggccccacccctgccattctagaatctctcatcagcattaataataagctacagcagccggaggcagcggccggagtgttagaatatgccatgaaacactttggagagctggagatccaggctacctggtatgagaaactgcacgagtgggaggatgcccttgtggcctatgacaagaaaatggacaccaacaaggacgacccagagctgatgctgggccgcatgcgctgcctcgaggccttgggggaatggggtcaactccaccagcagtgctgtgaaaagtggaccctggttaatgatgagacccaagccaagatggcccggatggctgctgcagctgcatggggtttaggtcagtgggacagcatggaagaatacacctgtatgatccctcgggacacccatgatggggcattttatagagctgtgctggcactgcatcaggacctcttctccttggcacaacagtgcattgacaaggccagggacctgctggatgctgaattaactgcratggcaggagagagttacagtcgggcatatggggccatggtttcttgccacatgctgtccgagctggaggaggttatccagtacaaacttgtccccgagcgacgagagatcatccgccagatctggtgggagagactgcagggctgccagcgtatcgtagaggactggcagaaaatccttatggtgcggtcccttgtggtcagccctcatgaagacatgagaacctggctcaagtatgcaagcctgtgcggcaagagtggcaggctggctcttgctcataaaactttagtgttgctcctgggagttgatccgtctcggcaacttgaccatcctctgccaacagttcaccctcaggtgacctatgcctacatgaaaaacatgtggaagagtgcccgcaagatcgatgccttccagcacatgcagcattttgtccagaccatgcagcaacaggcccagcatgccatcgctactgaggaccagcagcataagcaggaactgcacaagctcatggcccgatgcttcctgaaacttggagagtggcagctgaatctacagggcatcaatgagagcacaatccccaaagtgctgcagtactacagcgccgccacagagcacgaccgcagctggtacaaggcctggcatgcgtgggcagtgatgaacttcgaagctgtgctacactacaaacatcagaaccaagcccgcgatgagaagaagaaactgcgtcatgccagcggggccaacatcaccaacgccaccactgccgccaccacggccgccactgccaccaccactgccagcaccgagggcagcaacagtgagagygaggccgagagcaccgagaacagccccaccccatcgccgctgcagaagaaggtcactgaggatctgtccaaaaccctcctgatgtacacggtgcctgccgtccagggcttcttccgttccatctccttgtcacgaggcaacaacctccaggatacactcagagttctcaccttatggtttgattatggtcactggccagatgtcaatgaggccttagtggagggggtgaaagccatccagattgatacctggctacaggttatacctcagctcattgcaagaattgatacgcccagacccttggtgggacgtctcattcaccagcttctcacagacattggtcggtaccacccccaggccctcatctacccactgacagtggcttctaagtctaccacgacagcccggcacaatgcagccaacaagattctgaagaacatgtgtgagcacagcaacaccctggtccagcaggccatgatggtgagcgaggagctgatccgagtggccatcctctggcatgagatgtggcatgaaggcctggaagaggcatctcgtttgtactttggggaaaggaacgtgaaaggcatgtttgaggtgctggagcccttgcatgctatgatggaacggggcccccagactctgaaggaaacatcctttaatcaggcctatggtcgagatttaatggaggcccaagagtggtgcaggaagtacatgaaatcagggaatgtcaaggacctcacccaagcctgggacctctattatcatgtgttccgacgaatctcaaagcagctgcctcagctcacatccttagagctgcaatatgtttccccaaaacttctgatgtgccgggaccttgaattggctgtgccaggaacatatgaccccaaccagccaatcattcgcattcagtccatagcaccgtctttgcaagtcatcacatccaagcagaggccccggaaattgacacttatgggcagcaacggacatgagtttgttttccttctaaaaggccatgaagatctgcgccaggatgagcgtgtgatgcagctcttcggcctggttaacaccctyctggccaatgacccaacatctcttcggaaaaacctcagcatccagagatacgctgtcatccctttatcgaccaactcgggcctcattggctgggttccccactgtgacacactgcacgccctcatccgggactacagggagaagaagaagatccttctyaacatcgagcatcgcatcatgttgcggatggctccggactatgaccacttgactctgatgcagaaggtggaggtgtttgagcatgccgtcaataatacagctggggacgacctggccaagctgctrtggctgaaaagccccagctccgaggtgtggtttgaccgaagaaccaattatacccgttctttagcggtcatgtcaatggttgggtatattttaggcctgggagatagacacccatccaacctgatgctggaccgtctgagtgggaagatcctgcacattgactttggggactgctttgaggttgctatgacccgagagaagtttccagagaagattccatttagactaacaagaatgttgaccaatgctatggaggttacaggcctggatggcaactacagaatcacatgccacacagtgatggaggtgctgcgagagcacaaggacagtgtcatggccgtgctggaagcctttgtctatgaccccttgctgaactggaggctgatggacacaaataccaaaggcaacaagcgatcccgaacgaggacggattcctactctgctggccagtcagtcgaaattttggacggtgtggaacttggagagccagcccataagaaaacggggaccacagtgccagaatctattcattctttcattggagacggtttggtgaaaccagaggccctaaataagaaagctatccagattattaacagggttcgagataagctcactggtcgggacttctctcatgatgacactttggatgttccaacgcaagttgagctgctcatcaaacaagcgacatcccatgaaaacctctgccagtgctatattggctggtgccctttctggtaactggaggcccagatgtgcccatcacgttttttctgaggcttttgtactttagtaaatgcttccactaaactgaaaccatggtgagaaagtttgactttgttaaatattttgaaatgtaaatgaaaagaastactgtatattaaaagttggtttgaaccaactttctagctgctgttgaagaatatattgwcagaaacacaaggcttgatttggttcccaggacagtgaaacatagtaataccacgtaaatcaagccattcattttggggaacagaagatccataactttagaaatacgggttttgacttaactcacaagagaactcatcataagtacttgctgatggaagaatgacctagttgctcctctcaacatgggtacagcaaactcagcacagccaagaagcctcaggtcgtggagaacatggattaggatcctagactgtaaagacacagaagatgctgacctcacccctgccacctatcccaagacctcactggtctgtggacagcagcagaaatgtttgcaagataggccaaaatgagtacaaaaggtctgtcttccatcagacccagtgatgctgcgactcacacgcttcaattcaagacctgaccgctagtagggaggtttattcagatcgctggcagcctcggctgagcagatgcacagaggggatcactgtgcagtgggaccaccctcactggccttctgcagcagggttctgggatgttttcagtggtcaaaatactctgtttagagcaagggctcagaaaacagaaatactgtcatggaggtgctgaacacagggaaggtctggtacatattggraattatgagcagracaaatactcaactaaatgcacaaagtataaagtgtagccatgtctagacaccatgttgtatcagaataatttttgtgccaataaatgacatcagaattttaaacatat

SEQ ID NO: 4958 - DNA, 8330 bp, Homo sapiens
ctagcctcataggagtggaaggtgggaatgccacccgaattggcagatttgccaactatcttcggaacctcctcccctccaatgacccagttgtcatggaaatggcatccaaggccattggccgtcttgccatggcaggggacacttttaccgctgagtacgtggaatttgaggtgaagcgagccctggaatggctgggtgctgaccgcaatgagggccggagacatgcagctgtcctggttctccgtgagctggccatcagcgtccctaccttcttcttccagcaagtgcaacccttctttgacaacatttttgtggccgtgtgggaccccaaacaggccatccgtgagggagctgtagccgcccttcgtgcctgtctgattctcacaacccagcgtgagccgaaggagatgcagaagcctcagtggtacaggcacacatttgaagaagcagagaagggatttgatgagaccttggccaaagagaagggcatgaatcgggatgatcggatccatggagccttgttgatccttaacgagctggtccgaatcagcagcatggagggagagcgtctgagagaagaaatggaagaaatcacacagcagcagctggtacacgacaagtactgcaaagatctcatgggcttcggaacaaaacctcgtcacattacccccttcaccagtttccaggctgtacagccccagcagtcaaatgccttggtggggctgctggggtacagctctcaccaaggcctcatgggatttgggacctcccccagtccagctaagtccaccctggtggagagccggtgttgcagagacttgatggaggagaaatttgatcaggtgtgccagtgggtgctgaaatgcaggaatagcaagaactcgctgatccaaatgacaatccttaatttgttgccccgcttggctgcattccgaccttctgccttcacagatacccagtatctccaagataccatgaaccatgtcctaagctgtgtcaagaaggagaaggaacgtacagcggccttccaagccctggggctactttctgtggctgtgaggtctgagtttaaggtctatttgcctcgcgtgctggacatcatccgagcggccctgcccccaaaggacttcgcccataagaggcagaaggcaatgcaggtggaygccacagtcttcacttgcatcagcatgctggctcgagcaatggggccaggcatccagcaggatatcaaggagctgctggagcccatgctggcagtgggactaagccctgccctcactgcagtgctctacgacctgagccgtcagattccacagctaaagaaggacattcaagatgggctactgaaaatgctgtccctggtccttatgcacaaaccccttcgccacccaggcatgcccaagggcctggcccatcagctggcctctcctggcctcacgaccctccctgaggccagcgatgtgggcagcatcactcttgccctccgaacgcttggcagctttgaatttgaaggccactctctgacccaatttgttcgccactgtgcggatcatttcctgaacagtgagcacaaggagatccgcatggaggctgcccgcacctgctcccgcctgctcacaccctccatccacctcatcagtggccatgctcatgtggttagccagaccgcagtgcaagtggtggcagatgtgcttagcaaactgctcgtagttgggataacagatcctgaccctgacattcgctactgtgtcttggcgtccctggacgagcgctttgatgcacacctggcccaggcggagaacttgcaggccttgtttgtggctctgaatgaccaggtgtttgagatccgggagctggccatctgcactgtgggccgactcagtagcatgaaccctgcctttgtcatgcctttcctgcgcaagatgctcatccagattttgacagagttggagcacagtgggattggaagaatcaaagagcagagtgcccgcatgctggggcacctggtctccaatgccccccgactcatccgcccctacatggagcctattctgaaggcattaattttgaaactgaaagatccagaccctgatccaaacccaggtgtgatcaataatgtcctggcaacaataggagaattggcacaggttagtggcctggaaatgaggaaatgggttgatgaactttttattatcatcatggacatgctccaggattcctctttgttggccaaaaggcaggtggctctgtggaccctgggacagttggtggccagcactggctatgtagtagagccctacaggaagtaccctactttgcttgaggtgctactgaattttctgaagactgagcagaaccagggtacacgcagagaggccatccgtgtgttagggcttttaggggctttggatccttacaagcacaaagtgaacattggcatgatagaccagtcccgggatgcctctgctgtcagcctgtcagaatccaagtcaagtcaggattcctctgactatagcactagtgaaatgctggtcaacatgggaaacttgcctctggatgagttctacccagctgtgtccatggtggccctgatgcggatcttccgagaccagtcactctctcatcatcacaccatggttgtccaggccatcaccttcatcttcaagtccctgggactcaaatgtgtgcagttcctgccccaggtcatgcccacgttccttaaygtcattcgagtctgtgatggggccatccgggaatttttgttccagcagctgggaatgttggtgtcctttgtgaagagccacatcagaccttatatggatgaaatagtcaccctcatgagagaattctgggtcatgaacacctcaattcagagcacgatcattcttctcattgagcaaattgtggtagctcttgggggtgaatttaagctctacctgccccagctgatcccacacatgctgcgtgtcttcatgcatgacaacagcccaggccgcattgtctctatcaagttactggctgcaatccagctgtttggcgccaacctggatgactacctgcatttactgctgcctcctattgttaagttgtttgatgcccctgaagctccactgccatctcgaaaggcagcgctagagactgtggaccgcctgacggagtccctggatttcactgactatgcctcccgsatcattcaccctattgttcgaacactggaccagagcccagaactgcgctccacagccatggacacgctgtcttcacttgtttttcagctggggaagaagtaccaaattttcattccaatggtgaataaagttctggtgcgacaccgaatcaatcatcagcgctatgatgtgctcatctgcagaattgtcaagggatacacacttgctgatgaagaggaggatcctttgatttaccagcatcggatgcttaggagtggccaaggggatgcattggctagtggaccagtggaaacaggacccatgaagaaactgcacgtcagcaccatcaacctccaaaaggcctggggcgctgccaggagggtctccaaagatgactggctggaatggctgagacggctgagcctggagctgctgaaggactcatcatcgccctccctgcgctcctgctgggccctggcacaggcctacaacccgatggccagggatctcttcaatgctgcatttgtgtcctgctggtctgaactgaatgaagatcaacaggatgagctcatcagaagcatcgagttggccctcacctcacaagacatcgctgaagtcacacagaccctcttaaacttggctgaattcatggaacacagtgacaagggccccctgccactgagagatgacaatggcattgttctgctgggtgagagagctgccaagtgccgagcatatgccaaagcactacactacaaagaactggagttccagaaaggccccacccctgccattctagaatctctcatcagcattaataataagctacagcagccggaggcagcggccggagtgttagaatatgccatgaaacactttggagagctggagatccaggctacctggtatgagaaactgcacgagtgggaggatgcccttgtggcctatgacaagaaaatggacaccaacaaggacgacccagagctgatgctgggccgcatgcgctgcctcgaggccttgggggaatggggtcaactccaccagcagtgctgtgaaaagtggaccctggttaatgatgagacccaagccaagatggcccggatggctgctgcagctgcatggggtttaggtcagtgggacagcatggaagaatacacctgtatgatccctcgggacacccatgatggggcattttatagagctgtgctggcactgcatcaggacctcttctccttggcacaacagtgcattgacaaggccagggacctgctggatgctgaattaactgcratggcaggagagagttacagtcgggcatatggggccatggtttcttgccacatgctgtccgagctggaggaggttatccagtacaaacttgtccccgagcgacgagagatcatccgccagatctggtgggagagactgcagggctgccagcgtatcgtagaggactggcagaaaatccttatggtgcggtcccttgtggtcagccctcatgaagacatgagaacctggctcaagtatgcaagcctgtgcggcaagagtggcaggctggctcttgctcataaaactttagtgttgctcctgggagttgatccgtctcggcaacttgaccatcctctgccaacagttcaccctcaggtgacctatgcctacatgaaaaacatgtggaagagtgcccgcaagatcgatgccttccagcacatgcagcattttgtccagaccatgcagcaacaggcccagcatgccatcgctactgaggaccagcagcataagcaggaactgcacaagctcatggcccgatgcttcctgaaacttggagagtggcagctgaatctacagggcatcaatgagagcacaatccccaaagtgctgcagtactacagcgccgccacagagcacgaccgcagctggtacaaggcctggcatgcgtgggcagtgatgaacttcgaagctgtgctacactacaaacatcagaaccaagcccgcgatgagaagaagaaactgcgtcatgccagcggggccaacatcaccaacgccaccactgccgccaccacggccgccactgccaccaccactgccagcaccgagggcagcaacagtgagagygaggccgagagcaccgagaacagccccaccccatcgccgctgcagaagaaggtcactgaggatctgtccaaaaccctcctgatgtacacggtgcctgccgtccagggcttcttccgttccatctccttgtcacgaggcaacaacctccaggatacactcagagttctcaccttatggtttgattatggtcactggccagatgtcaatgaggccttagtggagggggtgaaagccatccagattgatacctggctacaggttatacctcagctcattgcaagaattgatacgcccagacccttggtgggacgtctcattcaccagcttctcacagacattggtcggtaccacccccaggccctcatctacccactgacagtggcttctaagtctaccacgacagcccggcacaatgcagccaacaagattctgaagaacatgtgtgagcacagcaacaccctggtccagcaggccatgatggtgagcgaggagctgatccgagtggccatcctctggcatgagatgtggcatgaaggcctggaagaggcatctcgtttgtactttggggaaaggaacgtgaaaggcatgtttgaggtgctggagcccttgcatgctatgatggaacggggcccccagactctgaaggaaacatcctttaatcaggcctatggtcgagatttaatggaggcccaagagtggtgcaggaagtacatgaaatcagggaatgtcaaggacctcacccaagcctgggacctctattatcatgtgttccgacgaatctcaaagcagctgcctcagctcacatccttagagctgcaatatgtttccccaaaacttctgatgtgccgggaccttgaattggctgtgccaggaacatatgaccccaaccagccaatcattcgcattcagtccatagcaccgtctttgcaagtcatcacatccaagcagaggccccggaaattgacacttatgggcagcaacggacatgagtttgttttccttctaaaaggccatgaagatctgcgccaggatgagcgtgtgatgcagctcttcggcctggttaacaccctyctggccaatgacccaacatctcttcggaaaaacctcagcatccagagatacgctgtcatccctttatcgaccaactcgggcctcattggctgggttccccactgtgacacactgcacgccctcatccgggactacagggagaagaagaagatccttctyaacatcgagcatcgcatcatgttgcggatggctccggactatgaccacttgactctgatgcagaaggtggaggtgtttgagcatgccgtcaataatacagctggggacgacctggccaagctgctrtggctgaaaagccccagctccgaggtgtggtttgaccgaagaaccaattatacccgttctttagcggtcatgtcaatggttgggtatattttaggcctgggagatagacacccatccaacctgatgctggaccgtctgagtgggaagatcctgcacattgactttggggactgctttgaggttgctatgacccgagagaagtttccagagaagattccatttagactaacaagaatgttgaccaatgctatggaggttacaggcctggatggcaactacagaatcacatgccacacagtgatggaggtgctgcgagagcacaaggacagtgtcatggccgtgctggaagcctttgtctatgaccccttgctgaactggaggctgatggacacaaataccaaaggcaacaagcgatcccgaacgaggacggattcctactctgctggccagtcagtcgaaattttggacggtgtggaacttggagagccagcccataagaaaacggggaccacagtgccagaatctattcattctttcattggagacggtttggtgaaaccagaggccctaaataagaaagctatccagattattaacagggttcgagataagctcactggtcgggacttctctcatgatgacactttggatgttccaacgcaagttgagctgctcatcaaacaagcgacatcccatgaaaacctctgccagtgctatattggctggtgccctttctggtaactggaggcccagatgtgcccatcacgttttttctgaggcttttgtactttagtaaatgcttccactaaactgaaaccatggtgagaaagtttgactttgttaaatattttgaaatgtaaatgaaaagaastactgtatattaaaagttggtttgaaccaactttctagctgctgttgaagaatatattgwcagaaacacaaggcttgatttggttcccaggacagtgaaacatagtaataccacgtaaatcaagccattcattttggggaacagaagatccataactttagaaatacgggttttgacttaactcacaagagaactcatcataagtacttgctgatggaagaatgacctagttgctcctctcaacatgggtacagcaaactcagcacagccaagaagcctcaggtcgtggagaacatggattaggatcctagactgtaaagacacagaagatgctgacctcacccctgccacctatcccaagacctcactggtctgtggacagcagcagaaatgtttgcaagataggccaaaatgagtacaaaaggtctgtcttccatcagacccagtgatgctgcgactcacacgcttcaattcaagacctgaccgctagtagggaggtttattcagatcgctggcagcctcggctgagcagatgcacagaggggatcactgtgcagtgggaccaccctcactggccttctgcagcagggttctgggatgttttcagtggtcaaaatactctgtttagagcaagggctcagaaaacagaaatactgtcatggaggtgctgaacacagggaaggtctggtacatattggraattatgagcagracaaatactcaactaaatgcacaaagtataaagtgtagccatgtctagacaccatgttgtatcagaataatttttgtgccaataaatgacatcagaattttaaacatat

SEQ ID NO: 4959 - DNA, 1584 bp, Homo sapiens
gggkgggggttgcctggcggcgcagcagcgcgggaggcggcgaagggcgcaggagcatcgctcggaggggacaaggggacgccacgggccacatgtttaggagggagccgagccttctcccggaccctcgccgagggcgaccgtgatgctgcagaaccggcgggagcgactcgccgccgccgctctctgcgcactcggagaccccagcgcccgccttctgcaggggaagcgaccatggccatagatcgtgacttcacccccagccacttcccctagaaagaaatccttggaaaagttgcatttgaaaaaatccttgcgctgacctttggggccgacggggcmgaagaagcgtgcgtgcgtttgcaagtaagagaaccaaaggtgtgtgtgcatggggggctggcggtgggggaccctccgctgccacttcgcctagctttgtgctgaggccccggcccccgcccctgggacgccggggctgcgatgagcccctgcgggcgggcccggcgacaaacgtccagaggggccatggctgtactggcgtggaagttcccgcggacccggctgcccatgggagccagtgccctctgtgtcgtggtcctctgttggctctacatcttccccgtctaccggctgcccaacgagaaagagatcgtgcagggggtgctgcaacagggcacggcgtggaggaggaaccagaccgcggccagagcgttcagctcagtacttgatatgtactgaattctcagagaagaaccttgtcaaactgcgaaggagatggcaggaagaaactgtggcattgcatgagagggaagcagccaagaccgtaagagctgtgtcgctctaattaggtgccaggaggaagtggaaatgaattcagagccacacattctccatttttcagatcttaaacacagaagacactatcagagatttccaggtgaccacaatgagaaaagggcctttcgtcccactacatcttgcctgggatgcaaaatctttagtttgtttccattattgataaaataaacatatatagtacatgattttatgtcccccatgttcatttaaacaatttatagtgtttattatttgtctgattttggaaagaatacatatttactatagaaaacttttaaatgtagtaaaaaagaagaaaaagcctgctgaaattccctcactcggaagtacttattgtaaacagtctcttttgtgtatgtttgtttgtgtgtattactaaattgtatgtattttgtatatttaattttatatcctcttttattcactcaaaattatacctttagaattttctcatataattaaataacttttaatttataaacttgtgaaaaaatagctttataattttttattttggaaaaataattatttattgtccaagtattaccataaaaatactttaaaaaaagattatgctgctgacaaatttatgttagactttttctttaatgatttcttcatatgtagttgttgtatagctgagcataggaaattaaaaagcctctttaaagatctgtactgtctygaggttgatatttaaaggataaaagcaacactattttc

SEQ ID NO: 4960 - DNA, 2453 bp, Homo sapiens
gggkgggggttgcctggcggcgcagcagcgcgggaggcggcgaagggcgcaggagcatcgctcggaggggacaaggggacgccacgggccacatgtttaggagggagccgagccttctcccggaccctcgccgagggcgaccgtgatgctgcagaaccggcgggagcgactcgccgccgccgctctctgcgcactcggagaccccagcgcccgccttctgcaggggaagcgaccatggccatagatcgtgacttcacccccagccacttcccctagaaagaaatccttggaaaagttgcatttgaaaaaatccttgcgctgacctttggggccgacggggcmgaagaagcgtgcgtgcgtttgcaagtaagagaaccaaaggtgtgtgtgcatggggggctggcggtgggggaccctccgctgccacttcgcctagctttgtgctgaggccccggcccccgcccctgggacgccggggctgcgatgagcccctgcgggcgggcccggcgacaaacgtccagaggggccatggctgtactggcgtggaagttcccgcggacccggctgcccatgggagccagtgccctctgtgtcgtggtcctctgttggctctacatcttccccgtctaccggctgcccaacgagaaagagatcgtgcagggggtgctgcaacagggcacggcgtggaggaggaaccagaccgcggccagagcgttcaggaaacaaatggaagactgctgcgaccctgcccatctctttgctatgactaaaatgaaytcccctatggggaagagcatgtggtatgacggggagtttttatactcattcaccattgacaattcaacttactctctcttcccacaggcaaccccattccagctgccattgaagaaatgcgcggtggtgggaaatggtgggattctgaagaagagtggctgtggccgtcaaatagatgaagcaaattttgtcatgcgatgcaatctccctcctttgtcaagtgaatacactaaggatgttggatccaaaagtcagttagtgacagctaatcccagcataattcggcaaaggtttcagaaccttctgtggtccagaaagacatttgtggacaacatgaaaatytataaccacagttacatctacatgcctgccttttctatgaagacaggaacagagccatctttgagggtttattatacactgtcagatgttggtgccaatcaaacagtgctgtttgccaaccccaactttctgcgtagcattggaaagttctggaaaagtagaggaatccatgccaagcgcctgtccacaggactttttctggtgagcgcagctctgggtctctgtgaagaggtggccatctatggcttctggcccttctctgtgaatatkcatgagcagcccatcagccaccactactatgacaacgtcttacccttttctggcttccatgccatgcccgaggaatttctccaactctggtatcttcataaaatcggtgcactgagaatgcagctggacccatgtgaagatacctcactccagcccacttcctaggaacaatggaagaagaaavkactgaaccagggtatttttgttaggttttctatgtgactccaagagggaatggtcaagttgtttcatgagtttgcatgggcccttggaaaaacaggaaaggagcaatgaagatccaagcaaaactttactttcagcgttggcttggaggacaaataagaaatgaaacatcctatgaaatactttatagcacatggcagatttgcaactagtaaaatgctggtgaaatgctgttggtaaagcacatggttcaaatctagaagatgcagttcaaaaacaagacagactcgagttgttagggctgaggaaccaatcaaggtagaacaaagaaaatgttggggtaaaagtgttgctgattgtcaacacaaactggcttaataatattaataagaacctgtcttattaagactggctttagaaccgtaggttttttwaaaaaattattatttatttttgccctctttggggaagtgggtgggtagatttaaaaaatcccttcctgagtaataaagatacaaaatgttactgctgataattgtgatttgttgagccacgtctatattaactatagctcccctctatttttaaaattttacataagaattgcttcttcctcttttgtcaagtccacagagacaatgtgaagcattattgaatttagactgtgttgcttcatagtctggataacaggagccactttccttcctcagaatttaggacataaacccaattttaggtctgcattatgtaagcctgtttgcattgtcatttttattttagtgcaaaagactaccaatatgagtgaattatttgtttgtaaattggcataattgtcttcataatttaatgttcagaaatgcagtaaagcacgttgatgaaaa

SEQ ID NO: 4961 - DNA, 1447 bp, Homo sapiens
ggacattgcagagctgtagtagatctgtactggtctgcagacagacaataatttgcactaccaggaagacgttctgtgaggaagacataggtggaaatacggaaagcagaaaagacaacttcggggtggccgggagataacagaagagccggcgccggaggagacgcacgcagctgactttgtcttctccgcacgactgttacagaggtctccagagccttctctctcctgtgcaaaatggcaactcttaaggaaraactcattgcaccagttgcggaagaagaggcaacagttccaaacaataagatcactgtagtgggtgttggacaagttggtatggcgtgtgctatcagcattctgggaaagtctctggctgatgaacttgctcttgtggatgttttggaagataagcttaaaggagaaatgatggatctgcagcatgggagcttatttcttcagacacctaaaattgtggcagataaagattattctgtgacygccaattctaagattgtagtggtaactgcaggagtccgtcagcaagaaggggagagtyggctcaatctggtgcagagaaatgttaatgtcttcaaattcattattcctcagatcgtcaagtacagtcctgattgcatcataattgtggtttccaacccagtggacattcttacgtakgttacctggaaactaagtggattacccaaacaccgcgtgattggaagtggatgtaatctggattctgctagakttcvctaccttwtggctgaaaaacttggcattcatcccagcagctgccatggatggattttgggggaacatggcgactcaagtgtggctgtgtggagtggtgtgaatgtggcaggtgtttctctccaggaattgaatccagaaatgggaactgacaatgatagtgaaaattggaaggaagtgcataagatggtggttgaaagtgcctatgaagtcatcaagctaaaaggatataccaactgggctattggattaagtgtggctgatcttattgaatccatgttgaaaaatctatccaggattcatcccgtgtcaacaatggtaaaggggatgtatggcattgagaatgaagtcttcctgagccttccatrtatcctcaatgcccggggattaaccagcgttatcaaccagaagctaaaggatgatgaggttgctcagctcaagaaaagtgcagataycctgygggacatccagaaggacctaaaagacctgtgactagtgagctytaggctgtagaaatttaaaaactacaatgtgattaactcgagcctttagttttcatccatgtacatggatcacagtttgytttgatcttcttcaatatgtgaatttgggctcacagaatcaaagcctatgcttggtttaatgcttgcaatctgagctcttgaacaaataaaattaactattgtagtgtgcttct

SEQ ID NO: 4962 - DNA, 1389 bp, Homo sapiens
ggacattgcagagctgtagtagatctgtactggtctgcagacagacaataatttgcactaccaggaagacgttctgtgaggaagacataggtggaaatacggaaagcagaaaagacaacttcggggtggccgggagataacagaagagccggcgccggaggagacgcacgcagctgactttgtcttctccgcacgactgttacagaggtctccagagccttctctctcctgtgcaaaatggcaactcttaaggaaraactcattgcaccagttgcggaagaagaggcaacagttccaaacaataagatcactgtagtgggtgttggacaagttggtatggcgtgtgctatcagcattctgggaaagtctctggctgatgaacttgctcttgtggatgttttggaagataagcttaaaggagaaatgatggatctgcagcatgggagcttatttcttcagacacctaaaattgtggcagataaagattattctgtgacygccaattctaagattgtagtggtaactgcaggagtccgtcagcaagaaggggagagtyggctcaatctggtgcagagaaatgttaatgtcttcaaattcattattcctcagatcgtcaagtacagtcctgattgcatcataattgtggtttccaacccagtggacattcttacgtakgttacctggaaactaagtggattacccaaacaccgcgtgattggaagtggatgtaatctggattctgctagakttcvctaccttwtggctgaaaaacttggcattcatcccagcagctgccatggatggattttgggggaacatggcgactcaagtgtggctgtgtggagtggtgtgaatgtggcaggtgtttctctccaggaattgaatccagaaatgggaactgacaatgatagtgaaaattggaaggaagtgcataagatggtggttgaaagtgcctatgaagtcatcaagctaaaaggatataccaactgggctattggattaagtgtggctgatcttattgaatccatgttgaaaaatctatccaggattcatcccgtgtcaacaatggtaaaggggatgtatggcattgagaatgaagtcttcctgagccttccatrtatcctcaatgcccggggattaaccagcgttatcaaccagaagctaaaggatgatgaggttgctcagctcaagaaaagtgcagataycctgygggacatccagaaggacctaaaagacctgtgactagtgattttcatccatgtacatggatcacagtttgytttgatcttcttcaatatgtgaatttgggctcacagaatcaaagcctatgcttggtttaatgcttgcaatctgagctcttgaacaaataaaattaactattgtagtgtg

SEQ ID NO: 4963 - DNA, 1792 bp, Homo sapiens
cgggggagggggcggggcgagggacggccgcgcgcgccagctgccaggcggggatcgggcggcgccgagctgaggtggtgagggactagctcccggatgtggagaagctggggagaaggcgtgggaggaagatggactcggtggagaagggggccgccacctccgtctccaacccgcgggggcgaccgtcccggggccggccgccgaagctgcagcgcaactctcgcggcggccagggccgaggtgtggagaagcccccgcacctggcagccctaattctggcccggggaggcagcaaaggcatccccctgaagaacattaagcacctggcgggggtcccgctcattggctgggtcctgcgtgcggccctggattcaggggccttccagagtgtatgggtttcgacagaccatgatgaaattgagaatgtggccaaacaatttggtgcacaagttcatcgaagaagttctgaagtttcaaaagacagctctacctcactagatgccatcatagaatttcttaattatcataatgaggttgacattgtaggaaatattcaagctacttctccatgtttacatcctactgatcttcaaaaagttgcagaaatgattcgagaagaaggatatgattctgttttctctgttgtgagacgccatcagtttcgatggagtgaaattcagaaaggagttcgtgaagtgaccgaacctctgaatttaaatccagctaaacggcctcgtcgacaagactgggatggagaattatatgaaaatggctcattttattttgctaaaagacatttgatagagatgggttacttgcagggtggaaaaatggcatactaygaaatgcgagctgaacatagtgtggatatagatgtggatattgattggcctattgcagagcaaagagtattaagatatggctattttggcaaagagaagcttaaggaaataaaacttttkgtttgcaatattgatggatgtctcaccaatggccacatttatgtatcaggagaccaaaaagaaataatatcttatgatgtaaaagatgctattgggataagtttattaaagaaaagtggtattgaggtgaggctaatctcagaaagggcctgttcaaagcagacgctgtcttctttaaaactggattgcaaaatggaagtcagtgtatcagacaagctagcagttgtagatgaatggagaaaagaaatgggcctgtgctggaaagaagtggcatatcttggaaatgaagtgtctgatgaagagtgcttgaagagagtgggcctaagtggcgctcctgctgatgcctgttctactgcccagaaggctgttggatacatttgcaaatgtaatggtggccgtggtgccatccgagaatttgcagagcacatttgcctactaatggaaaaggttaataattcatgccaaaaatagaaattagcgtaatattgagaaaaaaatgatacagccttcttcagccagtttgcttttatttttgattaagkaaattccatgttgtaatgttacagagagtgtgatttggtttgtgatatatatatattgtgctctacytttctctttacgcaagataattatttagagactgattacagtctttctcagatttttagtaaatgcaagtaagaacatcatcaaagttcactttgtattgtaccctgtaaaactgtgtgtttgtgtgctttcaaagatgttgggattttatttatctggggacagtgtgtatggtaagacatgmccttctattaataaaactacatttctcaaacttg

SEQ ID NO: 4964 - DNA, 1708 bp, Homo sapiens
cgggggagggggcggggcgagggacggccgcgcgcgccagctgccaggcggggatcgggcggcgccgagctgaggtggtgagggactagctcccggatgtggagaagctggggagaaggcgtgggaggaagatggactcggtggagaagggggccgccacctccgtctccaacccgcgggggcgaccgtcccggggccggccgccgaagctgcagcgcaactctcgcggcggccagggccgaggtgtggagaagcccccgcacctggcagccctaattctggcccggggaggcagcaaaggcatccccctgaagaacattaagcacctggcgggggtcccgctcattggctgggtcctgcgtgcggccctggattcaggggccttccagagtgtatgggtttcgacagaccatgatgaaattgagaatgtggccaaacaatttggtgcacaagttcatcgaagaagttctgaagtttcaaaagacagctctacctcactagatgccatcatagaatttcttaattatcataatgaggttgacattgtaggaaatattcaagctacttctccatgtttacatcctactgatcttcaaaaagttgcagaaatgattcgagaagaaggatatgattctgttttctctgttgtgagacgccatcagtttcgatggagtgaaattcagaaaggagttcgtgaagtgaccgaacctctgaatttaaatccagctaaacggcctcgtcgacaagactgggatggagaattatatgaaaatggctcattttattttgctaaaagacatttgatagagatgggttacttgcagggtggaaaaatggcatactaygaaatgcgagctgaacatagtgtggatatagatgtggatattgattggcctattgcagagcaaagagtattaagatatggctattttggcaaagagaagcttaaggaaataaaacttttkgtttgcaatattgatggatgtctcaccaatggccacatttatgtatcaggagaccaaaaagaaataatatcttatgatgtaaaagatgctattgggataagtttattaaagaaaagtggtattgaggtgaggctaatctcagaaagggcctgttcaaagcagacgctgtcttctttaaaactggattgcaaaatggaagtcagtgtatcagacaagctagcagttgtagatgaatggagaaaagaaatgggcctgtgctggaaagaagtggcatatcttgtatttattttacttgataggaaatgaagtgtctgatgaagagtgcttgaagagagtgggcctaagtggcgctcctgctgatgcctgttctactgcccagaaggctgttggatacatttgcaaatgtaatggtggccgtggtgccatccgagaatttgcagagcacatttgcctactaatggaaaaggttaataattcatgccaaaaatagaaattagctaatgttacagagagtgtgatttggtttgtgatatatatatattgtgctctacytttctctttacgcaagataattatttagagactgattacagtctttctcagatttttagtaaatgcaagtaagaacatcatcaaagttcactttgtattgtaccctgtaaaactgtgtgtttgtgtgctttcaaagatgttgggattttatttatctggggacagtgtgtatggtaagacatgmccttcta

SEQ ID NO: 4965 - DNA, 2019 bp, Homo sapiens
gaatggaggaggaagatttaaaagtgaattcgtgggcggcgacaaggaaacagcagccgtggccaagctgaccccagagcccttcccttcctggccctccctctgaatcatcgcgctccacttgtgacgtcgcggacgcccggctygggcargcgtggggggcccgcgcgtcccgggagccccgaggcggcagcgcgcgtttccacgccgcggtcccgcgggaaagccgggggcggcggcctggctgaggccaagctcggatccggtgccgagccaagcggggccgtgcgtcgccggggcttcgccttcgctcgcgtgacctccgccgtcctccccaaccctcgtcctctggccgcgcctgcggccgcacgcccarcgcccctcgcctaacctcgcgcccgggccgcgcctcckcctcctcctgctccccgccgcttccgtttctcgagggaaaggctgctgcctcctgctctgtcctcatccccggcttagctgacggcccagasggtgggtgccaattccaccagcagctgcaactgaaaagcaaggttcagaaatgtcagatatcctccgggagctgctctgtgtctctgagaaggctgctaacattgcccgggcgtgcagacagcaggaagccctcttccagctgctgatygaagaaaagaaagagggagaaaagaacaagaagtttgcagttgacttcaagackctggctgatgtactggtacaggaagttataaaacagaatatggagaacaagtttccaggcttggaaaaaaatatttttggagaagaatccaatgagtttactaatgactggggggaaaagattaccttgaggttgtgttcaacagagrargaaacagcagagcttcttagcaaagtcctcaatggtaacaagrtrgcatctgaagcattagccagggttgttcatcaggatgttgcctttactgacccaactctggattccacagagatcaatgttccacaggacattttgggaatttgggtggaccccatagattcaacttatcagtatataaaaggttctgctgacattaaatccaaccagggaatcttcccctgtggacttcagtgtgtcaccattttaattggtgtctatgacatacagacaggggttcccctgatgggagtcatcaatcaaccttttgtgtcacgagatccaaacaccctcaggtggaaaggacagtgctattggggcctttcttacatrgggrccaacatgcattcactacagctcaccatctctagaagaaacggcagtgaaacacacactggaaacaccggctctgaggcagcattctcccccagtttttcagccgtaattagtacaagtgaaaaggagactatcaaagctgcattgtcacgtgtgtgtggagatcgcatatttggggcagctggggctggttataagagcctatgtgttgtccaaggcctcgttgacatttacatcttttcagaagataccacattcaaatgggactcttgtgctgctcatgccatamtgmgggccatgggtgggggaatagtagacttgaaagaatgcttagaaagaaatccagaaacagggcttgatttgccacagttggtgtaccacrtggaaaatgagggtgctgctggggtggatcggtgggccaacaagggaggactcattgcatacagatccaggaagcggctggagacattcctgagcctcctggtccaaaacctggcacctgcagagacgcatacctagaggaactctaaccccggtgtacctgtataaactgaactgtgaaactgtttcggttatctctgtcttttgaggatggctttgtcctgttgctggttaacattcaccttcctcttttgaggagtatttttccattatgtattcataataatgttaatttcaataaatgacattcatgcagcaattatattggtgtatgaaattcttacagtgaatattgtgctgttagtgctgcttgaaacatttcartaaartattgaccagga

SEQ ID NO: 4966 - DNA, 1634 bp, Homo sapiens
cgtttctcgagggaaaggctgctgcctcctgctctgtcctcatccccggcttagggtgaaagaaagcactacttcaataytgctgctaagcmtrtgatcattctaagctgacggcccagasggtgggtgccaattccaccagcagctgcaactgaaaagcaaggttcagaaatgtcagatatcctccgggagctgctctgtgtctctgagaaggctgctaacattgcccgggcgtgcagacagcaggaagccctcttccagctgctgatygaagaaaagaaagagggagaaaagaacaagaagtttgcagttgacttcaagackctggctgatgtactggtacaggaagttataaaacagaatatggagaacaagtttccaggcttggaaaaaaatatttttggagaagaatccaatgagtttactaatgactggggggaaaagattaccttgaggttgtgttcaacagagrargaaacagcagagcttcttagcaaagtcctcaatggtaacaagrtrgcatctgaagcattagccagggttgttcatcaggatgttgcctttactgacccaactctggattccacagagatcaatgttccacaggacattttgggaatttgggtggaccccatagattcaacttatcagtatataaaaggttctgctgacattaaatccaaccagggaatcttcccctgtggacttcagtgtgtcaccattttaattggtgtctatgacatacagacaggggttcccctgatgggagtcatcaatcaaccttttgtgtcacgagatccaaacaccctcaggtggaaaggacagtgctattggggcctttcttacatrgggrccaacatgcattcactacagctcaccatctctagaagaaacggcagtgaaacacacactggaaacaccggctctgaggcagcattctcccccagtttttcagccgtaattagtacaagtgaaaaggagactatcaaagctgcattgtcacgtgtgtgtggagatcgcatatttggggcagctggggctggttataagagcctatgtgttgtccaaggcctcgttgacatttacatcttttcagaagataccacattcaaatgggactcttgtgctgctcatgccatamtgmgggccatgggtgggggaatagtagacttgaaagaatgcttagaaagaaatccagaaacagggcttgatttgccacagttggtgtaccacrtggaaaatgagggtgctgctggggtggatcggtgggccaacaagggaggactcattgcatacagatccaggaagcggctggagacattcctgagcctcctggtccaaaacctggcacctgcagagacgcatacctagaggaactctaaccccggtgtacctgtataaactgaactgtgaaactgtttcggttatctctgtcttttgaggatggctttgtcctgttgctggttaacattcaccttcctcttttgaggagtatttttccattatgtattcataataatgttaatttcaataaatgacattcatgcagcaattatattggtgtatgaaattcttacagtgaatattgtgctgttagtgctgcttgaaacatttcartaaartattgaccagga

SEQ ID NO: 4967 - DNA, 2071 bp, Homo sapiens
ggccaagggcgccgcgggactcacgagctcccctccgcgctggctgcagcggcgatgccgggcatgcctggccrggcccggccgggggcggcctcgctgccggggcagggacctcgcaggccggcgcgcagaggcgaggaaccctcccggcgccatcgactcacctacccgcgragaggcgacggcgcgcgccgctcaccagcccgggccccagatccaaggaggaggggcagcggcgcggggaccctgtggtttaatgcattcaaaaggactaataccatactgcaccatttgagaatgtccaagcacacagatgcagcagaagaggtgctattggaaaaaaaaggttgcrcgggagtcataacactaaacagaccaaagttcctcaatgcactgactcttaatatgattcggcagatttatccacagctaaagaagtgggaacaagatcctgaaactttcstgatcattataaagggagcaggaggaaaggctttctgtgccgggggtgatatcagagtgatctcggaagctgaaaaggcaaaacagaagatagctccagttttcttcagagaagaatatatgctgaataatgctgttggttcttgccagaaaccttatgttgcacttattcatggaattacaatgggtgggggagttggtctctcagtccatgggcaatttcgagtggctacagaaaagtgtctttttgctatgccagaaactgcaataggactgttccctgatgtgggtggaggttatttcttgccacgactccaaggaaaacttggttacttccttgcattaacaggattcagactaaaaggaagagatgtgtacagagcaggaattgctacacactttgtagattctgaaaagttggccatgttagaggaagatttgttagccttgaaatctccttcaaaagaaaatattgcatctgtcttagamaattaccatacagagtctaagattgatcgagacaagtcttttatacttgaggaacacatggacaaaataaacagttgtttttcagccaatactgtggaagaaattattgaaaacttacagcaagatggttcatcttttgccctagagcaattgaaggtaattaataaaatgtctccaacatctctaaagatcacactaaggcaactcatggaggggtcttcraagaccttgcaagaagtactaactatggagtatcggctaagtcaagcttgtatgagaggtcatgactttcatgaaggcgtwagagctgttttaattgataaagaccagagtccaaaatggaaaccagctgatctaaaagaagttactgaggaagatttgaataatcactttaagtctttgggaagcagtgatttgaaattttgaggtgacaggcttttaaggtatattttgtagcatgggttggcaatctacagcatgtgggccaaatccagcctgctgcctgtttttatataccctgtaagctaagaatggtttccgcatttttaaatggttgggaaaagaaatcaaagactaatawttcatgacgtgaaaattatcagaattcacaaataaagctttattggaactagctatactcatctgtttatatattatctgtggctgctttgaaatgagtagttgcaatagagatggtaaagcctacaaagcctaattatttactgtctggtttttgtcagaaaaaagtttgtcaatccttgttttagaagatggaaaaatgtgaagatctttrgagattctcttgagtggtatatctaattgaaatgggatcttygtttggcttgtatgttgatgaaatcaacttaggtatacaatataaaaaataaagaccctgaaaattgttttggatactgtgttaatgcctcatagaatttttgttttggatactgtgttaatgcctcatagaattttctccatatatgagtgtgttttaaagtaactgagttactgtagcagaagagctccttttataaacattagaaaccttgggcagagagaaaagatttttattaacgtccctcttcagtattaactcagacttggtcttccctaaaataat

SEQ ID NO: 4968 - DNA, 1545 bp, Homo sapiens
atctgtgcccggcggcgcaggacggcggtgggyggggctcacgcgaggcgctggaacrgtccgggagattctcgctctgctgctttagcttcggagtgtttggcgayggggcagcgcgagatgtggaggctcatgtcgaggtttaatgcattcaaaaggactaataccatactgcaccatttgagaatgtccaagcacacagatgcagcagaagaggtgctattggaaaaaaaaggttgcrcgggagtcataacactaaacagaccaaagttcctcaatgcactgactcttaatatgattcggcagatttatccacagctaaagaagtgggaacaagatcctgaaactttcstgatcattataaagggagcaggaggaaaggctttctgtgccgggggtgatatcagagtgatctcggaagctgaaaaggcaaaacagaagatagctccagttttcttcagagaagaatatatgctgaataatgctgttggttcttgccagaaaccttatgttgcacttattcatggaattacaatgggtgggggagttggtctctcagtccatgggcaatttcgagtggctacagaaaagtgtctttttgctatgccagaaactgcaataggactgttccctgatgtgggtggaggttatttcttgccacgactccaaggaaaacttggttacttccttgcattaacaggattcagactaaaaggaagagatgtgtacagagcaggaattgctacacactttgtagattctgaaaagttggccatgttagaggaagatttgttagccttgaaatctccttcaaaagaaaatattgcatctgtcttagamaattaccatacagagtctaagattgatcgagacaagtcttttatacttgaggaacacatggacaaaataaacagttgtttttcagccaatactgtggaagaaattattgaaaacttacagcaagatggttcatcttttgccctagagcaattgaaggtaattaataaaatgtctccaacatctctaaagatcacactaaggcaactcatggaggggtcttcraagaccttgcaagaagtactaactatggagtatcggctaagtcaagcttgtatgagaggtcatgactttcatgaaggcgtwagagctgttttaattgataaagaccagagtccaaaatggaaaccagctgatctaaaagaagttactgaggaagatttgaataatcactttaagtctttgggaagcagtgatttgaaattttgaggtgacaggcttttaagaccgcctatgggcagcatccagagcggaccagctccctgtgctggaggactccagtgtgaggcctgctgcttcctttctacattggcctgaaaccagcccaactcagtggtcataatcttctgggcctaccgaagagcaaaagcctacttctagttcttccagttgccagttcaagggctttatytgtcacttcctttgggaacaggtagagtgctttgatttagaatgatggcaataaatgagaaaccaatttgaaattgg

SEQ ID NO: 4969 - DNA, 1960 bp, Homo sapiens
atctgtgcccggcggcgcaggacggcggtgggyggggctcacgcgaggcgctggaacrgtccgggagattctcgctctgctgctttagcttcggagtgtttggcgayggggcagcgcgagatgtggaggctcatgtcgaggtttaatgcattcaaaaggactaataccatactgcaccatttgagaatgtccaagcacacagatgcagcagaagaggtgctattggaaaaaaaaggttgcrcgggagtcataacactaaacagaccaaagttcctcaatgcactgactcttaatatgattcggcagatttatccacagctaaagaagtgggaacaagatcctgaaactttcstgatcattataaagggagcaggaggaaaggctttctgtgccgggggtgatatcagagtgatctcggaagctgaaaaggcaaaacagaagatagctccagttttcttcagagaagaatatatgctgaataatgctgttggttcttgccagaaaccttatgttgcacttattcatggaattacaatgggtgggggagttggtctctcagtccatgggcaatttcgagtggctacagaaaagtgtctttttgctatgccagaaactgcaataggactgttccctgatgtgggtggaggttatttcttgccacgactccaaggaaaacttggttacttccttgcattaacaggattcagactaaaaggaagagatgtgtacagagcaggaattgctacacactttgtagattctgaaaagttggccatgttagaggaagatttgttagccttgaaatctccttcaaaagaaaatattgcatctgtcttagamaattaccatacagagtctaagattgatcgagacaagtcttttatacttgaggaacacatggacaaaataaacagttgtttttcagccaatactgtggaagaaattattgaaaacttacagcaagatggttcatcttttgccctagagcaattgaaggtaattaataaaatgtctccaacatctctaaagatcacactaaggcaactcatggaggggtcttcraagaccttgcaagaagtactaactatggagtatcggctaagtcaagcttgtatgagaggtcatgactttcatgaaggcgtwagagctgttttaattgataaagaccagagtccaaaatggaaaccagctgatctaaaagaagttactgaggaagatttgaataatcactttaagtctttgggaagcagtgatttgaaattttgaggtgacaggcttttaaggtatattttgtagcatgggttggcaatctacagcatgtgggccaaatccagcctgctgcctgtttttatataccctgtaagctaagaatggtttccgcatttttaaatggttgggaaaagaaatcaaagactaatawttcatgacgtgaaaattatcagaattcacaaataaagctttattggaactagctatactcatctgtttatatattatctgtggctgctttgaaatgagtagttgcaatagagatggtaaagcctacaaagcctaattatttactgtctggtttttgtcagaaaaaagtttgtcaatccttgttttagaagatggaaaaatgtgaagatctttrgagattctcttgagtggtatatctaattgaaatgggatcttygtttggcttgtatgttgatgaaatcaacttaggtatacaatataaaaaataaagaccctgaaaattgttttggatactgtgttaatgcctcatagaatttttgttttggatactgtgttaatgcctcatagaattttctccatatatgagtgtgttttaaagtaactgagttactgtagcagaagagctccttttataaacattagaaaccttgggcagagagaaaagatttttattaacgtccctcttcagtattaactcagacttggtcttccctaaaataat

SEQ ID NO: 4970 - DNA, 1893 bp, Homo sapiens
atctgtgcccggcggcgcaggacggcggtgggyggggctcacgcgaggcgctggaacrgtccgggagattctcgctctgctgctttagcttcggagtgtttggcgayggggcagcgcgagatgtggaggctcatgtcgaggtttaatgcattcaaaaggactaataccatactgcaccatttgagaatgtccaagcacacagatgcagcagaagaggtgctattggaaaaaaaaggttgcrcgggagtcataacactaaacagaccaaagttcctcaatgcactgactcttaatatgattcggcagatttatccacagctaaagaagtgggaacaagatcctgaaactttcstgatcattataaagggagcaggaggaaaggctttctgtgccgggggtgatatcagagtgatctcggaagctgaaaaggcaaaacagaagatagctccagttttcttcagagaagaatatatgctgaataatgctgttggttcttgccagaaaccttatgttgcacttattcatggaattacaatgggtgggggagttggtctctcagtccatgggcaatttcgagtggctacagaaaagtgtctttttgctatgccagaaactgcaataggactgttccctgatgtgggtggaggttatttcttgccacgactccaaggaaaacttggttacttccttgcattaacaggattcagactaaaaggaagagatgtgtacagagcaggaattgctacacactttgtagattctgaaaagttggccatgttagaggaagatttgttagccttgaaatctccttcaaaagaaaatattgcatctgtcttagamaattaccatacagagtctaagattgatcgagacaagtcttttatacttgaggaacacatggacaaaataaacagttgtttttcagccaatactgtggaagaaattattgaaaacttacagcaagatggttcatcttttgccctagagcaattgaagatcacactaaggcaactcatggaggggtcttcraagaccttgcaagaagtactaactatggagtatcggctaagtcaagcttgtatgttttaattgataaagaccagagtccaaaatggaaaccagctgatctaaaagaagttactgaggaagatttgaataatcactttaagtctttgggaagcagtgatttgaaattttgaggtgacaggcttttaaggtatattttgtagcatgggttggcaatctacagcatgtgggccaaatccagcctgctgcctgtttttatataccctgtaagctaagaatggtttccgcatttttaaatggttgggaaaagaaatcaaagactaatawttcatgacgtgaaaattatcagaattcacaaataaagctttattggaactagctatactcatctgtttatatattatctgtggctgctttgaaatgagtagttgcaatagagatggtaaagcctacaaagcctaattatttactgtctggtttttgtcagaaaaaagtttgtcaatccttgttttagaagatggaaaaatgtgaagatctttrgagattctcttgagtggtatatctaattgaaatgggatcttygtttggcttgtatgttgatgaaatcaacttaggtatacaatataaaaaataaagaccctgaaaattgttttggatactgtgttaatgcctcatagaatttttgttttggatactgtgttaatgcctcatagaattttctccatatatgagtgtgttttaaagtaactgagttactgtagcagaagagctccttttataaacattagaaaccttgggcagagagaaaagatttttattaacgtccctcttcagtattaactcagacttggtcttccctaaaataat

SEQ ID NO: 4971 - DNA, 1975 bp, Homo sapiens
ggccaagggcgccgcgggactcacgagctcccctccgcgctggctgcagcggcgatgccgggcatgcctggccrggcccggccgggggcggcctcgctgccggggcagggacctcgcaggccggcgcgcagaggcgaggaaccctcccggcgccatcgactcacctacccgcgragaggcgacggcgcgcgccgctcaccagcccgggccccagatccaaggaggaggggcagcggcgcggggaccctgtggtttaatgcattcaaaaggactaataccatactgcaccatttgagaatgtccaagcacacagatgcagcagaagaggtgctattggagaagtgggaacaagatcctgaaactttcstgatcattataaagggagcaggaggaaaggctttctgtgccgggggtgatatcagagtgatctcggaagctgaaaaggcaaaacagaagatagctccagttttcttcagagaagaatatatgctgaataatgctgttggttcttgccagaaaccttatgttgcacttattcatggaattacaatgggtgggggagttggtctctcagtccatgggcaatttcgagtggctacagaaaagtgtctttttgctatgccagaaactgcaataggactgttccctgatgtgggtggaggttatttcttgccacgactccaaggaaaacttggttacttccttgcattaacaggattcagactaaaaggaagagatgtgtacagagcaggaattgctacacactttgtagattctgaaaagttggccatgttagaggaagatttgttagccttgaaatctccttcaaaagaaaatattgcatctgtcttagamaattaccatacagagtctaagattgatcgagacaagtcttttatacttgaggaacacatggacaaaataaacagttgtttttcagccaatactgtggaagaaattattgaaaacttacagcaagatggttcatcttttgccctagagcaattgaaggtaattaataaaatgtctccaacatctctaaagatcacactaaggcaactcatggaggggtcttcraagaccttgcaagaagtactaactatggagtatcggctaagtcaagcttgtatgagaggtcatgactttcatgaaggcgtwagagctgttttaattgataaagaccagagtccaaaatggaaaccagctgatctaaaagaagttactgaggaagatttgaataatcactttaagtctttgggaagcagtgatttgaaattttgaggtgacaggcttttaaggtatattttgtagcatgggttggcaatctacagcatgtgggccaaatccagcctgctgcctgtttttatataccctgtaagctaagaatggtttccgcatttttaaatggttgggaaaagaaatcaaagactaatawttcatgacgtgaaaattatcagaattcacaaataaagctttattggaactagctatactcatctgtttatatattatctgtggctgctttgaaatgagtagttgcaatagagatggtaaagcctacaaagcctaattatttactgtctggtttttgtcagaaaaaagtttgtcaatccttgttttagaagatggaaaaatgtgaagatctttrgagattctcttgagtggtatatctaattgaaatgggatcttygtttggcttgtatgttgatgaaatcaacttaggtatacaatataaaaaataaagaccctgaaaattgttttggatactgtgttaatgcctcatagaatttttgttttggatactgtgttaatgcctcatagaattttctccatatatgagtgtgttttaaagtaactgagttactgtagcagaagagctccttttataaacattagaaaccttgggcagagagaaaagatttttattaacgtccctcttcagtattaactcagacttggtcttccctaaaataat

SEQ ID NO: 4972 - DNA, 2641 bp, Homo sapiens
ggtgagcgcggctggaagcgcgcatgcgctgtggctaatgccgtaggctcyttcagggctgagccatccygcgtgtcttgcgctcggtggaaatgcccagccgagggacgcgaccagaggacagctctgtgctgatccccaccgacaattcgaccccacacaaggaggatctaagcagcaagaaagtatataggcaacaacagaacagcaatatattctttcttgcagaccgaacagaaatgctgtctgagagcaagaatatattggatgaactgaaaaaagaataccaagaaatagaaaacttagacaagaccaaaatcaagaaatagtcaacctgatttcacataacaatgtgtggcatttgttgttctgtaaacttttctgctgagcatttcagtcaagatttaaaagaggacttactatataatctwaaacagcggggacccaatagtagtaaacaattgttaaagtctgatgttaactaccagtgtttattttctgctcacgtcctacacttgaggggtgttttgactacccagcctgtggaagatgaaagaggcaatgtgtttctatggaatggagaaatttttagtggaataaaggttgaagctgaagagaatgacactcaaattttgtttaattatctttcctcctgtaagaatgaatctgagattttgtcactcttctcagaagtacaaggtccctggtcatttatatattatcaagcatctagtcattatttatggtttggtagggatttttttggtcgccgtagcttgctttggcattttagtaatttgggcaagagtttctgcctctcttcagttggcacccaaacatctggattggcaaatcagtggcaagaagttccagcatctggacttttcagaattgatcttaagtcyactgtcatttccrgatgcattattttacaactgtatccttggaaatatatttctagggagaatattattgaagaaaatgttaatagcctgagtcaaatttcagcagacttaccagcatttgtatcagtggtagcaaatgaagccaaactgtatcttgaaaaacctgttgttcctttaaatatgatgttgccacaagctgcaytggagactcattgcagtaatatttccaatgtgccacctacaagagagatacttcaagtctttcttactgatgtacacatgaaggaagtaattcagcagttcattgatgtcctgagtgtagcagtcaagaaacgtgtcttgtgtttacctagggatgaaaacctgacagcaaatgaagttttgaaaacgtgtgataggaaagcaaatgttgcaatcctgttttctgggggcattgattccatggttattgcaacccttgctgaccgtcatattcctttagatgaaccaattgatcttcttaatgtagctttcatagstgaagaaaagaccatgccaactacctttaacagagaagggaataaacagaaaaataaatgtgaaataccttcagaagaattctctaaagatgttgctgctgctgctgctgacagtcctaataaacatgtcagtgtaccagatcgaatcacaggaagggcgggactaaaggaactacaagctgttagcccttcccgaatttggaattttgttgaaattaatgtttctayggaagaactgcagaaattaagaaraactcgaatatgtcacttaattcggccattggatacagttttggatgatagcattggctgtgcagtctggtttgcttctagaggaattggttggttagtggcccaggaaggagtgaaatcctatcagagcaatgcaaaggtagttctcactggaattggtgcagatgagcaacttgcaggttattctcgtcatcgtgtccgctttcagtcgcatgggctggaaggattgaataaggaaataatgatggaactgggtcgaatttcttctagaaatcttggtcgtgatgacagagttattggtgatcatggaaaagaagcaagatttcctttcctggatgaaaatgttgtctcctttctaaattctctgccgatttgggaaaaagcaaacttgactttaccccgaggaattggtgaaaaattacttttacgccttgcagctgtggaacttggtcttacagcctctgctcttctgcccaaacgggccatgcagtttggatcaagaattgcaaaaatggaaaaaattaatgaaaaggcatctgataaatgtggacggctccaaatcatgtccttagaaaatctttctattgaaaaggagactaaattgtaatgtgattcmcaatgtaacaatataaaaataagtttttatataattatataaaagtaagatactctgctgctttactattgtataayatagtagttttaaagttcatttggttgaattttcattttttcctgtcacagagcttctaaaaccatggaatttccttagtgatagggaatatcttttgttgttcataataagccccttttgatcacacctgagtttatgctaatgcgktgacttagggtgaggtctctaaatagcctttaacacctgcagcttgggaggccaaggcagagggatctcttgagtccaggagtttgagaacagcctgggcaacatgatgaaacctcatctctacc

SEQ ID NO: 4973 - DNA, 2704 bp, Homo sapiens
aaaagaaagggtgagcgcggctggaagcgcgcatgcgctgtggctaatgccgtaggctcyttcagggctgagccatccygcgtgtcttgcgctcggtggaaatgcccagccgagggacgcgaccagaggacagctctgtgctgatccccaccgacaattcgaccccacacaaggaggatctaagcagcaagattaaagaacaaaaaattgtggtggatgaactttctaaccttaagaagaataggaaagtatataggcaacaacagaacagcaatatattctttcttgcagaccgaacagaaatgctgtctgagagcaagaatatattggatgaactgaaaaaagaataccaagaaatagaaaacttagacaagaccaaaatcaagaaatagtcaacctgatttcacataacaatgtgtggcatttgttgttctgtaaacttttctgctgagcatttcagtcaagatttaaaagaggacttactatataatctwaaacagcggggacccaatagtagtaaacaattgttaaagtctgatgttaactaccagtgtttattttctgctcacgtcctacacttgaggggtgttttgactacccagcctgtggaagatgaaagaggcaatgtgtttctatggaatggagaaatttttagtggaataaaggttgaagctgaagagaatgacactcaaattttgtttaattatctttcctcctgtaagaatgaatctgagattttgtcactcttctcagaagtacaaggtccctggtcatttatatattatcaagcatctagtcattatttatggtttggtagggatttttttggtcgccgtagcttgctttggcattttagtaatttgggcaagagtttctgcctctcttcagttggcacccaaacatctggattggcaaatcagtggcaagaagttccagcatctggacttttcagaattgatcttaagtcyactgtcatttccrgatgcattattttacaactgtatccttggaaatatatttctagggagaatattattgaagaaaatgttaatagcctgagtcaaatttcagcagacttaccagcatttgtatcagtggtagcaaatgaagccaaactgtatcttgaaaaacctgttgttcctttaaatatgatgttgccacaagctgcaytggagactcattgcagtaatatttccaatgtgccacctacaagagagatacttcaagtctttcttactgatgtacacatgaaggaagtaattcagcagttcattgatgtcctgagtgtagcagtcaagaaacgtgtcttgtgtttacctagggatgaaaacctgacagcaaatgaagttttgaaaacgtgtgataggaaagcaaatgttgcaatcctgttttctgggggcattgattccatggttattgcaacccttgctgaccgtcatattcctttagatgaaccaattgatcttcttaatgtagctttcatagstgaagaaaagaccatgccaactacctttaacagagaagggaataaacagaaaaataaatgtgaaataccttcagaagaattctctaaagatgttgctgctgctgctgctgacagtcctaataaacatgtcagtgtaccagatcgaatcacaggaagggcgggactaaaggaactacaagctgttagcccttcccgaatttggaattttgttgaaattaatgtttctayggaagaactgcagaaattaagaaraactcgaatatgtcacttaattcggccattggatacagttttggatgatagcattggctgtgcagtctggtttgcttctagaggaattggttggttagtggcccaggaaggagtgaaatcctatcagagcaatgcaaaggtagttctcactggaattggtgcagatgagcaacttgcaggttattctcgtcatcgtgtccgctttcagtcgcatgggctggaaggattgaataaggaaataatgatggaactgggtcgaatttcttctagaaatcttggtcgtgatgacagagttattggtgatcatggaaaagaagcaagatttcctttcctggatgaaaatgttgtctcctttctaaattctctgccgatttgggaaaaagcaaacttgactttaccccgaggaattggtgaaaaattacttttacgccttgcagctgtggaacttggtcttacagcctctgctcttctgcccaaacgggccatgcagtttggatcaagaattgcaaaaatggaaaaaattaatgaaaaggcatctgataaatgtggacggctccaaatcatgtccttagaaaatctttctattgaaaaggagactaaattgtaatgtgattcmcaatgtaacaatataaaaataagtttttatataattatataaaagtaagatactctgctgctttactattgtataayatagtagttttaaagttcatttggttgaattttcattttttcctgtcacagagcttctaaaaccatggaatttccttagtgatagggaatatcttttgttgttcataataagccccttttgatcacacctgagtttatgctaatgcgktgacttagggtgaggtctctaaatagcctttaacacctgcagcttgggaggccaaggcagagggatctcttgagtccaggagtttgagaacagcctgggcaacatgatgaaacctcatctctacc

SEQ ID NO: 4974 - DNA, 2658 bp, Homo sapiens
aaaagaaagggtgagcgcggctggaagcgcgcatgcgctgtggctaatgccgtaggctcyttcagggctgagccatccygcgtgtcttgcgctcggtggaaatgcccagccgagggacgcgaccagaggacagctctgtgctgatccccaccgacaattcgaccccacacaaggaggatctaagcagcaagattaaagaacaaaaaattgtggtggatgaactttctaaccttaagaagaataggaccgaacagaaatgctgtctgagagcaagaatatattggatgaactgaaaaaagaataccaagaaatagaaaacttagacaagaccaaaatcaagaaatagtcaacctgatttcacataacaatgtgtggcatttgttgttctgtaaacttttctgctgagcatttcagtcaagatttaaaagaggacttactatataatctwaaacagcggggacccaatagtagtaaacaattgttaaagtctgatgttaactaccagtgtttattttctgctcacgtcctacacttgaggggtgttttgactacccagcctgtggaagatgaaagaggcaatgtgtttctatggaatggagaaatttttagtggaataaaggttgaagctgaagagaatgacactcaaattttgtttaattatctttcctcctgtaagaatgaatctgagattttgtcactcttctcagaagtacaaggtccctggtcatttatatattatcaagcatctagtcattatttatggtttggtagggatttttttggtcgccgtagcttgctttggcattttagtaatttgggcaagagtttctgcctctcttcagttggcacccaaacatctggattggcaaatcagtggcaagaagttccagcatctggacttttcagaattgatcttaagtcyactgtcatttccrgatgcattattttacaactgtatccttggaaatatatttctagggagaatattattgaagaaaatgttaatagcctgagtcaaatttcagcagacttaccagcatttgtatcagtggtagcaaatgaagccaaactgtatcttgaaaaacctgttgttcctttaaatatgatgttgccacaagctgcaytggagactcattgcagtaatatttccaatgtgccacctacaagagagatacttcaagtctttcttactgatgtacacatgaaggaagtaattcagcagttcattgatgtcctgagtgtagcagtcaagaaacgtgtcttgtgtttacctagggatgaaaacctgacagcaaatgaagttttgaaaacgtgtgataggaaagcaaatgttgcaatcctgttttctgggggcattgattccatggttattgcaacccttgctgaccgtcatattcctttagatgaaccaattgatcttcttaatgtagctttcatagstgaagaaaagaccatgccaactacctttaacagagaagggaataaacagaaaaataaatgtgaaataccttcagaagaattctctaaagatgttgctgctgctgctgctgacagtcctaataaacatgtcagtgtaccagatcgaatcacaggaagggcgggactaaaggaactacaagctgttagcccttcccgaatttggaattttgttgaaattaatgtttctayggaagaactgcagaaattaagaaraactcgaatatgtcacttaattcggccattggatacagttttggatgatagcattggctgtgcagtctggtttgcttctagaggaattggttggttagtggcccaggaaggagtgaaatcctatcagagcaatgcaaaggtagttctcactggaattggtgcagatgagcaacttgcaggttattctcgtcatcgtgtccgctttcagtcgcatgggctggaaggattgaataaggaaataatgatggaactgggtcgaatttcttctagaaatcttggtcgtgatgacagagttattggtgatcatggaaaagaagcaagatttcctttcctggatgaaaatgttgtctcctttctaaattctctgccgatttgggaaaaagcaaacttgactttaccccgaggaattggtgaaaaattacttttacgccttgcagctgtggaacttggtcttacagcctctgctcttctgcccaaacgggccatgcagtttggatcaagaattgcaaaaatggaaaaaattaatgaaaaggcatctgataaatgtggacggctccaaatcatgtccttagaaaatctttctattgaaaaggagactaaattgtaatgtgattcmcaatgtaacaatataaaaataagtttttatataattatataaaagtaagatactctgctgctttactattgtataayatagtagttttaaagttcatttggttgaattttcattttttcctgtcacagagcttctaaaaccatggaatttccttagtgatagggaatatcttttgttgttcataataagccccttttgatcacacctgagtttatgctaatgcgktgacttagggtgaggtctctaaatagcctttaacacctgcagcttgggaggccaaggcagagggatctcttgagtccaggagtttgagaacagcctgggcaacatgatgaaacctcatctctacc

SEQ ID NO: 4975 - DNA, 857 bp, Homo sapiens
gcttgggcgtgagatggcggcggcagcggtgagcagcgccaagcggagcctgcggggagagctgaagcagcgtctgcgggcgatgagtgccgaggagcggctacgccagtcccgcgtactgagccagaaggtgattgcccacagtgagtatcaaaagtccaaaagaatttccatctttctgagcatgcaagatgaaattgagacagaagagatcatcaaggacattttccaacgaggcaaaatctgcttcatccctcggtaccggttccagagcaatcacatggatatggtgagaatagaatcaccagaggaaatttctttacttcccaaaacatcctggaatatccctcagcctggtgagggtgatgttcgggaggaggccttgtccacagggggacttgatctcatcttcatgccaggccttgggtttgacaaacatggcaaccgactggggaggggcaagggctactatgatgcctatctgaagcgctgtttgcagcatcaggaagtgaagccctacaccctggcgttggctttcaaagaacagatttgcctccaggtcccagtgaatgaaaacgacatgaaggtagatgaagtcctttacgaagactcgtcarcagcttaaatctggattactacagccaaataatcagtgttttatatgagagtaaagcaaagtatgtgtatttttcccttgtcaaaaattagttgaaattgttcattaatgtgaatacagactgcattttaaaattgtaattatgaaataccttatataaaaccatctttaaaaaccaatagaagtgtgaatagtagaatattaattaaaatggaggctatcagcctgtgattttcagctt

SEQ ID NO: 4976 - DNA, 4071 bp, Homo sapiens
agccaagccggagaggaggcgagcrgcagggcctggtggcgagagcgcggctgtcactgcgcccgagcatcccagagctttccgagcggacgagccggccgtgccgggcatccccagcctcgctaccctcgcagcacacgtcgagccccgcacaggcgagggtccggaacttagcccaaagcacgtttcccctggcagcgcaggaaacgcccggccgcgcsccggcgcacgcccccctctcctcctttgttccgggggtcgsyggccgctctcctgccagcgtcgggatctcggccccgggaggcgggccgtcgggcgcagccgcgaagatgccgttggaactgacgcagagccgagtgcagaagatctgggtgcccgtggaccacaggccctcgttgcccagatcctgtgggccaaagctgaccaactcccccaccgtcatcgtcatggtgggcctccccgcccggggcaagacctacatctccaagaagctgactcgctacctcaactggattggcgtccccacaaaagtgttcaacgtcggggagtatcgccgggaggctgtgaagcagtacagctcctacaacttcttccgccccgacaatgaggaagccatgaaagtccrgaagcaatgtgccttagctgccttgagagatgtcaaaagctacctggcgaaagaagggggacaaattgcggttttcgatgccaccaatactactagagagaggagacacatgatccttcattttgccaaagaaaatgactttaaggcrtttttcatcgagtcggtgtgcgacgaccctacagttgtggcctccaatatcatggaagttaaaatctccagcccggattacaaagactgcaactcggcagaagccatggacgacttcatgaagaggatcagttgctatgaagccagctaccagcccctcgaccccgacaaatgcgacagggacttgtcgctgatcaaggtgattgacgtgggccggaggttcctggtgaaccgggtgcaggaccacatccagagccgcatygtgtactacctgatgaacatccacgtgcagccgcgtaccatctacctgtgccggcacggcgagaacgagcacaacctccagggccgcatcrggggcgactcaggcctgtccagccggggcaagaagtttgccagtgctctgagcaagttcgtggaggagcagaacctgaaggacytgcgcgtgtggaccagccagctgaagagcaccatccagacggccgaggcgctgcggctgccctacgagcagtggaaggcgctcaatgagatcgacgcgggcgtctgtgaggagctgacctacgaggagatcagggacacctaccctgaggagtatgcgctgcgggagcaggacaagtactattaccgctaccccaccggggagtcctaccaggacctggtccagcgcttggagccagtgatcatggagctggagcggcaggagaatgtrctggtcatctgccaccaggccgtcctgcgctgcctgcttgcctacttcctggataagagtgcagaggagatgccctacctgaaatgccctcttcacaccgtcctgaaactgacgcctgtcgcttatggctgccgtgtggaatcyatctacctgaacgtggagtccgtctgcacacaccgggagaggtcagaggatgcaaagaagggacctaacccgctcatgagacgcaatagtgtcaccccrctagccagccccgaacccaccaaaaagcctcgcatcaacagctttgaggagcatgtggcctccacctcggccgccctgcccagctgcctgmccccggaggtgcccacgcagctgcctggacaaaacatgaaaggctcccggagcagcgctgactcytccaggaaacactgaggcagacgtgtcggttccattccatttccatttctgcagcttagcttgtgtcctgccctccrcccgaggcaaaacgtatcctgaggacttcttccggagagggtggggtggagcagcgggggagccttggccgaagagaaccatgcttggcaccgtctgtgtcccctcggccgctggacaccagaaagccacgtgggtccctggcgccctgcctttagccgtggggcccycacctccacyctctgggtttcctaggaatgtccagcctcggagaycttcacaaagccttgggagggtgatgagtgctggtcctgacargaggccgctggggacactgtgctgttttgtttcgtttctgtgatctcccggcacgtttggagctgggaagaccacactggtggcagaatcctaaaattaaaggaggcaggctcctagttgctgaaagttaaggaatgtgtaaaacctccacgtgactgtttggtgcatcttgacctgggaagacgcctcatgggaacgaacttggacaggtgttgggttgaggcctcttctgcaggaatggcccaagcaaggcctcacwcgcagccacttcttcaagagctgcctgcacactgtcttggagcatctgccttgtgcctggcactctgccggtgccttgggaaggtcggaagagtggactttgtcctggccttcccttcatggcgtctatgacacttttgtggtgatggaaagcatgggacctgtcgtctcagcctgttggtttctcctcattgcctcaaaccctggggtaggtgggacggggggtctcgtgcccagatgaaaccatttggaaactcggcagcagagtttgtccaaatgacccttttcaggatgtctcaaagcttgtgccaaaggtcacttttctttcctgccttctgctgtgagccctgagatcctcctcccagctcaagggacaggtcctgggtgagggtgggagatttagacacctgaaactgggcgtggagagaagagccgttgctgtttgttttttgggaagagcttttaaagaatgcatrtttttttcctggttggaattgagtaggaactgaggctgtgcttcaggtatggtacaatcaagtgggggattttcatgctgaaccattcaagccctccccgcccgttscacccactttggctggcgtctgctggagaggatgtctctgtccgcattcccgtgcagctccaggctcgcgcagttttctctctcyccctggatgttgagtctcatcagaatatgtgggtrgggggtggacgtgcacgggtgcatgattgtgcttaacttggttgtatttttcgatttgacatggaaggcctgttgctttgctctwgagaatagtttctcgtgtccccctcrcasgcctcattctttgaacmtcractctgawgtttgatacagatrggggcttgatagctgtggtcccctctcccctctgactacctaaaatcaatacctaaatacagaagccttggtctaacacgggacttttagtttgcgaagggcctagatagggagagaggtaacatgaatctggacagggagggagatactatagaaaggagaacactgcmtactttgcaagccagtgacctgccttttgaggggacattggacgggggccgggggcgggggttsggtttgagctacmgtcatgaacttttggcgtctactgattcctccaactctccaccccacaaaataacggggaccaatatttttaactttgcctatttgtttttgggtgagtttcccccctccttattctgtcctgagaccacgggcaaagctcttcattttgagagagaagaaaaactgtttggaaccacaccaatgatatttttctttgtaatacttgaaatttatttttttattattttgatagcagatgtgctatttatttatttaatatgtataaggagcctaaacaatagaaagctgtagagattgggtttcattgttaattggtttgggagcctcctatgtgtgacttatgacttctctgtgttctgtgtatttgtctgaattaatgacctgggatataaagctatgctagctttcaaacaggagatgcctttcagaaatttgtatattttgcagttgccagaccaataaaatacctggttgaaatacatggacgaagtaaac

SEQ ID NO: 4977 - DNA, 4496 bp, Homo sapiens
agccaagccggagaggaggcgagcrgcagggcctggtggcgagagcgcggctgtcactgcgcccgagcatcccagagctttccgagcggacgagccggccgtgccgggcatccccagcctcgctaccctcgcagcacacgtcgagccccgcacaggcgagggtccggaacttagcccaaagcacgtttcccctggcagcgcaggaaacgcccggccgcgcsccggcgcacgcccccctctcctcctttgttccgggggtcgsyggccgctctcctgccagcgtcgggatctcggccccgggaggcgggccgtcgggcgcagccgcgaagatgccgttggaactgacgcagagccgagtgcagaagatctgggtgcccgtggaccacaggccctcgttgcccagatcctgtgggccaaagctgaccaactcccccaccgtcatcgtcatggtgggcctccccgcccggggcaagacctacatctccaagaagctgactcgctacctcaactggattggcgtccccacaaaagtgttcaacgtcggggagtatcgccgggaggctgtgaagcagtacagctcctacaacttcttccgccccgacaatgaggaagccatgaaagtccrgaagcaatgtgccttagctgccttgagagatgtcaaaagctacctggcgaaagaagggggacaaattgcggttttcgatgccaccaatactactagagagaggagacacatgatccttcattttgccaaagaaaatgactttaaggcrtttttcatcgagtcggtgtgcgacgaccctacagttgtggcctccaatatcatggaagttaaaatctccagcccggattacaaagactgcaactcggcagaagccatggacgacttcatgaagaggatcagttgctatgaagccagctaccagcccctcgaccccgacaaatgcgacagggacttgtcgctgatcaaggtgattgacgtgggccggaggttcctggtgaaccgggtgcaggaccacatccagagccgcatygtgtactacctgatgaacatccacgtgcagccgcgtaccatctacctgtgccggcacggcgagaacgagcacaacctccagggccgcatcrggggcgactcaggcctgtccagccggggcaagaagtttgccagtgctctgagcaagttcgtggaggagcagaacctgaaggacytgcgcgtgtggaccagccagctgaagagcaccatccagacggccgaggcgctgcggctgccctacgagcagtggaaggcgctcaatgagatcgacgcgggcgtctgtgaggagctgacctacgaggagatcagggacacctaccctgaggagtatgcgctgcgggagcaggacaagtactattaccgctaccccaccggggagtcctaccaggacctggtccagcgcttggagccagtgatcatggagctggagcggcaggagaatgtrctggtcatctgccaccaggccgtcctgcgctgcctgcttgcctacttcctggataagagtgcagaggagatgccctacctgaaatgccctcttcacaccgtcctgaaactgacgcctgtcgcttatggctgccgtgtggaatcyatctacctgaacgtggagtccgtctgcacacaccgggagaggtcagaggatgcaaagaagggacctaacccgctcatgagacgcaatagtgtcaccccrctagccagccccgaacccaccaaaaagcctcgcatcaacagctttgaggagcatgtggcctccacctcggccgccctgcccagctgcctgmccccggaggtgcccacgcagctgcctggacaaaacatgaaaggctcccggagcagcgctgactcytccaggaaacactgaggcagacgtgtcggttccattccatttccatttctgcagcttagcttgtgtcctgccctccrcccgaggcaaaacgtatcctgaggacttcttccggagagggtggggtggagcagcgggggagccttggccgaagagaaccatgcttggcaccgtctgtgtcccctcggccgctggacaccagaaagccacgtgggtccctggcgccctgcctttagccgtggggcccycacctccacyctctgggtttcctaggaatgtccagcctcggagaycttcacaaagccttgggagggtgatgagtgctggtcctgacargaggccgctggggacactgtgctgttttgtttcgtttctgtgatctcccggcacgtttggagctgggaagaccacactggtggcagaatcctaaaattaaaggaggcaggctcctagttgctgaaagttaaggaatgtgtaaaacctccacgtgactgtttggtgcatcttgacctgggaagacgcctcatgggaacgaacttggacaggtgttgggttgaggcctcttctgcaggaagtccctgagctgagacgcaagttggctgggtggtccgcaccctggctctcctgcaggtccacacaccttccaggcctgtggcctgcctccaaagatgtgcaagggcaggctggctgcacggggagagggaagtattttgcygaaatatgagaactggggcctcctgctcccagggagctccagggcccctctctcctcccacctggacttggggggaactgagaaacactttcctggagctgctggcttttgcacttttttgatggcagaagtgtgacctgagagtcccaccttctcttcaggaacgtagatgttggggtgtsttgccctggggggcttggaacctctgaaggtggggagcggaacacctggcatccttccccagcacttgcattacsgtccctgctcttcccaggtggggacagtggcccaagcaaggcctcacwcgcagccacttcttcaagagctgcctgcacactgtcttggagcatctgccttgtgcctggcactctgccggtgccttgggaaggtcggaagagtggactttgtcctggccttcccttcatggcgtctatgacacttttgtggtgatggaaagcatgggacctgtcgtctcagcctgttggtttctcctcattgcctcaaaccctggggtaggtgggacggggggtctcgtgcccagatgaaaccatttggaaactcggcagcagagtttgtccaaatgacccttttcaggatgtctcaaagcttgtgccaaaggtcacttttctttcctgccttctgctgtgagccctgagatcctcctcccagctcaagggacaggtcctgggtgagggtgggagatttagacacctgaaactgggcgtggagagaagagccgttgctgtttgttttttgggaagagcttttaaagaatgcatrtttttttcctggttggaattgagtaggaactgaggctgtgcttcaggtatggtacaatcaagtgggggattttcatgctgaaccattcaagccctccccgcccgttscacccactttggctggcgtctgctggagaggatgtctctgtccgcattcccgtgcagctccaggctcgcgcagttttctctctcyccctggatgttgagtctcatcagaatatgtgggtrgggggtggacgtgcacgggtgcatgattgtgcttaacttggttgtatttttcgatttgacatggaaggcctgttgctttgctctwgagaatagtttctcgtgtccccctcrcasgcctcattctttgaacmtcractctgawgtttgatacagatrggggcttgatagctgtggtcccctctcccctctgactacctaaaatcaatacctaaatacagaagccttggtctaacacgggacttttagtttgcgaagggcctagatagggagagaggtaacatgaatctggacagggagggagatactatagaaaggagaacactgcmtactttgcaagccagtgacctgccttttgaggggacattggacgggggccgggggcgggggttsggtttgagctacmgtcatgaacttttggcgtctactgattcctccaactctccaccccacaaaataacggggaccaatatttttaactttgcctatttgtttttgggtgagtttcccccctccttattctgtcctgagaccacgggcaaagctcttcattttgagagagaagaaaaactgtttggaaccacaccaatgatatttttctttgtaatacttgaaatttatttttttattattttgatagcagatgtgctatttatttatttaatatgtataaggagcctaaacaatagaaagctgtagagattgggtttcattgttaattggtttgggagcctcctatgtgtgacttatgacttctctgtgttctgtgtatttgtctgaattaatgacctgggatataaagctatgctagctttcaaacaggagatgcctttcagaaatttgtatattttgcagttgccagaccaataaaatacctggttgaaatacatggacgaagtaaac

SEQ ID NO: 4978 - DNA, 1591 bp, Homo sapiens
cgcggggctgccgcttggacgtcgtcctgtctgggtgtcgcgggccggccccgcggggagcgcccccggcgcgatgcccttcaggaaagcctgtgggccaaagctgaccaactcccccaccgtcatcgtcatggtgggcctccccgcccggggcaagacctacatctccaagaagctgactcgctacctcaactggattggcgtccccacaaaagtgttcaacgtcggggagtatcgccgggaggctgtgaagcagtacagctcctacaacttcttccgccccgacaatgaggaagccatgaaagtccrgaagcaatgtgccttagctgccttgagagatgtcaaaagctacctggcgaaagaagggggacaaattgcggttttcgatgccaccaatactactagagagaggagacacatgatccttcattttgccaaagaaaatgactttaaggcrtttttcatcgagtcggtgtgcgacgaccctacagttgtggcctccaatatcatggaagttaaaatctccagcccggattacaaagactgcaactcggcagaagccatggacgacttcatgaagaggatcagttgctatgaagccagctaccagcccctcgaccccgacaaatgcgacagggacttgtcgctgatcaaggtgattgacgtgggccggaggttcctggtgaaccgggtgcaggaccacatccagagccgcatygtgtactacctgatgaacatccacgtgcagccgcgtaccatctacctgtgccggcacggcgagaacgagcacaacctccagggccgcatcrggggcgactcaggcctgtccagccggggcaagaagtttgccagtgctctgagcaagttcgtggaggagcagaacctgaaggacytgcgcgtgtggaccagccagctgaagagcaccatccagacggccgaggcgctgcggctgccctacgagcagtggaaggcgctcaatgagatcgacgcgggcgtctgtgaggagctgacctacgaggagatcagggacacctaccctgaggagtatgcgctgcgggagcaggacaagtactattaccgctaccccaccggggagtcctaccaggacctggtccagcgcttggagccagtgatcatggagctggagcggcaggagaatgtrctggtcatctgccaccaggccgtcctgcgctgcctgcttgcctacttcctggataagagtgcagaggagatgccctacctgaaatgccctcttcacaccgtcctgaaactgacgcctgtcgcttatggctgccgtgtggaatcyatctacctgaacgtggagtccgtctgcacacaccgggagaggtcagaggatgcaaagaagggacctaacccgctcatgagacgcaatagtgtcaccccrctagccagccccgaacccaccaaaaagcctcgcatcaacagctttgaggagcatgtggcctccacctcggccgccctgcccagctgcctgmccccggaggtgcccacgcagctgcctggacaacctttgctagggcaagcctgtctacgaactgtctgtcacattttctcaaagttttctccttac

SEQ ID NO: 4979 - DNA, 619 bp, Homo sapiens
cgcggggctgccgcttggacgtcgtcctgtctgggtgtcgcgggccggccccgcggggagcgcccccggcgcgatgcccttcaggaaagcctgtgggccaaagctgaccaactcccccaccgtcatcgtcatggtgggcctccccgcccggggcaagacctacatctccaagaagctgactcgctacctcaactggattggcgtccccacaaaagtgttcaacgtcggggagtatcgccgggaggctgtgaagcagtacagctcctacaacttcttccgccccgacaatgaggaagccatgaaagtccrgaagcaatgtgccttagctgccttgagagatgtcaaaagctacctggcgaaagaagggggacaaattgcggttttcgatgccaccaatactactagagagaggagacacatgatccttcattttgccaaagaaaatgactttaaggcrtttttcatcgagtcggtgtgcgacgaccctacagttgtggcctccaatatcatggtaagacagccgggagccccgtgcttctgcggcagcgtagaccacaagggcatttgcagtctgaggaagtgggggaccgggtccrgctcggaagcgcagctgagccct

SEQ ID NO: 4980 - DNA, 1582 bp, Homo sapiens
cgcggggctgccgcttggacgtcgtcctgtctgggtgtcgcgggccggccccgcggggagcgcccccggcgcgatgcccttcaggaaagcctgtgggccaaagctgaccaactcccccaccgtcatcgtcatggtgggcctccccgcccggggcaagacctacatctccaagaagctgactcgctacctcaactggattggcgtccccacaaaagtgttcaacgtcggggagtatcgccgggaggctgtgaagcagtacagctcctacaacttcttccgccccgacaatgaggaagccatgaaagtccrgaagcaatgtgccttagctgccttgagagatgtcaaaagctacctggcgaaagaagggggacaaattgcggttttcgatgccaccaatactactagagagaggagacacatgatccttcattttgccaaagaaaatgactttaaggcrtttttcatcgagtcggtgtgcgacgaccctacagttgtggcctccaatatcatggaagttaaaatctccagcccggattacaaagactgcaactcggcagaagccatggacgacttcatgaagaggatcagttgctatgaagccagctaccagcccctcgaccccgacaaatgcgacagggacttgtcgctgatcaaggtgattgacgtgggccggaggttcctggtgaaccgggtgcaggaccacatccagagccgcatygtgtactacctgatgaacatccacgtgcagccgcgtaccatctacctgtgccggcacggcgagaacgagcacaacctccagggccgcatcrggggcgactcaggcctgtccagccggggcaagaagtttgccagtgctctgagcaagttcgtggaggagcagaacctgaaggacytgcgcgtgtggaccagccagctgaagagcaccatccagacggccgaggcgctgcggctgccctacgagcagtggaaggcgctcaatgagatcgacgcgggcgtctgtgaggagctgacctacgaggagatcagggacacctaccctgaggagtatgcgctgcgggagcaggacaagtactattaccgctaccccaccggggagtcctaccaggacctggtccagcgcttggagccagtgatcatggagctggagcggcaggagaatgtrctggtcatctgccaccaggccgtcctgcgctgcctgcttgcctacttcctggataagagtgcagaggagatgccctacctgaaatgccctcttcacaccgtcctgaaactgacgcctgtcgcttatggctgccgtgtggaatcyatctacctgaacgtggagtccgtctgcacacaccgggagaggtcagaggatgcaaagaagggacctaacccgctcatgagacgcaatagtgtcaccccrctagccagccccgaacccaccaaaaagcctcgcatcaacagctttgaggagcatgtggcctccacctcggccgccctgcccagctgcctgmccccggaggtgcccacgcagctgcctggacaacctttgctagggcaagcctgtctaaactggaaaggtgtgatgaggaatgcagcc

SEQ ID NO: 4981 - DNA, 8038 bp, Homo sapiens
acgtgggacactctacggtggccgagaggatgccgcagatgtgttagcggcgagtccagaagcagccccaggaggtgctgggggcatcgtttctctaatctggcctcccgagtgccaaggaggcgtcccggcagcggtcatcatggtgaaggagcagttccgggagacggatgtggccaagaaaataagccacatctgttttggaatgaagtcacctgaggagatgcgccagcaggcgcacatccaagttgtgagtaagaacctgtacagccaggacaaccaacatgcccccttgctatatggggtgctcgaccataggatgggtacgagtgagaaggatcgtccatgtgaaacctgtgggaaaaacttggctgactgtctaggccactatgggtatatcgacctggagttgccgtgttttcatgtagggtacttcagagcagtcataggcatcttacagatgatctgcaaaacctgctgccacatcatgctgtcccaagaggagaagaagcagtttctggactatctaaagaggcccggcctgacctaccttcagaagcgaggactgaaaaagaaaatytctgacaagtgccggaagaaaaacatctgccatcactgtggcgcttttaatggtaccgtaaagaagtgtggactgctgaaaataattcatgagaaatacaagaccaacaaaaaagtggtggatcccattgtatcaaatttccttcagtcttttgaaacagccattgaacataataaagaagtggagcctctgctgggaagggcacaggaaaacttgaatcccttagtagttctgaatttatttaaacgaatcccagctgaagatgttcctctacttctgatgaacccagaagccggaaagccgtctgatttgattctcacacgacttttggtgcctcctttgtgtatcagaccctccgttgtgagtgatttgaagtctggcaccaatgaagatgatctgacaatgaaactgacagaaatcattttcctaaacgatgttattaaaaagcatcggatctcaggagccaagacccagatgatcatggaggactgggatttcctgcagctgcagtgtgccctctacattaacagtgagctctcgggcattcccctcaacatggcacccaagaagtggaccagaggcttcgtccaacgcctgaagggaaaacagggtcgatttagaggaaatctctcaggaaagagagtggatttttctggcagaacagtcatctcgcccgaccccaacctccggattgatgaggtagctgtgccagttcatgtggccaaaattctaacttttcctgagaaggtaaacaaagcaaacatcaatttcttgaggaaactggttcaaaacggccctgaggttcacccaggagcaaacttcattcagcagagacatacgcagatgaaaaggtttttgaaatacggaaatcgagaaaagatggctcaagagctcaagtatggtgacatcgtagagagacacctcatcgatggagatgtggtgctgttcaatcggcagccctcgctgcacaaattgagcattatggctcatctggccagggtcaagccccaccggaccttcagatttaatgagtgtgtctgtacaccctataatgctgactttgatggtgatgaaatgaaccttcatcttcctcaaacagaagaagctaaagcagaggcccttgttctkatggggactaaagcaaatcttgtaaccccgaggaatggggaaccgctgattgctgctattcaggattttctaacaggtgcctatctcctcactctcaaggacactttctttgatcgagccaaggcttgccaaatcattgcttcaatactggttggcaaggatgagaaaattaaagttckcctcccaccrcctacaatcctaaagcctgtcaccctgtggacgggaaagcagatcttcagtgtcatcctcaggcctagcgatgacaatccagtgagggccaacctgcgaaccaagggcaagcagtactgtggcaaaggggaagatctctgtgccaatgattcctatgttacaatccagaacagtgagttgatgagtggcagcatggacaaaggaaccctagggtcaggatccaagaacaatattttttacattttgctgcgagactggggacagaatgaagctgcagatgccatgtcacggctcgccaggctggctcctgtctacctgtctaaccgtggtttctcaattgggatcggtgatgtcacacctggccaaggactgctgaaggccaastatgagttgctgaatgccggctacaagaaatgtgatgagtacatcgaagccctgaacacgggcaagctgcagcagcagcctggctgcactgctgaggagaccctggaggcactgatcctgaaggagctgtctgtgatccgtgaccaygctggcagtgcctgcctccgggagctggacaagagcaacagccccctcaccatggctctgtgcggctccaaaggttccttcattaacatatcacagatgattgcctgygtgggacagcaggccatcagtggctctcgagtgccagacggctttgaaaacaggtccttgcctcattttgaaaaacactcaaagctcccagctgccaaaggctttgtggctaatagcttttattccggtttgacaccaactgagtttttcttccacacaatggccggccgggaaggtctagtcgacacggctgtaaagacagctgaaacgggatacatgcagcgaaggcttgtcaaatctcttgaagatctttgctcccagtatgatctgacagtccgaagctctactggcgatattatccagttcatttatggaggagatggcttagatcctgcagctatggagggaaaagatgaacctttggagtttaaaagggttctggacaacatcaaagcagtcttcccgtgtcccagtgagcctgctctcagcaaaaacgagctgatcctgaccacagagtccatcatgaagaagagtgagttcctctgctgccaggacagcttcctgcaggaaataaaaaaattcattaagggggtctctgagaagatcaagaaaaccagagataaatatggcatcaatgataacggcacaacagagccccgtgtgctgtaccagctggaccgcatcacccccacccaagtagaaaagtttctggagacctgtagggacaagtacatgagggcacagatggagccaggttctgcagtgggtgctctgtgtgcccagagcattggtgagccaggcacccagatgaccctgaagactttccactttgcaggtgtggcctccatgaacatcaccctgggcgtgccccggattaaagagatcatcaacgcttccaaggccatcagcactccaattatcacagcacagctagacaaggatgacgacgcggattatgctcgcctcgtgaaagggagaattgagaaaaccctcttgggagagatttccgagtatattgaagaagtgtttcttcctgatgactgctttattctcgtcaagctctccctggaacggattaggcttctgagactggaagtgaacgctgagacagtgagatattccatctgcacatccaagctccgtgtgaagcccggtgatgtggctgttcatggtgaggctgtggtgtgtgtcacccccagagagaacagcaagagctccatgtactacgtgctgcagttcctgaaagaggatctccccaaggtggtggtgcagggcattccagaggtgtccagagctgtcatccacattgacgagcagagtggaaaggagaagtacaagcttctggtggaaggtgataacctgcgggcagtcatggccacacacggtgtgaagggcacccgaaccacctccaataacacctatgaggtggagaaaactctgggcatcgaggccgcccggacaacgatcatcaatgaaatccagtacaccatggtgaaccacggcatgagcatcgacaggaggcacgtgatgctgctctccgacctcatgacctacaagggtgaagtcctgggcatcactaggtttggcctggccaagatgaaggagagtgtgctgatgctggcctcctttgagaagacggctgaccatctctttgacgctgcctacttcgggcagaaggactctgtgtgtggggtgtctgagtgcatcatcatgggaatcccaatgaacattggaaccgggctcttcaagctgcttcacaaggctgacagggacccgaaccctcccaagaggcccctgatcttcgacacaaatgaattccacatcccccttgtcacatagtccaaagaaagaggggaccatgcctgaccttgactccttgtcctgtctccagctgatgtataaagagttttgtgctccctgggacgggggtcctgaggtccccacctatgccagcaatcagagaagccctcttggcatccccaggagcagcttctcctctgatagggtgcagctcacaccagtgaccctgactgtgccacrctgctcgggagagctgagggttttattgtttgcttgcttgaaacctaatctatagacggccccacagctcstgcacacactgcttccctggacttaaagcccagccaggtgtcatggtccatcccagctcactgcatacatccatcggctccccatggtgtcttcacacctgacgatgagccaggcctgagccccacacaggccagggcacattcttggattttccattccttggtcatgctggaatctctcaatgtgacatacttatgtaaatattgttactattatttatttgttccatttgagggatttggaatttttgttattttagttttatttttgaaaccaagcatctatagaaaccaagaaagtcagcatgtaagcgtcactggaaaaactggtttaagcaaatagagccgtctgggatttgtaactgaggtgcaactgtcatgaggcccaggcagctctgtaacatcttctatagatgcccctggctaccctgttgttttcatctacctcagacccctatcatggggctctaccctgtgacaagagccaaacccattctccatggcctatggaagcctcactggagtttggggcctgctgcaatggggatgagatggttttttgtagaattatacttacgttccttggatgatctctagttgattttttaagttctgagttgatgctgttaaggtacccggggtagccattggttcttggatctgtgttagaatgagtgctttcccttcctactgatgtgattgtggattaggaattcgtgaccgagtgatttttggccagtggttgggtttaaaattctattaaaatttgtagtttgggctgggtgctgtggctcatacctataatcccagcactttgggaggccgaggggggcagatcacttgagcccaggagttcgagagcagcctgggcaacatgacgaaaccccgtctctacagagaatacaaaaattagccaggcatggtggcccatgcctgtagtacctgctattggtaaggctgaggtggaaggttcacttgagcctgggaggtggaggttgtagtgagccaagatcgtgccactacactccagcctgggcaacaaagcaagaccttgtctcaaaaaaaaaaaagaaaaaaattaagcgtaaaaaaaaattagtttttataaaaaattatagtttgaccttttgatttccctgcatctacaaggtagacctattaacttctcttggggtatcagtgatgtggraaaaaaatgccatttttcttaatgtttaacccccctttatctttgaattgagctagagcctggtttaggacaaaggattaagtttgttaatgaacactaattcagggcttctacttgagaccccaccgagatcaccagttctcatgtaacctgggaagagccataaaggggtaccccccaccccaactgccttcctggaagcatgcctgggaagtaagctgtaggcctgatccgagccaggaccactgggatccgtgcaaaggccaggggagggtagaattgaatcataggagtgaactccrgcacctgttgtcttctgcrggtgacgcacactttaaatggaagagaggttgtggctataacttgtggctgggaataataaagatggcaccgccaaggarcctcaccttgcgtgagtgagtactcagttgggcgctgcagggtctggagtctgtgtgagacgtgtgtgattgtgatgggtgcgaatcagcgtatagcacttgrgaacaaggcagaccttggagcagaatggttatgtgaaggatcacatcacccatgggtagggggggaagtcatacgtcctggaggtgctggtcctcctcctggaactgccagccttgctaggactatcaacatcaacagcattgcctggtaaaccctactgtttgtgctccccactgtgtcccatgactggtgttaaaattctccctactttgatcatctgccctgcccaggccttgggctttatgccagcacagagctcaaaggccaggtagcagcacatcctcaagcatgagagctcaaagggttacatttgagtctctgtacctgcttggaagaaataaaaatacgtgtgaattccatctcatccatgaatagttacaaattcttgactagcattctgtccagttctttgccatttttacgtcttttttacaagggagattaaaatagctcctgactcagttacagctccctgcagtgttcagcactttaggggtgggagagacattctggagtccttcagtatatatatgtgtcagttaaactatggtgccgtgtttctatttcagggtttatccatgtgtattcccattgattcatgtctgattgaacctggcattgtatgtttacttttcttgatttttgctgtctgttggcagacctctttatttttcagccaaaacccaagagaggaaatatttgcgttacctaaaactatagcagaatcatccttatgggttgtgaaaaaggacgttggccttgtatgagttctaactcctagaatgagaaccaacccccgtcaggagctcacctcttcgggtgctggaggtcaacagtgaatgccccagttacccccacccctgtgacttagaaatgtaggaaataaagtgccctctgagatgcagctaatccagtcccagtaggaggcgctgaaaggactcaagtctggagtctgaagggccgtctggccaggatcaggtgcatagcttaacttttattcattcaacaaagatttaaggcttgctacttccaaggcactgttctaggtattaggggtgcagcagtaaacacaataggtgaatcagatgttaatacatctggccaggcacggtggttcacgcctgtaattccagcactttgggaggccgaggcgagtggatcacctgaggtcaggagttggagaccagcctggccaacatggtgaaaccccgtctctactaaaaatagaaaaattagctgggtgtggtggcacgtgcctgtaatcccagctactggggaggctgaggtaggagaattgcttgaaccaaggagacagaggttgcagtgagccgagatcacaccattgcactccagcctgggagacagagcgagactccatctcagaaaaaaaaaaaaaaaaaaaaaaaaagatgttaatacatctaaaaggaattccacagaagcgggtgaagcaaaaaggctcaggttcagtgtgcagaagtgtgtccagcacactctggggtggaagctgcagatcaagggattgtgctcccgtgggcacatcaggcccaccagggtaaagaaaggtccttctgtggctgcagccctctggttccaacccctcccacagggcctctcatgacactaatttggcctccttaccttaggcttggattctggggagtgtgccctgagcgaggacacaagcctgcagtcactgggaaacgttgccaccatcctttcctcaacctactggcagtgttagcgtgtgaacatttg

SEQ ID NO: 4982 - DNA, 5131 bp, Homo sapiens
ggtatgaaygtgatttctgatgaaactggattggaataattttcatgatctttgtatatttatatatatatatttttaaattttgcatttgacttaaagtgccatgagaaaatttgcatactgcaaggtggtcctagccacctccttgatttgggtactcttggatatgttcctgctgctttacttcagtgaatgcaacaaatgtgatgaaaaaaaggagagaggacttcctgctggagatgttctagagccagtacaaaagcctcatgaaggtcctggagaaatggggaaaccagtcgtcattcctaaagaggatcaagaaaagatgaaagagatgtttaaaatcaatcagttcaatttaatggcaagtgagatgattgcactcaacagatctttaccagatgttaggttagaagggtgtaaaacaaaggtgtatccagataatcttcctacaacaagtgtggtgattgttttccacaatgaggcttggagcacacttctgcgaactgtccatagtgtcattaatcgctcaccaagacacatgatagaagaaattgttctagtagatgatgccagtgaaagagactttttgaaaaggcctttagagagttatgtgaaaaaactaaaagtaccagttcatgtaattcgaatggaacaacgttctggattgatcagagctagattaaaaggagctgctgtgtctaaaggccaagtgatcaccttcctggatgcccattgtgagtgtacagtgggatggctggagcctctcttggccaggatcaaacatgacaggagaacagtggtgtgtcccatcatcgatgtgatcagtgatgatacttttgagtacatggcaggctctgatatgacctatggtgggttcaactggaagctcaattttcgctggtatcctgttccccaaagagaaatggacagaaggaaaggtgatcggactcttcctgtcaggacacctaccatggcaggaggccttttttcaatagacagagattactttcaggaaattggaacatatgatgctggaatggatatttggggaggagaaaacctagaaatttcctttaggatttggcagtgtggaggaactttggaaattgttacatgctcacatgttggacatgtgtttcggaaagctacaccttacacgtttccaggaggcacagggcagattatcaataaaaataacagacgacttgcagaagtgtggatggatgaattcaagaatttcttctatataatttctccaggtgttacaaaggtagattatggagatatatcgtcaagagttggtctaagacacaaactacaatgcaaacctttttcctggkacctagagaatatatatcctgattctcaaattccacgtcactatttctcattgggagagatacgaaatgtggaaacgaatcagtgtctagataacatggctagaaaagagaatgaaaaagttggaatttttaattgccatggtatggggggtaatcaggttttctcttatactgccaacaaagaaattagaacagatgacctttgcttggatgtttccaaacttaatggcccagttacaatgctcaaatgccaccacctaaaaggcaaccaactctgggagtatgacccagtgaaattaaccctgcagcatgtgaacagtaatcagtgcctggataaagccacagaagaggatagccaggtgcccagcattagagactgcaatggaagtcggtcccagcagtggcttcttcgaaacgtcaccctgccagaaatattctgagaccaaatttacaaaaaaacraaaaaaataaggattgactgggctacctcagcatacatttctgccacattcttaagtagcaaaaaaggaaaagtgctttcctcctctgcaggatgtaaggtttatcagccattaaaacttagacttctctagcttttcactagctgtgaaccagccttcctgtccatggacgtgaaactgcatagtaatgagactgtgcacactgatgtttacaagattgaaagagtctttctccgaaaatcatggtaaagaatactgagacaatgaaaaaaaatcaacaaaatatgctttctggagaactgtaccttttatggtttgcttgcacatcagtagtttctgctgaacgtgctgtcataatgaagagatttccaagattttttttcctgattagaactggtagccagtatattaaatattgatataaaaataaaagaactggaaccagattcagaatcatgaaaacaacatttttacaacaacaaaaaaactatattaaacagggtttaaaggaaattaaaacagaactatgagaagtacaatttgttatagtatagtatcaaatttctatatagattttatacctcagtggggaaaaataactgattccaatgacattcattttgttttcatctgtgatagtcatggatgcttttattttccttggggtgctgaaattgagctgaaaaaaaaaggctctttgaatatagttttaatttctctctacagttttttttgtttggtttgtgggctgttggaattgtaatttttaattgccttctaaaaaatggaaatttaacaatgtctgatctcagctgaacaaattagatgtttcagttgctcttgggtcaactggcttacagatttacatgtgcacacacacacaaatttcttatcacattttcgacttcttcacttgacctaactgattatgcgaaatacccaagattcatgctactgtaccacagatttgttttcacagcaataaatcttcagttctttgtttatgattccacttaacaaaaggcctgcagaagtgatttattatttgggtatttggagataatacatttgatggttttttggaaaacctttttcactccatactcagatatgcttcattgtcaaatgcatatttagattagattattgaattgtaatgtttatctgctgctttttttaaataaaatttgactgaaaatgtttaattggcattttttaatgacttagccaaagaagtgcagctattattccatattaataggcttgcatttcttttcctaaatcttatttaggctaaatcagttttatttttctctgattttttttaataccacagaatcacctgagtgtcaattgaaagttgtcaattaaaaggtaaccttttaatctcgtaggaggaatctcattaagacatttttcctgatatgtagagcagtctgttggcaaaaatgcatatattttctttcatatttgtaaaattatatttaatggaattcttttctttgattatcaaggactttcactgcaggcagtgctatttcttgtgcctaagaatgtttccaaaagtcgcatcgctaatgatatttgccaagttgagtgtacacaaagtttctcatatcctgttcaagttaatcaacrtcaagcacrtggggatgctttagggtgagtctatagtacaaaatgcataaaccatgtccccaggaaatttgaaaggaagcaggtgctgaatggaatttttttccttttccatgagctgtgttaattctatctccagtaggcctaatgcttgaataagcaagatgtctaatcaataaattattttcatgctcagaatttcaggtttttgtactccagcatagcttggtcttatttcttactgtatgaaagcttaacagcaatgtgatttaaggttttgttttaaatgggagatgtaagtgatttaattcatgggtacttttagaacmtgatagataatcccattgcctttatttttctaattaaagaattcctaaatactttgaaaatacaaaatattcctgaatagttgtgccttacattggttttatttgaagttagagtggatccctgtttatcataattacttrtaattaggcagatgcttatcactctattataactcaaattgggaagaaaagaatgaaaaagaaaacaatggctgggtactggctcatacctgtaattttagcattttgggaaggtgagacgataggaccacttgagggcaggagtttgaggttgcagtgagctatgatggtgccactgcactccagcctgggcaacagagaagaaaccatgtatcttaaaaaaaaagaaaaaatgaaggatgaaaaagtgggattattatttaaccagtgaagaattcataaatgtgacaattaaggataatttgaatctcacaaatctattcaccccaccccagtcaaggtctattttaatatatctatcttcattggcattcttgagaaatagtgctgccattgaacattgggaatattcatccattctgcagatggaggacatcgtgcaggccatgtcctcattgctcccattctacatttagctgagaaacagaggttcctcttygtaaggatttgatgctcttctcatcttccaagaagtataccaagagcaaatttaactctatagttacctgttcttcaaagaaaaaagaaacttaraaggtagtgtttctgaggtcataactgtgaggggttgtatacaaagaatgagtcactttttaagccatttggaaaattagatctgtttctaattagatgacattttctccattctctgatttcctgaagattgccaagcatttgcttgataatctaccaggactgataattttgcagaatatgaggcaaatatatgaaattcagttgtgtatctatatcctagcaacaaacacttgaaaatataacgttaaaatatgccatttgtaatagcatcaaataagtcaaacttctaagtaggaagaaagttaacaacaagacctctactctgaaaactacaaaacagtgctgggaagaattatagagcaccaaaataaatggctattctatgctcatggattgaaagactgcataatggtaagatgtcagttccccacaaattgttatctagattcaatgagatcaaaatcccacaaggccatcttgtagaaattggcaaatacatatatgaaaatgcaacagattctaagtagccaagataattttgaagaagaaaaataaaattggagcacttgtactacccaatgtcaagacttgctctaaagctacaacagttaagagagtatggtac

SEQ ID NO: 4983 - DNA, 2828 bp, Homo sapiens
gcccgcgctgcggcccgcgggaccgcgccgcgaccgcccgggccggcccggaggagcgcctgccgccgccgccgccgccgcgcgcctagcggtatgaaygtgatttctgatgaaactggattggaataattttcatgatctttgtatatttatatatatatatttttaaattttgcatttgacttaaagtgccatgagaaaatttgcatactgcaaggtggtcctagccacctccttgatttgggtactcttggatatgttcctgctgctttacttcagtgaatgcaacaaatgtgatgaaaaaaaggagagaggacttcctgctggagatgttctagagccagtacaaaagcctcatgaaggtcctggagaaatggggaaaccagtcgtcattcctaaagaggatcaagaaaagatgaaagagatgtttaaaatcaatcagttcaatttaatggcaagtgagatgattgcactcaacagatctttaccagatgttaggttagaagggtgtaaaacaaaggtgtatccagataatcttcctacaacaagtgtggtgattgttttccacaatgaggcttggagcacacttctgcgaactgtccatagtgtcattaatcgctcaccaagacacatgatagaagaaattgttctagtagatgatgccagtgaaagagactttttgaaaaggcctttagagagttatgtgaaaaaactaaaagtaccagttcatgtaattcgaatggaacaacgttctggattgatcagagctagattaaaaggagctgctgtgtctaaaggccaagtgatcaccttcctggatgcccattgtgagtgtacagtgggatggctggagcctctcttggccaggatcaaacatgacaggagaacagtggtgtgtcccatcatcgatgtgatcagtgatgatacttttgagtacatggcaggctctgatatgacctatggtgggttcaactggaagctcaattttcgctggtatcctgttccccaaagagaaatggacagaaggaaaggtgatcggactcttcctgtcaggacacctaccatggcaggaggccttttttcaatagacagagattactttcaggaaattggaacatatgatgctggaatggatatttggggaggagaaaacctagaaatttcctttaggatttggcagtgtggaggaactttggaaattgttacatgctcacatgttggacatgtgtttcggaaagctacaccttacacgtttccaggaggcacagggcagattatcaataaaaataacagacgacttgcagaagtgtggatggatgaattcaagaatttcttctatataatttctccaggtgttacaaaggtagattatggagatatatcgtcaagagttggtctaagacacaaactacaatgcaaacctttttcctggkacctagagaatatatatcctgattctcaaattccacgtcactatttctcattgggagagatacgaaatgtggaaacgaatcagtgtctagataacatggctagaaaagagaatgaaaaagttggaatttttaattgccatggtatggggggtaatcaggttttctcttatactgccaacaaagaaattagaacagatgacctttgcttggatgtttccaaacttaatggcccagttacaatgctcaaatgccaccacctaaaaggcaaccaactctgggagtatgacccagtgaaattaaccctgcagcatgtgaacagtaatcagtgcctggataaagccacagaagaggatagccaggtgcccagcattagagactgcaatggaagtcggtcccagcagtggcttcttcgaaacgtcaccctgccagaaatattctgagaccaaatttacaaaaaaacraaaaaaataaggattgactgggctacctcagcatacatttctgccacattcttaagtagcaaaaaaggaaaagtgctttcctcctctgcaggatgtaaggtttatcatccatggacgtgaaactgcatagtaatgagactgtgcacactgatgtttacaagattgaaagagtctttctccgaaaatcatggtaaagaatactgagacaatgaaaaaaaatcaacaaaatatgctttctggagaactgtaccttttatggtttgcttgcacatcagtagtttctgctgaacgtgctgtcataatgaagagatttccaagattttttttcctgattagaactggtagccagtatattaaatattgatataaaaataaaagaactggaaccagattcagaatcatgaaaacaacatttttacaacaacaaaaaaactatattaaacagggtttaaaggaaattaaaacagaactatgagaagtacaatttgttatagtatagtatcaaatttctatatagattttatacctcagtggggaaaaataactgattccaatgacattcattttgttttcatctgtgatagtcatggatgcttttattttccttggggtgctgaaattgagctgaaaaaaaaaggctctttgaatatagttttaatttctctctacagttttttttgtttggtttgtgggctgttggaattgtaatttttaattgccttctaaaaaatggaaatttaacaatgtctgatctcagctgaacaaattagatgtttcagttgctcttgggtcaactggcttacagatttacatgtgcacacacacacaaatttcttatcacattttcgacttcttcacttgacctaactgattatgcgaaatacccaagattcatgctactgtaccacagatttgttttcacagcaataaatct

SEQ ID NO: 4984 - DNA, 5221 bp, Homo sapiens
gcccgcgctgcggcccgcgggaccgcgccgcgaccgcccgggccggcccggaggagcgcctgccgccgccgccgccgccgcgcgcctagcggtatgaaygtgatttctgatgaaactggattggaataattttcatgatctttgtatatttatatatatatatttttaaattttgcatttgacttaaagtgccatgagaaaatttgcatactgcaaggtggtcctagccacctccttgatttgggtactcttggatatgttcctgctgctttacttcagtgaatgcaacaaatgtgatgaaaaaaaggagagaggacttcctgctggagatgttctagagccagtacaaaagcctcatgaaggtcctggagaaatggggaaaccagtcgtcattcctaaagaggatcaagaaaagatgaaagagatgtttaaaatcaatcagttcaatttaatggcaagtgagatgattgcactcaacagatctttaccagatgttaggttagaagggtgtaaaacaaaggtgtatccagataatcttcctacaacaagtgtggtgattgttttccacaatgaggcttggagcacacttctgcgaactgtccatagtgtcattaatcgctcaccaagacacatgatagaagaaattgttctagtagatgatgccagtgaaagagactttttgaaaaggcctttagagagttatgtgaaaaaactaaaagtaccagttcatgtaattcgaatggaacaacgttctggattgatcagagctagattaaaaggagctgctgtgtctaaaggccaagtgatcaccttcctggatgcccattgtgagtgtacagtgggatggctggagcctctcttggccaggatcaaacatgacaggagaacagtggtgtgtcccatcatcgatgtgatcagtgatgatacttttgagtacatggcaggctctgatatgacctatggtgggttcaactggaagctcaattttcgctggtatcctgttccccaaagagaaatggacagaaggaaaggtgatcggactcttcctgtcaggacacctaccatggcaggaggccttttttcaatagacagagattactttcaggaaattggaacatatgatgctggaatggatatttggggaggagaaaacctagaaatttcctttaggatttggcagtgtggaggaactttggaaattgttacatgctcacatgttggacatgtgtttcggaaagctacaccttacacgtttccaggaggcacagggcagattatcaataaaaataacagacgacttgcagaagtgtggatggatgaattcaagaatttcttctatataatttctccaggtgttacaaaggtagattatggagatatatcgtcaagagttggtctaagacacaaactacaatgcaaacctttttcctggkacctagagaatatatatcctgattctcaaattccacgtcactatttctcattgggagagatacgaaatgtggaaacgaatcagtgtctagataacatggctagaaaagagaatgaaaaagttggaatttttaattgccatggtatggggggtaatcaggttttctcttatactgccaacaaagaaattagaacagatgacctttgcttggatgtttccaaacttaatggcccagttacaatgctcaaatgccaccacctaaaaggcaaccaactctgggagtatgacccagtgaaattaaccctgcagcatgtgaacagtaatcagtgcctggataaagccacagaagaggatagccaggtgcccagcattagagactgcaatggaagtcggtcccagcagtggcttcttcgaaacgtcaccctgccagaaatattctgagaccaaatttacaaaaaaacraaaaaaataaggattgactgggctacctcagcatacatttctgccacattcttaagtagcaaaaaaggaaaagtgctttcctcctctgcaggatgtaaggtttatcagccattaaaacttagacttctctagcttttcactagctgtgaaccagccttcctgtccatggacgtgaaactgcatagtaatgagactgtgcacactgatgtttacaagattgaaagagtctttctccgaaaatcatggtaaagaatactgagacaatgaaaaaaaatcaacaaaatatgctttctggagaactgtaccttttatggtttgcttgcacatcagtagtttctgctgaacgtgctgtcataatgaagagatttccaagattttttttcctgattagaactggtagccagtatattaaatattgatataaaaataaaagaactggaaccagattcagaatcatgaaaacaacatttttacaacaacaaaaaaactatattaaacagggtttaaaggaaattaaaacagaactatgagaagtacaatttgttatagtatagtatcaaatttctatatagattttatacctcagtggggaaaaataactgattccaatgacattcattttgttttcatctgtgatagtcatggatgcttttattttccttggggtgctgaaattgagctgaaaaaaaaaggctctttgaatatagttttaatttctctctacagttttttttgtttggtttgtgggctgttggaattgtaatttttaattgccttctaaaaaatggaaatttaacaatgtctgatctcagctgaacaaattagatgtttcagttgctcttgggtcaactggcttacagatttacatgtgcacacacacacaaatttcttatcacattttcgacttcttcacttgacctaactgattatgcgaaatacccaagattcatgctactgtaccacagatttgttttcacagcaataaatcttcagttctttgtttatgattccacttaacaaaaggcctgcagaagtgatttattatttgggtatttggagataatacatttgatggttttttggaaaacctttttcactccatactcagatatgcttcattgtcaaatgcatatttagattagattattgaattgtaatgtttatctgctgctttttttaaataaaatttgactgaaaatgtttaattggcattttttaatgacttagccaaagaagtgcagctattattccatattaataggcttgcatttcttttcctaaatcttatttaggctaaatcagttttatttttctctgattttttttaataccacagaatcacctgagtgtcaattgaaagttgtcaattaaaaggtaaccttttaatctcgtaggaggaatctcattaagacatttttcctgatatgtagagcagtctgttggcaaaaatgcatatattttctttcatatttgtaaaattatatttaatggaattcttttctttgattatcaaggactttcactgcaggcagtgctatttcttgtgcctaagaatgtttccaaaagtcgcatcgctaatgatatttgccaagttgagtgtacacaaagtttctcatatcctgttcaagttaatcaacrtcaagcacrtggggatgctttagggtgagtctatagtacaaaatgcataaaccatgtccccaggaaatttgaaaggaagcaggtgctgaatggaatttttttccttttccatgagctgtgttaattctatctccagtaggcctaatgcttgaataagcaagatgtctaatcaataaattattttcatgctcagaatttcaggtttttgtactccagcatagcttggtcttatttcttactgtatgaaagcttaacagcaatgtgatttaaggttttgttttaaatgggagatgtaagtgatttaattcatgggtacttttagaacmtgatagataatcccattgcctttatttttctaattaaagaattcctaaatactttgaaaatacaaaatattcctgaatagttgtgccttacattggttttatttgaagttagagtggatccctgtttatcataattacttrtaattaggcagatgcttatcactctattataactcaaattgggaagaaaagaatgaaaaagaaaacaatggctgggtactggctcatacctgtaattttagcattttgggaaggtgagacgataggaccacttgagggcaggagtttgaggttgcagtgagctatgatggtgccactgcactccagcctgggcaacagagaagaaaccatgtatcttaaaaaaaaagaaaaaatgaaggatgaaaaagtgggattattatttaaccagtgaagaattcataaatgtgacaattaaggataatttgaatctcacaaatctattcaccccaccccagtcaaggtctattttaatatatctatcttcattggcattcttgagaaatagtgctgccattgaacattgggaatattcatccattctgcagatggaggacatcgtgcaggccatgtcctcattgctcccattctacatttagctgagaaacagaggttcctcttygtaaggatttgatgctcttctcatcttccaagaagtataccaagagcaaatttaactctatagttacctgttcttcaaagaaaaaagaaacttaraaggtagtgtttctgaggtcataactgtgaggggttgtatacaaagaatgagtcactttttaagccatttggaaaattagatctgtttctaattagatgacattttctccattctctgatttcctgaagattgccaagcatttgcttgataatctaccaggactgataattttgcagaatatgaggcaaatatatgaaattcagttgtgtatctatatcctagcaacaaacacttgaaaatataacgttaaaatatgccatttgtaatagcatcaaataagtcaaacttctaagtaggaagaaagttaacaacaagacctctactctgaaaactacaaaacagtgctgggaagaattatagagcaccaaaataaatggctattctatgctcatggattgaaagactgcataatggtaagatgtcagttccccacaaattgttatctagattcaatgagatcaaaatcccacaaggccatcttgtagaaattggcaaatacatatatgaaaatgcaacagattctaagtagccaagataattttgaagaagaaaaataaaattggagcacttgtactacccaatgtcaagacttgctctaaagctacaacagttaagagagtatggtac

SEQ ID NO: 4985 - DNA, 6279 bp, Homo sapiens
gcccgcgctgcggcccgcgggaccgcgccgcgaccgcccgggccggcccggaggagcgcctgccgccgccgccgccgccgcgcgcctagcggtatgaaygtgatttctgatgaaactggattggaataattttcatgatctttgtatatttatatatatatatttttaaattttgcatttgacttaaagtgccatgagaaaatttgcatactgcaaggtggtcctagccacctccttgatttgggtactcttggatatgttcctgctgctttacttcagtgaatgcaacaaatgtgatgaaaaaaaggagagaggacttcctgctggagatgttctagagccagtacaaaagcctcatgaaggtcctggagaaatggggaaaccagtcgtcattcctaaagaggatcaagaaaagatgaaagagatgtttaaaatcaatcagttcaatttaatggcaagtgagatgattgcactcaacagatctttaccagatgttaggttagaagggtgtaaaacaaaggtgtatccagataatcttcctacaacaagtgtggtgattgttttccacaatgaggcttggagcacacttctgcgaactgtccatagtgtcattaatcgctcaccaagacacatgatagaagaaattgttctagtagatgatgccagtgaaagagactttttgaaaaggcctttagagagttatgtgaaaaaactaaaagtaccagttcatgtaattcgaatggaacaacgttctggattgatcagagctagattaaaaggagctgctgtgtctaaaggccaagtgatcaccttcctggatgcccattgtgagtgtacagtgggatggctggagcctctcttggccaggatcaaacatgacaggagaacagtggtgtgtcccatcatcgatgtgatcagtgatgatacttttgagtacatggcaggctctgatatgacctatggtgggttcaactggaagctcaattttcgctggtatcctgttccccaaagagaaatggacagaaggaaaggtgatcggactcttcctgtcaggacacctaccatggcaggaggccttttttcaatagacagagattactttcaggaaattggaacatatgatgctggaatggatatttggggaggagaaaacctagaaatttcctttaggatttggcagtgtggaggaactttggaaattgttacatgctcacatgttggacatgtgtttcggaaagctacaccttacacgtttccaggaggcacagggcagattatcaataaaaataacagacgacttgcagaagtgtggatggatgaattcaagaatttcttctatataatttctccaggtgttacaaaggtagattatggagatatatcgtcaagagttggtctaagacacaaactacaatgcaaacctttttcctggkacctagagaatatatatcctgattctcaaattccacgtcactatttctcattgggagagatacgaaatgtggaaacgaatcagtgtctagataacatggctagaaaagagaatgaaaaagttggaatttttaattgccatggtatggggggtaatcaggttttctcttatactgccaacaaagaaattagaacagatgacctttgcttggatgtttccaaacttaatggcccagttacaatgctcaaatgccaccacctaaaaggcaaccaactctgggagtatgacccagtgaaattaaccctgcagcatgtgaacagtaatcagtgcctggataaagccacagaagaggatagccaggtgcccagcattagagactgcaatggaagtcggtcccagcagtggcttcttcgaaacgtcaccctgccagaaatattctgagaccaaatttacaaaaaaacraaaaaaataaggattgactgggctacctcagcatacatttctgccacattcttaagtagcaaaaaaggaaaagtgctttcctcctctgcaggatgtaaggtttatcagccattaaaacttagacttctctagcttttcactagctgtgaaccagccttcctgtccatggacgtgaaactgcatagtaatgagactgtgcacactgatgtttacaagattgaaagagtctttctccgaaaatcatggtaaagaatactgagacaatgaaaaaaaatcaacaaaatatgctttctggagaactgtaccttttatggtttgcttgcacatcagtagtttctgctgaacgtgctgtcataatgaagagatttccaagattttttttcctgattagaactggtagccagtatattaaatattgatataaaaataaaagaactggaaccagattcagaatcatgaaaacaacatttttacaacaacaaaaaaactatattaaacagggtttaaaggaaattaaaacagaactatgagaagtacaatttgttatagtatagtatcaaatttctatatagattttatacctcagtggggaaaaataactgattccaatgacattcattttgttttcatctgtgatagtcatggatgcttttattttccttggggtgctgaaattgagctgaaaaaaaaaggctctttgaatatagttttaatttctctctacagttttttttgtttggtttgtgggctgttggaattgtaatttttaattgccttctaaaaaatggaaatttaacaatgtctgatctcagctgaacaaattagatgtttcagttgctcttgggtcaactggcttacagatttacatgtgcacacacacacaaatttcttatcacattttcgacttcttcacttgacctaactgattatgcgaaatacccaagattcatgctactgtaccacagatttgttttcacagcaataaatcttcagttctttgtttatgattccacttaacaaaaggcctgcagaagtgatttattatttgggtatttggagataatacatttgatggttttttggaaaacctttttcactccatactcagatatgcttcattgtcaaatgcatatttagattagattattgaattgtaatgtttatctgctgctttttttaaataaaatttgactgaaaatgtttaattggcattttttaatgacttagccaaagaagtgcagctattattccatattaataggcttgcatttcttttcctaaatcttatttaggctaaatcagttttatttttctctgattttttttaataccacagaatcacctgagtgtcaattgaaagttgtcaattaaaaggtaaccttttaatctcgtaggaggaatctcattaagacatttttcctgatatgtagagcagtctgttggcaaaaatgcatatattttctttcatatttgtaaaattatatttaatggaattcttttctttgattatcaaggactttcactgcaggcagtgctatttcttgtgcctaagaatgtttccaaaagtcgcatcgctaatgatatttgccaagttgagtgtacacaaagtttctcatatcctgttcaagttaatcaacrtcaagcacrtggggatgctttagggtgagtctatagtacaaaatgcataaaccatgtccccaggaaatttgaaaggaagcaggtgctgaatggaatttttttccttttccatgagctgtgttaattctatctccagtaggcctaatgcttgaataagcaagatgtctaatcaataaattattttcatgctcagaatttcaggtttttgtactccagcatagcttggtcttatttcttactgtatgaaagcttaacagcaatgtgatttaaggttttgttttaaatgggagatgtaagtgatttaattcatgggtacttttagaacmtgatagataatcccattgcctttatttttctaattaaagaattcctaaatactttgaaaatacaaaatattcctgaatagttgtgccttacattggttttatttgaagttagagtggatccctgtttatcataattacttrtaattaggcagatgcttatcactctattataactcaaattgggaagaaaagaatgaaaaagaaaacaatggctgggtactggctcatacctgtaattttagcattttgggaaggtgagacgataggaccacttgagggcaggagtttgaggttgcagtgagctatgatggtgccactgcactccagcctgggcaacagagaagaaaccatgtatcttaaaaaaaaagaaaaaatgaaggatgaaaaagtgggattattatttaaccagtgaagaattcataaatgtgacaattaaggataatttgaatctcacaaatctattcaccccaccccagtcaaggtctattttaatatatctatcttcattggcattcttgagaaatagtgctgccattgaacattgggaatattcatccattctgcagatggaggacatcgtgcaggccatgtcctcattgctcccattctacatttagctgagaaacagaggttcctcttygtaaggatttgatgctcttctcatcttccaagaagtataccaagagcaaatttaactctatagttacctgttcttcaaagaaaaaagaaacttaraaggtagtgtttctgaggtcataactgtgaggggttgtatacaaagaatgagtcactttttaagccatttggaaaattagatctgtttctaattagatgacattttctccattctctgatttcctgaagattgccaagcatttgcttgataatctaccaggactgataattttgcagaatatgaggcaaatatatgaaattcagttgtgtatctatatcctagcaacaaacacttgaaaatataacgttaaaatatgccatttgtaatagcatcaaataagtcaaacttctaagtaggaagaaagttaacaacaagacctctactctgaaaactacaaaacagtgctgggaagaattatagagcaccaaaataaatggctattctatgctcatggattgaaagactgcataatggtaagatgtcagttccccacaaattgttatctagattcaatgagatcaaaatcccacaaggccatcttgtagaaattggcaaatacatatatgaaaatgcaacagattctaagtagccaagataattttgaagaagaaaaataaaattggagcacttgtactacccaatgtcaagacttgctctaaagctacaacagttaagagagtatggtactggtactggcataacaacagacacatagaacaatagaacataatagagaacccaaatataaatccacacatttataaccaactcatctttgacaaaagatcccagaatatgcaatagggaaaggacagtcttttcaataaatggtgctgagaaaactgaacaactaaatgcagaagaatgaaaccagatccctatctctcactatacacaaaaatcaaatcaaaaaggattaaagatttaaaaggactaaaacctgaaactatgaaactactagaagaaaacattgaggaaaagctccaggcaatcaaagcaaaaatagacaacggagattacatcaagttaaaaagcttctgcacagcaaatgaaacaaggtgaacaggcaacctacaaaatgggaaaaaaatatttgcaaactgtccctctgccaagagagtaataaccagaatatataaagagttcaaacaactcaatagcataaaacaaataatctgattttaaaatgggtatctgaactgacatttctcaaaagaagatatacaaatggccaacaagtatatgaaaaaatgttcaacatcactaattatcaggaaagtgcaaatcaaaaccacaacgaggtattatctcaccttgtttaaaatagcttgtaccaaaaaggcaggcaataacagatgttgacaaggatgtggagaaaggggaacccttgtacactgttggtgggaatgtaaattagcacagccactatggagatcagtatagagtttcctcaaaaaaccaaaaatagaactatcacatgattcagcaattccactatagggtatatatccaaaagaaaggaggtcaatgtatcaaagagatgtctgccttctaatgtttattgcagcactatttacaaaatccagaatacagaatcaacctaagtgcccactaatggatgaatggataaagaatatgtacctatacacaatggaatattattcatccataaaaagagtgaaatcttgccatttgcaacaacatggatggaactggaggccattatgttaagtgaaataagcaaa

SEQ ID NO: 4986 - DNA, 3390 bp, Homo sapiens
gtcccggatttaccagggccggtgggatcccctcgggctcccgccttagcatgctggccgggacatctggtgaacatggcctctgctactgcggcagcagcacgacggggcctcggccgggctctccctctcytctggcgtggctaccagaccgagcggggcgtttacggctaccggccgaggaagcccgagagccgcgagccccagggcgccctggagcgccccccagttgatcatggccttgccaggttggtgacagtatattgtgagcatggtcataaagstgccaaaatcaaccccctcttcaccggacaagccctgctggagaatgtgcctgaaatccaagccctggtgcagacactgcagggacccttccacacgkcaggattattgaacatggggaaggaagaggcctcacttgaggaagtgttagtctatctcaaycaaatctactgtgggcagatttctattgaaacctcccaacttcagagccaggatgagaaagactggtttgccaagcggtttgaggaactgcaaaaggagacgtttaccacagaagagcgaaaacatctgtcgaaactaatgctggaatctcaggagtttgaccactttctggccaccaagttctcgacagtgaagcgatatggaggcgaaggggctgaaagcatgatgggctttttccacgagctgctgaaaatgtcggcctacagcgggatcactgatgtcattattgggatgccccatagagggaggctgaatttattgacaggccttctgcagttccctccagagctgatgttccgtaaaatgcgaggcttaagtgaatttccagagaatttctcagccactggagacgtcctgtctcacctgacctcctctgtggacctgkactttggggcgcaccatcccctccatgtgacaatgttgcccaatccctcgcacctggaggccgtcaaccccgtggccgtgggcaaaactcgcggcaggcagcagtctcgccaagacggcgattactctccagacaaytcagcccagccgggggacagggtcatttgcttacaggtccatggtgatgcttctttctgtggtcaagggattgttcctgaaacattcacgctgtccratctcccacatttcagaattggtgggagtgtgcatttgattgttaataaccagctgggttacaccactccagctgaaagaggaaggtcttctttatactgcagtgatattgggaagcttgtgggctgtgccatcatccatgtcaatggagacagcccagaggaagtggtccgtgccacacgactggcttttgaataccaacgccagttccgcarggatgtgattattgatctgttgtgctacaggcagtggggccacaatgagctggatgagccattctacaccaaccccatcatgtacaaaatcatcagagctcgaaagagcattccagacacatatgcagagcacctcattgctggcrgactcatgacgcaggaggaggtgtctgaaataaaatcctcctactatgccaagttgaatgatcacttaaataacatggcccactacaggccccctgccctgaacctgcaggcccactggcagggcctggctcagccagaagcgcaaatcacyacctggagtacaggtgtgcccctcgacctcctgcggtttgttggcatgaagtctgtagaggtgccaagagagctgcagatgcacagtcacctgctgaagacacatgttcagtccagaatggagaagatgatggacggaatcaagctagactgggccaccgcggaagctcttgccttgggttctttacttgctcaaggttttaatgttcgtctaagtggccaagatgttggtcgtggaactttcagtcagaggcatgcaatsgtggtttgccaggagacggatgacacctacatccccctgaaccatatggacccaaatcagaaggggtttctagaggtcagcaacagcccmctgtcagaagaggccgtcctgggattygaatatgggatgagcattgagagcccaaagttactgcccctgtgggaggcacagtttggcgatttcttcaatggtgcccagatcatctttgacacattcatctctggaggagaggccaagtggctcctacaaagcggcatygtcatcctccttccacatggctacgatggggctgggccagamcactcatcctgtcgaatagagcgtttcctgcagatgtgtgacagtgcggaagagggggtggacggagacactgtgaacatgtttgtggttcacccaacaactcctgcacagtatttccacttgcttaggagacagatggtccggaacttcagaaaaccactcattgttgcttcccctaagatgttactcaggctcccggcagccgtgtcaactcttcaagaaatggcaccaggaacaacatttaacccggtcattggtgattcatctgtggatccaaaaaaggttaagaccctcgtgttctgctccggcaaacatttctactccctggtgaaacaaagagaatctctgggggccaagaagcatgactttgccatcatccgagtagaggaactctgccccttcccgttggattctttacagcaagagatgagcaaatacaaacatgttaaagatcatatttggagtcaggaggaacctcagaacatgggtccgtggtcgtttgtttctccaaggtttgaaaagcagctggcctgcaagctccgtctggtgggccggccccctttgccagtacccgctgtaggaattggcacagttcacttgcaccagcatgaagatatcctcgccaagaccttcgcttgatgatgacttttgaagaaacactatttctctttaagaaaatggccattaaggccgggtggggtggcacatgcctgtaatcccagcactttgggaggccaaggctggtggatcacctgaggtcaggagttcgagaccagcctggccaacacggtgaaaccccgcctctactaaaaatacaaaaaatagccgggtgtggtggtgggcacctgtgatcccagcttcctgggaggctgaggcaagagaatcgcttgaatctgggaggcggaggttgcagtgagccaggatcacaccattgctgtccagcctgggtgacagagcaagactgcgtttcaaaaaaaaaaaaaaaaaaaacccattaaaagaggcctccttcctccactctctcaacccctctgttgggtaacatgaaaagactgtattcctctaagatgttgggattgatatacgtgatttaatctgcaataggtggaataaccaggggaactggttatgaatatgtgaatgcaaccagcaaatttatccttgaaggtgtgatggtagaaataggaaaacaac

SEQ ID NO: 4987 - DNA, 2363 bp, Homo sapiens
agggcggagtctgcgcggggttgggcggagcctgcgcggggccggtaggatcgcgtcgggagccggtaccgaggcccgagccgcgggagtcgagcgaagrcagcgccgaggccgcggtttccccctgggcctccccagcagcagccatgggcatcaaatttttagaagttatcaaaccattctgtgcagttctaccagaaattcagaaaccggaaaggaaaatccagtttagagagaaggttctgtggactgctataacgctcttcattttcttagtgtgttgtcagattgagtaagcataatttttagtggccatgtaatattccattgtggatatcatcttcagtcttacattgagaagagtgaccttggctgtctttagtatatagagctttgcaaaatcattctacgaccaggcagatcccactgtttggaatcatgtcatcagattctgcagatcctttctactggatgagagttattctggcttccaatagaggaactttaatggaattgggtatctccccaattgtaacatctggtttgattatgcagttgttagctggagccaaaatcattgaagttggagatacaccgaaagatagagctttattcaatggagcccagaaactgtttggtatgatcattaccattgggcaagccattgtgtatgtcatgacggggatgtatggggaccctgcagaaatgggtgcyggaatctgtctcctgatcatcattcagttgtttgttgctggtttgattgtgctgctgttagatgagctgctacagaagggttacggcttggggtctgggatttccctctttattgccaccaacatctgtgagaccattgtctggaaggcctttagtcccactaccattaacactggcagaggtactgagtttgagggtgcagtcatagctctgttccatttgttggccaccaggacggacaaagtccgagctttacgggaggctttttatcggcagaacttacccaatctcatgaacctcattgctacagtttttgtgtttgctgttgttatatatttccaaggatttcgcgttgatctgcccattaagtcggcccgttaccgaggacagtacagcagctaccccatcaaactcttctacacctccaacatccccatcatcctccagtcggccctggtgtccaacctgtatgttatttcccagatgctgtctgttcgatttagtggcaactttttagtaaatttactrggacagtgggccgatgtcagtgggggaggacccgcacgttcttacccagttggaggcctttgttactatctttctcctcctgagtccatgggcgccatctttgaggatcctgtccatgtcgttgtttatatcatcttcatgttggggtcatgtgcattcttctctaagacatggattgaagtgtctggttcctcagccaaagatgtagctaaacagctgaaagaacagcagatggtaatgaggggccaccgagatacctctatggttcatgagcttaatagygctagagcgtaggaatagaccctggcgtccactgtgagatgttcttcagctaccagagctgtggaaagcaaagaaaacaacttagatcatgccgttaaggaaggacaaaacatcttattcaatcagtgtttgcgcagcagaccaaaagtgaagttaagaaggtggaagggagaaggaagacattttacaaaaaggatactcttctactaaaagataaccccgcacggcatttcacacttgcctacgtcaccctgctttccacgcacctcctcagagggaggggctgttattgttcctgttttatgaaaaaagccgagagaggctacagaacctgtttgatgtgatagctaattatggtccgcggagcctcaaaccgagtcgggcctgtgactccgagctgcgctgcctcgtattgattgtcatgcctttctccaaatacgcaccagataaactattgtatctattcagtatgaytgttctaactctggctttgagctgtcgaggtggcttctaccttaggtctagtttttggaaaggtgaagcaggagtggaagctctctaagggatacgaaatctgattttatccaaagaaatcacagcagcctttgaaagacacattcagattttcaaacaaacaacagacawttcaaaaccaggcgctctgcttattcactgaaaccgtaagctgctgaaactcagggaaaagcttaagaaactggtcttaaagcttcaggccaaacaatgcttcaaatcacatttgaagtaatcacttaaaaacagtagaaaaatcagttatcaattacctaaaacacttatacccaataaaatattcccatgat

SEQ ID NO: 4988 - DNA, 2230 bp, Homo sapiens
agggcggagtctgcgcggggttgggcggagcctgcgcggggccggtaggatcgcgtcgggagccggtaccgaggcccgagccgcgggagtcgagcgaagrcagcgccgaggccgcggtttccccctgggcctccccagcagcagccatgggcatcaaatttttagaagttatcaaaccattctgtgcagttctaccagaaattcagaaaccggaaaggaaaatccagtttagagagaaggttctgtggactgctataacgctcttcattttcttagtgtgttgtcagatcccactgtttggaatcatgtcatcagattctgcagatcctttctactggatgagagttattctggcttccaatagaggaactttaatggaattgggtatctccccaattgtaacatctggtttgattatgcagttgttagctggagccaaaatcattgaagttggagatacaccgaaagatagagctttattcaatggagcccagaaactgtttggtatgatcattaccattgggcaagccattgtgtatgtcatgacggggatgtatggggaccctgcagaaatgggtgcyggaatctgtctcctgatcatcattcagttgtttgttgctggtttgattgtgctgctgttagatgagctgctacagaagggttacggcttggggtctgggatttccctctttattgccaccaacatctgtgagaccattgtctggaaggcctttagtcccactaccattaacactggcagaggtactgagtttgagggtgcagtcatagctctgttccatttgttggccaccaggacggacaaagtccgagctttacgggaggctttttatcggcagaacttacccaatctcatgaacctcattgctacagtttttgtgtttgctgttgttatatatttccaaggatttcgcgttgatctgcccattaagtcggcccgttaccgaggacagtacagcagctaccccatcaaactcttctacacctccaacatccccatcatcctccagtcggccctggtgtccaacctgtatgttatttcccagatgctgtctgttcgatttagtggcaactttttagtaaatttactrggacagtgggccgatgtcagtgggggaggacccgcacgttcttacccagttggaggcctttgttactatctttctcctcctgagtccatgggcgccatctttgaggatcctgtccatgtcgttgtttatatcatcttcatgttggggtcatgtgcattcttctctaagacatggattgaagtgtctggttcctcagccaaagatgtagctaaacagctgaaagaacagcagatggtaatgaggggccaccgagatacctctatggttcatgagcttaatagygctagagcgtaggaatagaccctggcgtccactgtgagatgttcttcagctaccagagctgtggaaagcaaagaaaacaacttagatcatgccgttaaggaaggacaaaacatcttattcaatcagtgtttgcgcagcagaccaaaagtgaagttaagaaggtggaagggagaaggaagacattttacaaaaaggatactcttctactaaaagataaccccgcacggcatttcacacttgcctacgtcaccctgctttccacgcacctcctcagagggaggggctgttattgttcctgttttatgaaaaaagccgagagaggctacagaacctgtttgatgtgatagctaattatggtccgcggagcctcaaaccgagtcgggcctgtgactccgagctgcgctgcctcgtattgattgtcatgcctttctccaaatacgcaccagataaactattgtatctattcagtatgaytgttctaactctggctttgagctgtcgaggtggcttctaccttaggtctagtttttggaaaggtgaagcaggagtggaagctctctaagggatacgaaatctgattttatccaaagaaatcacagcagcctttgaaagacacattcagattttcaaacaaacaacagacawttcaaaaccaggcgctctgcttattcactgaaaccgtaagctgctgaaactcagggaaaagcttaagaaactggtcttaaagcttcaggccaaacaatgcttcaaatcacatttgaagtaatcacttaaaaacagtagaaaaatcagttatcaattacctaaaacacttatacccaataaaatattcccatgat

SEQ ID NO: 4989 - DNA, 1641 bp, Homo sapiens
ggggcggggcgtagtacggactgggcctggcctggggcgtccccgcgaagcctgggcctgtcaggcggttccgtccgggtctcggccaccgtcgagttccgtcgagttccgtcccggccctgctcacagcagcgccctcggagcgcccagcacctgcggccggccaggcagcgcgatcctgcggcgtctggccatcccgaatgctatggccgccgtcgccgtcttgcgggccttcggggcaagtgggcccatgtgtctccggcgcggcccctgggcccagctccccgcccgcttctgcagccgggacccggccggggcggggcggcgggagtcggagccgcggcccaccagcgcgcggcagctggacggcataaggaacatcgtcttgagcartcccaagaagaggaacrcgttgtcacttgcaatgctgaartctctccaaagtgacattcttcatgacgctgacagcaacgatctgaaagtcattatcatctcggctgaggggcctgtgttttcttctgggcatgacttaaaggagctgacagaggagcaaggccgtgattaccatgccgaagtatttcagacctgttccaaggtcatgatgcacatccggaaccaccccgtycccgtcattgccatggtcaatggcctggccrcggctgccggctgtcarctggttgccagctgcracattgccgtggcgagcgacaagtcctcttttgccactcctggggtgaacgtcgggctcttctgttctacccctggggttgccttggcaagagcagtgcctagaaaggtggccttggagatgctctttactggygagcccatttctgcccaggaggccctgctccacgggctgcttagcaaggtggtgccagaggcggagctgcaggaggagaccatgcggatygctaggaagatcgcrtcrctgagccgtccggtggtgtccctgggcaaagccaccttctacaagcagctgccccaggacctggggacggcttactacctcacctcccaggccatggtggacaacctggccctgcgggaygggcaggagggcatcacggccttcctccagaagagaaaacctgtctggtcacacgagccagtgtgagtggaggcagwggagtgaggcccacgggcagcgcccaggagcccaccttcccctctggcccagccaccactgcctctcagcttcaacaggtgacaggctgctttcgtgacttgatattggtgtcatagcatttggcctacattaaaagccacaatttcatggggaaaggacaaaatggagagtgactgaggtgctgacctcagtgcaaggctggtgaaccctgcagcgggccagctatggtgggaagcctggcatttggggtgctccttgcaacgtcttaagcaagcgaccccccgacatagcaaaaggtggcaacccatggaggcagaaagaaggacgccagcctgacccttatctgaaacgtcctaagcagagttaatcctggctgctcaggagaggcgacacatttcaaatctccacgagatattctccacacagaaaatcttcttgattctatagagacttaatcatgcctatggctttgaataatcttatgtgatttaaataaattaaatctttataga

SEQ ID NO: 4990 - DNA, 1795 bp, Homo sapiens
ggggcgtagtacggactgggcctggcctggggcgtccccgcgaagcctgggcctgtcaggcggttccgtccgggtctcggccaccgtcgagttccgtcgagttccgtcccggccctgctcacagcagcgccctcggagcgcccagcacctgcggccggccaggcagcgcgatcctgcggcgtctggccatcccgaatgctatggccgccgtcgccgtcttgcgggccttcggggcaagtgggcccatgtgtctccggcgcggcccctgggcccagctccccgcccgcttctgcagccgggacccggccggggcggggcggcgggagtcggagccgcggcccaccagcgcgcggcagctggacggcataaggtcagccccgggccgcgcgggctcctcgcgttggtgccgagtcggggtcagggcgccgccattgacccggggaggacccggggaaccggagccccgtttacgcccctggggagggaactccccgtgtcccggacccgggcctggcagcgagacgcgcaggaacatcgtcttgagcartcccaagaagaggaacrcgttgtcacttgcaatgctgaartctctccaaagtgacattcttcatgacgctgacagcaacgatctgaaagtcattatcatctcggctgaggggcctgtgttttcttctgggcatgacttaaaggagctgacagaggagcaaggccgtgattaccatgccgaagtatttcagacctgttccaaggtcatgatgcacatccggaaccaccccgtycccgtcattgccatggtcaatggcctggccrcggctgccggctgtcarctggttgccagctgcracattgccgtggcgagcgacaagtcctcttttgccactcctggggtgaacgtcgggctcttctgttctacccctggggttgccttggcaagagcagtgcctagaaaggtggccttggagatgctctttactggygagcccatttctgcccaggaggccctgctccacgggctgcttagcaaggtggtgccagaggcggagctgcaggaggagaccatgcggatygctaggaagatcgcrtcrctgagccgtccggtggtgtccctgggcaaagccaccttctacaagcagctgccccaggacctggggacggcttactacctcacctcccaggccatggtggacaacctggccctgcgggaygggcaggagggcatcacggccttcctccagaagagaaaacctgtctggtcacacgagccagtgtgagtggaggcagwggagtgaggcccacgggcagcgcccaggagcccaccttcccctctggcccagccaccactgcctctcagcttcaacaggtgacaggctgctttcgtgacttgatattggtgtcatagcatttggcctacattaaaagccacaatttcatggggaaaggacaaaatggagagtgactgaggtgctgacctcagtgcaaggctggtgaaccctgcagcgggccagctatggtgggaagcctggcatttggggtgctccttgcaacgtcttaagcaagcgaccccccgacatagcaaaaggtggcaacccatggaggcagaaagaaggacgccagcctgacccttatctgaaacgtcctaagcagagttaatcctggctgctcaggagaggcgacacatttcaaatctccacgagatattctccacacagaaaatcttcttgattctatagagacttaatcatgcctatggctttgaataatcttatgtgatttaaataaattaaatctttataga

SEQ ID NO: 4991 - DNA, 4057 bp, Homo sapiens
cgcgctccctgcggggcgggcggcaacctccatgcggcctcgtccacgctcagcaccggggaagccgaggcggagaagccgcgcgcgcctcagaagctcccggacgcccagtctgcatgaagaaatcagtgatttttatgaatacatgtctccaagacctgaggaggagaagatgcggatggaggtggtgaacaggatcgagagtgtaattaaggagctctggcccagcgctgacgtccagatatttggaagttttaaaactggactttatttacctactagtgacatcgacctagtggtgtttgggaagtgggagaacctacccctctggactctggaagaagctcttcggaaacacaaagtcgcagatgaggattcggtgaaagttttagacaaagcaactgtacctattattaaattaacagattcttttactgaagtgaaagttgatatcagctttaatgtacagaatggcgtgagagcagctgacctcatcaaagattttaccaagaaatatcctgtattgccatacttggttttagtattgaaacaattcctattgcagagggaccttaatgaagtatttacaggtggaattggttcttatagtctctttttaatggcagtcagtttccttcagttacatcccagggaagatgcttgcatccccaatacaaactatggtgttctcttaatagaattttttgaattatatggacgacacttcaattatttaaagactggcatccggataaaggatggtggttcatatgtggccaaagatgaagtacagaaaaatatgctagatggctacaggccatcaatgctttatatcgaagatcctttacaaccaggtaacgatgttggaaggagttcatatggggccatgcaagtgaagcaggcctttgattatgcctacgttgttttgagtcatgctgtatcaccaatagcaaagtactatcccaacaatgaaacagaaagcatactaggtagaataattagagtaacagatgaagttgccacatatagagattggatatcaaagcagtggggcttgaagaatagacctgagccttcatgcaatggaaatggtgttaccttgatagtagatactcagcagttagataaatgtaataataatctatctgaagaaaatgaagcccttggaaaatgtagaagtaaaacctcggaatctcttagtaaacactcttcaaactcttcatcaggtccagtgtcgtcctcttctgccacacagtccagctctagtgatgtagattccgatgcaacaccatgcaaaaccccgaaacagctgctttgccgtccgtccactgggaaccgagtagggtcgcaagatgtatccttggagtcctctcaggcagttgggaaaatgcaaagcacccaaaccactaacacatccaacagcaccaacaaatctcagcatggatcagcaaggctctttcgttcttccagcaaakgcttccaaggtacaactcaaacaagccatggttccttgatgacaaacaaacaacatcaaggcaaatccaataatcagtattaccatggcaaaaagaggaaacacaagagggacgcgcccctctcagacctctgtagatagtcagcgctgcgcggtggactgtcttctctgtgcaatgatctcatgctcaggacagttgcgcagggactcctgggagatattcaggagcctcacactgttcagacgttgacttagcaactgcgttttttcccagctcgccacagaatggatcatgaagactgacaactgcaaaaaaaacaaaacaaaacaaaaaaaaaagcaagcaaaaaagagggaaaaaaaaggctgcttatttgataagtcatatgctacaacagggtcattttaagatttaaagcttgaatgtaaaataaatatatttctcattggctttatgcagagttatagggaatagtattcagtgttggtagggtgatagaaacaaaaaacagtatcagaggatgaggtggggaaggaaaacaaaggtatctgataggaagtccagattccaaaggggaaagtgatctgtgcatgttttttttttaaatatttttgcatatatttaccattttattgtgtgtatatatagaagaccatataggaaattgatatttgtaatagtggatttgttaataatactttttacataacattactgtttaaattgtaaacagattttttctcaggattagtttgaaaaataatctaaattgtcatcttaacatccatatatagggaagtgattagttctattactcaatttgtttttctcagcattgaaatgacttaatagaacccttgtgtcctgctgcaaaaatttttcctctctaaagaaaaggtttatggtggcaaatgatgtttattttattttgtaaaaaaaaaaaaatgtactatgtacttttgtgtaaacactgaaaaatctctggtcatctccgagaattaacttgcaactgttttctatagtgctgtcgtcttgggcaatgggcaattacatgactttgtgtttgcttcctttgcagtcttttttttttccccccatttcttcctaataggaaaaaaaaaaaaaaaaaaggtcacccatgtctggtctcattcctgttgcagtgaaacttcgagttccacagactttgcatgctggcttctctaaccctgtgtgctgcgtgtgcctgtttctcatctcttattctttttaaaattcatgcttaactactgtgggagaataactgtaaacagctttaattaaatcatacttataaaaaactattttcttatattccactctatgcttttggtattgttgatctttacaaattaaatggtctttgataatggatctattttgtattgccttattaagaccaaatacttcttgtcatcccattctttatcctcttctttcatggaattgttatcgttaatcagctttgagtgcaatgagatgtataattctgttatcattacctgttgagtttgaaactcagttgggaatatttaatataatagaatgtaagtgacatttctgaaaatgctttctttcagggtgaaagctcttatgtttagcatcaatgtgtatggctctgttaaatgcagccatttctgagacgagattcttttatatatatatacatataaagtactattggcttttaggagtttcttttatatacatttatgaaatactgaagaccaatcagaccattaatggacacttagtgtaactttttataaagaaaataatgctaaagtaagaccaaaactgatgtcatcactgaaattaacaattttcaatatgttcatattttaattcacaatggaaaaatgtgttccaaaactggaaactcatagtactcgtgtaaactgtggaagatttcaaatgtgatgttattttgacaatgttttaaattttagagtcacattttattctgatcagaatttttattgagatgttgagcttttgtttttgaaactagtttgtcataacattgtgcataatcacagtatttattttctaggacaattgtgaatgtgtagacttatgtttactgctaagggaacaattatttataaaataatattaaatccagtattagctgcctatttcagacacttaatacttgcagagatctatgttacatttaccacactgaagttttttttgttgttttttgtttgtttttaaagaatcaccctcattgttgaaagtaaatgtactcttagggtgcgaatattagtgttccaataagcatgtgattatattaaggtggtggtagcgggaagataattctgattccattgggaatcttaggttttcgtaaatttattgggaaaatagtttttcctgtactgctgaagtttctttttggtaaacagtatctttctaaaagaaaaaagcatgaaggagaaattgaggtgtgtatacatttcctcaaatgaccagcattgtattcgtgaatactgtgtatcttgcagtgaacagtgtggaagctgttcatttttcaatctgaagtaaaatactttcaagaa

SEQ ID NO: 4992 - DNA, 4113 bp, Homo sapiens
cgcgctccctgcggggcgggcggcaacctccatgcggcctcgtccacgctcagcaccggggaagccgaggcggagaagccgcgcgcgcctcagaagctcccggacgcccagtctgcatgaagaaatcagtgatttttatgaatacatgtctccaagacctgaggaggagaagatgcggatggaggtggtgaacaggatcgagagtgtaattaaggagctctggcccagcgctgacgtccagatatttggaagttttaaaactggactttatttacctactagtgacatcgacctagtggtgtttgggaagtgggagaacctacccctctggactctggaagaagctcttcggaaacacaaagtcgcagatgaggattcggtgaaagttttagacaaagcaactgtacctattattaaattaacagattcttttactgaagtgaaagttgatatcagctttaatgtacagaatggcgtgagagcagctgacctcatcaaagattttaccaagaaatatcctgtattgccatacttggttttagtattgaaacaattcctattgcagagggaccttaatgaagtatttacaggtggaattggttcttatagtctctttttaatggcagtcagtttccttcagttacatcccagggaagatgcttgcatccccaatacaaactatggtgttctcttaatagaattttttgaattatatggacgacacttcaattatttaaagactggcatccggataaaggatggtggttcatatgtggccaaagatgaagtacagaaaaatatgctagatggctacaggccatcaatgctttatatcgaagatcctttacaaccaggtaacgatgttggaaggagttcatatggggccatgcaagtgaagcaggcctttgattatgcctacgttgttttgagtcatgctgtatcaccaatagcaaagtactatcccaacaatgaaacagaaagcatactaggtagaataattagagtaacagatgaagttgccacatatagagattggatatcaaagcagtggggcttgaagaatagacctgagccttcatgcaatggaaatggtgttaccttgatagtagatactcagcagttagataaatgtaataataatctatctgaagaaaatgaagcccttggaaaatgtagaagtaaaacctcggaatctcttagtaaacactcttcaaactcttcatcaggtccagtgtcgtcctcttctgccacacagtccagctctagtgatgtagattccgatgcaacaccatgcaaaaccccgaaacagctgctttgccgtccgtccactgggaaccgagtagggtcgcaagatgtatccttggagtcctctcaggcagttgggaaaatgcaaagcacccaaaccactaacacatccaacagcaccaacaaatctcagcatggatcagcaaggctctttcgttcttccagcaaakgcttccaaggtacaactcaaacaagccatggttccttgatgacaaacaaacaacatcaaggcaaatccaataatcagtattaccatggcaaaaagaggaaacacaagagggacgcgcccctctcagacctctgtagatagtcagcgctgcgcggtggactgtcttctctgtgcaatgatctcatgctcaggacagttgcgcagggactcctgggagatattcaggagcctcacactgttcagacgttgacttagcaactgcgttttttcccagctcgccacagaatggatcatgaagactgacaactgcaaaaaaaacaaaacaaaacaaaaaaaaaagcaagcaaaaaagagggaaaaaaaaggctgcttatttgataagtcatatgctacaacagggtcattttaagatttaaagcttgaatgtaaaataaatatatttctcattggctttatgcagagttatagggaatagtattcagtgttggtagggtgatagaaacaaaaaacagtatcagaggatgaggtggggaaggaaaacaaaggtatctgataggaagtccagattccaaaggggaaagtgatctgtgcatgttttttttttaaatatttttgcatatatttaccattttattgtgtgtatatatagaagaccatataggaaattgatatttgtaatagtggatttgttaataatactttttacataacattactgtttaaattgtaaacagattttttctcaggattagtttgaaaaataatctaaattgtcatcttaacatccatatatagggaagtgattagttctattactcaatttgtttttctcagcattgaaatgacttaatagaacccttgtgtcctgctgcaaaaatttttcctctctaaagaaaaggtttatggtggcaaatgatgtttattttattttgtaaaaaaaaaaaaatgtactatgtacttttgtgtaaacactgaaaaatctctggtcatctccgagaattaacttgcaactgttttctatagtgctgtcgtcttgggcaatgggcaattacatgactttgtgtttgcttcctttgcagtcttttttttttccccccatttcttcctaataggaaaaaaaaaaaaaaaaaaggtcacccatgtctggtctcattcctgttgcagtgaaacttcgagttccacagactttgcatgctggcttctctaaccctgtgtgctgcgtgtgcctgtttctcatctcttattctttttaaaattcatgcttaactactgtgggagaataactgtaaacagctttaattaaatcatacttataaaaaactattttcttatattccactctatgcttttggtattgttgatctttacaaattaaatggtctttgataatggatctattttgtattgccttattaagaccaaatacttcttgtcatcccattctttatcctcttctttcatggaattgttatcgttaattaaaacttttttaaacattggcttgtttcaatcatactgtaaattttggttgtagtcagctttgagtgcaatgagatgtataattctgttatcattacctgttgagtttgaaactcagttgggaatatttaatataatagaatgtaagtgacatttctgaaaatgctttctttcagggtgaaagctcttatgtttagcatcaatgtgtatggctctgttaaatgcagccatttctgagacgagattcttttatatatatatacatataaagtactattggcttttaggagtttcttttatatacatttatgaaatactgaagaccaatcagaccattaatggacacttagtgtaactttttataaagaaaataatgctaaagtaagaccaaaactgatgtcatcactgaaattaacaattttcaatatgttcatattttaattcacaatggaaaaatgtgttccaaaactggaaactcatagtactcgtgtaaactgtggaagatttcaaatgtgatgttattttgacaatgttttaaattttagagtcacattttattctgatcagaatttttattgagatgttgagcttttgtttttgaaactagtttgtcataacattgtgcataatcacagtatttattttctaggacaattgtgaatgtgtagacttatgtttactgctaagggaacaattatttataaaataatattaaatccagtattagctgcctatttcagacacttaatacttgcagagatctatgttacatttaccacactgaagttttttttgttgttttttgtttgtttttaaagaatcaccctcattgttgaaagtaaatgtactcttagggtgcgaatattagtgttccaataagcatgtgattatattaaggtggtggtagcgggaagataattctgattccattgggaatcttaggttttcgtaaatttattgggaaaatagtttttcctgtactgctgaagtttctttttggtaaacagtatctttctaaaagaaaaaagcatgaaggagaaattgaggtgtgtatacatttcctcaaatgaccagcattgtattcgtgaatactgtgtatcttgcagtgaacagtgtggaagctgttcatttttcaatctgaagtaaaatactttcaagaa

SEQ ID NO: 4993 - DNA, 3712 bp, Homo sapiens
tgacatcgacctagtggtgtttgggaagtgggagaacctacccctctggactctggaagaagctcttcggaaacacaaagtcgcagatgaggattcggtgaaagttttagacaaagcaactgtacctattattaaattaacagattcttttactgaagtgaaagttgatatcagctttaatgtacagaatggcgtgagagcagctgacctcatcaaagattttaccaagaaatatcctgtattgccatacttggttttagtattgaaacaattcctattgcagagggaccttaatgaagtatttacaggtggaattggttcttatagtctctttttaatggcagtcagtttccttcagttacatcccagggaagatgcttgcatccccaatacaaactatggtgttctcttaatagaattttttgaattatatggacgacacttcaattatttaaagactggcatccggataaaggatggtggttcatatgtggccaaagatgaagtacagaaaaatatgctagatggctacaggccatcaatgctttatatcgaagatcctttacaaccaggtaacgatgttggaaggagttcatatggggccatgcaagtgaagcaggcctttgattatgcctacgttgttttgagtcatgctgtatcaccaatagcaaagtactatcccaacaatgaaacagaaagcatactaggtagaataattagagtaacagatgaagttgccacatatagagattggatatcaaagcagtggggcttgaagaatagacctgagccttcatgcaatgcactcttcaaactcttcatcaggtccagtgtcgtcctcttctgccacacagtccagctctagtgatgtagattccgatgcaacaccatgcaaaaccccgaaacagctgctttgccgtccgtccactgggaaccgagtagggtcgcaagatgtatccttggagtcctctcaggcagttgggaaaatgcaaagcacccaaaccactaacacatccaacagcaccaacaaatctcagcatggatcagcaaggctctttcgttcttccagcaaakgcttccaaggtacaactcaaacaagccatggttccttgatgacaaacaaacaacatcaaggcaaatccaataatcagtattaccatggcaaaaagaggaaacacaagagggacgcgcccctctcagacctctgtagatagtcagcgctgcgcggtggactgtcttctctgtgcaatgatctcatgctcaggacagttgcgcagggactcctgggagatattcaggagcctcacactgttcagacgttgacttagcaactgcgttttttcccagctcgccacagaatggatcatgaagactgacaactgcaaaaaaaacaaaacaaaacaaaaaaaaaagcaagcaaaaaagagggaaaaaaaaggctgcttatttgataagtcatatgctacaacagggtcattttaagatttaaagcttgaatgtaaaataaatatatttctcattggctttatgcagagttatagggaatagtattcagtgttggtagggtgatagaaacaaaaaacagtatcagaggatgaggtggggaaggaaaacaaaggtatctgataggaagtccagattccaaaggggaaagtgatctgtgcatgttttttttttaaatatttttgcatatatttaccattttattgtgtgtatatatagaagaccatataggaaattgatatttgtaatagtggatttgttaataatactttttacataacattactgtttaaattgtaaacagattttttctcaggattagtttgaaaaataatctaaattgtcatcttaacatccatatatagggaagtgattagttctattactcaatttgtttttctcagcattgaaatgacttaatagaacccttgtgtcctgctgcaaaaatttttcctctctaaagaaaaggtttatggtggcaaatgatgtttattttattttgtaaaaaaaaaaaaatgtactatgtacttttgtgtaaacactgaaaaatctctggtcatctccgagaattaacttgcaactgttttctatagtgctgtcgtcttgggcaatgggcaattacatgactttgtgtttgcttcctttgcagtcttttttttttccccccatttcttcctaataggaaaaaaaaaaaaaaaaaaggtcacccatgtctggtctcattcctgttgcagtgaaacttcgagttccacagactttgcatgctggcttctctaaccctgtgtgctgcgtgtgcctgtttctcatctcttattctttttaaaattcatgcttaactactgtgggagaataactgtaaacagctttaattaaatcatacttataaaaaactattttcttatattccactctatgcttttggtattgttgatctttacaaattaaatggtctttgataatggatctattttgtattgccttattaagaccaaatacttcttgtcatcccattctttatcctcttctttcatggaattgttatcgttaattaaaacttttttaaacattggcttgtttcaatcatactgtaaattttggttgtagtcagctttgagtgcaatgagatgtataattctgttatcattacctgttgagtttgaaactcagttgggaatatttaatataatagaatgtaagtgacatttctgaaaatgctttctttcagggtgaaagctcttatgtttagcatcaatgtgtatggctctgttaaatgcagccatttctgagacgagattcttttatatatatatacatataaagtactattggcttttaggagtttcttttatatacatttatgaaatactgaagaccaatcagaccattaatggacacttagtgtaactttttataaagaaaataatgctaaagtaagaccaaaactgatgtcatcactgaaattaacaattttcaatatgttcatattttaattcacaatggaaaaatgtgttccaaaactggaaactcatagtactcgtgtaaactgtggaagatttcaaatgtgatgttattttgacaatgttttaaattttagagtcacattttattctgatcagaatttttattgagatgttgagcttttgtttttgaaactagtttgtcataacattgtgcataatcacagtatttattttctaggacaattgtgaatgtgtagacttatgtttactgctaagggaacaattatttataaaataatattaaatccagtattagctgcctatttcagacacttaatacttgcagagatctatgttacatttaccacactgaagttttttttgttgttttttgtttgtttttaaagaatcaccctcattgttgaaagtaaatgtactcttagggtgcgaatattagtgttccaataagcatgtgattatattaaggtggtggtagcgggaagataattctgattccattgggaatcttaggttttcgtaaatttattgggaaaatagtttttcctgtactgctgaagtttctttttggtaaacagtatctttctaaaagaaaaaagcatgaaggagaaattgaggtgtgtatacatttcctcaaatgaccagcattgtattcgtgaatactgtgtatcttgcagtgaacagtgtggaagctgttcatttttcaatctgaagtaaaatactttcaagaa

SEQ ID NO: 4994 - DNA, 3994 bp, Homo sapiens
cgcgctccctgcggggcgggcggcaacctccatgcggcctcgtccacgctcagcaccggggaagccgaggcggagaagccgcgcgcgcctcagaagctcccggacgcccagtctgcatgaagaaatcagtgatttttatgaatacatgtctccaagacctgaggaggagaagatgcggatggaggtggtgaacaggatcgagagtgtaattaaggagctctggcccagcgctgacgtccagatatttggaagttttaaaactggactttatttacctactagtgacatcgacctagtggtgtttgggaagtgggagaacctacccctctggactctggaagaagctcttcggaaacacaaagtcgcagatgaggattcggtgaaagttttagacaaagcaactgtacctattattaaattaacagattcttttactgaagtgaaagttgatatcagctttaatgtacagaatggcgtgagagcagctgacctcatcaaagattttaccaagaaatatcctgtattgccatacttggttttagtattgaaacaattcctattgcagagggaccttaatgaagtatttacaggtggaattggttcttatagtctctttttaatggcagtcagtttccttcagttacatcccagggaagatgcttgcatccccaatacaaactatggtgttctcttaatagaattttttgaattatatggacgacacttcaattatttaaagactggcatccggataaaggatggtggttcatatgtggccaaagatgaagtacagaaaaatatgctagatggctacaggccatcaatgctttatatcgaagatcctttacaaccaggtaacgatgttggaaggagttcatatggggccatgcaagtgaagcaggcctttgattatgcctacgttgttttgagtcatgctgtatcaccaatagcaaagtactatcccaacaatgaaacagaaagcatactaggtagaataattagagtaacagatgaagttgccacatatagagattggatatcaaagcagtggggcttgaagaatagacctgagccttcatgcaatgcactcttcaaactcttcatcaggtccagtgtcgtcctcttctgccacacagtccagctctagtgatgtagattccgatgcaacaccatgcaaaaccccgaaacagctgctttgccgtccgtccactgggaaccgagtagggtcgcaagatgtatccttggagtcctctcaggcagttgggaaaatgcaaagcacccaaaccactaacacatccaacagcaccaacaaatctcagcatggatcagcaaggctctttcgttcttccagcaaakgcttccaaggtacaactcaaacaagccatggttccttgatgacaaacaaacaacatcaaggcaaatccaataatcagtattaccatggcaaaaagaggaaacacaagagggacgcgcccctctcagacctctgtagatagtcagcgctgcgcggtggactgtcttctctgtgcaatgatctcatgctcaggacagttgcgcagggactcctgggagatattcaggagcctcacactgttcagacgttgacttagcaactgcgttttttcccagctcgccacagaatggatcatgaagactgacaactgcaaaaaaaacaaaacaaaacaaaaaaaaaagcaagcaaaaaagagggaaaaaaaaggctgcttatttgataagtcatatgctacaacagggtcattttaagatttaaagcttgaatgtaaaataaatatatttctcattggctttatgcagagttatagggaatagtattcagtgttggtagggtgatagaaacaaaaaacagtatcagaggatgaggtggggaaggaaaacaaaggtatctgataggaagtccagattccaaaggggaaagtgatctgtgcatgttttttttttaaatatttttgcatatatttaccattttattgtgtgtatatatagaagaccatataggaaattgatatttgtaatagtggatttgttaataatactttttacataacattactgtttaaattgtaaacagattttttctcaggattagtttgaaaaataatctaaattgtcatcttaacatccatatatagggaagtgattagttctattactcaatttgtttttctcagcattgaaatgacttaatagaacccttgtgtcctgctgcaaaaatttttcctctctaaagaaaaggtttatggtggcaaatgatgtttattttattttgtaaaaaaaaaaaaatgtactatgtacttttgtgtaaacactgaaaaatctctggtcatctccgagaattaacttgcaactgttttctatagtgctgtcgtcttgggcaatgggcaattacatgactttgtgtttgcttcctttgcagtcttttttttttccccccatttcttcctaataggaaaaaaaaaaaaaaaaaaggtcacccatgtctggtctcattcctgttgcagtgaaacttcgagttccacagactttgcatgctggcttctctaaccctgtgtgctgcgtgtgcctgtttctcatctcttattctttttaaaattcatgcttaactactgtgggagaataactgtaaacagctttaattaaatcatacttataaaaaactattttcttatattccactctatgcttttggtattgttgatctttacaaattaaatggtctttgataatggatctattttgtattgccttattaagaccaaatacttcttgtcatcccattctttatcctcttctttcatggaattgttatcgttaattaaaacttttttaaacattggcttgtttcaatcatactgtaaattttggttgtagtcagctttgagtgcaatgagatgtataattctgttatcattacctgttgagtttgaaactcagttgggaatatttaatataatagaatgtaagtgacatttctgaaaatgctttctttcagggtgaaagctcttatgtttagcatcaatgtgtatggctctgttaaatgcagccatttctgagacgagattcttttatatatatatacatataaagtactattggcttttaggagtttcttttatatacatttatgaaatactgaagaccaatcagaccattaatggacacttagtgtaactttttataaagaaaataatgctaaagtaagaccaaaactgatgtcatcactgaaattaacaattttcaatatgttcatattttaattcacaatggaaaaatgtgttccaaaactggaaactcatagtactcgtgtaaactgtggaagatttcaaatgtgatgttattttgacaatgttttaaattttagagtcacattttattctgatcagaatttttattgagatgttgagcttttgtttttgaaactagtttgtcataacattgtgcataatcacagtatttattttctaggacaattgtgaatgtgtagacttatgtttactgctaagggaacaattatttataaaataatattaaatccagtattagctgcctatttcagacacttaatacttgcagagatctatgttacatttaccacactgaagttttttttgttgttttttgtttgtttttaaagaatcaccctcattgttgaaagtaaatgtactcttagggtgcgaatattagtgttccaataagcatgtgattatattaaggtggtggtagcgggaagataattctgattccattgggaatcttaggttttcgtaaatttattgggaaaatagtttttcctgtactgctgaagtttctttttggtaaacagtatctttctaaaagaaaaaagcatgaaggagaaattgaggtgtgtatacatttcctcaaatgaccagcattgtattcgtgaatactgtgtatcttgcagtgaacagtgtggaagctgttcatttttcaatctgaagtaaaatactttcaagaa

SEQ ID NO: 4995 - DNA, 6404 bp, Homo sapiens
gcccgctgccactggggcggccactcgggcggcggtggagcgggagcgcgcagcagctgctggccaacgcagtcatcttcctgtgtgggaacctgacaggcgccttccacaagcaccaaatgcaggatgcgtcccgggacctcttcacctacactgtgaagtgcatccagatccgccggaagctgcgcatcgagaagcgccagcargagaacctgctgctgtcagtgcttccggcccacatctccatgggcatgaagctggccatcatygaacggctcaaggagcatggtgaccgtcgctgcatgcctgacaacaacttccacagcctctacgtcaagaggcaccagaatgtcagcatcctctatgcggacatcgtgggcttcacgcagctggccagcgactgttctcccaaggagctggtggtggtgctgaatgagctctttggcaagttcgaccagatcgccaaggccaacgagtgcatgcgaatcaagatcctcggcgactgctactactgtgtatcgggcctgcccgtgtcgctgcctacccacgcccggaactgcgtgaagatggggctggacatgtgccaggccatcaagcaggtgcgggaggccacgggcgtggacatcaacatgcgtgtgggcatacactcggggaatgtgctgtgcggggtcatcgggctgcgcaagtggcagtatgacgtgtggtcccacgacgtgtccctggccaaccggatggaggcagccggagtacccggccgggtgcacatcacggaggccacgctaaagcacctggacaaggcgtacgaggtggaggatgggcacgggcagcagcgggacccctacctcaaggagatgaacatccgcacctacctggtcatcgacccccggagccagcagccacccccgcccagccaacacctccccaggcccaagggggaygcggccctgaagatgcgggygtcagtgcgcatgacccggtacctcgagtcctggggggcggcacggccctttgcacatctcaaccaccgtgagagcgtgagcagtggtgagacccacgtccccaacgggcggaggcctaagagcgttccccagcgccaccgccggaccccagacagaagcatgtcccccaaggggcggtcggaggatgactcgtacgatgacgagatgctgtcagccattgagggrctcagctccacgaggccctgctgctccaagtccgatgacttctacacctttgggtccatcttcctggagaagggctttgagcgcgagtaccgcctggcacccatcccccgggcccgccacgactttgcctgcgccagcctgatcttcgtctgcatcctgctcgtccatgtcctgctcatgcccaggacggcggcactgggtgtgtccttcgggctggtggcctgtgtactggggctggtgctgggcctgtgctttgccaccaagttctcgaggtgctgcccagctcgggggacgctctgcactatctctgagagggtggagacacagcccctgctgaggctgaccctggcygtcctgaccatcggcagcctgctcactgtggccatcatcaacctgcccctgatgcctttccaagttccagagctgcctgttggcaatgagacaggcctactggccgcgagcagcaagacaagagccctgtgtgagcccctcccgtactacacctgcagctgtgtcctgggcttcatcgcctgctcggtcttcctgaggatgagcctggagccaaaggttgtgctgctgacagtggccctggtggcctacctggtgctcttcaacctctccccatgctggcagtgggactgctgcggccaaggcctgggcaacctcaccaagcccaacggcaccaccagtggcacccctagctgttcctggaaggacctgaagaccatgaccaatttctacctggtcctgttctacatcaccctgcttacactctccagacagattgactattactgccgcttggactgcctatggaagaagaagttcaagaaggagcacgaggagtttgagaccatggagaacgtgaaccgccttcttctggagaacgtcctgccagcccacgtggctgcccactttatcggtgacaagttaaacgaggactggtaccatcagtcctatgactgcgtctgtgtcatgtttgcctccgtgccggacttcaaagtgttctacacagagtgcgatgtcaacaaagaagggctggagtgcctacgcctgctcaatgagatcattgccgacttcgacgagctcctactgaagcccaagttcagcggcgtggagaagatcaagaccatcggcagcacgtacatggcagctgcagggctcagcgtcgcctcagggcacgagaaccaggagctggagcggcagcatgcccacattggtgtcatggtggagttcagcatcgccctgatgagtaagctggacggcatcaacaggcactccttcaactccttccgcctccgcgtcggcataaaccatgggcctgtgattgctggagtgattggggcccgaaaacctcagtatgacatctggggaaacactgtcaatgtggccagccgaatggaaagcactggagaacttgggaaaatccaggttaccgaggagacctgcaccatcctccagggcctcgggtactcttgtgaatgccgyggcctgatcaacgtcaaaggcaaaggcgagctgaggacttactttgtctgtacggacactgccaagtttcaggggctggggctgaactgagggctcctgctggattccgaaaaggccgggaagccagtctccttccctgaagcaagcccaggagaagactctccgccccacgccaatcccaaaggcatgcagatggctgtgcatgttggcttctttggacctgcactggaggatttctcagacacatgcaccagattctggctcgaagcagccactgagccataatgcgcaggggaggccagaagctctgtgcctggtctgtaacagtttccaggccagctggagaatgttcactggttcggggctgactttgagatctttgttccctgaggtgccaggcaggcaactttagcacatgatgaaaacagacttccacctcagtggcctgtgggcacgcacaagtgaggtctgtttttctagacaccaagggggagtaagctgagctgtctagcacggattggagactccctctccctggtgggcctggcaatgacagcatttctcacagaggcattctggtaaatgaagctgaaaggggtgttttacatctgtaaacggtttcaaacaggtagagagaaaaacaccacaattaacactgttactttttgccttgtctggcatgtttgttttaaatgaatacattaatggggtttttatccttttgaatgacttttcagacactagacataaatctcttccctccagtgtatgctctgcctttttaaccactgacatgtaaggaggactactgtctagcatcagcttatggggtcagctggctgtggggatagagtcctgaggaatgtggtcacagcaagaaggcrgggagcagcagagccttgcctttgaatgaggcagcttgtgaggcaagcattctggagagaggtgctttgaaagtaaggtgcggcctttcacctcttccttgattactcacacatctttgcrttctcccctgccgtccttcaactgtatcttacttttcttaccagaaaggaatggagtctgtttagagacaacttggacaacctgtgagtgcatctcttctttcctttagtcttcacagctaactctggagagcttcaaaactagaaggatctactccgcatgggtgcatgcagaggctcctggatctgggaagcccgccccctcacaaatgctgagccgttcttgctctgaaactgcgtgagtcaaggcaaatgcaaaaagccaggttttggggatgtgtcttactgtgcttcaacttcccaaggaattgaaagtcaacctaactgtaacaacagggtgagaaatgaccaaactgcccgtgactttttctgaatggacttcataaccggaagacttaaccggtggcctcatcaccagagcatcgccaggatttctaatgcactcagtttccctacatagcagggattcttagctaggtgtccccatgaaccccgtaaagttctacacaaagtcttgcatacaggagcctttacaagatgattatacagggtkgcagattgggtgactgaccagacttgttggggtcctgggatgagttgccccgggctgcaaattaagagtacagctaagtgcgggggtggcggtggagggaacgaaaattgaacctgtctgcctgtgctgtgtcgtgtggctttatcagcccgaggaagggcaggtgtattctaatttgcacaaaggtgctgggtagactagtggcagctctcatgtgctgcacataagtggaatcagtatgaatagaagaacttgctgtataaaggaatttcatggcaacaatgctggtaagggcaattagcctcgcttaagttgccttttttacacaccaaaactttttacatgaagggctggtttcacatgaatactatactgaaatctgtgctctcaagatctagcagtgaccagggctgcccggcgggggctctcctggcaagtcaggaaggtttctgttgctaatataacatagaaacacattagtgcactgggcctctctgaggtcagcatatttgtactcttggaatatttgtttttttcttcagtaacaacagaaaccccagttgggagtttaacaaataactgactaccactcactcatgcatttttatttccaattaaagcaaagcactgtgctgtgctcagataataatagtttgtaagtaraagtttttagttttcagtgttcaggttatagaatataactgaccataaaaattacctgcaggtattttctttttatgaacttgtttttaaattaccaagtaattactggtgtcattttgttttatgacagacacacgtatctaacaaacaaacaaacagtgaccttctccatgggtcaaggacttccttacaatttctcctgagttaacttttgtgaaaataatacctaaggttttctggcttattgaggaaatttcctaacaaacaaacaaacaaacaaacagaagagaagatcattaaccactgtatactttgtgtatataataggtcagtgtaaagaaatatgatttgaggtggtgcatgcaagtaactagggtttattctatataatgaatatttatagatctgtaacatttgtttcaaaatgctgtttcatttttataaagtaccagtgtttagctgctttttatacattaaattagcaatttgaaaaactcaaatatctgaaggtattttattttcgtggtcctcatgaactcactagagattaaaagtagactcaaacaacttgaaaatttgactcttttagcataagattttaagtcttttgagggaattaattttcctttaccctatttgttcttcctaaatactaattaattttcaaagtcaggaaaataatagaaatcaaatggcttcctgcctgggtgatttatagaaggattgtataagggccttcaaacttaatttgttcactgaacaaggctatctatctatctatctatctccatcctgatttttttcccttgtgtataacaggttctataccgattcagcaaaatcaccatttatctcagcttgctgataaaagggggccatgaatcttgtggtctcctacttagagttcaactccttgggtacttgacctttgtatttcagataaacagtaagtaaagtagaaatgtcaccttttggtaatctggtaattccctgatctattcaaggatgacttagtttatcttatttggcttattactttgctatagtactaagtaactcctctttctttaaaaaacggaaaaaaccaaaaaagaacactagccatgtgacagtgctataaaactcccagtgtgcttttgtcaggggtgggtgggaggtgcctaattacccatacaagggcatcattcccactgggtatgcaggggcagaaccacagtagtaaattctaaaattatttcaagtatgttcgtataacggaaaatctcactggatggggccgttttaagaacgcttcttagtgatgatcctgtctgtgggacataaggaagaagcattggaaggcactattttgaaagaatgctgcacaggtatggcaacagccccaagcacattccttcctcacgagtcccaggtccagctttattacctaatacaagtccaacctctggaacatccaaattcgctgttccaaagtttaattaaaaacacaatttacaaatatttaatatcttc

SEQ ID NO: 4996 - DNA, 6754 bp, Homo sapiens
agctgaggaactgcgtgtggagtyagcccagtctggatgcacaggaggatgctggyggcacagtgagtgaggcctggtgccagagctgtgcggaccccttgttggccatggagcagcaggcccagaggccctctccccagccctgcttgcctgcctcggagaggacagaggcctaggcccacgggggagggtgttggcagacagatgccctccaggccctggggcctccttaacggccccttaacgacacgcgtgccaagggtggaggatgccagccaaggggcgctacttcctcaacgagggcgaggagggccctgaccaagatgcgctctacgagaagtaccagytcaccagccagcatgggccgctgctgctcacgctcctgctggtggccgccactgcctgcgtggccctcatcatcattgccttcagccagggggacccctccagacaccaggccattctgggcatggcgttcctggtgctggcggtgtttgcggccctctctgtgctgatgtacgtcgagtgtctcctgcggcgctggctcagggccttggcgctgctcacctgggcctgcttggtggcgctgggctatgtgctggtgttcgacgcatggacaaaggcggcctgtgcgtgggagcaggtgcccttcttcctgttcattgtcttcgtggtgtacacactactgcccttcagcatgcggggcgctgtcgccgttggggccgtctccactgcctcccacctcctggtgctcggttctttgatgggaggcttcacgacacccagtgtccgggtggggctgcagctgctggccaacgcagtcatcttcctgtgtgggaacctgacaggcgccttccacaagcaccaaatgcaggatgcgtcccgggacctcttcacctacactgtgaagtgcatccagatccgccggaagctgcgcatcgagaagcgccagcargagaacctgctgctgtcagtgcttccggcccacatctccatgggcatgaagctggccatcatygaacggctcaaggagcatggtgaccgtcgctgcatgcctgacaacaacttccacagcctctacgtcaagaggcaccagaatgtcagcatcctctatgcggacatcgtgggcttcacgcagctggccagcgactgttctcccaaggagctggtggtggtgctgaatgagctctttggcaagttcgaccagatcgccaaggccaacgagtgcatgcgaatcaagatcctcggcgactgctactactgtgtatcgggcctgcccgtgtcgctgcctacccacgcccggaactgcgtgaagatggggctggacatgtgccaggccatcaagcaggtgcgggaggccacgggcgtggacatcaacatgcgtgtgggcatacactcggggaatgtgctgtgcggggtcatcgggctgcgcaagtggcagtatgacgtgtggtcccacgacgtgtccctggccaaccggatggaggcagccggagtacccggccgggtgcacatcacggaggccacgctaaagcacctggacaaggcgccctgctgctccaagtccgatgacttctacacctttgggtccatcttcctggagaagggctttgagcgcgagtaccgcctggcacccatcccccgggcccgccacgactttgcctgcgccagcctgatcttcgtctgcatcctgctcgtccatgtcctgctcatgcccaggacggcggcactgggtgtgtccttcgggctggtggcctgtgtactggggctggtgctgggcctgtgctttgccaccaagttctcgaggtgctgcccagctcgggggacgctctgcactatctctgagagggtggagacacagcccctgctgaggctgaccctggcygtcctgaccatcggcagcctgctcactgtggccatcatcaacctgcccctgatgcctttccaagttccagagctgcctgttggcaatgagacaggcctactggccgcgagcagcaagacaagagccctgtgtgagcccctcccgtactacacctgcagctgtgtcctgggcttcatcgcctgctcggtcttcctgaggatgagcctggagccaaaggttgtgctgctgacagtggccctggtggcctacctggtgctcttcaacctctccccatgctggcagtgggactgctgcggccaaggcctgggcaacctcaccaagcccaacggcaccaccagtggcacccctagctgttcctggaaggacctgaagaccatgaccaatttctacctggtcctgttctacatcaccctgcttacactctccagacagattgactattactgccgcttggactgcctatggaagaagaagttcaagaaggagcacgaggagtttgagaccatggagaacgtgaaccgccttcttctggagaacgtcctgccagcccacgtggctgcccactttatcggtgacaagttaaacgaggactggtaccatcagtcctatgactgcgtctgtgtcatgtttgcctccgtgccggacttcaaagtgttctacacagagtgcgatgtcaacaaagaagggctggagtgcctacgcctgctcaatgagatcattgccgacttcgacgagctcctactgaagcccaagttcagcggcgtggagaagatcaagaccatcggcagcacgtacatggcagctgcagggctcagcgtcgcctcagggcacgagaaccaggagctggagcggcagcatgcccacattggtgtcatggtggagttcagcatcgccctgatgagtaagctggacggcatcaacaggcactccttcaactccttccgcctccgcgtcggcataaaccatgggcctgtgattgctggagtgattggggcccgaaaacctcagtatgacatctggggaaacactgtcaatgtggccagccgaatggaaagcactggagaacttgggaaaatccaggttaccgaggagacctgcaccatcctccagggcctcgggtactcttgtgaatgccgyggcctgatcaacgtcaaaggcaaaggcgagctgaggacttactttgtctgtacggacactgccaagtttcaggggctggggctgaactgagggctcctgctggattccgaaaaggccgggaagccagtctccttccctgaagcaagcccaggagaagactctccgccccacgccaatcccaaaggcatgcagatggctgtgcatgttggcttctttggacctgcactggaggatttctcagacacatgcaccagattctggctcgaagcagccactgagccataatgcgcaggggaggccagaagctctgtgcctggtctgtaacagtttccaggccagctggagaatgttcactggttcggggctgactttgagatctttgttccctgaggtgccaggcaggcaactttagcacatgatgaaaacagacttccacctcagtggcctgtgggcacgcacaagtgaggtctgtttttctagacaccaagggggagtaagctgagctgtctagcacggattggagactccctctccctggtgggcctggcaatgacagcatttctcacagaggcattctggtaaatgaagctgaaaggggtgttttacatctgtaaacggtttcaaacaggtagagagaaaaacaccacaattaacactgttactttttgccttgtctggcatgtttgttttaaatgaatacattaatggggtttttatccttttgaatgacttttcagacactagacataaatctcttccctccagtgtatgctctgcctttttaaccactgacatgtaaggaggactactgtctagcatcagcttatggggtcagctggctgtggggatagagtcctgaggaatgtggtcacagcaagaaggcrgggagcagcagagccttgcctttgaatgaggcagcttgtgaggcaagcattctggagagaggtgctttgaaagtaaggtgcggcctttcacctcttccttgattactcacacatctttgcrttctcccctgccgtccttcaactgtatcttacttttcttaccagaaaggaatggagtctgtttagagacaacttggacaacctgtgagtgcatctcttctttcctttagtcttcacagctaactctggagagcttcaaaactagaaggatctactccgcatgggtgcatgcagaggctcctggatctgggaagcccgccccctcacaaatgctgagccgttcttgctctgaaactgcgtgagtcaaggcaaatgcaaaaagccaggttttggggatgtgtcttactgtgcttcaacttcccaaggaattgaaagtcaacctaactgtaacaacagggtgagaaatgaccaaactgcccgtgactttttctgaatggacttcataaccggaagacttaaccggtggcctcatcaccagagcatcgccaggatttctaatgcactcagtttccctacatagcagggattcttagctaggtgtccccatgaaccccgtaaagttctacacaaagtcttgcatacaggagcctttacaagatgattatacagggtkgcagattgggtgactgaccagacttgttggggtcctgggatgagttgccccgggctgcaaattaagagtacagctaagtgcgggggtggcggtggagggaacgaaaattgaacctgtctgcctgtgctgtgtcgtgtggctttatcagcccgaggaagggcaggtgtattctaatttgcacaaaggtgctgggtagactagtggcagctctcatgtgctgcacataagtggaatcagtatgaatagaagaacttgctgtataaaggaatttcatggcaacaatgctggtaagggcaattagcctcgcttaagttgccttttttacacaccaaaactttttacatgaagggctggtttcacatgaatactatactgaaatctgtgctctcaagatctagcagtgaccagggctgcccggcgggggctctcctggcaagtcaggaaggtttctgttgctaatataacatagaaacacattagtgcactgggcctctctgaggtcagcatatttgtactcttggaatatttgtttttttcttcagtaacaacagaaaccccagttgggagtttaacaaataactgactaccactcactcatgcatttttatttccaattaaagcaaagcactgtgctgtgctcagataataatagtttgtaagtaraagtttttagttttcagtgttcaggttatagaatataactgaccataaaaattacctgcaggtattttctttttatgaacttgtttttaaattaccaagtaattactggtgtcattttgttttatgacagacacacgtatctaacaaacaaacaaacagtgaccttctccatgggtcaaggacttccttacaatttctcctgagttaacttttgtgaaaataatacctaaggttttctggcttattgaggaaatttcctaacaaacaaacaaacaaacaaacagaagagaagatcattaaccactgtatactttgtgtatataataggtcagtgtaaagaaatatgatttgaggtggtgcatgcaagtaactagggtttattctatataatgaatatttatagatctgtaacatttgtttcaaaatgctgtttcatttttataaagtaccagtgtttagctgctttttatacattaaattagcaatttgaaaaactcaaatatctgaaggtattttattttcgtggtcctcatgaactcactagagattaaaagtagactcaaacaacttgaaaatttgactcttttagcataagattttaagtcttttgagggaattaattttcctttaccctatttgttcttcctaaatactaattaattttcaaagtcaggaaaataatagaaatcaaatggcttcctgcctgggtgatttatagaaggattgtataagggccttcaaacttaatttgttcactgaacaaggctatctatctatctatctatctccatcctgatttttttcccttgtgtataacaggttctataccgattcagcaaaatcaccatttatctcagcttgctgataaaagggggccatgaatcttgtggtctcctacttagagttcaactccttgggtacttgacctttgtatttcagataaacagtaagtaaagtagaaatgtcaccttttggtaatctggtaattccctgatctattcaaggatgacttagtttatcttatttggcttattactttgctatagtactaagtaactcctctttctttaaaaaacggaaaaaaccaaaaaagaacactagccatgtgacagtgctataaaactcccagtgtgcttttgtcaggggtgggtgggaggtgcctaattacccatacaagggcatcattcccactgggtatgcaggggcagaaccacagtagtaaattctaaaattatttcaagtatgttcgtataacggaaaatctcactggatggggccgttttaagaacgcttcttagtgatgatcctgtctgtgggacataaggaagaagcattggaaggcactattttgaaagaatgctgcacaggtatggcaacagccccaagcacattccttcctcacgagtcccaggtccagctttattacctaatacaagtccaacctctggaacatccaaattcgctgttccaaagtttaattaaaaacacaatttacaaatatttaatatcttc

SEQ ID NO: 4997 - DNA, 7294 bp, Homo sapiens
agatgtgactcactctcattaggtagcgtggaaggagccttcggatgggtgagcctgggcgcgtctgaggaagggcaggcgggggccgggccacctccctgcagaccctggccggctgctggggccggggaggagagccagagctgaggaactgcgtgtggagtyagcccagtctggatgcacaggaggatgctggyggcacagtgagtgaggcctggtgccagagctgtgcggaccccttgttggccatggagcagcaggcccagaggccctctccccagccctgcttgcctgcctcggagaggacagaggcctaggcccacgggggagggtgttggcagacagatgccctccaggccctggggcctccttaacggccccttaacgacacgcgtgccaagggtggaggatgccagccaaggggcgctacttcctcaacgagggcgaggagggccctgaccaagatgcgctctacgagaagtaccagytcaccagccagcatgggccgctgctgctcacgctcctgctggtggccgccactgcctgcgtggccctcatcatcattgccttcagccagggggacccctccagacaccaggccattctgggcatggcgttcctggtgctggcggtgtttgcggccctctctgtgctgatgtacgtcgagtgtctcctgcggcgctggctcagggccttggcgctgctcacctgggcctgcttggtggcgctgggctatgtgctggtgttcgacgcatggacaaaggcggcctgtgcgtgggagcaggtgcccttcttcctgttcattgtcttcgtggtgtacacactactgcccttcagcatgcggggcgctgtcgccgttggggccgtctccactgcctcccacctcctggtgctcggttctttgatgggaggcttcacgacacccagtgtccgggtggggctgcagctgctggccaacgcagtcatcttcctgtgtgggaacctgacaggcgccttccacaagcaccaaatgcaggatgcgtcccgggacctcttcacctacactgtgaagtgcatccagatccgccggaagctgcgcatcgagaagcgccagcargagaacctgctgctgtcagtgcttccggcccacatctccatgggcatgaagctggccatcatygaacggctcaaggagcatggtgaccgtcgctgcatgcctgacaacaacttccacagcctctacgtcaagaggcaccagaatgtcagcatcctctatgcggacatcgtgggcttcacgcagctggccagcgactgttctcccaaggagctggtggtggtgctgaatgagctctttggcaagttcgaccagatcgccaaggccaacgagtgcatgcgaatcaagatcctcggcgactgctactactgtgtatcgggcctgcccgtgtcgctgcctacccacgcccggaactgcgtgaagatggggctggacatgtgccaggccatcaagcaggtgcgggaggccacgggcgtggacatcaacatgcgtgtgggcatacactcggggaatgtgctgtgcggggtcatcgggctgcgcaagtggcagtatgacgtgtggtcccacgacgtgtccctggccaaccggatggaggcagccggagtacccggccgggtgcacatcacggaggccacgctaaagcacctggacaaggcgtacgaggtggaggatgggcacgggcagcagcgggacccctacctcaaggagatgaacatccgcacctacctggtcatcgacccccggagccagcagccacccccgcccagccaacacctccccaggcccaagggggaygcggccctgaagatgcgggygtcagtgcgcatgacccggtacctcgagtcctggggggcggcacggccctttgcacatctcaaccaccgtgagagcgtgagcagtggtgagacccacgtccccaacgggcggaggcctaagagcgttccccagcgccaccgccggaccccagacagaagcatgtcccccaaggggcggtcggaggatgactcgtacgatgacgagatgctgtcagccattgagggrctcagctccacgaggccctgctgctccaagtccgatgacttctacacctttgggtccatcttcctggagaagggctttgagcgcgagtaccgcctggcacccatcccccgggcccgccacgactttgcctgcgccagcctgatcttcgtctgcatcctgctcgtccatgtcctgctcatgcccaggacggcggcactgggtgtgtccttcgggctggtggcctgtgtactggggctggtgctgggcctgtgctttgccaccaagttctcgaggtgctgcccagctcgggggacgctctgcactatctctgagagggtggagacacagcccctgctgaggctgaccctggcygtcctgaccatcggcagcctgctcactgtggccatcatcaacctgcccctgatgcctttccaagttccagagctgcctgttggcaatgagacaggcctactggccgcgagcagcaagacaagagccctgtgtgagcccctcccgtactacacctgcagctgtgtcctgggcttcatcgcctgctcggtcttcctgaggatgagcctggagccaaaggttgtgctgctgacagtggccctggtggcctacctggtgctcttcaacctctccccatgctggcagtgggactgctgcggccaaggcctgggcaacctcaccaagcccaacggcaccaccagtggcacccctagctgttcctggaaggacctgaagaccatgaccaatttctacctggtcctgttctacatcaccctgcttacactctccagacagattgactattactgccgcttggactgcctatggaagaagaagttcaagaaggagcacgaggagtttgagaccatggagaacgtgaaccgccttcttctggagaacgtcctgccagcccacgtggctgcccactttatcggtgacaagttaaacgaggactggtaccatcagtcctatgactgcgtctgtgtcatgtttgcctccgtgccggacttcaaagtgttctacacagagtgcgatgtcaacaaagaagggctggagtgcctacgcctgctcaatgagatcattgccgacttcgacgagctcctactgaagcccaagttcagcggcgtggagaagatcaagaccatcggcagcacgtacatggcagctgcagggctcagcgtcgcctcagggcacgagaaccaggagctggagcggcagcatgcccacattggtgtcatggtggagttcagcatcgccctgatgagtaagctggacggcatcaacaggcactccttcaactccttccgcctccgcgtcggcataaaccatgggcctgtgattgctggagtgattggggcccgaaaacctcagtatgacatctggggaaacactgtcaatgtggccagccgaatggaaagcactggagaacttgggaaaatccaggttaccgaggagacctgcaccatcctccagggcctcgggtactcttgtgaatgccgyggcctgatcaacgtcaaaggcaaaggcgagctgaggacttactttgtctgtacggacactgccaagtttcaggggctggggctgaactgagggctcctgctggattccgaaaaggccgggaagccagtctccttccctgaagcaagcccaggagaagactctccgccccacgccaatcccaaaggcatgcagatggctgtgcatgttggcttctttggacctgcactggaggatttctcagacacatgcaccagattctggctcgaagcagccactgagccataatgcgcaggggaggccagaagctctgtgcctggtctgtaacagtttccaggccagctggagaatgttcactggttcggggctgactttgagatctttgttccctgaggtgccaggcaggcaactttagcacatgatgaaaacagacttccacctcagtggcctgtgggcacgcacaagtgaggtctgtttttctagacaccaagggggagtaagctgagctgtctagcacggattggagactccctctccctggtgggcctggcaatgacagcatttctcacagaggcattctggtaaatgaagctgaaaggggtgttttacatctgtaaacggtttcaaacaggtagagagaaaaacaccacaattaacactgttactttttgccttgtctggcatgtttgttttaaatgaatacattaatggggtttttatccttttgaatgacttttcagacactagacataaatctcttccctccagtgtatgctctgcctttttaaccactgacatgtaaggaggactactgtctagcatcagcttatggggtcagctggctgtggggatagagtcctgaggaatgtggtcacagcaagaaggcrgggagcagcagagccttgcctttgaatgaggcagcttgtgaggcaagcattctggagagaggtgctttgaaagtaaggtgcggcctttcacctcttccttgattactcacacatctttgcrttctcccctgccgtccttcaactgtatcttacttttcttaccagaaaggaatggagtctgtttagagacaacttggacaacctgtgagtgcatctcttctttcctttagtcttcacagctaactctggagagcttcaaaactagaaggatctactccgcatgggtgcatgcagaggctcctggatctgggaagcccgccccctcacaaatgctgagccgttcttgctctgaaactgcgtgagtcaaggcaaatgcaaaaagccaggttttggggatgtgtcttactgtgcttcaacttcccaaggaattgaaagtcaacctaactgtaacaacagggtgagaaatgaccaaactgcccgtgactttttctgaatggacttcataaccggaagacttaaccggtggcctcatcaccagagcatcgccaggatttctaatgcactcagtttccctacatagcagggattcttagctaggtgtccccatgaaccccgtaaagttctacacaaagtcttgcatacaggagcctttacaagatgattatacagggtkgcagattgggtgactgaccagacttgttggggtcctgggatgagttgccccgggctgcaaattaagagtacagctaagtgcgggggtggcggtggagggaacgaaaattgaacctgtctgcctgtgctgtgtcgtgtggctttatcagcccgaggaagggcaggtgtattctaatttgcacaaaggtgctgggtagactagtggcagctctcatgtgctgcacataagtggaatcagtatgaatagaagaacttgctgtataaaggaatttcatggcaacaatgctggtaagggcaattagcctcgcttaagttgccttttttacacaccaaaactttttacatgaagggctggtttcacatgaatactatactgaaatctgtgctctcaagatctagcagtgaccagggctgcccggcgggggctctcctggcaagtcaggaaggtttctgttgctaatataacatagaaacacattagtgcactgggcctctctgaggtcagcatatttgtactcttggaatatttgtttttttcttcagtaacaacagaaaccccagttgggagtttaacaaataactgactaccactcactcatgcatttttatttccaattaaagcaaagcactgtgctgtgctcagataataatagtttgtaagtaraagtttttagttttcagtgttcaggttatagaatataactgaccataaaaattacctgcaggtattttctttttatgaacttgtttttaaattaccaagtaattactggtgtcattttgttttatgacagacacacgtatctaacaaacaaacaaacagtgaccttctccatgggtcaaggacttccttacaatttctcctgagttaacttttgtgaaaataatacctaaggttttctggcttattgaggaaatttcctaacaaacaaacaaacaaacaaacagaagagaagatcattaaccactgtatactttgtgtatataataggtcagtgtaaagaaatatgatttgaggtggtgcatgcaagtaactagggtttattctatataatgaatatttatagatctgtaacatttgtttcaaaatgctgtttcatttttataaagtaccagtgtttagctgctttttatacattaaattagcaatttgaaaaactcaaatatctgaaggtattttattttcgtggtcctcatgaactcactagagattaaaagtagactcaaacaacttgaaaatttgactcttttagcataagattttaagtcttttgagggaattaattttcctttaccctatttgttcttcctaaatactaattaattttcaaagtcaggaaaataatagaaatcaaatggcttcctgcctgggtgatttatagaaggattgtataagggccttcaaacttaatttgttcactgaacaaggctatctatctatctatctatctccatcctgatttttttcccttgtgtataacaggttctataccgattcagcaaaatcaccatttatctcagcttgctgataaaagggggccatgaatcttgtggtctcctacttagagttcaactccttgggtacttgacctttgtatttcagataaacagtaagtaaagtagaaatgtcaccttttggtaatctggtaattccctgatctattcaaggatgacttagtttatcttatttggcttattactttgctatagtactaagtaactcctctttctttaaaaaacggaaaaaaccaaaaaagaacactagccatgtgacagtgctataaaactcccagtgtgcttttgtcaggggtgggtgggaggtgcctaattacccatacaagggcatcattcccactgggtatgcaggggcagaaccacagtagtaaattctaaaattatttcaagtatgttcgtataacggaaaatctcactggatggggccgttttaagaacgcttcttagtgatgatcctgtctgtgggacataaggaagaagcattggaaggcactattttgaaagaatgctgcacaggtatggcaacagccccaagcacattccttcctcacgagtcccaggtccagctttattacctaatacaagtccaacctctggaacatccaaattcgctgttccaaagtttaattaaaaacacaatttacaaatatttaatatcttc

SEQ ID NO: 4998 - DNA, 3033 bp, Homo sapiens
  misc_feature (1)...(3033): n = A,T,C or G
ccccggccccctgcggtctcccctcctccggacgctgcccctgccccacctgtggcgctcccgtcatctctagagcccccaaccagagtcctccagcccacccgcgaggctcgcgcacctgcgatgcggccccactagcagggacccgcccacctgtggcgctacccctgcctctgccgcctcccgcaccgctagcgcggcccccacctacgacgacccccgcgtagatgctcctgcccacacccgccccagccccggcccctgcccctagccgcgcccgcgccccctcccccgcagcccctcccatacgctcgggccccgcccgtcaccgcccattggcgctggggccgggcgggggcgcgggcggggcggcggttccgagtcaggcgcgcgcgggcagggtccccattgcctgctgcgcacccggacgtgcggctcccctcggcctcctcgccatggacgcggacgactcccgggcccccaagggctccttgcggaagttcctggagcacctctccggggccggcaaggccatcggcgtgctgaccagcggcggggatgctcaaggtatgaacgctgccgtccgtgccgtggtgcgcatgggtatctacgtgggggccaaggtgtacttcatctacgagggctaccagggcatggtggacggaggctcaaacatcgcagaggccgactgggagagtgtctccagcatcctgcaagtgggcgggacgatcattggcagtgcgcggtgccaggccttccgcacgcgggaaggccgcctgaaggctgcttgcaacctgctgcagcgmggcatcaccaacctgtgtgtgatyggcggrgacgggagcctcaccggggccaacctcttccggaaggagtggagtgggctgctggaggagctggccaggaacggccagatcgataaggaggccgtgcagaagtacgcctacctcaacgtggtgggcatggtgggctccatcgacaatgatttctgcggcaccgacatgaccatcggcacggactccgccctgcacaggatcatcgaggtcgtcgacgccatcatgaccacggcccagagccaccagaggaccttcgttctggaggtgatgggacgacactgtgggtacctggccctggtgagtgccttggcctgcggtgcggactgggtgttccttccagaatctccaccagaggaaggctgggaggagcagatgtgtgtcaaactctcggagaaccgtgcccggaaaaaaaggctgaatattattattgtggctgaaggagcaattgatacccaaaataaacccatcacctctgagaaaatcaaagagcttgtygtcacgcagctgggctatgacacacgtgtgaccatcctcgggcacgtgcagagaggagggacyccttcggcattygacaggatcttggccagccgcatgggagtggaggcagtcatcgccttgctagaggccaccccggacaccccagcttgcgtcgtgtcactgaaygggaaccacgccgtgcgcctgccgctgatggagtgcgtgcagatgactcaggatgtgcagaaggcgatggacgagaggagatttcaagatgcrgttcgactccgagggaggagctttgcgggcaacctgaacacctacaagcgacttgccatyaagctgccggatgatcagatcccaaagaccaattgcaacgtagctgtcatcaacgtgggggcacccgcggctgggatgaacgcrgccgtacgctcagctgtgcgcgtgggcattgccgacggccacaggatgctcgccatctatgatggctttgacggcttygccaagggccagatcaaagaaatcggctggacagatgtcgggggctggaccggccaaggaggctccattcttgggacaaaacgcgttctcccggggaagtacttggaagagatcgccacacagatgcgcacgcacagcatcaacgcgctgctgatcatcggtggattcgaggcctacctgggactcctggagctgtcagccgcccgggagaagcacgaggagttctgtgtccccatggtcatggttcccgctactgtgtccaacaatgtgccgggttccgatttcagcatyggggcagacacygccctgaacactatcaccgacacctgcgaccgcatcaagcagtcygccagcggaaccaagcggcgcgtgttcatcatcgagaccatgggcggctactgtggctacctggccaacatgggggggctygcrgcyggagctgatgccgcatacattttygaagagcccttcgacatcagggatctgcagtccaacgtggagcacctgacggagaaaatgaagaccaccatccagagaggccttgtgctcagaaatgagagctgcagtgaaaactacaccaccgacttcatttaccagctgtattcagaagagggcaaaggygtgtttgactgcaggaagaacgtgctgggtcacatgcagcagggtggggcaccctctccatttgatagaaactttggaaccaaaatctctgccagagctatggagtggatcactgcaaaactcaaggaggcccggggcagaggaaaaaaatttaccacygatgattccatttgtgtgctgggaataagcaaaagaaacgttatttttcaacctgtggyagagctgaagaagcaaackgattttgagcacaggattcccaaagaacagtggtggctcaagctacggcccctcatgaaaatcctggccaagtacaaggccagctatgaygtgtcggactcaggccagctggaacatgtgcagccctggagtgtctgacccagtcccgcctgcatgtgcctgcagccaycrtggactgtcwstttttgtaacacttaagttattttatcagcactttatgcacgtattattracattaatacctaatyggcgagtgcccatctgccccaccwgcnccagtgygtgctgtctgtggagtgtgtctcatgctttcagatgtgcatatgagcagaattaattaaacatttgcctayaactccaa

SEQ ID NO: 4999 - DNA, 2618 bp, Homo sapiens
  misc_feature (1)...(2618): n = A,T,C or G
ggcggttccgagtcaggcgcgcgcgggcagggtccccattgcctgctgcgcacccggacgtgcggctcccctcggcctcctcgccatggacgcggacgactcccgggcccccaagggctccttgcggaagttcctggagcacctctccggggccggcaaggccatcggcgtgctgaccagcggcggggatgctcaaggtatgaacgctgccgtccgtgccgtggtgcgcatgggtatctacgtgggggccaaggtgtacttcatctacgagggctaccagggcatggtggacggaggctcaaacatcgcagaggccgactgggagagtgtctccagcatcctgcaagtgggcgggacgatcattggcagtgcgcggtgccaggccttccgcacgcgggaaggccgcctgaaggctgcttgcaacctgctgcagcgmggcatcaccaacctgtgtgtgatyggcggrgacgggagcctcaccggggccaacctcttccggaaggagtggagtgggctgctggaggagctggccaggaacggccagatcgataaggaggccgtgcagaagtacgcctacctcaacgtggtgggcatggtgggctccatcgacaatgatttctgcggcaccgacatgaccatcggcacggactccgccctgcacaggatcatcgaggtcgtcgacgccatcatgaccacggcccagagccaccagaggaccttcgttctggaggtgatgggacgacactgtgggtacctggccctggtgagtgccttggcctgcggtgcggactgggtgttccttccagaatctccaccagaggaaggctgggaggagcagatgtgtgtcaaactctcggagaaccgtgcccggaaaaaaaggctgaatattattattgtggctgaaggagcaattgatacccaaaataaacccatcacctctgagaaaatcaaagagcttgtygtcacgcagctgggctatgacacacgtgtgaccatcctcgggcacgtgcagagaggagggacyccttcggcattygacaggatcttggccccggacaccccagcttgcgtcgtgtcactgaaygggaaccacgccgtgcgcctgccgctgatggagtgcgtgcagatgactcaggatgtgcagaaggcgatggacgagaggagatttcaagatgcrgttcgactccgagggaggagctttgcgggcaacctgaacacctacaagcgacttgccatyaagctgccggatgatcagatcccaaagaccaattgcaacgtagctgtcatcaacgtgggggcacccgcggctgggatgaacgcrgccgtacgctcagctgtgcgcgtgggcattgccgacggccacaggatgctcgccatctatgatggctttgacggcttygccaagggccagatcaaagaaatcggctggacagatgtcgggggctggaccggccaaggaggctccattcttgggacaaaacgcgttctcccggggaagtacttggaagagatcgccacacagatgcgcacgcacagcatcaacgcgctgctgatcatcggtggattcgaggcctacctgggactcctggagctgtcagccgcccgggagaagcacgaggagttctgtgtccccatggtcatggttcccgctactgtgtccaacaatgtgccgggttccgatttcagcatyggggcagacacygccctgaacactatcaccgacacctgcgaccgcatcaagcagtcygccagcggaaccaagcggcgcgtgttcatcatcgagaccatgggcggctactgtggctacctggccaacatgggggggctygcrgcyggagctgatgccgcatacattttygaagagcccttcgacatcagggatctgcagtccaacgtggagcacctgacggagaaaatgaagaccaccatccagagaggccttgtgctcagaaatgagagctgcagtgaaaactacaccaccgacttcatttaccagctgtattcagaagagggcaaaggygtgtttgactgcaggaagaacgtgctgggtcacatgcagcagggtggggcaccctctccatttgatagaaactttggaaccaaaatctctgccagagctatggagtggatcactgcaaaactcaaggaggcccggggcagaggaaaaaaatttaccacygatgattccatttgtgtgctgggaataagcaaaagaaacgttatttttcaacctgtggyagagctgaagaagcaaackgattttgagcacaggattcccaaagaacagtggtggctcaagctacggcccctcatgaaaatcctggccaagtacaaggccagctatgaygtgtcggactcaggccagctggaacatgtgcagccctggagtgtctgacccagtcccgcctgcatgtgcctgcagccaycrtggactgtcwstttttgtaacacttaagttattttatcagcactttatgcacgtattattracattaatacctaatyggcgagtgcccatctgccccaccwgcnccagtgygtgctgtctgtggagtgtgtctcatgctttcagatgtgcatatgagcagaattaattaaacatttgcctayaactccaa

SEQ ID NO: 5000 - DNA, 2955 bp, Homo sapiens
  misc_feature (1)...(2955): n = A,T,C or G
ccccggccccctgcggtctcccctcctccggacgctgcccctgccccacctgtggcgctcccgtcatctctagagcccccaaccagagtcctccagcccacccgcgaggctcgcgcacctgcgatgcggccccactagcagggacccgcccacctgtggcgctacccctgcctctgccgcctcccgcaccgctagcgcggcccccacctacgacgacccccgcgtagatgctcctgcccacacccgccccagccccggcccctgcccctagccgcgcccgcgccccctcccccgcagcccctcccatacgctcgggccccgcccgtcaccgcccattggcgctggggccgggcgggggcgcgggcggggcggcggttccgagtcaggcgcgcgcgggcagggtccccattgcctgctgcgcacccggacgtgcggctcccctcggcctcctcgccatggacgcggacgactcccgggcccccaagggctccttgcggaagttcctggagcacctctccggggccggcaaggccatcggcgtgctgaccagcggcggggatgctcaaggtatgaacgctgccgtccgtgccgtggtgcgcatgggtatctacgtgggggccaaggtgtacttcatctacgagggcgggacgatcattggcagtgcgcggtgccaggccttccgcacgcgggaaggccgcctgaaggctgcttgcaacctgctgcagcgmggcatcaccaacctgtgtgtgatyggcggrgacgggagcctcaccggggccaacctcttccggaaggagtggagtgggctgctggaggagctggccaggaacggccagatcgataaggaggccgtgcagaagtacgcctacctcaacgtggtgggcatggtgggctccatcgacaatgatttctgcggcaccgacatgaccatcggcacggactccgccctgcacaggatcatcgaggtcgtcgacgccatcatgaccacggcccagagccaccagaggaccttcgttctggaggtgatgggacgacactgtgggtacctggccctggtgagtgccttggcctgcggtgcggactgggtgttccttccagaatctccaccagaggaaggctgggaggagcagatgtgtgtcaaactctcggagaaccgtgcccggaaaaaaaggctgaatattattattgtggctgaaggagcaattgatacccaaaataaacccatcacctctgagaaaatcaaagagcttgtygtcacgcagctgggctatgacacacgtgtgaccatcctcgggcacgtgcagagaggagggacyccttcggcattygacaggatcttggccagccgcatgggagtggaggcagtcatcgccttgctagaggccaccccggacaccccagcttgcgtcgtgtcactgaaygggaaccacgccgtgcgcctgccgctgatggagtgcgtgcagatgactcaggatgtgcagaaggcgatggacgagaggagatttcaagatgcrgttcgactccgagggaggagctttgcgggcaacctgaacacctacaagcgacttgccatyaagctgccggatgatcagatcccaaagaccaattgcaacgtagctgtcatcaacgtgggggcacccgcggctgggatgaacgcrgccgtacgctcagctgtgcgcgtgggcattgccgacggccacaggatgctcgccatctatgatggctttgacggcttygccaagggccagatcaaagaaatcggctggacagatgtcgggggctggaccggccaaggaggctccattcttgggacaaaacgcgttctcccggggaagtacttggaagagatcgccacacagatgcgcacgcacagcatcaacgcgctgctgatcatcggtggattcgaggcctacctgggactcctggagctgtcagccgcccgggagaagcacgaggagttctgtgtccccatggtcatggttcccgctactgtgtccaacaatgtgccgggttccgatttcagcatyggggcagacacygccctgaacactatcaccgacacctgcgaccgcatcaagcagtcygccagcggaaccaagcggcgcgtgttcatcatcgagaccatgggcggctactgtggctacctggccaacatgggggggctygcrgcyggagctgatgccgcatacattttygaagagcccttcgacatcagggatctgcagtccaacgtggagcacctgacggagaaaatgaagaccaccatccagagaggccttgtgctcagaaatgagagctgcagtgaaaactacaccaccgacttcatttaccagctgtattcagaagagggcaaaggygtgtttgactgcaggaagaacgtgctgggtcacatgcagcagggtggggcaccctctccatttgatagaaactttggaaccaaaatctctgccagagctatggagtggatcactgcaaaactcaaggaggcccggggcagaggaaaaaaatttaccacygatgattccatttgtgtgctgggaataagcaaaagaaacgttatttttcaacctgtggyagagctgaagaagcaaackgattttgagcacaggattcccaaagaacagtggtggctcaagctacggcccctcatgaaaatcctggccaagtacaaggccagctatgaygtgtcggactcaggccagctggaacatgtgcagccctggagtgtctgacccagtcccgcctgcatgtgcctgcagccaycrtggactgtcwstttttgtaacacttaagttattttatcagcactttatgcacgtattattracattaatacctaatyggcgagtgcccatctgccccaccwgcnccagtgygtgctgtctgtggagtgtgtctcatgctttcagatgtgcatatgagcagaattaattaaacatttgcctayaactccaa

SEQ ID NO: 5001 - DNA, 2663 bp, Homo sapiens
  misc_feature (1)...(2663): n = A,T,C or G
ggcggttccgagtcaggcgcgcgcgggcagggtccccattgcctgctgcgcacccggacgtgcggctcccctcggcctcctcgccatggacgcggacgactcccgggcccccaagggctccttgcggaagttcctggagcacctctccggggccggcaaggccatcggcgtgctgaccagcggcggggatgctcaaggtatgaacgctgccgtccgtgccgtggtgcgcatgggtatctacgtgggggccaaggtgtacttcatctacgagggctaccagggcatggtggacggaggctcaaacatcgcagaggccgactgggagagtgtctccagcatcctgcaagtgggcgggacgatcattggcagtgcgcggtgccaggccttccgcacgcgggaaggccgcctgaaggctgcttgcaacctgctgcagcgmggcatcaccaacctgtgtgtgatyggcggrgacgggagcctcaccggggccaacctcttccggaaggagtggagtgggctgctggaggagctggccaggaacggccagatcgataaggaggccgtgcagaagtacgcctacctcaacgtggtgggcatggtgggctccatcgacaatgatttctgcggcaccgacatgaccatcggcacggactccgccctgcacaggatcatcgaggtcgtcgacgccatcatgaccacggcccagagccaccagaggaccttcgttctggaggtgatgggacgacactgtgggtacctggccctggtgagtgccttggcctgcggtgcggactgggtgttccttccagaatctccaccagaggaaggctgggaggagcagatgtgtgtcaaactctcggagaaccgtgcccggaaaaaaaggctgaatattattattgtggctgaaggagcaattgatacccaaaataaacccatcacctctgagaaaatcaaagagcttgtygtcacgcagctgggctatgacacacgtgtgaccatcctcgggcacgtgcagagaggagggacyccttcggcattygacaggatcttggccagccgcatgggagtggaggcagtcatcgccttgctagaggccaccccggacaccccagcttgcgtcgtgtcactgaaygggaaccacgccgtgcgcctgccgctgatggagtgcgtgcagatgactcaggatgtgcagaaggcgatggacgagaggagatttcaagatgcrgttcgactccgagggaggagctttgcgggcaacctgaacacctacaagcgacttgccatyaagctgccggatgatcagatcccaaagaccaattgcaacgtagctgtcatcaacgtgggggcacccgcggctgggatgaacgcrgccgtacgctcagctgtgcgcgtgggcattgccgacggccacaggatgctcgccatctatgatggctttgacggcttygccaagggccagatcaaagaaatcggctggacagatgtcgggggctggaccggccaaggaggctccattcttgggacaaaacgcgttctcccggggaagtacttggaagagatcgccacacagatgcgcacgcacagcatcaacgcgctgctgatcatcggtggattcgaggcctacctgggactcctggagctgtcagccgcccgggagaagcacgaggagttctgtgtccccatggtcatggttcccgctactgtgtccaacaatgtgccgggttccgatttcagcatyggggcagacacygccctgaacactatcaccgacacctgcgaccgcatcaagcagtcygccagcggaaccaagcggcgcgtgttcatcatcgagaccatgggcggctactgtggctacctggccaacatgggggggctygcrgcyggagctgatgccgcatacattttygaagagcccttcgacatcagggatctgcagtccaacgtggagcacctgacggagaaaatgaagaccaccatccagagaggccttgtgctcagaaatgagagctgcagtgaaaactacaccaccgacttcatttaccagctgtattcagaagagggcaaaggygtgtttgactgcaggaagaacgtgctgggtcacatgcagcagggtggggcaccctctccatttgatagaaactttggaaccaaaatctctgccagagctatggagtggatcactgcaaaactcaaggaggcccggggcagaggaaaaaaatttaccacygatgattccatttgtgtgctgggaataagcaaaagaaacgttatttttcaacctgtggyagagctgaagaagcaaackgattttgagcacaggattcccaaagaacagtggtggctcaagctacggcccctcatgaaaatcctggccaagtacaaggccagctatgaygtgtcggactcaggccagctggaacatgtgcagccctggagtgtctgacccagtcccgcctgcatgtgcctgcagccaycrtggactgtcwstttttgtaacacttaagttattttatcagcactttatgcacgtattattracattaatacctaatyggcgagtgcccatctgccccaccwgcnccagtgygtgctgtctgtggagtgtgtctcatgctttcagatgtgcatatgagcagaattaattaaacatttgcctayaactccaa

SEQ ID NO: 5002 - DNA, 2177 bp, Homo sapiens
gcattggtacatgaactttgagggttcattctagtaccaagaacctcagtcaatgaaaaagaaatggtggaatgtttgacaagtctcttgctgttaaactttctaaaagtcagaatatcttttctcaagcacttcactccttttatcattatttgtgatgttcttcagtggttttatagttctgccattactgcaatagccacatctgtgtgtcacggcccaccctgtcgccagcttcatcatgccctcatgcctcatgggaaaggtggacgttcctcagtcagtgggattgtggccactgtgtttggagcaacaggattcctggggcgatatgttgtcaaccaccttggacrcatggggtcacaggtaatcataccctatcggtgtgataaatatgacatcatgcaccttcgtcccatgggtgacctgggccagcttctgtttctggaatgggacgcgagagataaagattctatccgacgagtagtacaacacagcaatgtggtcatcaatcttattggacgagactgggaaaccaaaaactttgattttgaggatgtttttgtgaagattccccaagcaattgctcaactgtccaaggaagctggagttgaaaaattcattcatgtttcacatctgaatgcgaatattaaaagctcttctagatatttgagaaataaggctgttggagagaaagtagtgagagatgcatttccggaagccattatcgtaaagccgtcggacatctttggaagagaggatagattccttaattcttttgcaagtatgcatcggtttggtcctataccccttggttccttgggctggaagacagttaaacaaccagtatatgtcgtagatgtatccaaaggaattgttaatgcagttaaggatcctgatgccaatgggaaatcctttgctttcgttggtcccagtcggtacctccttttccacctggtgaagtacatctttgctgtggctcacagattgttcctcccattccccttgcygctttttgcctatcgatgggtagcaagagtctttgaaataagcccatttgagccctggataacaagggataaagtggagcggatgcacatcacagacatgaaattgcctcacctgcctggcttagaagaccttggtattcaggcaacaccactggaactcaaggccattgaggtgctgcggcktcatcrcacttacygctggctgtctgctgaaattgaggatgtgaagcyggccaagaccgtcaacatttagtgcctccygagcarctcttggttttggygtcttttgggtcrgcccrtgtggtttgagcacccagccaggyggtctctttagagratcctgtacacagttccacyattaaaacatttcaggttgaattctgcagtattttcttccttgatttacaaaatgagaaatgtagtcacttagaacttgagcatgatttttkttaaacatatttaataatgatatatatactatttattctctgaaatgccagagagtttgaattttcctatgacaaaccacttytagcatacgttytagaagacaaggaccctttttaatgtcaaagtattgtaaagaccccaagtgatatgtgattgttttttaatttccattaaatgagagagcatacagtatcccctaacctgaatgtgtttacactgaaggtgtttttaaaatttattttaataatgtccatatgccttttaaaaatagtagtacatatatagaaaaacattgtccatagattctcaaaccccttgcagtaattccacagtcttcttggatctgagctatctgaggccagcccgatgcccttagtaccacatctggattatttcagacacataggtggagatagattctcttcmcatgcaaaggagatgcttcagcttctatgccagcagtgccagcacttaggaattakgaccttctaatgaagttcttaaaattgcagccaagacccagatgaacaattggtttagtgttggcaaatcccaccagtacagtgtgatttaaaactcccacaatttgtggtgaagccaacataccaccatcctaggtgacccagggttggtcattgtgtttcactggacttcagcctcctgatctatatttgggacagggatgtcagtaaaaaygctgtttgatgagggaatgcc

SEQ ID NO: 5003 - DNA, 2069 bp, Homo sapiens
cgtgggggattgtgggaaaagatggcggctgccscacaatcccgggttgtccgggtcctgtcaatgtcacgttctgccattactgcaatagccacatctgtgtgtcacggcccaccctgtcgccagcttcatcatgccctcatgcctcatgggaaaggtggacgttcctcagtcagtgggattgtggccactgtgtttggagcaacaggattcctggggcgatatgttgtcaaccaccttggacrcatggggtcacaggtaatcataccctatcggtgtgataaatatgacatcatgcaccttcgtcccatgggtgacctgggccagcttctgtttctggaatgggacgcgagagataaagattctatccgacgagtagtacaacacagcaatgtggtcatcaatcttattggacgagactgggaaaccaaaaactttgattttgaggatgtttttgtgaagattccccaagcaattgctcaactgtccaaggaagctggagttgaaaaattcattcatgtttcacatctgaatgcgaatattaaaagctcttctagatatttgagaaataaggctgttggagagaaagtagtgagagatgcatttccggaagccattatcgtaaagccgtcggacatctttggaagagaggatagattccttaattcttttgcaagtatgcatcggtttggtcctataccccttggttccttgggctggaagacagttaaacaaccagtatatgtcgtagatgtatccaaaggaattgttaatgcagttaaggatcctgatgccaatgggaaatcctttgctttcgttggtcccagtcggtacctccttttccacctggtgaagtacatctttgctgtggctcacagattgttcctcccattccccttgcygctttttgcctatcgatgggtagcaagagtctttgaaataagcccatttgagccctggataacaagggataaagtggagcggatgcacatcacagacatgaaattgcctcacctgcctggcttagaagaccttggtattcaggcaacaccactggaactcaaggccattgaggtgctgcggcktcatcrcacttacygctggctgtctgctgaaattgaggatgtgaagcyggccaagaccgtcaacatttagtgcctccygagcarctcttggttttggygtcttttgggtcrgcccrtgtggtttgagcacccagccaggyggtctctttagagratcctgtacacagttccacyattaaaacatttcaggttgaattctgcagtattttcttccttgatttacaaaatgagaaatgtagtcacttagaacttgagcatgatttttkttaaacatatttaataatgatatatatactatttattctctgaaatgccagagagtttgaattttcctatgacaaaccacttytagcatacgttytagaagacaaggaccctttttaatgtcaaagtattgtaaagaccccaagtgatatgtgattgttttttaatttccattaaatgagagagcatacagtatcccctaacctgaatgtgtttacactgaaggtgtttttaaaatttattttaataatgtccatatgccttttaaaaatagtagtacatatatagaaaaacattgtccatagattctcaaaccccttgcagtaattccacagtcttcttggatctgagctatctgaggccagcccgatgcccttagtaccacatctggattatttcagacacataggtggagatagattctcttcmcatgcaaaggagatgcttcagcttctatgccagcagtgccagcacttaggaattakgaccttctaatgaagttcttaaaattgcagccaagacccagatgaacaattggtttagtgttggcaaatcccaccagtacagtgtgatttaaaactcccacaatttgtggtgaagccaacataccaccatcctaggtgacccagggttggtcattgtgtttcactggacttcagcctcctgatctatatttgggacagggatgtcagtaaaaaygctgtttgatgagggaatgcc

SEQ ID NO: 5004 - DNA, 2135 bp, Homo sapiens
  misc_feature (1)...(2135): n = A,T,C or G
ttcccacaaaagctaggctggttctgattcttaacctgctccagcagtgacacactcagtcccacagggagtggacgacccccaggaagaagatgatgttttggaggaaactccccaaagccctcttcattgggctgactctggccattgctgtcaatctccttctggtattttctagcaaggggactttacaaaacctgtttacgggtggtctccacagggagcttcctttacatctgaataaacgcnacggggcagtgataaagagactctcccacttggaggtggaattgcaggatctgaaagaaagtatgaaattagctctgaggcaacaagaaaatgtgaacagcacactgaagagggcgaaagatgaagtacgccctcttctaaaggcaatggaaaccaaggtgaatgagacraagaagcacaaaacccaaatgaaactcttcccacactcacagcttttcaggcaatggggcgaggatctktctgaggcccagcagaaggcggcccaggacctcttccggaagtttggttacaaygcgtacctcagcaaccarctgcctctcaatcgcaccatccccgacacgcgagactacagatgtcttyggaagacatatccttcccaactcccatccctcagtgtcattctcatattcgtgaatgaagctctgtccattatacaacgggccatcaccagtatcatcaaccggacgccctctcgattgttgaaggaaatcatcttggtggatgatttcagctcaaatggagaactaaaggtacacttggatragaagattaagctttacaaccagaagtatccagractactgaaaataatacggcatcctgaaaggaaaggtcttgctcaagcccgcaacactggctgggragctgccacagcagacgtggtcgccatcttggatgctcacattgaagtcaatgttgggtgggcagagccaatcttggctcggattcaggaggaccgcactgtgattgtgtctcctgtgtttgacaacattcgttytgacaccttcaaactggataagtatgaactggcagttgatgggtttaactgggaactctggtgccgctacgatgcactgccacaagcctggattgatctgcatgatgtcactgccccagtgaagagtccttcaatcatgggcatcctggctgctaacaggcacttcctgggagagatcgggtctctggatggtggaatgctcatctatggaggagagaacgtggagcttagcctgagggtgtggcagtgtggagggaaggtcgagattttgccctgttcccggattgcccacctagagagacaccacaagccctacgccttggatctcaccgctgccttgaagcgcaatgctctgcgagtggccgaaatctggatggatgagcacaaacacatggtctacttggcctggaacatacctctccagaactctggaatagatwttggagacgtttcttccagaatggcactccgggaaaaactgaaatgtaaaacttttgactggtacctgaaaaatgtttatccactcttgaagccactccacaccatcgtgggctatggaagaatgaaaaacctattggatgaaaatgtctgcttggatcagggaccykttccaggcaacacccccatcatgtattactgccatgaattcagctcacagaatgtctactatcacctaactggggagctctatgtgggacaactgattgcagaggccagtgctagtgatcgctgcctgacagaccctggcaaggcggagaagcccaccttagaaccatgctccaaggcagctaagaatagactgcatatatattgggattttaaaccgggaggagctgtcataaacagagataccaagcggtgtctggagatgaagaaggatcttttgggtagccacrtgcttgtgctccagacctgtagcacgcaagtgtgggaaatccagcacactgtcagagactggggtcagaccaacagccagtgatcytcagatggygctggatctgggtcatcaattcttgcaagtggaatggcttctactcctaacactcccagcttctttctcaatgagaaagaaagcatgtgtatgtcygtttatggcgacttcaggtgg

SEQ ID NO: 5005 - DNA, 3436 bp, Homo sapiens
cacccactagaaagccacccgggttctccttcatccccaacgctcctcacctagcccctgtcctgagggtgcccctaaccctggagccagctttaaaggggcaggccccttctcctgccccagccccagccccacccaccgggcccacattctccgtcttccaggtccagcgctccctcacagaactcccccgcaccttgtctcgctcgctccgcccctccttcccagccacagctagaggtcccgggcgcacctgcagagccggaggcttgctggggcatgcgctccatgaaggctctgcagaaggccctgagccgggctggcagtcactgcgggcgaggaggctggggtcacccgagccggagccccctccttggcgggggcgtccggcaccacctcagtgaggcygcggcgcagggcagagagacgccacacagccaccagccgcagcaccaggatcatgattcatcagaaagtggcatgctgtcccgcctgggtgatttgctcttttacactattgctgaaggacaggaacgaatccctatccacaagttcaccactgcactaaaggccactggactgcagacatcagatcctcggctccgagactgcatgagcgagatgcaccgcgtggtccaagagtccagtagtggtggcctcttggaccgagatctcttccgaaagtggcagcctacatccctcagctggccaagtcaaacccagacctgtggggtgtctccctgtgcactgtggatggtcaacggcactctgtgggccacacaaagatccccttctgcctgcagtcctgtgtgaagcccctcacctatgccatctccataagcaccctaggcactgactacgtgcacaagtttgtgggcaaagagccaagtggcctgcgctacaacaagctctccctcaatgaggaaggaatcccccataaccccatggtcaatgctggtgccattgttgtcagctccctgatcaagatggactgtaacaaagcagagaagtttgattttgtgttgcagtatctcaacaaaatggctgggaatgaatacatgggtttcagcaatgccacattccagtcagagaaggaaacaggggatcggaattatgccatcggctattatctcaaggaaaagaagtgctttcctaagggrgtggacatgatggctgcccttgatctctacttccagctgtgttctgtggaggtcacttgtgaatcaggcagtgtcatggcagccaccctcgccaacggtgggatctgccccatcacaggcgagagtgtgctgagtgctgaagcagtgcgcaacaccctcagcctcatgcattcctgcggcatgtatgacttctctggccagtttgccttccacgtgggcctgccagccaagtcagctgtatcaggagccatcctcctggtggtacccaatgtcatgggaatgatgtgcctgtcacccccattggacaagctggggaacagccatagggggaccagcttctgccagaagttggtgtctctcttcaatttccacaactatgacaacctgaggcactgtgctcggaagttagacccacggcgtgaaggggcagaaattcggaacaagactgtggtcaacctgttatttgctgcctatagtggcgatgtctcagctcttcgaaggtttgccttrtcagccatggatatggaacagaaagactatgactcgcgcacagctctgcatgttgctgcagctgaaggacacatcgaagttgttaaattcctgatcgaggcttgcaaagtgaatccttttgccaaggacaggtggggcaacattcccctggatgatgctgtgcagttcaaccatctggaggtggtcaaactgcttcaagattaccaggactcctacacacyctctgaaactcaggctgaggcagcagctgaggccctgtccaaagagaacttagaaagcatggtatgagcacaggtcatggacagcccctgctcaagaaaaagcatgagctggccacacatgtaatccataaccaccaaaaatactatggagagctacactgcttcagtggggaccaagcagtcatttggtgacttaggctagtgctttctatgggagtcaaaataccccattccctcagcagacagagtacagagaagggcctcagaggacacctgcagtasagctatccagagagamtgggcttcaaggtacagcctaatggcttgccccactcaaaaccatcccagctcttcacccaggtctcctcttcctctccctgaagaaaccatcatgagagagatactctggtggagggactctagctaccatgcacatgtacatatccacagaatatgggaagtgggaatggctatatacatggctttagtagtctggagaaatctactccccttggccaggacatgctgctgctactgctaacagccaattttatagacagagaaagtattttgtgttcaaataaactttaattaccaaatcatttttgctaaacccagtccttctttcttccctaggggtatctagcttcatcaccatcatagaaggtagaaaaagatggaatcacagggtcaaagcacagcttctctacctaccctaccaaacagtacatattcacttaccccaccaggtttttctcaactccaaatactgctttaggttaagtgtattctgctgccaagggaagcataggtttgagtctaaacaggctctgaaacagattgtgcaaaacctcaggcctccttccttcctcgggaagttccaactgtggcagaaatgaagatggaacttctcaagaataaacagttttggccgggtgtggtggctcacgcctgaaatcccagcactttgggaggccaaggtgggctgatcacatgaggccaggagttcgagaccagcctggccaatatggcaaaaccccatctctactaaaaatataaaaatgagacgggcatggtggcacacacctgtaatcctagctactcaggaggctgaggcacgagagtcgcttgaacccaaaaggcagagtttgcagtgagccaagatcatgccactgcactccagcctgggtgacagagtgagactctgtctcaaaaataaataaatagtttctagcactcatcccctagatatcccccaagtgtctctcttcccctttggtcaaggttataactgggataatgattatgacagactggctgggtgtcagaggtacagatttaaggtagatggactcagggtaaggatagctacagctgtgtggggctgaaggtctgtggcactgagctactggggaaggagggctctgttttcattttgacacactgagttaataaagcacttactgagggagccagagcccaaactctaaatgtgctgtagaaaaagggccaagtcattgactgcaccactccttcagccagagg

SEQ ID NO: 5006 - DNA, 3566 bp, Homo sapiens
cacccactagaaagccacccgggttctccttcatccccaacgctcctcacctagcccctgtcctgagggtgcccctaaccctggagccagctttaaaggggcaggccccttctcctgccccagccccagccccacccaccgggcccacattctccgtcttccaggtccagcgctccctcacagaactcccccgcaccttgtctcgctcgctccgcccctccttcccagccacagctagaggtcccgggcgcacctgcagagccggaggcttgctggggcatgcgctccatgaaggctctgcagaaggccctgagccgggctggcagtcactgcgggcgaggaggctggggtcacccgagccggagccccctccttggcgggggcgtccggcaccacctcagtgaggcygcggcgcagggcagagagacgccacacagccaccagccgcagcaccaggatcatgattcatcagaaagtggcatgctgtcccgcctgggtgatttgctcttttacactattgctgaaggacaggaacgaatccctatccacaagttcaccactgcactaaaggccactggactgcagacatcagatcctcggctccgagactgcatgagcgagatgcaccgcgtggtccaagagtccagtagtggtggcctcttggaccgagatctcttccgaaagtgtgtgagcagcaacattgtgctcctgacccaggcattccgaaagaagtttgtcattcctgattttgaggagttcacgggccatgtggatcgcatctttgaggatgtcaaagagctcactggaggcaaagtggcagcctacatccctcagctggccaagtcaaacccagacctgtggggtgtctccctgtgcactgtggatggtcaacggcactctgtgggccacacaaagatccccttctgcctgcagtcctgtgtgaagcccctcacctatgccatctccataagcaccctaggcactgactacgtgcacaagtttgtgggcaaagagccaagtggcctgcgctacaacaagctctccctcaatgaggaaggaatcccccataaccccatggtcaatgctggtgccattgttgtcagctccctgatcaagatggactgtaacaaagcagagaagtttgattttgtgttgcagtatctcaacaaaatggctgggaatgaatacatgggtttcagcaatgccacattccagtcagagaaggaaacaggggatcggaattatgccatcggctattatctcaaggaaaagaagtgctttcctaagggrgtggacatgatggctgcccttgatctctacttccagctgtgttctgtggaggtcacttgtgaatcaggcagtgtcatggcagccaccctcgccaacggtgggatctgccccatcacaggcgagagtgtgctgagtgctgaagcagtgcgcaacaccctcagcctcatgcattcctgcggcatgtatgacttctctggccagtttgccttccacgtgggcctgccagccaagtcagctgtatcaggagccatcctcctggtggtacccaatgtcatgggaatgatgtgcctgtcacccccattggacaagctggggaacagccatagggggaccagcttctgccagaagttggtgtctctcttcaatttccacaactatgacaacctgaggcactgtgctcggaagttagacccacggcgtgaaggggcagaaattcggaacaagactgtggtcaacctgttatttgctgcctatagtggcgatgtctcagctcttcgaaggtttgccttrtcagccatggatatggaacagaaagactatgactcgcgcacagctctgcatgttgctgcagctgaaggacacatcgaagttgttaaattcctgatcgaggcttgcaaagtgaatccttttgccaaggacaggtggggcaacattcccctggatgatgctgtgcagttcaaccatctggaggtggtcaaactgcttcaagattaccaggactcctacacacyctctgaaactcaggctgaggcagcagctgaggccctgtccaaagagaacttagaaagcatggtatgagcacaggtcatggacagcccctgctcaagaaaaagcatgagctggccacacatgtaatccataaccaccaaaaatactatggagagctacactgcttcagtggggaccaagcagtcatttggtgacttaggctagtgctttctatgggagtcaaaataccccattccctcagcagacagagtacagagaagggcctcagaggacacctgcagtasagctatccagagagamtgggcttcaaggtacagcctaatggcttgccccactcaaaaccatcccagctcttcacccaggtctcctcttcctctccctgaagaaaccatcatgagagagatactctggtggagggactctagctaccatgcacatgtacatatccacagaatatgggaagtgggaatggctatatacatggctttagtagtctggagaaatctactccccttggccaggacatgctgctgctactgctaacagccaattttatagacagagaaagtattttgtgttcaaataaactttaattaccaaatcatttttgctaaacccagtccttctttcttccctaggggtatctagcttcatcaccatcatagaaggtagaaaaagatggaatcacagggtcaaagcacagcttctctacctaccctaccaaacagtacatattcacttaccccaccaggtttttctcaactccaaatactgctttaggttaagtgtattctgctgccaagggaagcataggtttgagtctaaacaggctctgaaacagattgtgcaaaacctcaggcctccttccttcctcgggaagttccaactgtggcagaaatgaagatggaacttctcaagaataaacagttttggccgggtgtggtggctcacgcctgaaatcccagcactttgggaggccaaggtgggctgatcacatgaggccaggagttcgagaccagcctggccaatatggcaaaaccccatctctactaaaaatataaaaatgagacgggcatggtggcacacacctgtaatcctagctactcaggaggctgaggcacgagagtcgcttgaacccaaaaggcagagtttgcagtgagccaagatcatgccactgcactccagcctgggtgacagagtgagactctgtctcaaaaataaataaatagtttctagcactcatcccctagatatcccccaagtgtctctcttcccctttggtcaaggttataactgggataatgattatgacagactggctgggtgtcagaggtacagatttaaggtagatggactcagggtaaggatagctacagctgtgtggggctgaaggtctgtggcactgagctactggggaaggagggctctgttttcattttgacacactgagttaataaagcacttactgagggagccagagcccaaactctaaatgtgctgtagaaaaagggccaagtcattgactgcaccactccttcagccagagg

SEQ ID NO: 5007 - DNA, 2439 bp, Homo sapiens
cttctcgagaactcgcagagctgggctggtaaaattgcagtgctgaagacactggacccgcaaaaggctgtccctcccaaacctgggattctgggctcactgagttcacctgcgagtcagccctacctgcactgctctggtctagtayaaacaggctgctggcattgagggacggagtctccaactcctggcctctagcagtcctcctgtgtaggtctcccaaagtgctagtgtgtccggaattggtgggttcttggtctcactgacttcaagaatgaagccgcggaccctcgcagtctgctacaatgctgctgctgcacagagctgtggtcctcaggctccaacaggcctgcagactcaagtcaatcccctcaaggatctgcattcaggcctgctccacaaatgattcatttcagccccagcgccccagcctcaccttctctggtgataactccagcacccagggatggagagtcatggggaccctattaggtctcggtgcagtgttggcctatcaggaccatcggtgtagkgctgctcaggagtcaacacacatatacactaaggaggaagtgagttcccacaccagccctgagactgggatctgggtgactctgggctctgaggtctttgatgtcacagaatttgtggacctacatccaggggggccttcaaagctgatgctagcagctgggggtcccctagagcccttctgggccctctatgctgttcacaaccagtcccatgtgcgtgagttactggctcagtacaagattggggagctgaatcctgaagacaaggtagcccccaccgtggagacctctgacccttatgctgatgatcctgtacgtcacccagccctgaaggtcaacagccagcggccctttaatgcagagcctccccctgagctgctgacagaaaactacatcacacccaaccctatcttcttcacccrgaaccatctgcctgtacctaacctggatccagacacctatcgcttacacgtagtaggagcacctgggggtcagtcactgtctctttccctggatgacttgcacaactttcccaggtacgagmtcacagtcactctgcagtgtgmcggcaaccracgctctgagatgactcaggtcaaagaagtaaaaggtctggagtggagaacaggagccatcagcactgcacgctgggctggggcacggctctgtgatgtgttagcccaggctggccaccaactctgtgaaactgaggcccacgtctgctttgagggactggactcagaccctactgggactgcctatggagcatccatccctctggctcgggccatggaccctgaagctgaggtcctgctggcatatgagatgaatgggcagcctytgccacgtgaccacrgcttccctgtgcrtgtggtggttcctggagtggtgggtgccygccatgtcaratggctgggcagagtgagtgtgcagccagaggaaagttacagccactggcracggcgggattasaaaggcttctctccatctgtggactgggagactgtagattttgactctgctccatccattyaggaacttcctgtccagtmbgccatcacagagcccygggatggagagactgtagaatcaggggaggtgaccatcaagggctatgcayggagtggtggtggcagggctgtgatccgggtggatgtgtctctggatgggggcctaacctggcaggtggctaagctggatggagaggaacagcgccccaggaaggcctgggcatggcgtctgtggcagttgaaagcccctgtgccagctggacaaaaggaactgaacattgtttgtaaggctgtggatgatggttacaatgtgcagccagacaccgtggccccaatctggaacctgcgagrtgttctcagcaatgcctggcatcgtgtccatgtctatgtctccccatgagcatggaaaggagccacctccacccctttccccacccattagcctcactgcttcagaaaaatctttcccacctttcaacttcttggatcacaactctggccttcctaagccatacccaagtacacatatagcacatttcacccaaggaccttccctctttggacactatgttacatacccctcttggcctttgaacctgtgccaggaagtgtgagctgttacagcaaggggctagaagtgaaaaaagtaattctggagacaagcactattttctcttcctaccccacctccatttctaatgcctactgccatcaaggccttgttttgcttttctttttggattgttcagagaaatgtgtgtggcatgtgtaagaaaagtgtatatactatcttatactacctctccaggttgccagagagttgcgaggagagcaaggggcacaaccgtctccctttatagttctacttttctaataaatagtctgtttaagatcat

SEQ ID NO: 5008 - DNA, 2303 bp, Homo sapiens
ggtaaaattgcagtgctgaagacactggacccgggacggagtctccaactcctggcctctagcagtcctcctgtgtaggtctcccaaagtgctagtgtgtccggaattggtgggttcttggtctcactgacttcaagaatgaagccgcggaccctcgcagtctgctacaatgctgctgctgcacagagctgtggtcctcaggctccaacaggcctgcagactcaagtcaatcccctcaaggatctgcattcaggcctgctccacaaatgattcatttcagccccagcgccccagcctcaccttctctggtgataactccagcacccagggatggagagtcatggggaccctattaggtctcggtgcagtgttggcctatcaggaccatcggtgtagkgctgctcaggagtcaacacacatatacactaaggaggaagtgagttcccacaccagccctgagactgggatctgggtgactctgggctctgaggtctttgatgtcacagaatttgtggacctacatccaggggggccttcaaagctgatgctagcagctgggggtcccctagagcccttctgggccctctatgctgttcacaaccagtcccatgtgcgtgagttactggctcagtacaagattggggagctgaatcctgaagacaaggtagcccccaccgtggagacctctgacccttatgctgatgatcctgtacgtcacccagccctgaaggtcaacagccagcggccctttaatgcagagcctccccctgagctgctgacagaaaactacatcacacccaaccctatcttcttcacccrgaaccatctgcctgtacctaacctggatccagacacctatcgcttacacgtagtaggagcacctgggggtcagtcactgtctctttccctggatgacttgcacaactttcccaggtacgagmtcacagtcactctgcagtgtgmcggcaaccracgctctgagatgactcaggtcaaagaagtaaaaggtctggagtggagaacaggagccatcagcactgcacgctgggctggggcacggctctgtgatgtgttagcccaggctggccaccaactctgtgaaactgaggcccacgtctgctttgagggactggactcagaccctactgggactgcctatggagcatccatccctctggctcgggccatggaccctgaagctgaggtcctgctggcatatgagatgaatgggcagcctytgccacgtgaccacrgcttccctgtgcrtgtggtggttcctggagtggtgggtgccygccatgtcaratggctgggcagagtgagtgtgcagccagaggaaagttacagccactggcracggcgggattasaaaggcttctctccatctgtggactgggagactgtagattttgactctgctccatccattyaggaacttcctgtccagtmbgccatcacagagcccygggatggagagactgtagaatcaggggaggtgaccatcaagggctatgcayggagtggtggtggcagggctgtgatccgggtggatgtgtctctggatgggggcctaacctggcaggtggctaagctggatggagaggaacagcgccccaggaaggcctgggcatggcgtctgtggcagttgaaagcccctgtgccagctggacaaaaggaactgaacattgtttgtaaggctgtggatgatggttacaatgtgcagccagacaccgtggccccaatctggaacctgcgagrtgttctcagcaatgcctggcatcgtgtccatgtctatgtctccccatgagcatggaaaggagccacctccacccctttccccacccattagcctcactgcttcagaaaaatctttcccacctttcaacttcttggatcacaactctggccttcctaagccatacccaagtacacatatagcacatttcacccaaggaccttccctctttggacactatgttacatacccctcttggcctttgaacctgtgccaggaagtgtgagctgttacagcaaggggctagaagtgaaaaaagtaattctggagacaagcactattttctcttcctaccccacctccatttctaatgcctactgccatcaaggccttgttttgcttttctttttggattgttcagagaaatgtgtgtggcatgtgtaagaaaagtgtatatactatcttatactacctctccaggttgccagagagttgcgaggagagcaaggggcacaaccgtctccctttatagttctacttttctaataaatagtctgtttaagatcat

SEQ ID NO: 5009 - DNA, 2922 bp, Homo sapiens
tctcttactgtgggtaatttagtaattaaactataagaggtatgtatgtatgggggaaaaaacagtaatatagggtttggtgcaatctgtggtttcaaacatctactgggggtcgtagaacatatccccagtggataagggggtactactgtacttgttgrctcttcatgttagctctgctaggcagatgtcatttcagagawgaggaagcaagttcagaacggcttggaatcttgctcaggaaatcgggctggttaatgaataacaagagatccagtttcacaaacccaaggcattttgcccccagaatctgggcttcttcacccatttaggctgtcactacttttttttcacttttttatccctgtttaagtcagtctgacccacagttgtcctctgctgacttcagaaataataatctggccagtagacatttggtttcggtcctttaggcccttcgccccaggcatcrttctctatggtggacaaagttcagaatggaagatgggagaaaggtgattctgattctagaagcacccatccctcctaccccattccccacccgcattacctgccatcctgtcagcacagtctgtctctgaagtgctccaagttttctctaagggcccatttggactcccactctcaagactcctcacttgcccagaaagctccttgctgaccttctctgtgtcttcctctcacccattcccttaggcctccctaatatcccctcccagggtctccctatcttgatcccagaatcttccttctacaggtctgctacaatgctgctgctgcacagagctgtggtcctcaggctccaacaggcctgcagactcaagtcaatcccctcaaggatctgcattcaggcctgctccacaaatgattcatttcagccccagcgccccagcctcaccttctctggtgataactccagcacccagggatggagagtcatggggaccctattaggtctcggtgcagtgttggcctatcaggaccatcggtgtagkgctgctcaggagtcaacacacatatacactaaggaggaagtgagttcccacaccagccctgagactgggatctgggtgactctgggctctgaggtctttgatgtcacagaatttgtggacctacatccaggggggccttcaaagctgatgctagcagctgggggtcccctagagcccttctgggccctctatgctgttcacaaccagtcccatgtgcgtgagttactggctcagtacaagattggggagctgaatcctgaagacaaggtagcccccaccgtggagacctctgacccttatgctgatgatcctgtacgtcacccagccctgaaggtcaacagccagcggccctttaatgcagagcctccccctgagctgctgacagaaaactacatcacacccaaccctatcttcttcacccrgaaccatctgcctgtacctaacctggatccagacacctatcgcttacacgtagtaggagcacctgggggtcagtcactgtctctttccctggatgacttgcacaactttcccaggtacgagmtcacagtcactctgcagtgtgmcggcaaccracgctctgagatgactcaggtcaaagaagtaaaaggtctggagtggagaacaggagccatcagcactgcacgctgggctggggcacggctctgtgatgtgttagcccaggctggccaccaactctgtgaaactgaggcccacgtctgctttgagggactggactcagaccctactgggactgcctatggagcatccatccctctggctcgggccatggaccctgaagctgaggtcctgctggcatatgagatgaatgggcagcctytgccacgtgaccacrgcttccctgtgcrtgtggtggttcctggagtggtgggtgccygccatgtcaratggctgggcagagtgagtgtgcagccagaggaaagttacagccactggcracggcgggattasaaaggcttctctccatctgtggactgggagactgtagattttgactctgctccatccattyaggaacttcctgtccagtmbgccatcacagagcccygggatggagagactgtagaatcaggggaggtgaccatcaagggctatgcayggagtggtggtggcagggctgtgatccgggtggatgtgtctctggatgggggcctaacctggcaggtggctaagctggatggagaggaacagcgccccaggaaggcctgggcatggcgtctgtggcagttgaaagcccctgtgccagctggacaaaaggaactgaacattgtttgtaaggctgtggatgatggttacaatgtgcagccagacaccgtggccccaatctggaacctgcgagrtgttctcagcaatgcctggcatcgtgtccatgtctatgtctccccatgagcatggaaaggagccacctccacccctttccccacccattagcctcactgcttcagaaaaatctttcccacctttcaacttcttggatcacaactctggccttcctaagccatacccaagtacacatatagcacatttcacccaaggaccttccctctttggacactatgttacatacccctcttggcctttgaacctgtgccaggaagtgtgagctgttacagcaaggggctagaagtgaaaaaagtaattctggagacaagcactattttctcttcctaccccacctccatttctaatgcctactgccatcaaggccttgttttgcttttctttttggattgttcagagaaatgtgtgtggcatgtgtaagaaaagtgtatatactatcttatactacctctccaggttgccagagagttgcgaggagagcaaggggcacaaccgtctccctttatagttctacttttctaataaatagtctgtttaagatcat

SEQ ID NO: 5010 - DNA, 2313 bp, Homo sapiens
cttctcgagaactcgcagagctgggctggtaaaattgcagtgctgaagacactggacccgcaaaaggctgtccctcccaaacctgggattctgggctcactgagttcacctgcgagtcagccctacctgcactgctctggtctagtayaaacaggctgctggcattgaggtctgctacaatgctgctgctgcacagagctgtggtcctcaggctccaacaggcctgcagactcaagtcaatcccctcaaggatctgcattcaggcctgctccacaaatgattcatttcagccccagcgccccagcctcaccttctctggtgataactccagcacccagggatggagagtcatggggaccctattaggtctcggtgcagtgttggcctatcaggaccatcggtgtagkgctgctcaggagtcaacacacatatacactaaggaggaagtgagttcccacaccagccctgagactgggatctgggtgactctgggctctgaggtctttgatgtcacagaatttgtggacctacatccaggggggccttcaaagctgatgctagcagctgggggtcccctagagcccttctgggccctctatgctgttcacaaccagtcccatgtgcgtgagttactggctcagtacaagattggggagctgaatcctgaagacaaggtagcccccaccgtggagacctctgacccttatgctgatgatcctgtacgtcacccagccctgaaggtcaacagccagcggccctttaatgcagagcctccccctgagctgctgacagaaaactacatcacacccaaccctatcttcttcacccrgaaccatctgcctgtacctaacctggatccagacacctatcgcttacacgtagtaggagcacctgggggtcagtcactgtctctttccctggatgacttgcacaactttcccaggtacgagmtcacagtcactctgcagtgtgmcggcaaccracgctctgagatgactcaggtcaaagaagtaaaaggtctggagtggagaacaggagccatcagcactgcacgctgggctggggcacggctctgtgatgtgttagcccaggctggccaccaactctgtgaaactgaggcccacgtctgctttgagggactggactcagaccctactgggactgcctatggagcatccatccctctggctcgggccatggaccctgaagctgaggtcctgctggcatatgagatgaatgggcagcctytgccacgtgaccacrgcttccctgtgcrtgtggtggttcctggagtggtgggtgccygccatgtcaratggctgggcagagtgagtgtgcagccagaggaaagttacagccactggcracggcgggattasaaaggcttctctccatctgtggactgggagactgtagattttgactctgctccatccattyaggaacttcctgtccagtmbgccatcacagagcccygggatggagagactgtagaatcaggggaggtgaccatcaagggctatgcayggagtggtggtggcagggctgtgatccgggtggatgtgtctctggatgggggcctaacctggcaggtggctaagctggatggagaggaacagcgccccaggaaggcctgggcatggcgtctgtggcagttgaaagcccctgtgccagctggacaaaaggaactgaacattgtttgtaaggctgtggatgatggttacaatgtgcagccagacaccgtggccccaatctggaacctgcgagrtgttctcagcaatgcctggcatcgtgtccatgtctatgtctccccatgagcatggaaaggagccacctccacccctttccccacccattagcctcactgcttcagaaaaatctttcccacctttcaacttcttggatcacaactctggccttcctaagccatacccaagtacacatatagcacatttcacccaaggaccttccctctttggacactatgttacatacccctcttggcctttgaacctgtgccaggaagtgtgagctgttacagcaaggggctagaagtgaaaaaagtaattctggagacaagcactattttctcttcctaccccacctccatttctaatgcctactgccatcaaggccttgttttgcttttctttttggattgttcagagaaatgtgtgtggcatgtgtaagaaaagtgtatatactatcttatactacctctccaggttgccagagagttgcgaggagagcaaggggcacaaccgtctccctttatagttctacttttctaataaatagtctgtttaagatcat

SEQ ID NO: 5011 - DNA, 1850 bp, Homo sapiens
agccagttcacccaatggacctgcctactgcagcgtaggcctcgcctcaacggcaggagagcaggcggctgcggttgctgcagccttcagtctccacccggactacgccatgttggggtttgtgggtcgggtggccgctgctccggcctccggggccttgcggagactcaccccttcagcgtygctgcccccagctcagctcttactgcgggccgctccgacggcggtccatcctgtcagggactatgcggcgcaaacatctccttcgccaaaagcaggcgccgccaccgggcgcatcgtggcggtcattggcgcagtggtggacgtccagtttgatgagggactaccaccaattctaaatgccctggaagtgcaaggcagggagaccagactggttttggaggtggcccagcatttgggtgagagcacagtaaggactattgctatggatggtacagaaggcttggttagaggccagaaagtactggattctggtgcaccaatcaaaattcctgttggtcctgagactttgggcagaatcatgaatgtcattggagaacctattgatgaaagaggtcccatcaaaaccaaacaatttgctcccattcatgctgaggctccagagttcatggaaatgagtgttgagcaggaaattctggtgactggtatcaaggttgtcgatctgctagctccctatgccaagggtggcaaaattgggctttttggtggtgctggagttggcaagactgtactgatcatggagttaatcaacaatgtcgccaaagcccatggtggttactctgtgtttgctggtgttggtgagaggacccgtgaaggcaatgatttataccatgaaatgattgaatctggtgttatcaacttaaaagatgccacctctaaggtagcgctggtatatggtcaaatgaatgaaccacctggtgctcgtgcccgggtagctctgactgggctgactgtggctgaatacttcagagaccaagaaggtcaagatgtactgctatttattgataacatctttcgcttcacccaggctggttcagaggtgtctgcattattgggccgaatcccttctgctgtgggctatcagcctaccctggccactgacatgggyactatgcaggaaagaattaccactaccaagaagggatctatcacctctgtacaggctatctatgtgcctgctgatgacttgactgaccctgcccctgctactacgtttgcccatttggatgctaccactgtactgtcgcgtgccattgctgagctgggcatctatccagctgtggatcctctagactccacctctcgtatcatggatcccaacattgttggcagtgagcattacgatgttgcccgtggggtgcaaaagatcctgcaggactacaaatccctccaggatatcattgccatcctgggtatggatgaactttctgaggaagacaagttgaccgtgtcccgtgcacggaaaatacagcgtttcttgtctcagccattccaggttgctgaggtcttcacaggtcatatggggaagctggtacccctgaaggagaccatcaaaggattccagcagattttggcaggtgaatatgaccatctcccagaacaggccttctatatggtgggaccyattgaagaagctgtggcaaaagctgataagctggctgaagagcattcatcgtgaggggtctttgtcctctgtactgtctctctccttgcccctaacccaaaaagcttcatttttytrtgtaggctgcacaagagccttgattgaagatatattctttytgaacagtatttaaggtttccaataaaatgtacacccctcagaattt

SEQ ID NO: 5012 - DNA, 2966 bp, Homo sapiens
ctccatctctctcccttgctgtaccaccttcaccascatccatgcgaccccaagagccttaatgactctagaagagactccaggcaggggaagctgaaaggacctttcactccctacttttggccagggccttctgtgccacctgccaagaccagcaggtaaagcctaccctctgaagaggtccaagcaacggaagtactactacgaagctgcctttctggccatccttgagaaaaatagacagatggccaaggagaggggcctaataagccccagtgattttgcccagctgcaaaaatacatggaatactccaccaaaaaggtcagtgatgtcctaaagctcttcgaggatggcgagatggctaaatatgtccaaggagatgccattgggtacgagggattccagcaattcctgaaaatctatctcgaagtggataatgttcccagacacctaagcctggcactgtttcaatcctttgagactggtcactgcttaaatgagacaaatgtgacaaaaggtatggtcaagcagatgtggtgtgtctcartgatgtttcctgctacttttcccttctggagggtggtcggccagaagacaagttagaattcaccttcaagctgtacgacacggacagaaatgggatcctggacagctcagaagtggacaaaattatcctacagatgatgcgagtggctgaatacctggattgggatgtgtctgagctgaggccgattcttcaggagatgatgaaagagattgactatgatggcagtggctctgtctctcaagctgagtgggtccgggctggggccaccaccgtgccactgctagtgctgctgggtctggagatgactctgaaggaygacggacagcacatgtggaggcccaagaggttccccagaccagtctactgcaatctgtgcgagtcaagcattggtcttggcaaacagggactgagctgtaacctctgtaagtacactgttcacgaccagtgtgccatgaaagccctgccttgtgaagtcagcacctatgccaagtctcggaaggacattggtgtccaatcacatgtgtgggtgcgaggaggctgtgagtccgggcgctgcgaccgctgtcagaaaaagatccggatctaccacagtctgaccgggctgcattgtgtatggtgccacctagagatccacgatgactgcctgcaagcggtgggccatgagtgtgactgtgggctgctccgggatcacatcctgcctccatcttccatctatcccagtgtcctggcctctggaccggatcgtaaaaatagcaaaacaagccagaagaccatggatgatttaaatttgagcacctctgaggctctgcggattgaccctgttcctaacacccacccacttctcgtctttgtcaatcctaagagtggcgggaagcaggggcaragggtgctctggaagttccartatatattaaaccctcgacaggtgttcaacctcctaaaggatggtcctgagatagggctccgattattcaaggatgttcctgatagccggattttggtgtgtggtggagacggcacagtaggctggattctagagaccattgacaaagctaacttgccagttttgcctcctgttgctgtgttgcccctgggtactggaaatgatctggctcgatgcctaagatggggaggaggktatgaaggacagaatctggcaaagatcctcaaggatttagagatgagtaaagtggtacatatggatcgatggtctgtggaggtgatacctcaacaaactgaagaaaaaagtgacccagtcccctttcaaatcatcaataactacttctctattggcgtggatgcctctattgctcatcgattccacatcatgcgagagaaatatccggagaagttcaacagcagaatgaagaacaagctatggtacttcgaatttgccacatctgaatccatcttctcaacatgcaaaaagctggaggagtctttgacagttgagatctgtgggaaaccgctggatctgagcaacctgtccctagaaggcatcgcagtgctaaacatccctagcatgcatggtggctccaacctctggggtgataccaggagaccccatggggatatctatgggatcaaccaggccttaggtgctacagctaaagtcatcaccgaccctgatatcctgaaaacctgtgtaccagacctaagtgacaagagactggaagtggttgggctggagggtgcaattgagatgggccaaatytataccaagctcaagaatgctggacgtcggctggccaagtgctctgagatcaccttccacaccacaaaaacccttcccatgcaaattgacggagaaccctggatgcagacgccctgtacagtgagtattgacgatcccagccaaaaattaaacccttgggctccatggatcctaaatccccattccacagcttctttacacccttctgatgcctgaacttcccctgcacatcattcatcctaaaccctgatttctcagcccctggtttccctatcgtggcctctctaggaacctagcaacccaccccaaaccccacagatttccctctaaatctctgaagccacagccccaaagtatcaggtcctgcctctgaatgtgctcccttcccttccagatcaagatcacccacaagaaccagatgcccatgctcatgggcccacccccccgctccaccaatttctttggcttcttgagctaagggggacacccttggcctccaagccagccttgaacccacctccctcactgttccccatgcgcacacacatacacacaccccaaaacacatacattgaaagtgcctcatctgaataaaatgacttgtgtttcccctttgggatctgctaagtaagtggtacacttccttctttyawaccttcactccttaaatgacgtagattctcccaagaagcaacagaaaaacc

SEQ ID NO: 5013 - DNA, 3075 bp, Homo sapiens
ggaaacctagaaacgggcctctccaacttcgaagttcccagagtcgggggcgccgggcgcgggcgcggcgggcaggctggggtggggggcgggcagctatgtcgtcaggaacggggcggccccgctgcggccgcgtctgcctggcccgtcccctccagcccagctcgggctccagctccagcgccggcgcttcagctgcgaccgcgagccctctcaagcaaggtagagaccccgcgagccccccagcgccccaccctcccccatcggaaaaggacaggggtagggaagccgaggacccacgggctgcgttcgtgctgctgggtcgggaaggaggaagcgtgacagctggagcggatataacttccccaagtcacacagtggtatcagagctaagaatgggacccagatatgactgatctagttctgttccaaaaccgtgctgtattatattaacgcctaccctctgaagaggtccaagcaacggaagtactactacgaagctgcctttctggccatccttgagaaaaatagacagatggccaaggagaggggcctaataagccccagtgattttgcccagctgcaaaaatacatggaatactccaccaaaaaggtcagtgatgtcctaaagctcttcgaggatggcgagatggctaaatatgtccaaggagatgccattgggtacgagggattccagcaattcctgaaaatctatctcgaagtggataatgttcccagacacctaagcctggcactgtttcaatcctttgagactggtcactgcttaaatgagacaaatgtgacaaaagatgtggtgtgtctcartgatgtttcctgctacttttcccttctggagggtggtcggccagaagacaagttagaattcaccttcaagctgtacgacacggacagaaatgggatcctggacagctcagaagtggacaaaattatcctacagatgatgcgagtggctgaatacctggattgggatgtgtctgagctgaggccgattcttcaggagatgatgaaagagattgactatgatggcagtggctctgtctctcaagctgagtgggtccgggctggggccaccaccgtgccactgctagtgctgctgggtctggagatgactctgaaggaygacggacagcacatgtggaggcccaagaggttccccagaccagtctactgcaatctgtgcgagtcaagcattggtcttggcaaacagggactgagctgtaacctctgtaagtacactgttcacgaccagtgtgccatgaaagccctgccttgtgaagtcagcacctatgccaagtctcggaaggacattggtgtccaatcacatgtgtgggtgcgaggaggctgtgagtccgggcgctgcgaccgctgtcagaaaaagatccggatctaccacagtctgaccgggctgcattgtgtatggtgccacctagagatccacgatgactgcctgcaagcggtgggccatgagtgtgactgtgggctgctccgggatcacatcctgcctccatcttccatctatcccagtgtcctggcctctggaccggatcgtaaaaatagcaaaacaagccagaagaccatggatgatttaaatttgagcacctctgaggctctgcggattgaccctgttcctaacacccacccacttctcgtctttgtcaatcctaagagtggcgggaagcaggggcaragggtgctctggaagttccartatatattaaaccctcgacaggtgttcaacctcctaaaggatggtcctgagatagggctccgattattcaaggatgttcctgatagccggattttggtgtgtggtggagacggcacagtaggctggattctagagaccattgacaaagctaacttgccagttttgcctcctgttgctgtgttgcccctgggtactggaaatgatctggctcgatgcctaagatggggaggaggktatgaaggacagaatctggcaaagatcctcaaggatttagagatgagtaaagtggtacatatggatcgatggtctgtggaggtgatacctcaacaaactgaagaaaaaagtgacccagtcccctttcaaatcatcaataactacttctctattggcgtggatgcctctattgctcatcgattccacatcatgcgagagaaatatccggagaagttcaacagcagaatgaagaacaagctatggtacttcgaatttgccacatctgaatccatcttctcaacatgcaaaaagctggaggagtctttgacagttgagatctgtgggaaaccgctggatctgagcaacctgtccctagaaggcatcgcagtgctaaacatccctagcatgcatggtggctccaacctctggggtgataccaggagaccccatggggatatctatgggatcaaccaggccttaggtgctacagctaaagtcatcaccgaccctgatatcctgaaaacctgtgtaccagacctaagtgacaagagactggaagtggttgggctggagggtgcaattgagatgggccaaatytataccaagctcaagaatgctggacgtcggctggccaagtgctctgagatcaccttccacaccacaaaaacccttcccatgcaaattgacggagaaccctggatgcagacgccctgtacaatcaagatcacccacaagaaccagatgcccatgctcatgggcccacccccccgctccaccaatttctttggcttcttgagctaagggggacacccttggcctccaagccagccttgaacccacctccctgtccctggactctactcccgaggctctgtacattgctgccacatactcctgccagcttgggggagtgttccttcaccctcacagtatttattatcctgcaccacctcactgttccccatgcgcacacacatacacacaccccaaaacacatacattgaaagtgcctcatctgaataaaatgacttgtgtttcccctttgggatctgctaagtaagtggtacacttccttctttyawaccttcactccttaaatgacgtagattctcccaagaagcaacagaaaaacc

SEQ ID NO: 5014 - DNA, 2621 bp, Homo sapiens
gcctaccctctgaagaggtccaagcaacggaagtactactacgaagctgcctttctggccatccttgagaaaaatagacagatggccaaggagaggggcctaataagccccagtgattttgcccagctgcaaaaatacatggaatactccaccaaaaaggtcagtgatgtcctaaagctcttcgaggatggcgagatggctaaatatgtccaaggagatgccattgggtacgagggattccagcaattcctgaaaatctatctcgaagtggataatgttcccagacacctaagcctggcactgtttcaatcctttgagactggtcactgcttaaatgagacaaatgtgacaaaagatgtggtgtgtctcartgatgtttcctgctacttttcccttctggagggtggtcggccagaagacaagttagaattcaccttcaagctgtacgacacggacagaaatgggatcctggacagctcagaagtggacaaaattatcctacagatgatgcgagtggctgaatacctggattgggatgtgtctgagctgaggccgattcttcaggagatgatgaaagagattgactatgatggcagtggctctgtctctcaagctgagtgggtccgggctggggccaccaccgtgccactgctagtgctgctgggtctggagatgactctgaaggaygacggacagcacatgtggaggcccaagaggttccccagaccagtctactgcaatctgtgcgagtcaagcattggtcttggcaaacagggactgagctgtaacctctgtaagtacactgttcacgaccagtgtgccatgaaagccctgccttgtgaagtcagcacctatgccaagtctcggaaggacattggtgtccaatcacatgtgtgggtgcgaggaggctgtgagtccgggcgctgcgaccgctgtcagaaaaagatccggatctaccacagtctgaccgggctgcattgtgtatggtgccacctagagatccacgatgactgcctgcaagcggtgggccatgagtgtgactgtgggctgctccgggatcacatcctgcctccatcttccatctatcccagtgtcctggcctctggaccggatcgtaaaaatagcaaaacaagccagaagaccatggatgatttaaatttgagcacctctgaggctctgcggattgaccctgttcctaacacccacccacttctcgtctttgtcaatcctaagagtggcgggaagcaggggcaragggtgctctggaagttccartatatattaaaccctcgacaggtgttcaacctcctaaaggatggtcctgagatagggctccgattattcaaggatgttcctgatagccggattttggtgtgtggtggagacggcacagtaggctggattctagagaccattgacaaagctaacttgccagttttgcctcctgttgctgtgttgcccctgggtactggaaatgatctggctcgatgcctaagatggggaggaggktatgaaggacagaatctggcaaagatcctcaaggatttagagatgagtaaagtggtacatatggatcgatggtctgtggaggtgatacctcaacaaactgaagaaaaaagtgacccagtcccctttcaaatcatcaataactacttctctattggcgtggatgcctctattgctcatcgattccacatcatgcgagagaaatatccggagaagttcaacagcagaatgaagaacaagctatggtacttcgaatttgccacatctgaatccatcttctcaacatgcaaaaagctggaggagtctttgacagttgagatctgtgggaaaccgctggatctgagcaacctgtccctagaaggcatcgcagtgctaaacatccctagcatgcatggtggctccaacctctggggtgataccaggagaccccatggggatatctatgggatcaaccaggccttaggtgctacagctaaagtcatcaccgaccctgatatcctgaaaacctgtgtaccagacctaagtgacaagagactggaagtggttgggctggagggtgcaattgagatgggccaaatytataccaagctcaagaatgctggacgtcggctggccaagtgctctgagatcaccttccacaccacaaaaacccttcccatgcaaattgacggagaaccctggatgcagacgccctgtacaatcaagatcacccacaagaaccagatgcccatgctcatgggcccacccccccgctccaccaatttctttggcttcttgagctaagggggacacccttggcctccaagccagccttgaacccacctccctgtccctggactctactcccgaggctctgtacattgctgccacatactcctgccagcttgggggagtgttccttcaccctcacagtatttattatcctgcaccacctcactgttccccatgcgcacacacatacacacaccccaaaacacatacattgaaagtgcctcatctgaataaaatgacttgtgtttcccctttgggatctgctaagtaagtggtacacttccttctttyawaccttcactccttaaatgacgtagattctcccaagaagcaacagaaaaacc

SEQ ID NO: 5015 - DNA, 2691 bp, Homo sapiens
ctccagcccagctcgggctccagctccagcgccggcgcttcagctgcgaccgcgagccctctcaagcaaggcctaccctctgaagaggtccaagcaacggaagtactactacgaagctgcctttctggccatccttgagaaaaatagacagatggccaaggagaggggcctaataagccccagtgattttgcccagctgcaaaaatacatggaatactccaccaaaaaggtcagtgatgtcctaaagctcttcgaggatggcgagatggctaaatatgtccaaggagatgccattgggtacgagggattccagcaattcctgaaaatctatctcgaagtggataatgttcccagacacctaagcctggcactgtttcaatcctttgagactggtcactgcttaaatgagacaaatgtgacaaaagatgtggtgtgtctcartgatgtttcctgctacttttcccttctggagggtggtcggccagaagacaagttagaattcaccttcaagctgtacgacacggacagaaatgggatcctggacagctcagaagtggacaaaattatcctacagatgatgcgagtggctgaatacctggattgggatgtgtctgagctgaggccgattcttcaggagatgatgaaagagattgactatgatggcagtggctctgtctctcaagctgagtgggtccgggctggggccaccaccgtgccactgctagtgctgctgggtctggagatgactctgaaggaygacggacagcacatgtggaggcccaagaggttccccagaccagtctactgcaatctgtgcgagtcaagcattggtcttggcaaacagggactgagctgtaacctctgtaagtacactgttcacgaccagtgtgccatgaaagccctgccttgtgaagtcagcacctatgccaagtctcggaaggacattggtgtccaatcacatgtgtgggtgcgaggaggctgtgagtccgggcgctgcgaccgctgtcagaaaaagatccggatctaccacagtctgaccgggctgcattgtgtatggtgccacctagagatccacgatgactgcctgcaagcggtgggccatgagtgtgactgtgggctgctccgggatcacatcctgcctccatcttccatctatcccagtgtcctggcctctggaccggatcgtaaaaatagcaaaacaagccagaagaccatggatgatttaaatttgagcacctctgaggctctgcggattgaccctgttcctaacacccacccacttctcgtctttgtcaatcctaagagtggcgggaagcaggggcaragggtgctctggaagttccartatatattaaaccctcgacaggtgttcaacctcctaaaggatggtcctgagatagggctccgattattcaaggatgttcctgatagccggattttggtgtgtggtggagacggcacagtaggctggattctagagaccattgacaaagctaacttgccagttttgcctcctgttgctgtgttgcccctgggtactggaaatgatctggctcgatgcctaagatggggaggaggktatgaaggacagaatctggcaaagatcctcaaggatttagagatgagtaaagtggtacatatggatcgatggtctgtggaggtgatacctcaacaaactgaagaaaaaagtgacccagtcccctttcaaatcatcaataactacttctctattggcgtggatgcctctattgctcatcgattccacatcatgcgagagaaatatccggagaagttcaacagcagaatgaagaacaagctatggtacttcgaatttgccacatctgaatccatcttctcaacatgcaaaaagctggaggagtctttgacagttgagatctgtgggaaaccgctggatctgagcaacctgtccctagaaggcatcgcagtgctaaacatccctagcatgcatggtggctccaacctctggggtgataccaggagaccccatggggatatctatgggatcaaccaggccttaggtgctacagctaaagtcatcaccgaccctgatatcctgaaaacctgtgtaccagacctaagtgacaagagactggaagtggttgggctggagggtgcaattgagatgggccaaatytataccaagctcaagaatgctggacgtcggctggccaagtgctctgagatcaccttccacaccacaaaaacccttcccatgcaaattgacggagaaccctggatgcagacgccctgtacaatcaagatcacccacaagaaccagatgcccatgctcatgggcccacccccccgctccaccaatttctttggcttcttgagctaagggggacacccttggcctccaagccagccttgaacccacctccctgtccctggactctactcccgaggctctgtacattgctgccacatactcctgccagcttgggggagtgttccttcaccctcacagtatttattatcctgcaccacctcactgttccccatgcgcacacacatacacacaccccaaaacacatacattgaaagtgcctcatctgaataaaatgacttgtgtttcccctttgggatctgctaagtaagtggtacacttccttctttyawaccttcactccttaaatgacgtagattctcccaagaagcaacagaaaaacc

SEQ ID NO: 5016 - DNA, 2784 bp, Homo sapiens
ctccatctctctcccttgctgtaccaccttcaccascatccatgcgaccccaagagccttaatgactctagaagagactccaggcaggggaagctgaaaggacctttcactccctacttttggccagggccttctgtgccacctgccaagaccagcaggtaaagcctaccctctgaagaggtccaagcaacggaagtactactacgaagctgcctttctggccatccttgagaaaaatagacagatggccaaggagaggggcctaataagccccagtgattttgcccagctgcaaaaatacatggaatactccaccaaaaaggtcagtgatgtcctaaagctcttcgaggatggcgagatggctaaatatgtccaaggagatgccattgggtacgagggattccagcaattcctgaaaatctatctcgaagtggataatgttcccagacacctaagcctggcactgtttcaatcctttgagactggtcactgcttaaatgagacaaatgtgacaaaagatgtggtgtgtctcartgatgtttcctgctacttttcccttctggagggtggtcggccagaagacaagttagaattcaccttcaagctgtacgacacggacagaaatgggatcctggacagctcagaagtggacaaaattatcctacagatgatgcgagtggctgaatacctggattgggatgtgtctgagctgaggccgattcttcaggagatgatgaaagagattgactatgatggcagtggctctgtctctcaagctgagtgggtccgggctggggccaccaccgtgccactgctagtgctgctgggtctggagatgactctgaaggaygacggacagcacatgtggaggcccaagaggttccccagaccagtctactgcaatctgtgcgagtcaagcattggtcttggcaaacagggactgagctgtaacctctgtaagtacactgttcacgaccagtgtgccatgaaagccctgccttgtgaagtcagcacctatgccaagtctcggaaggacattggtgtccaatcacatgtgtgggtgcgaggaggctgtgagtccgggcgctgcgaccgctgtcagaaaaagatccggatctaccacagtctgaccgggctgcattgtgtatggtgccacctagagatccacgatgactgcctgcaagcggtgggccatgagtgtgactgtgggctgctccgggatcacatcctgcctccatcttccatctatcccagtgtcctggcctctggaccggatcgtaaaaatagcaaaacaagccagaagaccatggatgatttaaatttgagcacctctgaggctctgcggattgaccctgttcctaacacccacccacttctcgtctttgtcaatcctaagagtggcgggaagcaggggcaragggtgctctggaagttccartatatattaaaccctcgacaggtgttcaacctcctaaaggatggtcctgagatagggctccgattattcaaggatgttcctgatagccggattttggtgtgtggtggagacggcacagtaggctggattctagagaccattgacaaagctaacttgccagttttgcctcctgttgctgtgttgcccctgggtactggaaatgatctggctcgatgcctaagatggggaggaggktatgaaggacagaatctggcaaagatcctcaaggatttagagatgagtaaagtggtacatatggatcgatggtctgtggaggtgatacctcaacaaactgaagaaaaaagtgacccagtcccctttcaaatcatcaataactacttctctattggcgtggatgcctctattgctcatcgattccacatcatgcgagagaaatatccggagaagttcaacagcagaatgaagaacaagctatggtacttcgaatttgccacatctgaatccatcttctcaacatgcaaaaagctggaggagtctttgacagttgagatctgtgggaaaccgctggatctgagcaacctgtccctagaaggcatcgcagtgctaaacatccctagcatgcatggtggctccaacctctggggtgataccaggagaccccatggggatatctatgggatcaaccaggccttaggtgctacagctaaagtcatcaccgaccctgatatcctgaaaacctgtgtaccagacctaagtgacaagagactggaagtggttgggctggagggtgcaattgagatgggccaaatytataccaagctcaagaatgctggacgtcggctggccaagtgctctgagatcaccttccacaccacaaaaacccttcccatgcaaattgacggagaaccctggatgcagacgccctgtacaatcaagatcacccacaagaaccagatgcccatgctcatgggcccacccccccgctccaccaatttctttggcttcttgagctaagggggacacccttggcctccaagccagccttgaacccacctccctgtccctggactctactcccgaggctctgtacattgctgccacatactcctgccagcttgggggagtgttccttcaccctcacagtatttattatcctgcaccacctcactgttccccatgcgcacacacatacacacaccccaaaacacatacattgaaagtgcctcatctgaataaaatgacttgtgtttcccctttgggatctgctaagtaagtggtacacttccttctttyawaccttcactccttaaatgacgtagattctcccaagaagcaacagaaaaacc

SEQ ID NO: 5017 - DNA, 1961 bp, Homo sapiens
acagccsgttgctgagccgggagcgctgactggcccggctgggcagggtgaatctacttctcttaacaaagtctcaatgtcctatttgcaatttatgtggtaaacactgaagacaatggtccttaaccttttggcatctcagcctcctttcgaaagtcttgactcgtctgctgaacaaatcctctgacctcaggccggctgtgaacgtagttcctgagagatagcaaacatgcccaacagtgagcccgcatctctgctggagctgttcaacagcatcgccacacaaggggagctcgtaaggtccctcaaagcgggaaatgcgtcaaaggatgaaattgattctgcagtaaagatgttggtgtcattaaaaatgagctacaaakctgcckygggggaggattacaaggctgactgtcctccagggaacccagcacctaccagtaatcatggcccagatgccacagaagctgaagaggattttgtggacccatggacagtacagacaagcagtgcaaaaggcatagactaygataagctcattgttcggtttggaagtagtaaaattgacaaagagctaataaaccgaatagagagagccaccggccaaagaccacaccacttcctgcgcagaggcatcttcttctcacacagagatatgaatcaggttcttgatgcctatgaaaataagaagccattttatctgtacacgggccggggcccctcttctgaagcaatgcatgtaggtcacctcattccatttattttcacaaagtggctccaggatgtatttaacgtgcccttggtcatccagatgacggatgacgagaagtatctgtggaaggacctgaccctggaccaggcctatagctatgctgtggagaatgccaaggacatcatcgcctgtggctttgacatcaacaagactttcatattctctgacctggactacatggggatgagctcaggtttctacaaaaatgtggtgaagattcaaaagcatgttaccttcaaccaagtgaaaggcattttcggcttcactgacagcgactgcattgggaagatcagttttcctgccatccaggctgctccctccttcagcaactcattcccacagatcttccgagacaggacggatatccagtgccttatcccatgtgccattgaccaggatccttactttagaatgacaagggacgtcgcccccaggatcggctatcytaaaccagccctgytgcactccaccttcttcccagccctgcagggcgcccagaccaaaatgagtgccagcgaccccaactcctccatcttcctcaccgacacggccaagcagatcaaaaccaaggtcaataagcatgcgttttctggagggagagacaccatcgaggagcacaggcagtttgkgggcaactgtgatgtggacgtgtctttcatgtacctgaccttcttcctcgaggacgaygacaagctcgagcagatcaggaaggattacaccagcggagccatgctcaccggtgagctcaagaaggcactcatagaggttctgcagcccttgatcgcagagcaccaggcccggcgcaaggaggtcacggatgagatagtgaaagagttcatgactccccggaagctgtccttcgactttcagtagcactcgttttacatatgcttataaaagaagtgatgtatcagtaatgtatcaataatcccagcccagtcaaagcacsgccacctgtaggcttctgtctcatggtaattactgggcctggcctctgtaagcctgtgtatgttatcaatactgkttcttcctgtgagttccattatttctatctcttatgggcaaagcattgtgggtaattggtgctggctaacattgccaccctgttcttgtccatggaggactccgagggttccaagtatactcttaagacccactctgtttaaaaatatatattctatgtatgcgt

SEQ ID NO: 5018 - DNA, 2703 bp, Homo sapiens
cggacgcccaggagacagccsgttgctgagccgggagcgctgactggcccggctgggcaggggcactctcagcagctcaactgcccagcgtgaccagtggccacctctgcagtgtcttccacaacctggtcttgactcgtctgctgaacaaatcctctgacctcaggccggctgtgaacgtagttcctgagagatagcaaacatgcccaacagtgagcccgcatctctgctggagctgttcaacagcatcgccacacaaggggagctcgtaaggtccctcaaagcgggaaatgcgtcaaaggatgaaattgattctgcagtaaagatgttggtgtcattaaaaatgagctacaaakctgcckygggggaggattacaaggctgactgtcctccagggaacccagcacctaccagtaatcatggcccagatgccacagaagctgaagaggattttgtggacccatggacagtacagacaagcagtgcaaaaggcatagactaygataagctcattgttcggtttggaagtagtaaaattgacaaagagctaataaaccgaatagagagagccaccggccaaagaccacaccacttcctgcgcagaggcatcttcttctcacacagagatatgaatcaggttcttgatgcctatgaaaataagaagccattttatctgtacacgggccggggcccctcttctgaagcaatgcatgtaggtcacctcattccatttattttcacaaagtggctccaggatgtatttaacgtgcccttggtcatccagatgacggatgacgagaagtatctgtggaaggacctgaccctggaccaggcctatagctatgctgtggagaatgccaaggacatcatcgcctgtggctttgacatcaacaagactttcatattctctgacctggactacatggggatgagctcaggtttctacaaaaatgtggtgaagattcaaaagcatgttaccttcaaccaagtgaaaggcattttcggcttcactgacagcgactgcattgggaagatcagttttcctgccatccaggctgctccctccttcagcaactcattcccacagatcttccgagacaggacggatatccagtgccttatcccatgtgccattgaccaggatccttactttagaatgacaagggacgtcgcccccaggatcggctatcytaaaccagccctgytgcactccaccttcttcccagccctgcagggcgcccagaccaaaatgagtgccagcgaccccaactcctccatcttcctcaccgacacggccaagcagatcaaaaccaaggtcaataagcatgcgttttctggagggagagacaccatcgaggagcacaggcagtttgkgggcaactgtgatgtggacgtgtctttcatgtacctgaccttcttcctcgaggacgaygacaagctcgagcagatcaggaaggattacaccagcggagccatgctcaccggtgagctcaagaaggcactcatagaggttctgcagcccttgatcgcagagcaccaggcccggcgcaaggaggtcacggatgagatagtgaaagagttcatgactccccggaagctgtccttcgactttcagtagcactcgttttacatatgcttataaaagaagtgatgtatcagtaatgtatcaataatcccagcccagtcaaagcacsgccacctgtaggcttctgtctcatggtaattactgggcctggcctctgtaagcctgtgtatgttatcaatactgkttcttcctgtgagttccattatttctatctcttatgggcaaagcattgtgggtaattggtgctggctaacattgcatggtcggatagagaagtccagctgtgagtctctccccaaagcagccccacagtggagcctttggctggaagtccatgggccaccctgttcttgtccatggaggactccgagggttccaagtatactcttaagacccactctgtttaaaaatatatattctatgtatgcgtatatggaattgaaatgtcattattgtaacctagaaagtgctttgaaatattgatgtggggaggtttattgagcacaagatgtatttcagcccatgccccctcccaaaaagaaattgataagtaaaagcttcgttatacatttgactaagaaatcacccagctttaaagctgcttttaacaatgaagattgaacagagttcagcarttttgattaaattaagacttgggggtgaaactttccagtttactgaactccagaccatgcatgtagtccactccagaaatcatgctcgcttcccttggcacaccagtgttctcctgccaaatgaccctagaccctctgtcctgcagagtcagggtggcttttcccctgactgtgtccgatgccaaggagtcctggcctccgcagatgcttcattttgacccttggctgcagtggaagtcagcacagagcagtgccctggctgtgtccctggacgggtggacttagctagggagaaagtcgaggcagcagccctcgaggccctcacagatgtytaggcaggcctcatttcatcacgcagcatgtgcaggcctggaagagcaaagccaaatytcaggsaagtccttggttgatgtatytgggtctcctytggagcactctgccctcctgtcacccagtagagtaaataaacttccttggctcctg

SEQ ID NO: 5019 - DNA, 2758 bp, Homo sapiens
gtttccacggacgcccaggagacagccsgttgctgagccgggagcgctgactggcccggctgggcaggctgaaagaaagaggggaagagtattaaagaccatttctggctgggcagggcactctcagcagctcaactgcccagcgtgaccagtggccacctctgcagtgtcttccacaacctggtcttgactcgtctgctgaacaaatcctctgacctcaggccggctgtgaacgtagttcctgagagatagcaaacatgcccaacagtgagcccgcatctctgctggagctgttcaacagcatcgccacacaaggggagctcgtaaggtccctcaaagcgggaaatgcgtcaaaggatgaaattgattctgcagtaaagatgttggtgtcattaaaaatgagctacaaakctgcckygggggaggattacaaggctgactgtcctccagggaacccagcacctaccagtaatcatggcccagatgccacagaagctgaagaggattttgtggacccatggacagtacagacaagcagtgcaaaaggcatagactaygataagctcattgttcggtttggaagtagtaaaattgacaaagagctaataaaccgaatagagagagccaccggccaaagaccacaccacttcctgcgcagaggcatcttcttctcacacagagatatgaatcaggttcttgatgcctatgaaaataagaagccattttatctgtacacgggccggggcccctcttctgaagcaatgcatgtaggtcacctcattccatttattttcacaaagtggctccaggatgtatttaacgtgcccttggtcatccagatgacggatgacgagaagtatctgtggaaggacctgaccctggaccaggcctatagctatgctgtggagaatgccaaggacatcatcgcctgtggctttgacatcaacaagactttcatattctctgacctggactacatggggatgagctcaggtttctacaaaaatgtggtgaagattcaaaagcatgttaccttcaaccaagtgaaaggcattttcggcttcactgacagcgactgcattgggaagatcagttttcctgccatccaggctgctccctccttcagcaactcattcccacagatcttccgagacaggacggatatccagtgccttatcccatgtgccattgaccaggatccttactttagaatgacaagggacgtcgcccccaggatcggctatcytaaaccagccctgytgcactccaccttcttcccagccctgcagggcgcccagaccaaaatgagtgccagcgaccccaactcctccatcttcctcaccgacacggccaagcagatcaaaaccaaggtcaataagcatgcgttttctggagggagagacaccatcgaggagcacaggcagtttgkgggcaactgtgatgtggacgtgtctttcatgtacctgaccttcttcctcgaggacgaygacaagctcgagcagatcaggaaggattacaccagcggagccatgctcaccggtgagctcaagaaggcactcatagaggttctgcagcccttgatcgcagagcaccaggcccggcgcaaggaggtcacggatgagatagtgaaagagttcatgactccccggaagctgtccttcgactttcagtagcactcgttttacatatgcttataaaagaagtgatgtatcagtaatgtatcaataatcccagcccagtcaaagcacsgccacctgtaggcttctgtctcatggtaattactgggcctggcctctgtaagcctgtgtatgttatcaatactgkttcttcctgtgagttccattatttctatctcttatgggcaaagcattgtgggtaattggtgctggctaacattgcatggtcggatagagaagtccagctgtgagtctctccccaaagcagccccacagtggagcctttggctggaagtccatgggccaccctgttcttgtccatggaggactccgagggttccaagtatactcttaagacccactctgtttaaaaatatatattctatgtatgcgtatatggaattgaaatgtcattattgtaacctagaaagtgctttgaaatattgatgtggggaggtttattgagcacaagatgtatttcagcccatgccccctcccaaaaagaaattgataagtaaaagcttcgttatacatttgactaagaaatcacccagctttaaagctgcttttaacaatgaagattgaacagagttcagcarttttgattaaattaagacttgggggtgaaactttccagtttactgaactccagaccatgcatgtagtccactccagaaatcatgctcgcttcccttggcacaccagtgttctcctgccaaatgaccctagaccctctgtcctgcagagtcagggtggcttttcccctgactgtgtccgatgccaaggagtcctggcctccgcagatgcttcattttgacccttggctgcagtggaagtcagcacagagcagtgccctggctgtgtccctggacgggtggacttagctagggagaaagtcgaggcagcagccctcgaggccctcacagatgtytaggcaggcctcatttcatcacgcagcatgtgcaggcctggaagagcaaagccaaatytcaggsaagtccttggttgatgtatytgggtctcctytggagcactctgccctcctgtcacccagtagagtaaataaacttccttggctcctg

SEQ ID NO: 5020 - DNA, 2902 bp, Homo sapiens
tgcaatgaccagctaatggctcgattctcaagagggtttcattggtctcaacmtggccccccaggcaacccacccctgattggacagtctcatcaagaaggttggtcaagagctcaagtgtttctgagaatctgggtgatttataagaaacccttagctgaatgcagggtggggagaacgaaagacaaaagcatcttttttcagaagggaaactgaaagaaagaggggaagagtattaaagaccatttctggctgggcagggcactctcagcagctcaactgcccagcgtgaccagtggccacctctgcagtgtcttccacaacctggtcttgactcgtctgctgaacaaatcctctgacctcaggccggctgtgaacgtagttcctgagagatagcaaacatgcccaacagtgagcccgcatctctgctggagctgttcaacagcatcgccacacaaggggagctcgtaaggtccctcaaagcgggaaatgcgtcaaaggatgaaattgattctgcagtaaagatgttggtgtcattaaaaatgagctacaaakctgcckygggggaggattacaaggctgactgtcctccagggaacccagcacctaccagtaatcatggcccagatgccacagaagctgaagaggattttgtggacccatggacagtacagacaagcagtgcaaaaggcatagactaygataagctcattgttcggtttggaagtagtaaaattgacaaagagctaataaaccgaatagagagagccaccggccaaagaccacaccacttcctgcgcagaggcatcttcttctcacacagagatatgaatcaggttcttgatgcctatgaaaataagaagccattttatctgtacacgggccggggcccctcttctgaagcaatgcatgtaggtcacctcattccatttattttcacaaagtggctccaggatgtatttaacgtgcccttggtcatccagatgacggatgacgagaagtatctgtggaaggacctgaccctggaccaggcctatagctatgctgtggagaatgccaaggacatcatcgcctgtggctttgacatcaacaagactttcatattctctgacctggactacatggggatgagctcaggtttctacaaaaatgtggtgaagattcaaaagcatgttaccttcaaccaagtgaaaggcattttcggcttcactgacagcgactgcattgggaagatcagttttcctgccatccaggctgctccctccttcagcaactcattcccacagatcttccgagacaggacggatatccagtgccttatcccatgtgccattgaccaggatccttactttagaatgacaagggacgtcgcccccaggatcggctatcytaaaccagccctgytgcactccaccttcttcccagccctgcagggcgcccagaccaaaatgagtgccagcgaccccaactcctccatcttcctcaccgacacggccaagcagatcaaaaccaaggtcaataagcatgcgttttctggagggagagacaccatcgaggagcacaggcagtttgkgggcaactgtgatgtggacgtgtctttcatgtacctgaccttcttcctcgaggacgaygacaagctcgagcagatcaggaaggattacaccagcggagccatgctcaccggtgagctcaagaaggcactcatagaggttctgcagcccttgatcgcagagcaccaggcccggcgcaaggaggtcacggatgagatagtgaaagagttcatgactccccggaagctgtccttcgactttcagtagcactcgttttacatatgcttataaaagaagtgatgtatcagtaatgtatcaataatcccagcccagtcaaagcacsgccacctgtaggcttctgtctcatggtaattactgggcctggcctctgtaagcctgtgtatgttatcaatactgkttcttcctgtgagttccattatttctatctcttatgggcaaagcattgtgggtaattggtgctggctaacattgcatggtcggatagagaagtccagctgtgagtctctccccaaagcagccccacagtggagcctttggctggaagtccatgggccaccctgttcttgtccatggaggactccgagggttccaagtatactcttaagacccactctgtttaaaaatatatattctatgtatgcgtatatggaattgaaatgtcattattgtaacctagaaagtgctttgaaatattgatgtggggaggtttattgagcacaagatgtatttcagcccatgccccctcccaaaaagaaattgataagtaaaagcttcgttatacatttgactaagaaatcacccagctttaaagctgcttttaacaatgaagattgaacagagttcagcarttttgattaaattaagacttgggggtgaaactttccagtttactgaactccagaccatgcatgtagtccactccagaaatcatgctcgcttcccttggcacaccagtgttctcctgccaaatgaccctagaccctctgtcctgcagagtcagggtggcttttcccctgactgtgtccgatgccaaggagtcctggcctccgcagatgcttcattttgacccttggctgcagtggaagtcagcacagagcagtgccctggctgtgtccctggacgggtggacttagctagggagaaagtcgaggcagcagccctcgaggccctcacagatgtytaggcaggcctcatttcatcacgcagcatgtgcaggcctggaagagcaaagccaaatytcaggsaagtccttggttgatgtatytgggtctcctytggagcactctgccctcctgtcacccagtagagtaaataaacttccttggctcctg

SEQ ID NO: 5021 - DNA, 3030 bp, Homo sapiens
caatgaccagctaatggctcgattctcaagagggtttcattggtctcaacmtggccccccaggcaacccacccctgattggacagtctcatcaagaaggttggtcaagagctcaagtgtttctgagaatctgggtgatttataagaaacccttagctgaatgcagggtggggagaacgaaagacaaaagcatcttttttcagaagggaaactgaaagaaagaggggaagagtattaaagaccatttctggctgggcagggcactctcagcagctcaactgcccagcgtgaccagtggccacctctgcagtgtcttccacaacctggagtgtastatttgttaaacaggtgaatctacttctcttaacaaagtctcaatgtcctatttgcaatttatgtggtaaacactgaagacaatggtccttaaccttttggcatctcagcctcctttcgaaagtcttgactcgtctgctgaacaaatcctctgacctcaggccggctgtgaacgtagttcctgagagatagcaaacatgcccaacagtgagcccgcatctctgctggagctgttcaacagcatcgccacacaaggggagctcgtaaggtccctcaaagcgggaaatgcgtcaaaggatgaaattgattctgcagtaaagatgttggtgtcattaaaaatgagctacaaakctgcckygggggaggattacaaggctgactgtcctccagggaacccagcacctaccagtaatcatggcccagatgccacagaagctgaagaggattttgtggacccatggacagtacagacaagcagtgcaaaaggcatagactaygataagctcattgttcggtttggaagtagtaaaattgacaaagagctaataaaccgaatagagagagccaccggccaaagaccacaccacttcctgcgcagaggcatcttcttctcacacagagatatgaatcaggttcttgatgcctatgaaaataagaagccattttatctgtacacgggccggggcccctcttctgaagcaatgcatgtaggtcacctcattccatttattttcacaaagtggctccaggatgtatttaacgtgcccttggtcatccagatgacggatgacgagaagtatctgtggaaggacctgaccctggaccaggcctatagctatgctgtggagaatgccaaggacatcatcgcctgtggctttgacatcaacaagactttcatattctctgacctggactacatggggatgagctcaggtttctacaaaaatgtggtgaagattcaaaagcatgttaccttcaaccaagtgaaaggcattttcggcttcactgacagcgactgcattgggaagatcagttttcctgccatccaggctgctccctccttcagcaactcattcccacagatcttccgagacaggacggatatccagtgccttatcccatgtgccattgaccaggatccttactttagaatgacaagggacgtcgcccccaggatcggctatcytaaaccagccctgytgcactccaccttcttcccagccctgcagggcgcccagaccaaaatgagtgccagcgaccccaactcctccatcttcctcaccgacacggccaagcagatcaaaaccaaggtcaataagcatgcgttttctggagggagagacaccatcgaggagcacaggcagtttgkgggcaactgtgatgtggacgtgtctttcatgtacctgaccttcttcctcgaggacgaygacaagctcgagcagatcaggaaggattacaccagcggagccatgctcaccggtgagctcaagaaggcactcatagaggttctgcagcccttgatcgcagagcaccaggcccggcgcaaggaggtcacggatgagatagtgaaagagttcatgactccccggaagctgtccttcgactttcagtagcactcgttttacatatgcttataaaagaagtgatgtatcagtaatgtatcaataatcccagcccagtcaaagcacsgccacctgtaggcttctgtctcatggtaattactgggcctggcctctgtaagcctgtgtatgttatcaatactgkttcttcctgtgagttccattatttctatctcttatgggcaaagcattgtgggtaattggtgctggctaacattgcatggtcggatagagaagtccagctgtgagtctctccccaaagcagccccacagtggagcctttggctggaagtccatgggccaccctgttcttgtccatggaggactccgagggttccaagtatactcttaagacccactctgtttaaaaatatatattctatgtatgcgtatatggaattgaaatgtcattattgtaacctagaaagtgctttgaaatattgatgtggggaggtttattgagcacaagatgtatttcagcccatgccccctcccaaaaagaaattgataagtaaaagcttcgttatacatttgactaagaaatcacccagctttaaagctgcttttaacaatgaagattgaacagagttcagcarttttgattaaattaagacttgggggtgaaactttccagtttactgaactccagaccatgcatgtagtccactccagaaatcatgctcgcttcccttggcacaccagtgttctcctgccaaatgaccctagaccctctgtcctgcagagtcagggtggcttttcccctgactgtgtccgatgccaaggagtcctggcctccgcagatgcttcattttgacccttggctgcagtggaagtcagcacagagcagtgccctggctgtgtccctggacgggtggacttagctagggagaaagtcgaggcagcagccctcgaggccctcacagatgtytaggcaggcctcatttcatcacgcagcatgtgcaggcctggaagagcaaagccaaatytcaggsaagtccttggttgatgtatytgggtctcctytggagcactctgccctcctgtcacccagtagagtaaataaacttccttggctcctg

SEQ ID NO: 5022 - DNA, 2690 bp, Homo sapiens
ctgaaagaaagaggggaagagtattaaagaccatttctggctgggcagggcactctcagcagctcaactgcccagcgtgaccagtggccacctctgcagtgtcttccacaacctggtcttgactcgtctgctgaacaaatcctctgacctcaggccggctgtgaacgtagttcctgagagatagcaaacatgcccaacagtgagcccgcatctctgctggagctgttcaacagcatcgccacacaaggggagctcgtaaggtccctcaaagcgggaaatgcgtcaaaggatgaaattgattctgcagtaaagatgttggtgtcattaaaaatgagctacaaakctgcckygggggaggattacaaggctgactgtcctccagggaacccagcacctaccagtaatcatggcccagatgccacagaagctgaagaggattttgtggacccatggacagtacagacaagcagtgcaaaaggcatagactaygataagctcattgttcggtttggaagtagtaaaattgacaaagagctaataaaccgaatagagagagccaccggccaaagaccacaccacttcctgcgcagaggcatcttcttctcacacagagatatgaatcaggttcttgatgcctatgaaaataagaagccattttatctgtacacgggccggggcccctcttctgaagcaatgcatgtaggtcacctcattccatttattttcacaaagtggctccaggatgtatttaacgtgcccttggtcatccagatgacggatgacgagaagtatctgtggaaggacctgaccctggaccaggcctatagctatgctgtggagaatgccaaggacatcatcgcctgtggctttgacatcaacaagactttcatattctctgacctggactacatggggatgagctcaggtttctacaaaaatgtggtgaagattcaaaagcatgttaccttcaaccaagtgaaaggcattttcggcttcactgacagcgactgcattgggaagatcagttttcctgccatccaggctgctccctccttcagcaactcattcccacagatcttccgagacaggacggatatccagtgccttatcccatgtgccattgaccaggatccttactttagaatgacaagggacgtcgcccccaggatcggctatcytaaaccagccctgytgcactccaccttcttcccagccctgcagggcgcccagaccaaaatgagtgccagcgaccccaactcctccatcttcctcaccgacacggccaagcagatcaaaaccaaggtcaataagcatgcgttttctggagggagagacaccatcgaggagcacaggcagtttgkgggcaactgtgatgtggacgtgtctttcatgtacctgaccttcttcctcgaggacgaygacaagctcgagcagatcaggaaggattacaccagcggagccatgctcaccggtgagctcaagaaggcactcatagaggttctgcagcccttgatcgcagagcaccaggcccggcgcaaggaggtcacggatgagatagtgaaagagttcatgactccccggaagctgtccttcgactttcagtagcactcgttttacatatgcttataaaagaagtgatgtatcagtaatgtatcaataatcccagcccagtcaaagcacsgccacctgtaggcttctgtctcatggtaattactgggcctggcctctgtaagcctgtgtatgttatcaatactgkttcttcctgtgagttccattatttctatctcttatgggcaaagcattgtgggtaattggtgctggctaacattgcatggtcggatagagaagtccagctgtgagtctctccccaaagcagccccacagtggagcctttggctggaagtccatgggccaccctgttcttgtccatggaggactccgagggttccaagtatactcttaagacccactctgtttaaaaatatatattctatgtatgcgtatatggaattgaaatgtcattattgtaacctagaaagtgctttgaaatattgatgtggggaggtttattgagcacaagatgtatttcagcccatgccccctcccaaaaagaaattgataagtaaaagcttcgttatacatttgactaagaaatcacccagctttaaagctgcttttaacaatgaagattgaacagagttcagcarttttgattaaattaagacttgggggtgaaactttccagtttactgaactccagaccatgcatgtagtccactccagaaatcatgctcgcttcccttggcacaccagtgttctcctgccaaatgaccctagaccctctgtcctgcagagtcagggtggcttttcccctgactgtgtccgatgccaaggagtcctggcctccgcagatgcttcattttgacccttggctgcagtggaagtcagcacagagcagtgccctggctgtgtccctggacgggtggacttagctagggagaaagtcgaggcagcagccctcgaggccctcacagatgtytaggcaggcctcatttcatcacgcagcatgtgcaggcctggaagagcaaagccaaatytcaggsaagtccttggttgatgtatytgggtctcctytggagcactctgccctcctgtcacccagtagagtaaataaacttccttggctcctg

SEQ ID NO: 5023 - DNA, 2749 bp, Homo sapiens
tgttgctgctggagatcaatgaagccgagtgaatgggggctgaatgtgcgagtccatagctgaagaggagcgccagatggtggaggaatacacttatttatgaaactgtcttgagttcttcttgaattgccagttttcagcctcctcatgcctccgtctcctttagacgacagggtagtagtggcactatctaggcccgtccgacctcaggatctcaacctttgtttagactctagttaccttggctctgccaacccaggcagtaacagccaccctcctgtcatcgccaccaccgttgtgtccctcaaggctgcgaatctgacgtatatgccctcatccagcggctctgcccgctcgctgaattgtggatgcagcagtgccagctgctgcactgtggcaacctacgacaaggacaatcaggcccaracccaagccattgccgctggcaccaccaccactgccatcggaacctctaccacctgccctgctaaccagatggtcaacaataatgagaatacaggctctctaagtccatcaagtggggtgggcagccctgtgtcagggacccccaagcagctagccagcatcaaaataatctaccccaatgacttggcaaagaagatgaccaaatgcagcaagagtcacctgccgagtcagggccctgtcatcattgactgcaggcccttcatggagtacaacaagagtcacatccaaggagctgtccacattaactgtgccgataagatcagccggcggagactgcagcagggcaagatcactgtcctagacttgatttcctgtagggaaggcaaggactctttcaagaggatcttttccaaagaaattatagtttatgatgagaataccaatgarccaagccgagtgatgccctcccagccmcttcacatagtcctcgagtccctgaagagagaaggcaaagaacctctggtgttgaaaggtggacttagtagttttaagcagaaccatgaaaacctctgtgacaactccctccagctccaagagtgccgggaggtggggggcggcgcatccgcggcctcgagcttgctacctcagcccatccccaccacccctgacatcgagaacgctgagctcacccccatcttgcccttcctgttccttggcaatgagcaggatgctcaggacctggacaccatgcagcggctgaacatcggctacgtcatcaacgtcaccactcatcttcccctctaccactatgagaaaggcctgttcaactacaagcggctgccagccactgacagcaacaagcagaacctgcggcagtactttgaagaggcttttgagttcattgaggaagctcaccagtgtgggaaggggcttctcatccactgccaggctggggtgtcccgctccgccaccatcgtcatcgcttacttgatgaagcacactcggatgaccatgactgatgcttataaatttgtcaaaggcaaacgaccaattatctccccaaaccttaacttcatggggcagttgctagagttcgaggaagacctaaacaacggtgtgacaccgagaatccttacaccaaagctgatgggcgtggagacggttgtgtgacaatggtctggatggaaaggattgctgctctccattaggagacaatgaggaaggaggatggattctggttttttttctttctttttttttttgtagttgggagtaagtttgtgaatggaaacaaacttgtttaaacactttatttttaacaagtgtaagaagactataacttttgatgccattgagattcacctcccacaaactgacaaattaaggaggttaaagaagtaatttttttaagccaacaataaaaatataatacaacttgtttctcccccttttccttttaagctatttgtagagtttatgactaaatagtctgtgcaggttcatagaccgaagatactacacactttaaaccaattaaaaagaaccaaaagtaaatagaaaagacattgaatcaccaaggcctgggatcaacctgggctgtccacacagaaaacaaaaacccaaccaaaccaagccctgttgtgctcactggtgcaaagagaagatcagggcagcttaagtggtctaagaatccttcaggcattctttaaggagaaaaaggatacctttgattttgtgtgtttcatgctctggattttttttttttttccttctctgggtttaagagattttttttgaaatagtgaggaactgaccattatatgccttcactggcttcttgtgcaataatatgatgttttaagtgtgcaaacaagttagagctggcagctgaatgatagacaaatagtgcaaatttgccagcttggagatagaaaggaattcaacaatatatcaaataytttccttcccacctttttccttttttttttttttttctgatttgattctggttacagtgccataaaccttgttacatatgtatatcagaatgtaagaaaaaaaaatttatttaaaaatatttttcgcaaaaaaaaaaaaatcttggtgtgtttctgttgattgtgtaaaaatttattttcattatataaatgaaactggtttaggatgtgtctttttttcccctctcttttaccttaactcaggttcaagcctttcttaagctctggtaacttgcatatayaacaaagttgaaataaaacagatttttatatagggaaagagagatgaggaagggaacatatccagttttctcactgtgaaacag

SEQ ID NO: 5024 - DNA, 1901 bp, Homo sapiens
agatcaatgaagccgagtgaatgggggctgaatgtgcgagtccatagctgaagaggagcgccagatggtggaggaatacacttatttatgaagtaatgtttgtgttctaggtggacttagtagttttaagcagaaccatgaaaacctctgtgacaactccctccagctccaagagtgccgggaggtggggggcggcgcatccgcggcctcgagcttgctacctcagcccatccccaccacccctgacatcgagaacgctgagctcacccccatcttgcccttcctgttccttggcaatgagcaggatgctcaggacctggacaccatgcagcggctgaacatcggctacgtcatcaacgtcaccactcatcttcccctctaccactatgagaaaggcctgttcaactacaagcggctgccagccactgacagcaacaagcagaacctgcggcagtactttgaagaggcttttgagttcattgaggaagctcaccagtgtgggaaggggcttctcatccactgccaggctggggtgtcccgctccgccaccatcgtcatcgcttacttgatgaagcacactcggatgaccatgactgatgcttataaatttgtcaaaggcaaacgaccaattatctccccaaaccttaacttcatggggcagttgctagagttcgaggaagacctaaacaacggtgtgacaccgagaatccttacaccaaagctgatgggcgtggagacggttgtgtgacaatggtctggatggaaaggattgctgctctccattaggagacaatgaggaaggaggatggattctggttttttttctttctttttttttttgtagttgggagtaagtttgtgaatggaaacaaacttgtttaaacactttatttttaacaagtgtaagaagactataacttttgatgccattgagattcacctcccacaaactgacaaattaaggaggttaaagaagtaatttttttaagccaacaataaaaatataatacaacttgtttctcccccttttccttttaagctatttgtagagtttatgactaaatagtctgtgcaggttcatagaccgaagatactacacactttaaaccaattaaaaagaaccaaaagtaaatagaaaagacattgaatcaccaaggcctgggatcaacctgggctgtccacacagaaaacaaaaacccaaccaaaccaagccctgttgtgctcactggtgcaaagagaagatcagggcagcttaagtggtctaagaatccttcaggcattctttaaggagaaaaaggatacctttgattttgtgtgtttcatgctctggattttttttttttttccttctctgggtttaagagattttttttgaaatagtgaggaactgaccattatatgccttcactggcttcttgtgcaataatatgatgttttaagtgtgcaaacaagttagagctggcagctgaatgatagacaaatagtgcaaatttgccagcttggagatagaaaggaattcaacaatatatcaaataytttccttcccacctttttccttttttttttttttttctgatttgattctggttacagtgccataaaccttgttacatatgtatatcagaatgtaagaaaaaaaaatttatttaaaaatatttttcgcaaaaaaaaaaaaatcttggtgtgtttctgttgattgtgtaaaaatttattttcattatataaatgaaactggtttaggatgtgtctttttttcccctctcttttaccttaactcaggttcaagcctttcttaagctctggtaacttgcatatayaacaaagttgaaataaaacagatttttatatagggaaagagagatgaggaagggaacatatccagttttctcactgtgaaacag

SEQ ID NO: 5025 - DNA, 3121 bp, Homo sapiens
cagggcagataccgtcctcacaatacctgcccagaaagacgagaaagaggaggaagaattcctccttccaccaggaattctgtgggaagcacataagatttcatgctactagtttattcccaagagaagctaccaaagcctggtaactctaccaactctaacttttgtgcctgtaagttctcttctcctgggattacaactaattgaaacaggaattcaaaggagtctcggaggactgtaagaagaatgcttcgaggcygatccctctctgtaacatccctgggtgggcttccccagtgggaagtcgaagaacttcctgtggaggagttactgctctttgaagttgcttgggaagtgaccaataaagttggaggcatctatactgtgattcagacaaaggccaaaacaacagcagatgaatggggagagaactattttctgataggtccatattttgagcataatatgaagactcaggtggaacagtgtgaacctgtaaatgatgctgtcagaagagcagtggacrcaatgaataagcatggctgccaggtgcattttggaagatggctgatagaaggaagtccttatgtggtactttttgacataggctattcagcttggaatctggacaggtggaagggtgacctctgggaagcatgcagtgtcggcattccttatcatgaccgagaagccaatgatatgctgatatttggatctttaactgcctggttcttaaaagaggtgacagatcatgcagatggtaaatatgtcgttgcccaattccatgaatggyaggctggaattggactgatcctttctcgarccaggaaacttcctattgccacaatatttacaacccacgctacactacttgggaggtatctctgtgcagcaaatattgatttctacaaccatcttgataagtttaacattgacaaagaggctggggaaaggcagatttaccaccggtactgcatggagygagcttccgttcattgcgctcacgtgttcaccacggtttctgaaataacagcaatagaagctgaacatatgctgaagagaaagcctgatgtagttactccaaacggcttgaatgttaagaaattttcagcagtgcatgagtttcaaaatctacatgccatgtacaaggccagaatccaagattttgttcgaggtcatttctatggtcatctcgactttgatcttgaaaagactttgttccttttcattgctgggaggtatgagttttcaaacaaaggasctgacatcttcctagaatccttatccaggctaaatttcctgctgaggatgcataaaagtgacatcacagtgrtggtgtttttcattatgcctgccaagacaaataatttcaacgtggaaaccctgaaaggacaagcagtgcgaaaacagctgtgggatgttgcacattctgtgaaggaaaagtttggaaaaaaactctatgatgcattattaagaggagaaattcctgasctgaacgatattttagatcgagatgatctaacaattatgaaaagagccatcttttcaactcagcgacagtcattgcccccagtgaccacgcacaacatgattgatgactccaccgaccccatcctcagcaccattagacggattggacttttcaacaaccgcacagatagagtcaaggtgattttgcacccagagtttctatcctccaccagtcccttrctacccakggactatgaagagtttgttagaggttgtcatcttggagtatttccatcatactatgaaccctggggttatactccagctgaatgcactgtgatgggtatccccagtgtgaccacgaatctctccgggtttggctgtttcatgcaggagcacgtggctgatcctrctgcttacggtatttacatcgttgacaggcggttccgttctccagatgattcttgcaatcagctgactaagtttctctatggattttgcaaacagtcacgccgccaaaggattatccagaggaacagaactgagaggctctcagatcttctggattggagatacttaggcagatattaccagcatgccagacacctgacattaagcagagcttttccagataaattccatgtggaactaacatcaccaccaacgacagaaggatttaaatatcccaggccttcctcagtaccaccttctccttcagggtctcaggcctccagtcctcagagcagtgatgtggaagatgaagtggaggatgagagatacgatgaggaagaggaggctgaaagggatcggttaaatatcaagtcaccattttcactgagccaygttcctcatgggaagaaaaagctgcatggtgaatataagaaytgaattctwcatgtgctgcatgaagagctaatttaaaaaagcaaagtaagactaattatttaaaataaaaatgccacaaatttmattttctccttctaagtattacaatggagtttattctctgcctaaaaagtggaagaahttgagtgaatgayaattttgtaatttaggataagatccaagttattttccccaactcttgtttcccccataaagttaggcatgaggaggagcactcattaaaggcagaagacggaaaagtgtttttaaaatggtgaatttaagtggtaaggattttctcttactctgtttatttttaaatgatcatcataatcctttgcttactatttatgcagcttctctaccccaccacacaaatttcccatttcccccccgaaaaccttgatcttacccatgaatgtgcactacctacattttttaaatagctaggtttttactgattattttcatttttcacatgcatcagaaccatgatttagatgtagttttgcagagacaaaaatccatgagtgaatagctatcctaagtccatattttgatgcatattaatggacatttatgtcacttttgaaatctagaattgatgttgtaattaatgcaagatattaccatgtacatggtaccaccatcttactgtaacatttttctattgtttaaatagaaagcctttttaaaatttggtcaatcttcatagatgataacttgtaaaatccaagtaaataaacacattaatatttaataactt

SEQ ID NO: 5026 - DNA, 2554 bp, Homo sapiens
cagggcagataccgtcctcacaatacctgcccagaaagacgagaaagaggaggaagaattcctccttccaccaggaattctgtgggaagcacataagatttcatgctactagtttattcccaagagaagctaccaaagcctggtaactctaccaactctaacttttgtgcctgtaagttctcttctcctgggattacaactaattgaaacaggaattcaaaggagtctcggaggactgtaagaagaatgcttcgaggcygatccctctctgtaacatccctgggtgggcttccccagtgggaagtcgaagaacttcctgtggaggagttactgctctttgaagttgcttgggaagtgaccaataaagttggaggcatctatactgtgattcagacaaaggccaaaacaacagcagatgaatggggagagaactattttctgataggtccatattttgagcataatatgaagactcaggtggaacagtgtgaacctgtaaatgatgctgtcagaagagcagtggacrcaatgaataagcatggctgccaggtgcattttggaagatggctgatagaaggaagtccttatgtggtactttttgacataggctattcagcttggaatctggacaggtggaagggtgacctctgggaagcatgcagtgtcggcattccttatcatgaccgagaagccaatgatatgctgatatttggatctttaactgcctggttcttaaaagaggtgacagatcatgcagatggtaaatatgtcgttgcccaattccatgaatggyaggctggaattggactgatcctttctcgarccaggaaacttcctattgccacaatatttacaacccacgctacactacttgggaggtatctctgtgcagcaaatattgatttctacaaccatcttgataagtttaacattgacaaagaggctggggaaaggcagatttaccaccggtactgcatggagygagcttccgttcattgcgctcacgtgttcaccacggtttctgaaataacagcaatagaagctgaacatatgctgaagagaaagcctgatgtagttactccaaacggcttgaatgttaagaaattttcagcagtgcatgagtttcaaaatctacatgccatgtacaaggccagaatccaagattttgttcgaggtcatttctatggtcatctcgactttgatcttgaaaagactttgttccttttcattgctgggaggtatgagttttcaaacaaaggasctgacatcttcctagaatccttatccaggctaaatttcctgctgaggatgcataaaagtgacatcacagtgrtggtgtttttcattatgcctgccaagacaaataatttcaacgtggaaaccctgaaaggacaagcagtgcgaaaacagctgtgggatgttgcacattctgtgaaggaaaagtttggaaaaaaactctatgatgcattattaagaggagaaattcctgasctgaacgatattttagatcgagatgatctaacaattatgaaaagagccatcttttcaactcagcgacagtcattgcccccagtgaccacgcacaacatgattgatgactccaccgaccccatcctcagcaccattagacggattggacttttcaacaaccgcacagatagagtcaaggtgattttgcacccagagtttctatcctccaccagtcccttrctacccakggactatgaagagtttgttagaggttgtcatcttggagtatttccatcatactatgaaccctggggttatactccagctgaatgcactgtgatgggtatccccagtgtgaccacgaatctctccgggtttggctgtttcatgcaggagcacgtggctgatcctrctgcttacggtatttacatcgttgacaggcggttccgttctccagatgattcttgcaatcagctgactaagtttctctatggattttgcaaacagtcacgccgccaaaggattatccagaggaacagaactgagaggctctcagatcttctggattggagatacttaggcagatattaccagcatgccagacacctgacattaagcagagcttttccagataaattccatgtggaactaacatcaccaccaacgacagaaggatttaaatatcccaggccttcctcagtaccaccttctccttcagggtctcaggcctccagtcctcagagcagtgatgtggaagatgaagtggaggatgagagatacgatgaggaagaggaggctgaaagggatcggttaaatatcaagtcaccattttcactgagccaygttcctcatgggaagaaaaagctgcatggtgaatataagaaytgaattctwcatgtgctgcatgaagagctaatttaaaaaagcaaagtaagactaattatttaaaataaaaatgccacaaatttmattttctccttctaagtattacaatggagtttattctctgcctaaaaattattttccccaactcttgtttcccccataaagttaggcatgaggaggagcactcattaaaggcaga

SEQ ID NO: 5027 - DNA, 4021 bp, Homo sapiens
gtgagtgtgatggccgccgcgaggccgggaaggtgaaggactggtggagtcaacacagtcaatcaatagccaacctcaacytgagacaggacagaagagaactcagaatctttttgtcttttggacttcagccatgtccatgatgcctaccctgtgaagatctctcaccatccaaaaaacgcaatgtccctgctcttctctcgatgcaactctatcgtcacagtcaagaaaaataagagacacatggctgaggtgaatgcatccccacttaagcactttgtcactgccaagaagaagatcaatggcatttttgagcagctgggggcctacatccaggagagyrccaccttccttgaagacacgtacaggaatgcagaactggaccccgttaccacagaagaacaggttctggacgtcaaaggttacctatccaaagtgagaggcatcagtgaggtgctggctcggaggcacatgaaagtggctttttttggccggacgagcaatgggaagagcaccgtgatcaatgccatgctctgggacaaagttctgccctctgggattggccacaccaccaattgcttcctgcgggtagagggcacagatggccatgaggcctttctccttaccgagggctcagaggaaaagaggagtgccaagactgtgaaccagctggcccatgccctccaccaggacaagcagctccatgccggcagcctagtgagtgtgatgtggcccaactctaagtgcccacttctgaaggatgacctcgttttgatggacagccctggtattgatgtcaccacagagctggacagctggattgacaagttttgtctggatgctgatgtgtttgtgctggtggccaactcagagtccaccctgatgcagacggaaaagcacttcttccacaaggtgcggcggcagcacatggagcgttgtaccagcttcctggtggatgagctgggcgtggtggatcgatcccaggcyrgggaccgcatcttctttgtgtctgctaaggaggtgctcaacgccaggattcagaaagcccagggcatgcctgaaggagggggcgctctcgcagaaggctttcaagtgaggatgtttgagtttcagaattttgagaggagatttgaggagtgcatctcccagtctgcagtgaagaccaagtttgagcagcacacggtccgggccaagcagattgcagaggcggttcgactcatcatggactccctgcacatggcggctcgggagcagcaggtttactgcgaggaaatgcgtgaagagcggcaagaccgactgaaatttattgacaaacagctggagctcttggctcaagactataagctgcgaattaagcagattacggaggaagtggagaggcaggtgtcgactgcaatggccgaggagatcaggcgcctctctgtactggtggacgattaccagatggacttccacccttctccagtagtcctcaaggtttataagaatgagctgcaccgccacatagaggaaggactgggtcgaaacatgtctgaccgctgctccacggccatcaccaactccctgcagaccatgcagcaggacatgatagatggcttgaaacccctccttcctgtgtctgtgcggagtcagatagacatgctggtcccacgccagygcttctcyctcaactatgacctaaactgtgacaagctgtgtgctgacttccaggaagacattgagttccatttctctctcggatggaccatgctggtgaataggttcctgggccccaagaacagccgtcgggccttgatgggctacaatgaccaggcaagcaaagttcctcacctcaagggcattgtggggsgtccagcgtcccatccctctgacgccagccaaccccagcatgcccccactgccacagggctcgctcacccaggaggagttcatggtttccatggttaccggcctggcctccttgacatccaggacctccatgggcattcttgttgttggaggagtgtgggctggcggctcattgccctctcctttgggctctatggcctcctctacgtctatgagcgtctgacctggaccaccaaggccaaggagagggccttcaagcgccagtttgtggagcatgccagcgagaagctgcagcttgtcatcagctacactggctccaactgcagccaccaagtccagcaggaactgtctgggacctttgctcatctgtgtcagcaagttgacgtcacccgggagaacctggagcaggaaattgccgccatgaacaagaaaattgaggttcttgactcacttcagagcaaagcaaagctgctcaggaataaagccggttggttggacagtgagctcaacatgttcacacaccagtacctgcagcccagcagatagtgggcacctgaggcggagtctgcgtggagaggggcggtgctgccagccctaagtgccrtgtgggctcccccaggggcacgtgtggctcctgccccctggccactgccaagagaatgaagcacccagtctcgtaccattttgagccctccagcactacttattttcccccacctttgcctgctgttgctggaagagctggctcatacccccaaaggacactttcagcgacagctatggacagcatggtaccaaggagttaagttgaggctttttccagctttctctggttcatttgattgcttgataaggcctcaggatctcagcattgcacaatgcctcatggaagcctttgagggtatcacacagacacccccaccttcctccagcctgtgcgcacctgccctccttgcagcccagcacacctgcaggtgtaagggacgattggagtttcttcccagagagtctgtcccagaaggactgtggcttgtgtgtgtccatctcgcctgttggctcagtgcttcatcccatttgcagagcctcagacacgtcttggtggtgaggctcagttacccctgggcttaggctgaggcgggccctgtgctgggggtggtagaaaggatgctgctgaggcagctggaggagtgggagtagctcagaggggagggctgttggatgtatggggagctggcagagcaggtggcagtcactgggacaaggagggacttgcctctcttctcattattgtgtcctttgctttagtgtcagtcctggacttgtgcaggcctgttttgtgtagatctgttttggaagatggcatggtctaggtggttgaaggatgtagtagaaggatggatggtggaaggtggggacgttggtggctggctgaggtgcatggsccccacacaggacagytggagaatgggccgtccacttggcctcgttctgcgaggggctcatgggtctgagagcccccacccactaggcttgattgcatccaaaacccagtgtccatctttccaccctccctgatctccagaaccttcgactgacccccttgtctttatgctgatgttgagttttgggattgttactggttgaagtgggggcagatgcctgtcaccaaggtgttgactgtgtgagaaaagcagtttgggtgacaaatcctgtgtggcacaagttggatcgcttcctagaaataagcaacacctctcccaaaaagcagcccacaaggcaggggcccagcagcccagccatcactcatctttgaggaaatgagttggtagcctctgtgcactgtttggtggycacatcacaggtgatgtcctgttcacatacctgcttgtatttaaagccctcagtctgtcctgttgtgtggggcgaagtgatggactctgccaggtggacatgctgtgggtggataccmctgagggagagaccctttytgaaagaagtatggccaaaagcactttaatgctgctgacattgttgtttttatgttcatttgctggagcgcaaracgtgctgacacagtgagttttytctgatgtatttaaggtgatgtatttgcttgagttactcctgtatcattgctcataatattggaaactaaaataaaacctagttggaa

SEQ ID NO: 5028 - DNA, 4628 bp, Homo sapiens
acgcgccggcggaggagtggcgcgcggaggagtggcgcgctgagrcgccgctcgaagcgccgagtcgcggggcagcagaggcgtaaggagtaggcggggcgagccggctgggctcagggtccacyagctcacccgggtcgaggggcaatctgaggcgactggwgacgcgcttatccacttccctcctcccgcctcccccyggggtggcgctcgctggtgacgtagtgagtgtgatggccgccgcgaggccgggaaggtgaagtcaggactggtggagtcaacacagtcaatcaatagccaacctcaacytgagacaggacagaagagaactcagaatctttttgtcttttggacttcagccatgtccatgatgcctaccctgtgaagatctctcaccatccaaaaaacgcaatgtccctgctcttctctcgatgcaactctatcgtcacagtcaagaaaaataagagacacatggctgaggtgaatgcatccccacttaagcactttgtcactgccaagaagaagatcaatggcatttttgagcagctgggggcctacatccaggagagyrccaccttccttgaagacacgtacaggaatgcagaactggaccccgttaccacagaagaacaggttctggacgtcaaaggttacctatccaaagtgagaggcatcagtgaggtgctggctcggaggcacatgaaagtggctttttttggccggacgagcaatgggaagagcaccgtgatcaatgccatgctctgggacaaagttctgccctctgggattggccacaccaccaattgcttcctgcgggtagagggcacagatggccatgaggcctttctccttaccgagggctcagaggaaaagaggagtgccaagactgtgaaccagctggcccatgccctccaccaggacaagcagctccatgccggcagcctagtgagtgtgatgtggcccaactctaagtgcccacttctgaaggatgacctcgttttgatggacagccctggtattgatgtcaccacagagctggacagctggattgacaagttttgtctggatgctgatgtgtttgtgctggtggccaactcagagtccaccctgatgcagacggaaaagcacttcttccacaaggtgagtgagcgtctytcccggccaaacatcttcatcctgaacaaccgctgggatgcatctgcctcagagcccgagtacatggaggaggtgcggcggcagcacatggagcgttgtaccagcttcctggtggatgagctgggcgtggtggatcgatcccaggcyrgggaccgcatcttctttgtgtctgctaaggaggtgctcaacgccaggattcagaaagcccagggcatgcctgaaggagggggcgctctcgcagaaggctttcaagtgaggatgtttgagtttcagaattttgagaggagatttgaggagtgcatctcccagtctgcagtgaagaccaagtttgagcagcacacggtccgggccaagcagattgcagaggcggttcgactcatcatggactccctgcacatggcggctcgggagcagcaggtttactgcgaggaaatgcgtgaagagcggcaagaccgactgaaatttattgacaaacagctggagctcttggctcaagactataagctgcgaattaagcagattacggaggaagtggagaggcaggtgtcgactgcaatggccgaggagatcaggcgcctctctgtactggtggacgattaccagatggacttccacccttctccagtagtcctcaaggtttataagaatgagctgcaccgccacatagaggaaggactgggtcgaaacatgtctgaccgctgctccacggccatcaccaactccctgcagaccatgcagcaggacatgatagatggcttgaaacccctccttcctgtgtctgtgcggagtcagatagacatgctggtcccacgccagygcttctcyctcaactatgacctaaactgtgacaagctgtgtgctgacttccaggaagacattgagttccatttctctctcggatggaccatgctggtgaataggttcctgggccccaagaacagccgtcgggccttgatgggctacaatgaccaggtccagcgtcccatccctctgacgccagccaaccccagcatgcccccactgccacagggctcgctcacccaggaggagttcatggtttccatggttaccggcctggcctccttgacatccaggacctccatgggcattcttgttgttggaggagtggtgtggaaggcagtgggctggcggctcattgccctctcctttgggctctatggcctcctctacgtctatgagcgtctgacctggaccaccaaggccaaggagagggccttcaagcgccagtttgtggagcatgccagcgagaagctgcagcttgtcatcagctacactggctccaactgcagccaccaagtccagcaggaactgtctgggacctttgctcatctgtgtcagcaagttgacgtcacccgggagaacctggagcaggaaattgccgccatgaacaagaaaattgaggttcttgactcacttcagagcaaagcaaagctgctcaggaataaagccggttggttggacagtgagctcaacatgttcacacaccagtacctgcagcccagcagatagtgggcacctgaggcggagtctgcgtggagaggggcggtgctgccagccctaagtgccrtgtgggctcccccaggggcacgtgtggctcctgccccctggccactgccaagagaatgaagcacccagtctcgtaccattttgagccctccagcactacttattttcccccacctttgcctgctgttgctggaagagctggctcatacccccaaaggacactttcagcgacagctatggacagcatggtaccaaggagttaagttgaggctttttccagctttctctggttcatttgattgcttgataaggcctcaggatctcagcattgcacaatgcctcatggaagcctttgagggtatcacacagacacccccaccttcctccagcctgtgcgcacctgccctccttgcagcccagcacacctgcaggtgtaagggacgattggagtttcttcccagagagtctgtcccagaaggactgtggcttgtgtgtgtccatctcgcctgttggctcagtgcttcatcccatttgcagagcctcagacacgtcttggtggtgaggctcagttacccctgggcttaggctgaggcgggccctgtgctgggggtggtagaaaggatgctgctgaggcagctggaggagtgggagtagctcagaggggagggctgttggatgtatggggagctggcagagcaggtggcagtcactgggacaaggagggacttgcctctcttctcattattgtgtcctttgctttagtgtcagtcctggacttgtgcaggcctgttttgtgtagatctgttttggaagatggcatggtctaggtggttgaaggatgtagtagaaggatggatggtggaaggtggggacgttggtggctggctgaggtgcatggsccccacacaggacagytggagaatgggccgtccacttggcctcgttctgcgaggggctcatgggtctgagagcccccacccactaggcttgattgcatccctgttgtgccctttaagagacatgtttccaccccacccccaaccttgtcccaagtgccctggactaaatttcctgtgccagtgactgcagttggccaagggacaatgtggaaaacccagtgtccatctttccaccctccctgatctccagaaccttcgactgacccccttgtctttatgctgatgttgagttttgggattgttactggttgaagtgggggcagatgcctgtcaccaaggtgttgactgtgtgagaaaagcagtttgggtgacaaatcctgtgtggcacaagttggatcgcttcctagaaataagcaacacctctcccaaaaagcagcccacaaggcaggggcccagcagcccagccatcactcatctttgaggaaatgagttggtagcctctgtgcactgtttggtggycacatcacaggtgatgtcctgttcacatacctgcttgtatttaaagccctcagtctgtcctgttgtgtggggcgaagtgatggactctgccaggtggacatgctgtgggtggatgttcccggcgtgtgccrggcctgaatggacaggggccacttcacagcatgtcagggaaaatcactgtcacacaattccaatggattttgtgctctttttgaaaaaaaaaaattctttagcgtaaacatgaattttttttcaatgtagcccctggggaatgaatgaaattttgagcttcttcaatacgtaaaattaaatttataccmctgagggagagaccctttytgaaagaagtatggccaaaagcactttaatgctgctgacattgttgtttttatgttcatttgctggagcgcaaracgtgctgacacagtgagttttytctgatgtatttaaggtgatgtatttgcttgagttactcctgtatcattgctcataatattggaaactaaaataaaacctagttggaaatcc

SEQ ID NO: 5029 - DNA, 3104 bp, Homo sapiens
aagccccgggagctgcacagagaggcggagggagctgccctaataaggagaggcccggacttgggcatatctgcagaaaaacccttccccactaggcaggcgcgggggagggcgtggaggggcggggtggtgccgcccccggggcgggcccagtgcgtggcagcgggacctgcggccccgtcgcgaagtttccagccctgcgagcgccgccgggtcggccgatcgtcccccatacctcggccatgcggcccctgctgctactggccctgctgggctggctgctgctggccgaagcgaagggcgacgccaagccggaggacaaccttttagtcctcacggtggccactaaggagaccgagggattccgtcgcttcaagcgctcagctyagttcttcaactacaagatccaggcgcttggyctaggggaggactggaatgtggagaaggggacgtcggcaggtggagggcagaaggtccggctgctgaagaaarctctggagaagcacgcagacaaggaggatctggtcattctcttyrcagacagctatgacgtgctgtttgcatcggggccccgggagctcctgaagaagttccggcagkccaggagccaggtggtcttctctgctgaggagctcatctacccagaccgcaggctggagaccaagtawccggtggtgtccgatggcaagaggttcctgggctctggaggcttcatcggttatgcccccaacctcagcaaactggtggccgagtgggagggccaggacagcgacagcgatcarctgttttacaccaagatcttcttggacccggagaagagggagcagatcaatatcaccctggaccaccgctgccgtatcttccagaacctggatggagccttggatgaggtcgtgctcaagtttgaaatgggccatgtgagagcgaggaacctggcctatgacaccctcccggtcctgatccatggcaacgggccaaccaagctgcagttgaactacctgggcaactacatcccgcgcttctggaccttcgaaacaggctgcaccgtgtgtgacgaaggcttgcgcagcctcaagggcattggggatgaagctctgcccacggtcctggtcggcgtgttcatcgaacagcccacgccgtttgtgtccctgttcttccagcggctcctgcggctccactacccccagaaacacatgygacttttcatccacaaccacgagyagcaccacaaggctcaggtggaagagttcctggcacagcatggcagcgagtaccagtctgtgaagctggtgggccctgargtgcggatggcgaatgcagatgccaggaacatgggcgcagacctgtgccggcaggaccgcagctgcacctactacttcagcgtggatgctgacgtggccctgaccgagcccaacagcctgcggctgctgatccaacagaacaagaacgtcattgccccgctgatgacccggcatgggaggctgtggtcgaacttctggggggctctcagtgcagatggctactatgcccgttccgaggactacgtggacattgtgcaggggcggcgtgttggtgtctggaatgtgccctatatttcaaacatctacttgatcaagggcagtgccctgcggggtgagctgcagtcctcagatctcttccaccacagcaagctggaccccgacatggccttctgtgccaacatccggcagcaggatgtgttcatgttcctgaccaaccggcacacccttggccatctgctctccctagacagctascgcaccacccacctgcacaacgacctctgggaggtgttcagcaaccccgaggactggaaggagaagtacatccaccagaactacaccaaagccctggcmgggaagctggtggagacgccctgcccggatgtctattggttccccatcttcacggaggtggcctgtgatgagctggtggaggagatggagcactttggccagtggtctctgggcaacaacaaggacaaccgcatccagggtggctacgagaacgtkccgactattgacatccacatgaaccagatcggctttgagcgggagtgscacaaattcctgctggagtacattgcgcccatgacggagaagctctaccccggctactacaccagggcccagtttgacctggcctttgtcgtccgctacaagcctgatgagcagccctcactgatkccacaccatgatgcctccaccttcaccatcaacatcgccctgaacygagtcggggtggattacgagggcrggggctgtcggttcctgcgctacaactgttccatccgagccccaaggaagggctggaccctcatgcaccctggacgactcacgcattaccaygaggggctscccaccaccaggggcacccgctacatcgcagtctccttcgtcgatccctaattggccaggcctgaccctcttggacctttcttctttgccgacaaccactgcccagcagcctctgggacctsggggtcccagggaacccagtccagcctcctggctgttgacttcccattgctcttggagccaccaatcaaagagattcaaagagattcctgcaggccagaggcggaacacacctttatggctggggctctccgtggtgttctggacccagcccctggagacaccattcacttttactgctttgtagtgactcgtgctctccaacctgtcttcctaacaggggcttccccaagttgcccagaaagactgtctgggtgagaagccatggccagagcttctcccaggcacaggtgttgcaccagggacttctgcttcaagttttggggtaaagacacctggatcagactccaagggctgccctgagtctgggacttctgcctccatggctggtcatgagagcaaaccgtagtcccctggagacagcsactccagagaacctcttgggagacagaagaggcatctgtgcacagctcgatyttctacttgcctgtkgggaggggagtgacaggtccacacaccacactgggtcaccctgtcctggatgcctmtgaagagagggacagaccgtcagaaactggagagtttctattaaaggtcatttaaaccact

SEQ ID NO: 5030 - DNA, 3165 bp, Homo sapiens
aagccccgggagctgcacagagaggcggagggagctgccctaataaggagaggcccggacttgggcatatctgcagaaaaacccttccccactaggcaggcgcgggggagggcgtggaggggcggggtggtgccgcccccggggcgggcccagtgcgtggcagcgggacctgcggccccgtcgcgaagtttccagccctgcgagcgccgccgggtcggccgatcgtcccccatacctcggccatgcggcccctgctgctactggccctgctgggctggctgctgctggccgaagcgaagggcgacgccaagccggaggacaaccttttagtcctcacggtggccactaaggagaccgagggattccgtcgcttcaagcgctcagctyagttcttcaactacaagatccaggcgcttggyctaggggaggactggaatgtggagaaggggacgtcggcaggtggagggcagaaggtccggctgctgaagaaarctctggagaagcacgcagacaaggaggatctggtcattctcttyrcagacagctatgacgtgctgtttgcatcggggccccgggagctcctgaagaagttccggcagkccaggagccaggtggtcttctctgctgaggagctcatctacccagaccgcaggctggagaccaagtawccggtggtgtccgatggcaagaggttcctgggctctggaggcttcatcggttatgcccccaacctcagcaaactggtggccgagtgggagggccaggacagcgacagcgatcarctgttttacaccaagatcttcttggacccggagaagagggagcagatcaatatcaccctggaccaccgctgccgtatcttccagaacctggatggagccttggatgaggtcgtgctcaagtttgaaatgggccatgtgagagcgaggaacctggcctatgacaccctcccggtcctgatccatggcaacgggccaaccaagctgcagttgaactacctgggcaactacatcccgcgcttctggaccttcgaaacaggctgcaccgtgtgtgacgaaggcttgcgcagcctcaagggcattggggatgaagctctgcccacggtcctggtcggcgtgttcatcgaacagcccacgccgtttgtgtccctgttcttccagcggctcctgcggctccactacccccagaaacacatgygacttttcatccacaaccacgagyagcaccacaaggctcaggtggaagagttcctggcacagcatggcagcgagtaccagtctgtgaagctggtgggccctgargtgcggatggcgaatgcagatgccaggaacatgggcgcagacctgtgccggcaggaccgcagctgcacctactacttcagcgtggatgctgacgtggccctgaccgagcccaacagcctgcggctgctgatccaacagaacaagaacgtcattgccccgctgatgacccggcatgggaggctgtggtcgaacttctggggggctctcagtgcagatggctactatgcccgttccgaggactacgtggacattgtgcaggggcggcgtgttggtgtctggaatgtgccctatatttcaaacatctacttgatcaagggcagtgccctgcggggtgagctgcagtcctcagatctcttccaccacagcaagctggaccccgacatggccttctgtgccaacatccggcagcaggatgtgttcatgttcctgaccaaccggcacacccttggccatctgctctccctagacagctascgcaccacccacctgcacaacgacctctgggaggtgttcagcaaccccgaggactggaaggagaagtacatccaccagaactacaccaaagccctggcmgggaagctggtggagacgccctgcccggatgtctattggttccccatcttcacggaggtggcctgtgatgagctggtggaggagatggagcactttggccagtggtctctgggcaacaacaaggacaaccgcatccagggtggctacgagaacgtkccgactattgacatccacatgaaccagatcggctttgagcgggagtgscacaaattcctgctggagtacattgcgcccatgacggagaagctctaccccggctactacaccagggcccagtttgacctggcctttgtcgtccgctacaagcctgatgagcagccctcactgatkccacaccatgatgcctccaccttcaccatcaacatcgccctgaacygagtcggggtggattacgagggcrggggctgtcggttcctgcgctacaactgttccatccgagccccaaggaagggctggaccctcatgcaccctggacgactcacgcattaccaygaggggctscccaccaccaggggcacccgctacatcgcagtctccttcgtcgatccctaattggccaggcctgaccctcttggacctttcttctttgccgacaaccactgcccagcagcctctgggacctsggggtcccagggaacccagtccagcctcctggctgttgacttcccattgctcttggagccaccaatcaaagagattcaaagagattcctgcaggccagaggcggaacacacctttatggctggggctctccgtggtgttctggacccagcccctggagacaccattcacttttactgctttgtagtgactcgtgctctccaacctgtcttcctgaaaaaccaaggcccccttcccccacctcttccatggggtgagacttgagcagaacaggggcttccccaagttgcccagaaagactgtctgggtgagaagccatggccagagcttctcccaggcacaggtgttgcaccagggacttctgcttcaagttttggggtaaagacacctggatcagactccaagggctgccctgagtctgggacttctgcctccatggctggtcatgagagcaaaccgtagtcccctggagacagcsactccagagaacctcttgggagacagaagaggcatctgtgcacagctcgatyttctacttgcctgtkgggaggggagtgacaggtccacacaccacactgggtcaccctgtcctggatgcctmtgaagagagggacagaccgtcagaaactggagagtttctattaaaggtcatttaaaccactgaagggaa

SEQ ID NO: 5031 - DNA, 3458 bp, Homo sapiens
gccacagtggtgcggccggcggccgagcgttctgagtcacccgggactggagggccttcttcctgtgtggaaatacagygcctccggcttgaacctgccactcaggtgtcttgatgtgtcgggggtgtggctgcctgccccctgatgctccctgccccaccctgtgcagtaggaacccagccatggtgaacgaagccwgaggaaacagcagcctcaacccctgcttggagggcagtgccagcagtggcagtgagagctccaaagatagttcgagatgttccaccccgggcctggacccygagcggcatgagagactccgggagaagatgaggcsgcrattggaatctggtgacaagtggttctccctggaattcttccctcctcraactgctgagggagctgtcaatctcatctcaaggtttgaccggatggcagcaggtggccccctctacatagacgtgacctggcacccagcaggtgaccctggctcagacaaggagacctcctccatgatgatcgccagcacmrccgtgaactactgtggcctggagaccatcctgcacatgacctgctgccgtcagcgcctggaggagatcacrggccatctgcacaaagctaagcagctgggcctgaagaacatcatggcgctgcrgggagacccaataggtgaccagtgggaagaggaggagggaggcttcaactacgcagtggacctggtgaagcacatcygaagtgagtttggtgactactttgacatctgtgtggcaggttaccccaaaggccaccccgaagcagggagctttgaggctgacctgaagcacttgaaggagaaggtgtctgcgggagycgatttcatcaycaygcagcttttctttgaggctgacacattyttccgctttgtgaaggcatgcaccgacatgggcatcacttgccccatcgtccccgggatctttcccatccagggctaccactcccttcggcagcttgtgaagctgtccaagctggaggtgccacaggagatcaaggacgtgattgagccaatcaaagacaacgatgctgccatccgcaactatggcatcgagctggccgtgagcctgtgccaggagcttctggccagtggcttggtgccaggcctccacttctacacccycarcygcgagatggctaccacagaggtgctgaagcgcctggggatgtggactgaggaccccaggcgtcccctaccctgggctctcagygcccaccccaagygcygagaggaagatgtacgtcccatcttctgggcctccagaccaaagagttasatctaccgtacccaggagtgggacgagttccctaacgrccgctggggcaattcctcttcccctgcctttggggagctgaaggactactacctcttctacctgaagagcaagtcccccaaggaggagctgctgaagatgtggggggakgagctgaccagtgaagmaagtgtctttgaagtcttygttctttacctctcgggagaaccaaaccggaatggtcacaaagtgacttgcctgccctggaacgatgagcccctggcggctgagaccagcctgctgaaggaggagctgctgcgggtgaaccgccagggcatcctcaccatcaactcacagcccaacatcaacgggaagccrtcctccgaccccatcgtgggctggggccccagcgggggctatgtcttccagaaggcctacttagagtttttcacttcccgcgagacagcggaagcacttctgcaagtgctgaagaagtacgagctccgggttaattaccaccttgtcaatgtgaagggtgaaaacatcaccaatgcccctgaactgcagccgaatgctgtcacttggggcatcttccctgrgygagagatcatccagcccaccgtagtggatcccgtcagcttcatgttctggwaggacraggcctttgccctgtggattgagcrgtggggaaagctgtatgaggaggagtccccgtcccgcaccatcatccagtacatccacgacaactacttcctggtcaacctggtggacaatgacttcccactggacaactgcctctggcaggtggtggaagacacattggagcttctcaacaggcccacccagaatgcgagagaaayggaggctccatgaccctgcgtcctgacgccctgcgttggagccactcctgtcccgccttcctcctccacagtgctgcttctcttgggaactccactctccttcgtgtctctcccaccccggcctccactcccccacctgacaatggcagctagactggagtgaggcttccaggctcttcctggacctgagtcggccccacatgggaacctagtactctctgctctagccaggagtctgtgctcttttggtggggagcacttgcgtcctgcagaggaccacagtgggtggcacctcctgagaaggcgaggagagtggttgttgccaactaagccctcgaaccaaggcagcctccagagccagcctgggactcccagtgaacttacmcttggagcccgtgcagtacaggcaaaacacgcaagggcatcaggcactggtggcatcgtagaagagatgtggcaaagtgctgtacccttccacctcctagaggtgggcagctgggccccacctacttgtgactgaaggggcacaccactgccctgcctgcccacttagccgtccatggcaccagccccctggatgggcattgggctgacacctaccatgctgctttttggcacagttgtctattctgagccttgagagaaaaagtgccccttaagggttgaaggcagtctgaacccttgtgcttggtggggctcgtggccttccccttttgcctggctgtggaggcctgatgctgccccgttccctgtcagaggctaagatgagatttgccactgggatttcttcgctgctctagctggcaggacacatcccggcctcttcttccacccattcccccatgtggctgaagacattccaacaatggggtgggcccataatagttagccctcagtcagttcccggagcacagccctgggagggggctatttctctccccactgaaaacatttcaaagctgatttctccatcagcttatgggatccttgtctttactgacaagaatggaatagaaatgtaaaagtactctgaaaagcaattgccctgtaacttatctagaaagaaaagaccctgagactccagaatctgctgttgccatagccccatatgtgtgaattctgcaactagccaaggctagttcctttcaattccatttaaaaaacaaaaaccagcaggtgtggtggctcatggcgtaatgggcctgcccaatgctttgggaggccaaggcagrtagatcgcttgagcccaggagtttgagacaagccctggcaacatagtgagatcccatttctacaaaaaaaaaaaaaaaattagccg

SEQ ID NO: 5032 - DNA, 2855 bp, Homo sapiens
gaccatcgaaaagccagggtcctcccagctgggcactactgcccctcgctaggaatatgggcctcgcaggtcggcagcgtgaggtcctctgtgccaccttccatcagtaggaacccagccatggtgaacgaagccwgaggaaacagcagcctcaacccctgcttggagggcagtgccagcagtggcagtgagagctccaaagatagttcgagatgttccaccccgggcctggacccygagcggcatgagagactccgggagaagatgaggcsgcrattggaatctggtgacaagtggttctccctggaattcttccctcctcraactgctgagggagctgtcaatctcatctcaaggtttgaccggatggcagcaggtggccccctctacatagacgtgacctggcacccagcaggtgaccctggctcagacaaggagacctcctccatgatgatcgccagcacmrccgtgaactactgtggcctggagaccatcctgcacatgacctgctgccgtcagcgcctggaggagatcacrggccatctgcacaaagctaagcagctgggcctgaagaacatcatggcgctgcrgggagacccaataggtgaccagtgggaagaggaggagggaggcttcaactacgcagtggacctggtgaagcacatcygaagtgagtttggtgactactttgacatctgtgtggcaggttaccccaaaggccaccccgaagcagggagctttgaggctgacctgaagcacttgaaggagaaggtgtctgcgggagycgatttcatcaycaygcagcttttctttgaggctgacacattyttccgctttgtgaaggcatgcaccgacatgggcatcacttgccccatcgtccccgggatctttcccatccagggctaccactcccttcggcagcttgtgaagctgtccaagctggaggtgccacaggagatcaaggacgtgattgagccaatcaaagacaacgatgctgccatccgcaactatggcatcgagctggccgtgagcctgtgccaggagcttctggccagtggcttggtgccaggcctccacttctacacccycarcygcgagatggctaccacagaggtgctgaagcgcctggggatgtggactgaggaccccaggcgtcccctaccctgggctctcagygcccaccccaagygcygagaggaagatgtacgtcccatcttctgggcctccagaccaaagagttasatctaccgtacccaggagtgggacgagttccctaacgrccgctggggcaattcctcttcccctgcctttggggagctgaaggactactacctcttctacctgaagagcaagtcccccaaggaggagctgctgaagatgtggggggakgagctgaccagtgaagmaagtgtctttgaagtcttygttctttacctctcgggagaaccaaaccggaatggtcacaaagtgacttgcctgccctggaacgatgagcccctggcggctgagaccagcctgctgaaggaggagctgctgcgggtgaaccgccagggcatcctcaccatcaactcacagcccaacatcaacgggaagccrtcctccgaccccatcgtgggctggggccccagcgggggctatgtcttccagaaggcctacttagagtttttcacttcccgcgagacagcggaagcacttctgcaagtgctgaagaagtacgagctccgggttaattaccaccttgtcaatgtgaagggtgaaaacatcaccaatgcccctgaactgcagccgaatgctgtcacttggggcatcttccctgrgygagagatcatccagcccaccgtagtggatcccgtcagcttcatgttctggwaggacraggcctttgccctgtggattgagcrgtggggaaagctgtatgaggaggagtccccgtcccgcaccatcatccagtacatccacgacaactacttcctggtcaacctggtggacaatgacttcccactggacaactgcctctggcaggtggtggaagacacattggagcttctcaacaggcccacccagaatgcgagagaaayggaggctccatgaccctgcgtcctgacgccctgcgttggagccactcctgtcccgccttcctcctccacagtgctgcttctcttgggaactccactctccttcgtgtctctcccaccccggcctccactcccccacctgacaatggcagctagactggagtgaggcttccaggctcttcctggacctgagtcggccccacatgggaacctagtactctctgctctagccaggagtctgtgctcttttggtggggagcacttgcgtcctgcagaggaccacagtgggtggcacctcctgagaaggcgaggagagtggttgttgccaactaagccctcgaaccaaggcagcctccagagccagcctgggactcccagtgaacttacmcttggagcccgtgcagtacaggcaaaacacgcaagggcatcaggcactggtggcatcgtagaagagatgtggcaaagtgctgtacccttccacctcctagaggtgggcagctgggccccacctacttgtgactgaaggggcacaccactgccctgcctgcccacttagccgtccatggcaccagccccctggatgggcattgggctgacacctaccatgctgctttttggcacagttgtctattctgagccttgagagaaaaagtgccccttaagggttgaaggcagtctgaacccttgtgcttggtggggctcgtggccttccccttttgcctggctgtggaggcctgatgctgccccgttccctgtcagaggctaagatgagatttgcca

SEQ ID NO: 5033 - DNA, 2917 bp, Homo sapiens
gccacagtggtgcggccggcggccgagcgttctgagtcacccgggactggagggccttcttcctgtgtggaaatacagygcctccggcttgaacctgccactcaggtgtcttgatgtgtcgggggtgtggctgcctgccccctgatgctccctgccccaccctgtgcagtaggaacccagccatggtgaacgaagccwgaggaaacagcagcctcaacccctgcttggagggcagtgccagcagtggcagtgagagctccaaagatagttcgagatgttccaccccgggcctggacccygagcggcatgagagactccgggagaagatgaggcsgcrattggaatctggtgacaagtggttctccctggaattcttccctcctcraactgctgagggagctgtcaatctcatctcaaggtttgaccggatggcagcaggtggccccctctacatagacgtgacctggcacccagcaggtgaccctggctcagacaaggagacctcctccatgatgatcgccagcacmrccgtgaactactgtggcctggagaccatcctgcacatgacctgctgccgtcagcgcctggaggagatcacrggccatctgcacaaagctaagcagctgggcctgaagaacatcatggcgctgcrgggagacccaataggtgaccagtgggaagaggaggagggaggcttcaactacgcagtggacctggtgaagcacatcygaagtgagtttggtgactactttgacatctgtgtggcaggttaccccaaaggccaccccgaagcagggagctttgaggctgacctgaagcacttgaaggagaaggtgtctgcgggagycgatttcatcaycaygcagcttttctttgaggctgacacattyttccgctttgtgaaggcatgcaccgacatgggcatcacttgccccatcgtccccgggatctttcccatccagggctaccactcccttcggcagcttgtgaagctgtccaagctggaggtgccacaggagatcaaggacgtgattgagccaatcaaagacaacgatgctgccatccgcaactatggcatcgagctggccgtgagcctgtgccaggagcttctggccagtggcttggtgccaggcctccacttctacacccycarcygcgagatggctaccacagaggtgctgaagcgcctggggatgtggactgaggaccccaggcgtcccctaccctgggctctcagygcccaccccaagygcygagaggaagatgtacgtcccatcttctgggcctccagaccaaagagttasatctaccgtacccaggagtgggacgagttccctaacgrccgctggggcaattcctcttcccctgcctttggggagctgaaggactactacctcttctacctgaagagcaagtcccccaaggaggagctgctgaagatgtggggggakgagctgaccagtgaagmaagtgtctttgaagtcttygttctttacctctcgggagaaccaaaccggaatggtcacaaagtgacttgcctgccctggaacgatgagcccctggcggctgagaccagcctgctgaaggaggagctgctgcgggtgaaccgccagggcatcctcaccatcaactcacagcccaacatcaacgggaagccrtcctccgaccccatcgtgggctggggccccagcgggggctatgtcttccagaaggcctacttagagtttttcacttcccgcgagacagcggaagcacttctgcaagtgctgaagaagtacgagctccgggttaattaccaccttgtcaatgtgaagggtgaaaacatcaccaatgcccctgaactgcagccgaatgctgtcacttggggcatcttccctgrgygagagatcatccagcccaccgtagtggatcccgtcagcttcatgttctggwaggacraggcctttgccctgtggattgagcrgtggggaaagctgtatgaggaggagtccccgtcccgcaccatcatccagtacatccacgacaactacttcctggtcaacctggtggacaatgacttcccactggacaactgcctctggcaggtggtggaagacacattggagcttctcaacaggcccacccagaatgcgagagaaayggaggctccatgaccctgcgtcctgacgccctgcgttggagccactcctgtcccgccttcctcctccacagtgctgcttctcttgggaactccactctccttcgtgtctctcccaccccggcctccactcccccacctgacaatggcagctagactggagtgaggcttccaggctcttcctggacctgagtcggccccacatgggaacctagtactctctgctctagccaggagtctgtgctcttttggtggggagcacttgcgtcctgcagaggaccacagtgggtggcacctcctgagaaggcgaggagagtggttgttgccaactaagccctcgaaccaaggcagcctccagagccagcctgggactcccagtgaacttacmcttggagcccgtgcagtacaggcaaaacacgcaagggcatcaggcactggtggcatcgtagaagagatgtggcaaagtgctgtacccttccacctcctagaggtgggcagctgggccccacctacttgtgactgaaggggcacaccactgccctgcctgcccacttagccgtccatggcaccagccccctggatgggcattgggctgacacctaccatgctgctttttggcacagttgtctattctgagccttgagagaaaaagtgccccttaagggttgaaggcagtctgaacccttgtgcttggtggggctcgtggccttccccttttgcctggctgtggaggcctgatgctgccccgttccctgtcagaggctaagatgagatttgcca

SEQ ID NO: 5034 - DNA, 3396 bp, Homo sapiens
gaccatcgaaaagccagggtcctcccagctgggcactactgcccctcgctaggaatatgggcctcgcaggtcggcagcgtgaggtcctctgtgccaccttccatcagtaggaacccagccatggtgaacgaagccwgaggaaacagcagcctcaacccctgcttggagggcagtgccagcagtggcagtgagagctccaaagatagttcgagatgttccaccccgggcctggacccygagcggcatgagagactccgggagaagatgaggcsgcrattggaatctggtgacaagtggttctccctggaattcttccctcctcraactgctgagggagctgtcaatctcatctcaaggtttgaccggatggcagcaggtggccccctctacatagacgtgacctggcacccagcaggtgaccctggctcagacaaggagacctcctccatgatgatcgccagcacmrccgtgaactactgtggcctggagaccatcctgcacatgacctgctgccgtcagcgcctggaggagatcacrggccatctgcacaaagctaagcagctgggcctgaagaacatcatggcgctgcrgggagacccaataggtgaccagtgggaagaggaggagggaggcttcaactacgcagtggacctggtgaagcacatcygaagtgagtttggtgactactttgacatctgtgtggcaggttaccccaaaggccaccccgaagcagggagctttgaggctgacctgaagcacttgaaggagaaggtgtctgcgggagycgatttcatcaycaygcagcttttctttgaggctgacacattyttccgctttgtgaaggcatgcaccgacatgggcatcacttgccccatcgtccccgggatctttcccatccagggctaccactcccttcggcagcttgtgaagctgtccaagctggaggtgccacaggagatcaaggacgtgattgagccaatcaaagacaacgatgctgccatccgcaactatggcatcgagctggccgtgagcctgtgccaggagcttctggccagtggcttggtgccaggcctccacttctacacccycarcygcgagatggctaccacagaggtgctgaagcgcctggggatgtggactgaggaccccaggcgtcccctaccctgggctctcagygcccaccccaagygcygagaggaagatgtacgtcccatcttctgggcctccagaccaaagagttasatctaccgtacccaggagtgggacgagttccctaacgrccgctggggcaattcctcttcccctgcctttggggagctgaaggactactacctcttctacctgaagagcaagtcccccaaggaggagctgctgaagatgtggggggakgagctgaccagtgaagmaagtgtctttgaagtcttygttctttacctctcgggagaaccaaaccggaatggtcacaaagtgacttgcctgccctggaacgatgagcccctggcggctgagaccagcctgctgaaggaggagctgctgcgggtgaaccgccagggcatcctcaccatcaactcacagcccaacatcaacgggaagccrtcctccgaccccatcgtgggctggggccccagcgggggctatgtcttccagaaggcctacttagagtttttcacttcccgcgagacagcggaagcacttctgcaagtgctgaagaagtacgagctccgggttaattaccaccttgtcaatgtgaagggtgaaaacatcaccaatgcccctgaactgcagccgaatgctgtcacttggggcatcttccctgrgygagagatcatccagcccaccgtagtggatcccgtcagcttcatgttctggwaggacraggcctttgccctgtggattgagcrgtggggaaagctgtatgaggaggagtccccgtcccgcaccatcatccagtacatccacgacaactacttcctggtcaacctggtggacaatgacttcccactggacaactgcctctggcaggtggtggaagacacattggagcttctcaacaggcccacccagaatgcgagagaaayggaggctccatgaccctgcgtcctgacgccctgcgttggagccactcctgtcccgccttcctcctccacagtgctgcttctcttgggaactccactctccttcgtgtctctcccaccccggcctccactcccccacctgacaatggcagctagactggagtgaggcttccaggctcttcctggacctgagtcggccccacatgggaacctagtactctctgctctagccaggagtctgtgctcttttggtggggagcacttgcgtcctgcagaggaccacagtgggtggcacctcctgagaaggcgaggagagtggttgttgccaactaagccctcgaaccaaggcagcctccagagccagcctgggactcccagtgaacttacmcttggagcccgtgcagtacaggcaaaacacgcaagggcatcaggcactggtggcatcgtagaagagatgtggcaaagtgctgtacccttccacctcctagaggtgggcagctgggccccacctacttgtgactgaaggggcacaccactgccctgcctgcccacttagccgtccatggcaccagccccctggatgggcattgggctgacacctaccatgctgctttttggcacagttgtctattctgagccttgagagaaaaagtgccccttaagggttgaaggcagtctgaacccttgtgcttggtggggctcgtggccttccccttttgcctggctgtggaggcctgatgctgccccgttccctgtcagaggctaagatgagatttgccactgggatttcttcgctgctctagctggcaggacacatcccggcctcttcttccacccattcccccatgtggctgaagacattccaacaatggggtgggcccataatagttagccctcagtcagttcccggagcacagccctgggagggggctatttctctccccactgaaaacatttcaaagctgatttctccatcagcttatgggatccttgtctttactgacaagaatggaatagaaatgtaaaagtactctgaaaagcaattgccctgtaacttatctagaaagaaaagaccctgagactccagaatctgctgttgccatagccccatatgtgtgaattctgcaactagccaaggctagttcctttcaattccatttaaaaaacaaaaaccagcaggtgtggtggctcatggcgtaatgggcctgcccaatgctttgggaggccaaggcagrtagatcgcttgagcccaggagtttgagacaagccctggcaacatagtgagatcccatttctacaaaaaaaaaaaaaaaattagccg

SEQ ID NO: 5035 - DNA, 2745 bp, Homo sapiens
gaacccagccatggtgaacgaagccwgaggaaacagcagcctcaacccctgcttggagggcagtgccagcagtggcagtgagagctccaaagatagttcgagatgttccaccccgggcctggacccygagcggcatgagagactccgggagaagatgaggcsgcrattggaatctggtgacaagtggttctccctggaattcttccctcctcraactgctgagggagctgtcaatctcatctcaaggtttgaccggatggcagcaggtggccccctctacatagacgtgacctggcacccagcaggtgaccctggctcagacaaggagacctcctccatgatgatcgccagcacmrccgtgaactactgtggcctggagaccatcctgcacatgacctgctgccgtcagcgcctggaggagatcacrggccatctgcacaaagctaagcagctgggcctgaagaacatcatggcgctgcrgggagacccaataggtgaccagtgggaagaggaggagggaggcttcaactacgcagtggacctggtgaagcacatcygaagtgagtttggtgactactttgacatctgtgtggcaggttaccccaaaggccaccccgaagcagggagctttgaggctgacctgaagcacttgaaggagaaggtgtctgcgggagycgatttcatcaycaygcagcttttctttgaggctgacacattyttccgctttgtgaaggcatgcaccgacatgggcatcacttgccccatcgtccccgggatctttcccatccagggctaccactcccttcggcagcttgtgaagctgtccaagctggaggtgccacaggagatcaaggacgtgattgagccaatcaaagacaacgatgctgccatccgcaactatggcatcgagctggccgtgagcctgtgccaggagcttctggccagtggcttggtgccaggcctccacttctacacccycarcygcgagatggctaccacagaggtgctgaagcgcctggggatgtggactgaggaccccaggcgtcccctaccctgggctctcagygcccaccccaagygcygagaggaagatgtacgtcccatcttctgggcctccagaccaaagagttasatctaccgtacccaggagtgggacgagttccctaacgrccgctggggcaattcctcttcccctgcctttggggagctgaaggactactacctcttctacctgaagagcaagtcccccaaggaggagctgctgaagatgtggggggakgagctgaccagtgaagmaagtgtctttgaagtcttygttctttacctctcgggagaaccaaaccggaatggtcacaaagtgacttgcctgccctggaacgatgagcccctggcggctgagaccagcctgctgaaggaggagctgctgcgggtgaaccgccagggcatcctcaccatcaactcacagcccaacatcaacgggaagccrtcctccgaccccatcgtgggctggggccccagcgggggctatgtcttccagaaggcctacttagagtttttcacttcccgcgagacagcggaagcacttctgcaagtgctgaagaagtacgagctccgggttaattaccaccttgtcaatgtgaagggtgaaaacatcaccaatgcccctgaactgcagccgaatgctgtcacttggggcatcttccctgrgygagagatcatccagcccaccgtagtggatcccgtcagcttcatgttctggwaggacraggcctttgccctgtggattgagcrgtggggaaagctgtatgaggaggagtccccgtcccgcaccatcatccagtacatccacgacaactacttcctggtcaacctggtggacaatgacttcccactggacaactgcctctggcaggtggtggaagacacattggagcttctcaacaggcccacccagaatgcgagagaaayggaggctccatgaccctgcgtcctgacgccctgcgttggagccactcctgtcccgccttcctcctccacagtgctgcttctcttgggaactccactctccttcgtgtctctcccaccccggcctccactcccccacctgacaatggcagctagactggagtgaggcttccaggctcttcctggacctgagtcggccccacatgggaacctagtactctctgctctagccaggagtctgtgctcttttggtggggagcacttgcgtcctgcagaggaccacagtgggtggcacctcctgagaaggcgaggagagtggttgttgccaactaagccctcgaaccaaggcagcctccagagccagcctgggactcccagtgaacttacmcttggagcccgtgcagtacaggcaaaacacgcaagggcatcaggcactggtggcatcgtagaagagatgtggcaaagtgctgtacccttccacctcctagaggtgggcagctgggccccacctacttgtgactgaaggggcacaccactgccctgcctgcccacttagccgtccatggcaccagccccctggatgggcattgggctgacacctaccatgctgctttttggcacagttgtctattctgagccttgagagaaaaagtgccccttaagggttgaaggcagtctgaacccttgtgcttggtggggctcgtggccttccccttttgcctggctgtggaggcctgatgctgccccgttccctgtcagaggctaagatgagatttgcca

SEQ ID NO: 5036 - DNA, 2842 bp, Homo sapiens
cacctgcgccgcgccccttcactgcgttccccgcccctgcagcggccacagtggtgcggccggcggccgagcgttctgagtcacccgggactggagggaacccagccatggtgaacgaagccwgaggaaacagcagcctcaacccctgcttggagggcagtgccagcagtggcagtgagagctccaaagatagttcgagatgttccaccccgggcctggacccygagcggcatgagagactccgggagaagatgaggcsgcrattggaatctggtgacaagtggttctccctggaattcttccctcctcraactgctgagggagctgtcaatctcatctcaaggtttgaccggatggcagcaggtggccccctctacatagacgtgacctggcacccagcaggtgaccctggctcagacaaggagacctcctccatgatgatcgccagcacmrccgtgaactactgtggcctggagaccatcctgcacatgacctgctgccgtcagcgcctggaggagatcacrggccatctgcacaaagctaagcagctgggcctgaagaacatcatggcgctgcrgggagacccaataggtgaccagtgggaagaggaggagggaggcttcaactacgcagtggacctggtgaagcacatcygaagtgagtttggtgactactttgacatctgtgtggcaggttaccccaaaggccaccccgaagcagggagctttgaggctgacctgaagcacttgaaggagaaggtgtctgcgggagycgatttcatcaycaygcagcttttctttgaggctgacacattyttccgctttgtgaaggcatgcaccgacatgggcatcacttgccccatcgtccccgggatctttcccatccagggctaccactcccttcggcagcttgtgaagctgtccaagctggaggtgccacaggagatcaaggacgtgattgagccaatcaaagacaacgatgctgccatccgcaactatggcatcgagctggccgtgagcctgtgccaggagcttctggccagtggcttggtgccaggcctccacttctacacccycarcygcgagatggctaccacagaggtgctgaagcgcctggggatgtggactgaggaccccaggcgtcccctaccctgggctctcagygcccaccccaagygcygagaggaagatgtacgtcccatcttctgggcctccagaccaaagagttasatctaccgtacccaggagtgggacgagttccctaacgrccgctggggcaattcctcttcccctgcctttggggagctgaaggactactacctcttctacctgaagagcaagtcccccaaggaggagctgctgaagatgtggggggakgagctgaccagtgaagmaagtgtctttgaagtcttygttctttacctctcgggagaaccaaaccggaatggtcacaaagtgacttgcctgccctggaacgatgagcccctggcggctgagaccagcctgctgaaggaggagctgctgcgggtgaaccgccagggcatcctcaccatcaactcacagcccaacatcaacgggaagccrtcctccgaccccatcgtgggctggggccccagcgggggctatgtcttccagaaggcctacttagagtttttcacttcccgcgagacagcggaagcacttctgcaagtgctgaagaagtacgagctccgggttaattaccaccttgtcaatgtgaagggtgaaaacatcaccaatgcccctgaactgcagccgaatgctgtcacttggggcatcttccctgrgygagagatcatccagcccaccgtagtggatcccgtcagcttcatgttctggwaggacraggcctttgccctgtggattgagcrgtggggaaagctgtatgaggaggagtccccgtcccgcaccatcatccagtacatccacgacaactacttcctggtcaacctggtggacaatgacttcccactggacaactgcctctggcaggtggtggaagacacattggagcttctcaacaggcccacccagaatgcgagagaaayggaggctccatgaccctgcgtcctgacgccctgcgttggagccactcctgtcccgccttcctcctccacagtgctgcttctcttgggaactccactctccttcgtgtctctcccaccccggcctccactcccccacctgacaatggcagctagactggagtgaggcttccaggctcttcctggacctgagtcggccccacatgggaacctagtactctctgctctagccaggagtctgtgctcttttggtggggagcacttgcgtcctgcagaggaccacagtgggtggcacctcctgagaaggcgaggagagtggttgttgccaactaagccctcgaaccaaggcagcctccagagccagcctgggactcccagtgaacttacmcttggagcccgtgcagtacaggcaaaacacgcaagggcatcaggcactggtggcatcgtagaagagatgtggcaaagtgctgtacccttccacctcctagaggtgggcagctgggccccacctacttgtgactgaaggggcacaccactgccctgcctgcccacttagccgtccatggcaccagccccctggatgggcattgggctgacacctaccatgctgctttttggcacagttgtctattctgagccttgagagaaaaagtgccccttaagggttgaaggcagtctgaacccttgtgcttggtggggctcgtggccttccccttttgcctggctgtggaggcctgatgctgccccgttccctgtcagaggctaagatgagatttgcca

SEQ ID NO: 5037 - DNA, 1009 bp, Homo sapiens
attgcaggctgggtagctggtagaaatgttgtgggcgtttgtaagtggaagatttacgccattataaccctaatatattcctgcagagtaacaacacagcctatctaatatacaatgatggagtccctaaacctgtgaattacagcagaaagtatggacacaccaaaggtttactgctgtggaacagagttcaagggttctggctgattcattccatccctcagtttcctccaattccggaagaaggctatgattatccacccacagggagacgaaatggacaaagtggcatctgcataactttcaagtacaaccagtatgaggcaatagattctcagctcttggtctgcaaccccaacgtctatagctgctccatcccagccacctttcaccaggagctcattcacatgccccagctgtgcaccagggccagctcatcagagattcctggcaggctcctcaccacacttcagtckgcccagggacaaaaattcctccattttgcaaagtcggattcttttcttgaygacatctttgcagcctggatggctcaacggctgaagacacacttgttaacagaaacctggcagcgaaaaagacaagagcttccttcaaactgctcccttccttaccatgtctacaatataaaagcaattaaattatcacgacactcttatttcagttcttatcaagatcaygccaagtggtgtatttcccaaaagggcaccaaaaatcgctggacatgtattggagacctaaatcggagtccacaccaagccttcagaagtggaggattcatttgtacccagaattggcaaatttaccaagcatttcaaggattagtattatactatgaaagctgtaagtaaacttggtgaaaggacacaggtactatcattgaaaaccttgacaatgggtcttcttccattacaccttctttatattttaaaggcctgtgaatatacttataacctgcatatcacaaaataaaacatttttctctcatgtt

SEQ ID NO: 5038 - DNA, 1259 bp, Homo sapiens
atggggaaagtgtcctgctgtggcatgaaataaatgaaacasaaaatgatggcaagactgctaagaacatcctttgctttgctcttccttggcctctttggggtgctgggggcagcaacaatttcatgcagaaatgaagaagggaaagctgtggactggtttactttttataagttacctaaaaracaaaacaaggaaagtggagagactgggttagagtacctgtacctagactctacaactagaagctggaggaagagtgagcaactaatgaatgacaccaagagtgttttgggaaggacattacaacagctatatgaagcatatgcctctaagagtaacaacacagcctatctaatatacaatgatggagtccctaaacctgtgaattacagcagaaagtatggacacaccaaaggtttactgctgtggaacagagttcaagggttctggctgattcattccatccctcagtttcctccaattccggaagaaggctatgattatccacccacagggagacgaaatggacaaagtggcatctgcataactttcaagtacaaccagtatgaggcaatagattctcagctcttggtctgcaaccccaacgtctatagctgctccatcccagccacctttcaccaggagctcattcacatgccccagctgtgcaccagggccagctcatcagagattcctggcaggctcctcaccacacttcagtckgcccagggacaaaaattcctccattttgcaaagtcggattcttttcttgaygacatctttgcagcctggatggctcaacggctgaagacacacttgttaacagaaacctggcagcgaaaaagacaagagcttccttcaaactgctcccttccttaccatgtctacaatataaaagcaattaaattatcacgacactcttatttcagttcttatcaagatcaygccaagtggtgtatttcccaaaagggcaccaaaaatcgctggacatgtattggagacctaaatcggagtccacaccaagccttcagaagtggaggattcatttgtacccagaattggcaaatttaccaagcatttcaaggattagtattatactatgaaagctgtaagtaaacttggtgaaaggacacaggtactatcattgaaaaccttgacaatgggtcttcttccattacaccttctttatattttaaaggcctgtgaatatacttataacctgcatatcacaaaataaaacatttttctctcatgtt

SEQ ID NO: 5039 - DNA, 3329 bp, Homo sapiens
atttcaggacttcgctttcgggttcccttgtcctgtgttgtgtaatgcccccgttatggcactagaaatattttttattagccgaagctaaatatagtgggactttggctgatcccgagctcggaggacagccggggtgatccgtttccccccgaggatcgaggtggtgcgctctggacggggttgtgcattctcgccgcgcccgggcggacgatccagcgaacagccccgcttctaacccgagatgctgctgccggcgcccgcgctccgccgcgccctgctgtcccgcccctggaccggggccggcctgcggtggaagcacacctcctccctgaaggtggccaacgagcccgtcttagccttcacgcagggcagccctgagcgagatgccctgcaaaaggccttgaaggacctgaagggccggatggaagccatcccatgcgtggtgggggatgaggaggtgtggacgtcggacgtgcagtaccaagtgtcgccttttaaccatggacataaggtggccaagttctgttatgcagacaagagcctgctcaacaaagccattgaggctgccctggctgcccggaaagagtgggacctgaagcctattgcagaccgggcccagatcttcctgaaggcggcagacatgctgagtgggccgcgcagggctgagatcctcgccaagaccatggtgggacagggtaagaccgtgatccaagcggagattgacgctgcagcggaactcatcgacttcttccggttcaatgccaagtatgcggtggagctggaggggcagcagcccatcagcgtgcccccgagcaccaacagcacggtgtaccggggtctggagggcttcgtggcggccatctcgccctttaacttcactgcaatcggcggcaacctggcgggggcaccggccctgatgggcaacgtggtcctatggaagcccagtgacactgccatgctggccagctatgctgtctaccgcatycttcgggaggctggcctgccccccaacatcatccagtttgtgccagctgatgggcccctatttggggacactgtcaccagctcagagcacctctgtggcatcaacttcacaggcagtgtgcccaccttcaaacacctgtggaagcaggtggcccagaacctggaccggttccacaccttcccacgcctggctggagagtgcggcggaaagaacttccacttcgtgcaccgctcggccgacgtggagagcgtggtgagcgggaccctccgctcagccttcgagtacggtggccagaagtgttccgcstgctygcgtctctacgtgccgcactcgctgtggccrcagatcaaarggcggctgctggaggagcacagtcggatcaaagtgggcgaccctgcagaggattttgggaccttcttctctgcagtgattgatgccaagtcctttgcccgtatcaagaagtggctggagcacgcrcgctcctcrcccagcctcaccatcctggcygggggcaagtgtgatgactccgtgggctactttgtggagccctgcatcgtggagagcaaggaccctcaggagcccatcatgaaggaggagatcttcgggcctgtactgtctgtgtacgtctacccggaygacaagtacaaggagacgctgcagctgrttgacagcaccaccagctatggcctcacgggggcagtgttctcccaggataaggacgtcgtgcaggaggccacaaaggtgctgaggaatgctgccggcaacttctacatcaacgacaagtccactggctcgatagtgggycagcagccctttgggggggcccgagcctctggaaccaatgacaagccagggggcccacactacatcctgcgctggacgtcgccgcaggtcatcaaggagacacataagcccctgggggactggagctacgcgtacatgcagtgagcccctctcgggctccaccgtccagctgtctgtcygtccaggtggccgacctcactgcacagaccccactccagcccctccaccccttcttcatgcacagctgcctttctataatccrggcytgactcccttcttaccactgtattctggcctctcccatgcctcaggctctggtttgagatcgtgctggggaggaacatggccactaccccttatcccatcggccatgtgggaggtatgaccctggtgcctggcaggttctccctctgccctccactgggcccagtggctcagggacctggggaaaggagatggagcagctcttgggatcctttggggaaaaggaggccattctgggccccttggcaaacctcaccactcacagaggctcctggccttgatccctgcccctccaggtgtccagggtaaagtgtaactcagacygacctgtggggcacagggggcaccagctggccttgccctctctggtctgggctgtctrccttcctcactgtatctttgcccagacccacctgggccagtaggcccctgtccccagccacacaccttagatgctggcatgccttactccaggtgcctgtgtttggccgaggcctgtgtgattcccggtctgcaccacatggcggggttggggggccgctggaggccacctgccaaggcgtgggatgggatggtcctgccggtttaggcygtgattctggaaaaccttggatgggccttcgtcctatgtcagccttccctytgatcctcaggccctacctgtagagacctccactcctagagccagtctcagggtctgggatttccctgcaggagctcagccaccactgtgccatggtgacacaggccaaggcagacattggccctcccttctcccagcccccagaggcctggccttgrgttygtcagcatgggccgaggacgttgcctgtagaatcctcctctgcctgggagtggctctgtgtggaccagtccctcactggcccattctttttttgacgcagccaatctgtgaccacgattcctcccacagatgcctcctgcttggattctgagtggtcagagatctgtaaagcatgactttcaaggatggttcttaggggactgtgaaartgttgggtcttcctccaggatgcctgcatgggaccccacccggagctggtgtggccattcccsragtgctggtgccasctgggctgggtgtgggttctgtgtccttccaggatmtgtgtcatttcccatgaggggccggggcaggtggctgggtgggggcacaggctggagtattyttagttctactggttctacactgtgaggtggcaatgggatttgctcagatgccacccaataaaatgcctgttacttaatcaca

SEQ ID NO: 5040 - DNA, 3351 bp, Homo sapiens
atttcaggacttcgctttcgggttcccttgtcctgtgttgtgtaatgcccccgttatggcactagaaatattttttattagccgaagctaaatatagtgggactttggctgatcccgagctcggaggacagccggggtgatccgtttccccccgaggatcgaggtggtgcgctctggacggggttgtgcattctcgccgcgcccgggcggacgatccagcgaacagccccgcttctaacccgagatgctgctgccggcgcccgcgctccgccgcgccctgctgtcccgcccctggaccggggccggcctgcggtggaagcacacctcctccctgaaggtggccaacgagcccgtcttagccttcacgcagggcagccctgagcgagatgccctgcaaaaggccttgaaggacctgaagggccggatggaagccatcccatgcgtggtgggggatgaggaggtgtggacgtcggacgtgcagtaccaagtgtcgccttttaaccatggacataaggtggccaagttctgttatgcagacaagagcctgctcaacaaagccattgaggctgccctggctgcccggaaagagtgggacctgaagcctattgcagaccgggcccagatcttcctgaaggcggcagacatgctgagtgggccgcgcagggctgagatcctcgccaagaccatggtgggacagggtaagaccgtgatccaagcggagattgacgctgcagcggaactcatcgacttcttccggttcaatgccaagtatgcggtggagctggaggggcagcagcccatcagcgtgcccccgagcaccaacagcacggtgtaccggggtctggagggcttcgtggcggccatctcgccctttaacttcactgcaatcggcggcaacctggcgggggcaccggccctgatgggcaacgtggtcctatggaagcccagtgacactgccatgctggccagctatgctgtctaccgcatycttcgggaggctggcctgccccccaacatcatccagtttgtgccagctgatgggcccctatttggggacactgtcaccagctcagagcacctctgtggcatcaacttcacaggcagtgtgcccaccttcaaacacctgtggaagcaggtggcccagaacctggaccggttccacaccttcccacgcctggctggagagtgcggcggaaagaacttccacttcgtgcaccgctcggccgacgtggagagcgtggtgagcgggaccctccgctcagccttcgagtacggtggccagaagtgttccgcstgctygcgtctctacgtgccgcactcgctgtggccrcagatcaaarggcggctgctggaggagcacagtcggatcaaagtgggcgaccctgcagaggattttgggaccttcttctctgcagtgattgatgccaagtcctttgcccgtatcaagaagtggctggagcacgcrcgctcctcrcccagcctcaccatcctggcygggggcaagtgtgatgactccgtgggctactttgtggagccctgcatcgtggagagcaaggaccctcaggagcccatcatgaaggaggagatcttcgggcctgtactgtctgtgtacgtctacccggaygacaagtacaaggagacgctgcagctgrttgacagcaccaccagctatggcctcacgggggcagtgttctcccaggataaggacgtcgtgcaggaggccacaaaggtgctgaggaatgctgccggcaacttctacatcaacgacaagtccactggctcgatagtgggycagcagccctttgggggggcccgagcctctggaaccaatgacaagccagggggcccacactacatcctgcgctggacgtcgccgcaggtcatcaaggagacacataagcccctgggggactggagctacgcgtacatgcagtgagcccctctcgggctccaccgtccagctgtctgtcygtccaggtggccgacctcactgcacagaccccactccagcccctccaccccttcttcatgcacagctgcctttctataatccrggcytgactcccttcttaccactgtattctggcctctcccatgcctcaggctctggtttgagatcgtgctggggaggaacatggccactaccccttatcccatcggccatgtgggaggtatgaccctggtgcctggcaggttctccctctgccctccactgggcccagtggctcagggacctggggaaaggagatggagcagctcttgggatcctttggggaaaaggaggccattctgggccccttggcaaacctcaccactcacagaggctcctggccttgatccctgcccctccaggtgtccagggtaaagtgtaactcagacygacctgtggggcacagggggcaccagctggccttgccctctctggtctgggctgtctrccttcctcactgtatctttgcccagacccacctgggccagtaggcccctgtccccagccacacaccttagatgctggcatgccttactccaggtgcctgtgtttggccgaggcctgtgtgattcccggtctgcaccacatggcggggttggggggccgctggaggccacctgccaaggcgtgggatgggatggtcctgccggtttaggcygtgattctggaaaaccttggatgggccttcgtcctatgtcagccttccctytgatcctcaggccctacctgtagagacctccactcctagagccagtctcagggtctgggatttccctgcaggagctcagccaccactgtgccatggtgacacaggccaaggcagacattggccctcccttctcccagcccccagaggcctggccttgrgttygtcagcatgggccgaggacgttgcctgtagaatcctcctctgcctgggagtggctctgtgtggaccagtccctcactggcccattctttttttgacgcagccaatctgtgaccacgattcctcccacagatgcctcctgcttggattctgagtggtcagagatctgtaaagcatgactttcaaggatggttcttaggggactgtgaaartgttgggtcttcctccaggatgcctgcatgggaccccacccggagctggtgtggccattcccsragtgccactggcccatggatgggggtgggtgctggtgccasctgggctgggtgtgggttctgtgtccttccaggatmtgtgtcatttcccatgaggggccggggcaggtggctgggtgggggcacaggctggagtattyttagttctactggttctacactgtgaggtggcaatgggatttgctcagatgccacccaataaaatgcctgttacttaa

SEQ ID NO: 5041 - DNA, 2336 bp, Homo sapiens
atttcaggacttcgctttcgggttcccttgtcctgtgttgtgtaatgcccccgttatggcactagaaatattttttattagccgaagctaaatatagtgggactttggctgatcccgagctcggaggacagccggggtgatccgtttccccccgaggatcgaggtggtgcgctctggacggggttgtgcattctcgccgcgcccgggcggacgatccagcgaacagccccgcttctaacccgagatgctgctgccggcgcccgcgctccgccgcgccctgctgtcccgcccctggaccggggccggcctgcggtggaagcacacctcctccctgaaggtggccaacgagcccgtcttagccttcacgcagggcagccctgagcgagatgccctgcaaaaggccttgaaggacctgaagggccggatggaagccatcccatgcgtggtgggggatgaggaggtgtggacgtcggacgtgcagtaccaagtgtcgccttttaaccatggacataaggtggccaagttctgttatgcagacaagagcctgctcaacaaagccattgaggctgccctggctgcccggaaagagtgggacctgaagcctattgcagaccgggcccagatcttcctgaaggcggcagacatgctgagtgggccgcgcagggctgagatcctcgccaagaccatggtgggacagggtaagaccgtgatccaagcggagattgacgctgcagcggaactcatcgacttcttccggttcaatgccaagtatgcggtggagctggaggggcagcagcccatcagcgtgcccccgagcaccaacagcacggtgtaccggggtctggagggcttcgtggcggccatctcgccctttaacttcactgcaatcggcggcaacctggcgggggcaccggccctgatgggcaacgtggtcctatggaagcccagtgacactgccatgctggccagctatgctgtctaccgcatycttcgggaggctggcctgccccccaacatcatccagtttgtgccagctgatgggcccctatttggggacactgtcaccagctcagagcacctctgtggcatcaacttcacaggcagtgtgcccaccttcaaacacctgtggaagcaggtggcccagaacctggaccggttccacaccttcccacgcctggctggagagtgcggcggaaagaacttccacttcgtgcaccgctcggccgacgtggagagcgtggtgagcgggaccctccgctcagccttcgagtacggtggccagaagtgttccgcstgctygcgtctctacgtgccgcactcgctgtggccrcagatcaaarggcggctgctggaggagcacagtcggatcaaagtgggcgaccctgcagaggattttgggaccttcttctctgcagtgattgatgccaagtcctttgcccgtatcaagaagtggctggagcacgcrcgctcctcrcccagcctcaccatcctggcygggggcaagtgtgatgactccgtgggctactttgtggagccctgcatcgtggagagcaaggaccctcaggagcccatcatgaaggaggagatcttcgggcctgtactgtctgtgtacgtctacccggaygacaagtacaaggagacgctgcagctgrttgacagcaccaccagctatggcctcacgggggcagtgttctcccaggataaggacgtcgtgcaggaggccacaaaggtgctgaggaatgctgccggcaacttctacatcaacgacaagtccactggctcgatagtgggycagcagccctttgggggggcccgagcctctggaaccaatgacaagccagggggcccacactacatcctgcgctggacgtcgccgcaggtcatcaaggagacacataagcccctgggggactggagctacgcgtacatgcagtgagcccctctcgggctccaccgtccagctgtctgtcygtccagatgcctcctgcttggattctgagtggtcagagatctgtaaagcatgactttcaaggatggttcttaggggactgtgaaartgttgggtcttcctccaggatgcctgcatgggaccccacccggagctggtgtggccattcccsragtgccactggcccatggatgggggtgggtgctggtgccasctgggctgggtgtgggttctgtgtccttccaggatmtgtgtcatttcccatgaggggccggggcaggtggctgggtgggggcacaggctggagtattyttagttctactggttctacactgtgaggtggcaatgggatttgctcagatgccacccaataaaatgcctgttactt

SEQ ID NO: 5042 - DNA, 1178 bp, Homo sapiens
gaagagagcaaggtgggaggggcgcgctggggagcttcggcgcatgcgcgctgaggcctgcctgaccgaccttcagcagggctgtggctaccatgttctctcgcgcgggtgtcgctgggctgtcggcctggaccttgcagscgcaatggattcaagttcgaaatatggcaactttgaaagatatcaccaggagactaaagtccatcaaaaacatccagaaaattaccaagtctatgaaaatggtagcggcagcaaaatatgcccgagctgagagagagctgaaaccagctcgaatatatggattgggatctttagctctgtatgaaaaagctgatatcaaggggcctgaagacaagaagaaacacctccttattggtgtgtcctcagatcgaggactgtgtggtgctattcattcctccattgctaaacagatgaaaagcgaggttgctacactaacagcagctgggaaagaagttatgcttgttggaattggtgacaaaatcagaggcatactttataggactcattctgaccagtttctggtggcattcaaagaagtgggaagaaagccccccacttttggagatgcgtcagtcattgcccttgaattactaaattctggatatgaatttgatgaaggctccatcatctttaataaattcaggtctgtcatctcctataagacagaagaaaagcccatcttttcccttaataccgttgcaagtgctgacagcatgagtatctatgacgatattgatgctgacgtgctgcaaaattaccaagaatacaatctggccaacatcatctactactctctgaaggagtccaccactagtgagcagagtgccaggatgacagccatggacaatgccagcaagaatgcttctgagatgattgacaaattgacattgacattcaaccgtacccgccaagctgtcatcacaaaagagttgattgaaattatctctggtgctgcagctctggattaatgaaaatcaagttccatcctcagacaagaggtaaagaaggaaaattcagccagttgattttgtttttagcttactgctgcctttgtccgaagaaacygttcctccattatttgaattactgaagacagcaagatatttgtaaattatcttaaaataaacaacttaaaataaaatcattgtttttcttat

SEQ ID NO: 5043 - DNA, 1139 bp, Homo sapiens
gaagagagcaaggtgggaggggcgcgctggggagcttcggcgcatgcgcgctgaggcctgcctgaccgaccttcagcagggctgtggctaccatgttctctcgcgcgggtgtcgctgggctgtcggcctggaccttgcagscgcaatggattcaagttcgaaatatggcaactttgaaagatatcaccaggagactaaagtccatcaaaaacatccagaaaattaccaagtctatgaaaatggtagcggcagcaaaatatgcccgagctgagagagagctgaaaccagctcgaatatatggattgggatctttagctctgtatgaaaaagctgatatcaaggggcctgaagacaagaagaaacacctccttattggtgtgtcctcagatcgaggactgtgtggtgctattcattcctccattgctaaacagatgaaaagcgaggttgctacactaacagcagctgggaaagaagttatgcttgttggaattggtgacaaaatcagaggcatactttataggactcattctgaccagtttctggtggcattcaaagaagtgggaagaaagccccccacttttggagatgcgtcagtcattgcccttgaattactaaattctggatatgaatttgatgaaggctccatcatctttaataaattcaggtctgtcatctcctataagacagaagaaaagcccatcttttcccttaataccgttgcaagtgctgacagcatgagtatctatgacgatattgatgctgacgtgctgcaaaattaccaagaatacaatctggccaacatcatctactactctctgaaggagtccaccactagtgagcagagtgccaggatgacagccatggacaatgccagcaagaatgcttctgagatgattgacaaattgacattgacattcaaccgtacccgccaagctgtcatcacaaaagagttgattgaaattatctctggtgctgcagctctgtaaagaaggaaaattcagccagttgattttgtttttagcttactgctgcctttgtccgaagaaacygttcctccattatttgaattactgaagacagcaagatatttgtaaattatcttaaaataaacaacttaaaataaaatcattgtttttctt

SEQ ID NO: 5044 - DNA, 1157 bp, Homo sapiens
cacccgggaaacckgaagccgcctcccacttggttgctcgtacgcggctagtgggtcctcagtggatgtaggctgggcgccgcgatgttcgacgggacaccggcggagagcgacctcggggttaaggggtggggctgacgtcaggarccaagatggcggcggtggtcgcmctctccttgaggcgccggttgccggccacaacccttggcggagcctgcctgcaggcctcccgaggagcccagacagctgcagccacagctccccgtatcaagaaatttgccatctatsgatgggacccagacaaggctgragacaaacctcrtatgcagrcttatgaagttgaccttaataaatgtggccccatggtattggatgctttaatcaagattaagaatgaagttgactctactttgaccttcygaagatcatgcagagaaggcatctgtggctcttrtgcaatgaacatcaatggaggcaacactctagcttgcacccgaaggattgacaccaacctcaataaggtctcaaaaatctaccctcttccacacatgtatgtgataaaggatcttgttcccgatttgagcaacttctatgcacagtacaaatccattgagccttatttgaagaagaaggatgaayctcaggaaggcaagcagcagtatctgcagtccatagaagagcgtgagaaactggacgggctctacgagtgcattctctgtgcctgctgtagcaccagctrccscagctactggtggaacggagacaaatatctggggcctgcagttcttatgcaggcctatcgctggatgattgactccagagatgacttcacagaggagcgcctggccaagctgcaggacccattctctctataccgctgccacaccatcatgaactgmacaaggacctgtcctaagggtctgaatccagggaaagctattgcagagatcaagaaaatgatggcaacctataaggagaagaaagcttcagtttaactgtttccatgctaaacatgatttataaccagctcagagctgaacataatttatatctaatttgagttcctttaaagatcttggttttccatgaatacagcatgtataataaaaattttaagaaataaatgttattctactttattaacaaaaaaaaaagaa

SEQ ID NO: 5045 - DNA, 1006 bp, Homo sapiens
ccaagatggcggcggtggtcgcmctctccttgaggcgccggttgccggccacaacccttggcggagcctgcctgcctcccgaggagcccagacagctgcagccacagctccccgtatcaagaaatttgccatctatsgatgggacccagacaaggctgragacaaacctcrtatgcagrcttatgaagttgaccttaataaatgtggccccatggtattggatgctttaatcaagattaagaatgaagttgactctactttgaccttcygaagatcatgcagagaaggcatctgtggctcttrtgcaatgaacatcaatggaggcaacactctagcttgcacccgaaggattgacaccaacctcaataaggtctcaaaaatctaccctcttccacacatgtatgtgataaaggatcttgttcccgatttgagcaacttctatgcacagtacaaatccattgagccttatttgaagaagaaggatgaayctcaggaaggcaagcagcagtatctgcagtccatagaagagcgtgagaaactggacgggctctacgagtgcattctctgtgcctgctgtagcaccagctrccscagctactggtggaacggagacaaatatctggggcctgcagttcttatgcaggcctatcgctggatgattgactccagagatgacttcacagaggagcgcctggccaagctgcaggacccattctctctataccgctgccacaccatcatgaactgmacaaggacctgtcctaagggtctgaatccagggaaagctattgcagagatcaagaaaatgatggcaacctataaggagaagaaagcttcagtttaactgtttccatgctaaacatgatttataaccagctcagagctgaacataatttatatctaatttgagttcctttaaagatcttggttttccatgaatacagcatgtataataaaaattttaagaaataaatgttattctactttattaacaaaaaaaaaagaa

SEQ ID NO: 5046 - DNA, 3188 bp, Homo sapiens
gcagtgttgrggttggcggccacagctaagtccaacaccagcatgtcgctgcagmgaatcgtgcgtgtgtccctggagcatcccaccagcgcggtgtgtgtggctggcgtggagaccctcgtggacatttatgggtcagtgcctgagggcacagaaatgtttgaggtctatgggacgcctggcgtggacatctacrtctctcccaacatggagaggggccgggagcgtgcagacaccaggcggtggcgctttgacgcgactttggagatcatcgtggtcatgaactcccccagcaatgacctcaacgacagccatgttcagatttcctaccactccagccatgagcctctgcccctggcctatgcggtgctctacctcacctgtgttgacatctctctggattgcgacctgaactgtgagggaaggcaggacaggaactttgtagacaagcggcagtgggtctgggggcccagtgggtatggcggcatcttgctggtgaactgtgaccgtgatgatccgagctgtgatgtccaggacaattgtgaccagcacrtgcactgcctgcaagacctggaagacatgtctgtcatggtcctgcggacgcagggccctgcagccctctttgatgaccacaaacttgtcctccatacctccagctatgatgccaaacgggcacaggtcttccacatctgcggtcctgaggatgtgtgtgaggcctataggcatgtgctgggccaarataaggtgtcctatgaggtaccccgcttgcatggggatgaggagcgcttcttcgtggaaggcctgtccttccctgatgccggcttcacaggactcatctccttccatgtcactctgctggacgactccaacgaggatttctcggcatcccctatcttcactgacactgtggtgttccgagtggcaccctggatcatgacgcccagcactctgccacccctagaggtgtatgtgtgccgtgtgaggaacaacacgtrttttgtggatgcggtggcagagctggccaggaaggccggctgcaagctgaccatctgcccacaggccgagaaccgyaacgaccgctggatccaggatgagatggagctgggctacgttcaggcgccgcacaagaccctcccggtggtctttgactcyccaaggaatggggaactgcaggatttcccttacaaaagaatcctgggtccagattttggttacgtgactcgggaaccacgygacaggtctgtgagtggcctggactcctttgggaacctggaggtcagccctccagtggtggccaatgggaaagagtaccccctggggaggatcctcattggggrcaacctgcctgggtcaagtggccgcagggtcacccaggtggtgcgggacttcctccatgcccagaaggtgcagccccccgtggagctctttgtggactggttggccgtgggccatgtggatgagtttctgagctttgtccctgcccccgatgggaagggcttccggatgctcctggccagccctggggcctgcttcaagctcttccaggaaaagcagaagtgtggccaygggagggccctcctgttccagggggttgttgatgatgagcaggtcaagaccatctccatcaaccaggtgctctccaataaagacctcatcaactacaataagtttgtgcagagctgcatcgactggaaccgtgaggtgctgaagcgggagctgggcctggcagagtgtgacatcattgacatcccacagctcttcaagaccgagaggaaaaaagcaacgrccttcttccctgacttggtgaacatgctggtgctggggaagcacctgggcatccccaagccctttgggcccatcatcaatggctgctgctgcctggaggagaaggtgcrgtccctgctggagcckctgggcctccactgcaccttcattgatgacttcactccataccacatgctgcatggggaggtgcactgtggcaccaatgtgtgcagaaagcccttctctttcaagtggtggmacatggtgccctgagacagctcccacccaccatcctgtccccctggggcgggcattggcccaggtggtggagacagagacaggcccctgaacgataagcaccaagagaccccaaggctccagatggaacactgagggtgaccgtccctctcagaagccttttccctggaagtgtccatgcctcacctgcaacccatgtggttctcagacttgaatcttctcggccccccaaaaagaaggacctcatttcttatagcctctcctgtgattcaacacaacccatggagatgtccccttctcactctgaaatcatccatttggggacaaatccacattggggtctagaaacatccacgtatctcatcagccatcttgtcctgtgcatcctaacagaggaaggatccatgattctgctttggtccaattgcttcctctctgcagaggaacaaccctaaaaccagaccactccacgcaggacaggcaggagagattcttcctaaagcctcccccataaaaagggagctgtggatccacttagatcagggcggaaccatctttcacccggccaagctcctgcccagatgttgaccctcacccagcgtgagctgtcacatagtaggagcttctagatgcatgtggaagcaatgagagttgtcccttagccttataaactccccatgatctgacatgcagaaatccagccttgtccagaatcctcctggaatttcttggagacgaaagtatctgggggattgttgggtactagggagactgggtacaagggtgaaaagtagttcccataatacacatggttgactatggtgatccaccttgtgatggttaatattaggtgtctggagaaggttgcttcattggccctgggacttctctctgcaggaggagagamcgctgcctctcctctggattggtctcaggctctctgttggcctttggtcagcgtttccacatcctgctctgctgcaggagagggggctaaggggctggatccaccaaggcagctcacagcgggaaaactctgggamtgaaccactgaattcaggggatgggggtgggggggcggttctcgaggtgtgtgccagctacacgtgtgttctgtatgggtccagctgcgtttccatcactcgctaataaatcaacagaaacac

SEQ ID NO: 5047 - DNA, 1764 bp, Homo sapiens
acagccagagggaygagctagcccgacgatggcccaggggacattgatccrtgtgaccccagagcagcccacccatgccgtgtgtgtgctgggcaccttgactcagcttgacatctgcagctctgcccctgaggactgcacgtccttcagcatcaacgcctccccaggggtggtcgtggatattgcccacrgccctccagccaagaagaaatccacaggttcctccacatggcccctggaccctggggtagaggtgaccctgaygatgaaagyggccagtggtagcacaggcgaccagaaggttcagatttcatactacggacccaagactmcaccagtcaaagctctactctacctcaccgsggtggaaatctccytgtgcgcagacatcacccgcaccggcaaagtgaagccaaccasagctgtgaaagatcagaggacctggacctggggcccttgtggacagggtgccatcctgctggtgaactgtgacagagacaatctcgaatcttctgccayggactgcgaggatgatgaagtgcttgacagcgaagacctgcaggacatgtcgctgatgaccctgagcacgaagacccccaaggacttcttcacaaaccatacactggtgctccacgtggccaggtctgagatggacaaagtgagggtgtttcaggccacacggggcaaactgtcctccaagtgcagcgtagtcttgggtcccaagtggccctctcactacctgatggtcccyggtggaaagcacaacatggacttctacgtggaggccctcgctttcccggacaccracttccyggggctcattaccctcaccatctccctgctggacacgtycaacctggagctccccgaggctgtggtgttccaagacagcgtggtcttccgcgtggcgccctggatcatgacccccaacacccagcccccgcaggaggtgtrcgcgtgcagtatttttgaaaatgaggacttcctgaagtcagtgactactctggccatgaaagccaagtgcaagctgaccatctgccctgaggaggagaacatggatgaccagtggatgcaggatgaaatggagatcggctacatccaagccccacacaaaacgctgcccgtggtcttcgactctccaaggaacagaggcctgaaggagtttcccatcaaacgmgtgatggtacctgcatggggtggggagggggcacagctgccgaaaccctcttgtcttgagactycctccttttagcctgccttccccgcccgcgcctgtagctgagtagcccagtgcaaggaggtggaattcctaccaaagtgggagcatgtaggtggggcttgttatttttttattaccaagataagatctggctcttcatttcccaaaacccttgtcacccgtgagctcagcttgatctccaggtaaccctgccgaggaggtggctcaggcttggacctccctgtgctcttgaagaagctcttgctgcaaggyggaggtggggccgggrctggaatctttcccaatgcccagctggaggctctgtcttatgggtggtgtttggtcttcaggggctccatctgggatatgggggattttgggatcagtggatcagtggtcatttcctgggtgtgactttatcagccacaggctgtccatgtggaggtgggaagtgacgtattgctgactcatgcttgactagcctggcaggttgatgcaaactcagcacagaacaataataataatagttgcatttattgagaatg

SEQ ID NO: 5048 - DNA, 2265 bp, Homo sapiens
acagccagagggaygagctagcccgacgatggcccaggggacattgatccrtgtgaccccagagcagcccacccatgccgtgtgtgtgctgggcaccttgactcagcttgacatctgcagctctgcccctgaggactgcacgtccttcagcatcaacgcctccccaggggtggtcgtggatattgcccacrgccctccagccaagaagaaatccacaggttcctccacatggcccctggaccctggggtagaggtgaccctgaygatgaaagyggccagtggtagcacaggcgaccagaaggttcagatttcatactacggacccaagactmcaccagtcaaagctctactctacctcaccgsggtggaaatctccytgtgcgcagacatcacccgcaccggcaaagtgaagccaaccasagctgtgaaagatcagaggacctggacctggggcccttgtggacagggtgccatcctgctggtgaactgtgacagagacaatctcgaatcttctgccayggactgcgaggatgatgaagtgcttgacagcgaagacctgcaggacatgtcgctgatgaccctgagcacgaagacccccaaggacttcttcacaaaccatacactggtgctccacgtggccaggtctgagatggacaaagtgagggtgtttcaggccacacggggcaaactgtcctccaagtgcagcgtagtcttgggtcccaagtggccctctcactacctgatggtcccyggtggaaagcacaacatggacttctacgtggaggccctcgctttcccggacaccracttccyggggctcattaccctcaccatctccctgctggacacgtycaacctggagctccccgaggctgtggtgttccaagacagcgtggtcttccgcgtggcgccctggatcatgacccccaacacccagcccccgcaggaggtgtrcgcgtgcagtatttttgaaaatgaggacttcctgaagtcagtgactactctggccatgaaagccaagtgcaagctgaccatctgccctgaggaggagaacatggatgaccagtggatgcaggatgaaatggagatcggctacatccaagccccacacaaaacgctgcccgtggtcttcgactctccaaggaacagaggcctgaaggagtttcccatcaaacgmgtgatgggtccagattttggctatgtaactcgagggccccaaacagggggtatcagtggactggactcctttgggaacctggaagtgagccccccagtcacagtcaggggcaaggaatacccrctgggcaggattctcttcggggacagctgttatcccagcaatgacagccggcagatgcaccaggccctgcaggacttcctcagtgcccagcaggtgcaggcccctgtgaagctctattctgactggctgtccgtgggccacgtggacgagttcctgagctttgtgccagcacccgacaggaagggcttccggctgctcctggccagccccaggtcctgctacaaactgttccaggagcagcagaatgagggccayggggaggccctgctgttcgaagggatcaagaaaaaaaaacagcagaaaataaagaacattctgtcaaacaagacattgagagaacataattcatttgtggagagatgcatcgactggaaccgcgagctgctgaagcgggagctgggcctggccgagagtgacatcattgacatcccgcagctcttcaagctcaaagagttctctaaggcggaagcttttttccccaacatggtgaacatgctggtgctagggaagcacctgggcatccccaagcccttcgggcccgtcatcaacggccgctgctgcctrgaggagaaggtgtgttccctgctggagccactgggcctccagtgcaccttcatcaacgacttcttcacctaccacatcaggcatggggaggtgcactgcggcaccaacgtgcgcagaaagcccttctccttcaagtggtggaacatggtgccctgagcccatcttccctggcgtcctctccytcctggccagatgtcgctggrtcctctgcagtgtggcaagcaagagctcttgtgaatattgtggctccctgggggcggccagccctcccagcagtggcttgctttcttctcctgtgatgtcccagtttcccactctgaagatcccaacatggtcctagcactgcacactcagttctgctctaagaagctgcaataaagtttttttaagtcactttgtac

SEQ ID NO: 5049 - DNA, 4015 bp, Homo sapiens
cgcacggagggactgcggcagtgtcggagccgcgccgagcctggtggcccaggtgccccgcccgcgtcagccctgctccagccccgcgctagcccagcgcccctcgccccgggccgtccggaccgcgcccccgcccagggccttgcgcacgccggggcccaggccgagggccgcagcgccggggccggcgatgagcgcgaggagccggcatgagcgcagacagcagccctctcgtgggcagcacrcccaccggttatgggaccctgacgatagggacatcaatagatcccctcagctcctcagtttcatccgtgaggctcagcggctactgtggcagtccatggagggtcatcggctatcacgtcgtggtctggatgatggctgggatccctttgctgctcttccgttggaagcccctgtggggggtgcggctgcggctccggccctgcaacctggcccacgccgaaacactcgttatcgaaataagagacaaagaggatagttcctggcagctcttcactgtccaggtgcagactgaggccatcggcgagggcagcctggagccgtccccacagtcccaggcagaggatggccggagccaggcggcagttggggcggtaccagagggtgcctggaaggatacggcccagctccacaagagcgaggaggcggtgagtgtcggacagaagcgggtgctgcggtattacctcttccagggccagcgctatatctggatcgagacccagcaagccttctaccaggtcagcctcctggaccatggccgctcttgtgacgacgtccaccgctcccgccatggcctcagcctccaggaccaaatggtgaggaaggccatttacggccccaacgtgatcagcataccggtcaagtcctacccccagctgctggtggacgaggcactgaacccctactatgggttccaggccttcagcatcgcgctgtggctggctgaccactactactggtacgccctgtgcatcttcctcatttcctccatctccatctgcctgtcgctgtacaagaccagaaagcaaagccagactctaagggacatggtcaagttgtccatgcgggtgtgcgtgtgccggccagggggagaggaagagtgggtggactccagtgagctagtgcccggagactgcctggtgctgccccaggagggtgggctgatgccctgtgatgccgccctggtggccggcgagtgcatggtgaatgagagctctctgacaggagagagcattccagtgctgaagacggcactgccggaggggctggggccctactgtgcagagacacaccggcggcacacactcttctgcgggaccctcatcttgcaggcccgggcctatgtgggaccgcacgtcctggcagtggtgacccgcacagggttctgcacggcaaaagggggcctggtgagctccatcttgcacccccggcccatcaacttcaagttctataaacacagcatgaagtttgtggctgccctctctgtcctggctctcctcggcaccatctacagcatcttcatcctctaccgaaaccgggtgcctctgaatgagattgtaatccgggctctcgacctggtgaccgtggtggtgccacctgccctgcctgctgccatgactgtgtgcacgctctacgcccagagccgactgcggagacagggcattttctgcatccacccactgcgcatcaacctggggggcaagctgcagctggtgtgtttcgacaagacgggcaccctcactgaggacggcttagacgtgatgggggtggtgcccctgaaggggcaggcattcctgcccctkgtcccagagcctcgccgcctgcctgtggggcccctgctccgagcactggccacctgccatgccctcagccggctccaggacacccccgtgggcgaccccatggacttgaagatggtggagtctactggctgggtcctggaggaagagccggctgcagactcagcatttgggacccaggtcttggcagtgatgagaccyccactttgggagccccagctgcaggcaatggaggagcccccggtgccagtcagcgtcctccaccgcttccccttctcttcggctctgcagcgcatgagtgtggtggtggcgtggccaggggccactcagcccgaggcctacgtcaaaggctccccggagctggtggcagggctctgcaaccccgagacagtgcccaccgacttcgcccagatgctgcagagctatacagctgctggctaccgtgtcgtggccctggccagcaagccactgcccactgygcccagcctggaggcagcccagcaactgacgagggacactgtggaaggagacctgagcctcctgggkctgctggtcatgaggaacctactgaagccgcagacaacgccagttatccaggctctgcgaaggacccgcatccgcgccgtcatggtgacaggggacaacctgcagacagcggtgactgtggcccggggctgtggcatggtggccccccaggagcatctgatcatcgtccacgccacccaccctgagcggggtcagcctgcctctctcgagttcctgccgatggagtcccccacagccgtgaatggcgttaaggatcctgaccaggctgcaagctacaccgtggagccagacccccgatccaggcacctggccctcagcgggcccacctttggtatcattgtgaagcacttccccaagctgctgcccaaggtcctggtccagggcactgtctttgcccgcatggcccctgagcagaagacagagctggtgtgcgagctacagaagcttcagtactgcgtgggcatgtgcggagacggygccaatgactgtggggccctgaaggcggctgatgtcggcatctcgctgtcccaggcagaagcctcagtggtctcacccttcacctcgagcatggccagtattgagtgcgtgcccatggtcatcagggaggggcgctgttcccttgacacttcrttcagcgtcttcaagtacatggctctgtacagcctgacccagttcatctccgtcctgatcctctacacgatcaacaccaacctgggtgacctgcagttcctggccatcgacctggtcatcaccaccacagtggcagtgctcatgagccgcacggggccagcgctggtcctgggacgggtrcggccaccgggggcgctgctcagcgtgcccgtgctcagcagcctgctgctgcagatggtcctggtgaccggcgtgcagctagggggctacttcctgaccctggcccagccatggttcgtgcctctgaacaggacagtggccgcaccagacaacctgcccaactacgagaacaccgtggtcttctctctgtccagcttccagtacctcatcctggctgcagcygtgtccaagggggcgcccttccgccggccgctctacaccaatgtgcccttcctggtggccctggcgctcctgagctccgtcctggtgggccttgtcctggtccccggcctcctgcaggggccgctggcgctgaggaacatcactgacaccggcttcaagctgctgctgctgggtctggtcaccctcaacttcgtgggggccttcatgctggagagcgtgctagaccagtgcctccccgcctgcctgcgccgcctccggcccaagcgggcctccaagaagcgcttcaagcagctggaacgagagctggccgagcagccctggccrccgctgcccgccggccccctgaggtagtgcaggcccacgggcaccccagacactggaactccctgcctytgagccaccaactggacccctctccagcaacaccaccgccaccacctcccacatccctgaggttggcgactgtctacactcytcccccgagaccacccccaccctggggaagcgttgactactgtcccctaccttggaccatcccgcgtaggggtggcagcccccagctcccctcagtgctgctgtcagtgtagcaaataaagtcatgatattttcctggc

SEQ ID NO: 5050 - DNA, 4000 bp, Homo sapiens
cgcacggagggactgcggcagtgtcggagccgcgccgagcctggtggcccaggtgccccgcccgcgtcagccctgctccagccccgcgctagcccagcgcccctcgccccgggccgtccggaccgcgcccccgcccagggccttgcgcacgccggggcccaggccgagggccgcagcgccggggccggcgatgagcgcgaggagccggcatgagcgcagacagcagccctctcgtgggcagcacrcccaccggttatgggaccctgacgatagggacatcaatagatcccctcagctcctcagtttcatccgtgaggctcagcggctactgtggcagtccatggagggtcatcggctatcacgtcgtggtctggatgatggctgggatccctttgctgctcttccgttggaagcccctgtggggggtgcggctgcggctccggccctgcaacctggcccacgccgaaacactcgttatcgaaataagagacaaagaggatagttcctggcagctcttcactgtccaggtgcagactgaggccatcggcgagggcagcctggagccgtccccacagtcccaggcagaggatggccggagccaggcggcagttggggcggtaccagagggtgcctggaaggatacggcccagctccacaagagcgaggaggcgaagcgggtgctgcggtattacctcttccagggccagcgctatatctggatcgagacccagcaagccttctaccaggtcagcctcctggaccatggccgctcttgtgacgacgtccaccgctcccgccatggcctcagcctccaggaccaaatggtgaggaaggccatttacggccccaacgtgatcagcataccggtcaagtcctacccccagctgctggtggacgaggcactgaacccctactatgggttccaggccttcagcatcgcgctgtggctggctgaccactactactggtacgccctgtgcatcttcctcatttcctccatctccatctgcctgtcgctgtacaagaccagaaagcaaagccagactctaagggacatggtcaagttgtccatgcgggtgtgcgtgtgccggccagggggagaggaagagtgggtggactccagtgagctagtgcccggagactgcctggtgctgccccaggagggtgggctgatgccctgtgatgccgccctggtggccggcgagtgcatggtgaatgagagctctctgacaggagagagcattccagtgctgaagacggcactgccggaggggctggggccctactgtgcagagacacaccggcggcacacactcttctgcgggaccctcatcttgcaggcccgggcctatgtgggaccgcacgtcctggcagtggtgacccgcacagggttctgcacggcaaaagggggcctggtgagctccatcttgcacccccggcccatcaacttcaagttctataaacacagcatgaagtttgtggctgccctctctgtcctggctctcctcggcaccatctacagcatcttcatcctctaccgaaaccgggtgcctctgaatgagattgtaatccgggctctcgacctggtgaccgtggtggtgccacctgccctgcctgctgccatgactgtgtgcacgctctacgcccagagccgactgcggagacagggcattttctgcatccacccactgcgcatcaacctggggggcaagctgcagctggtgtgtttcgacaagacgggcaccctcactgaggacggcttagacgtgatgggggtggtgcccctgaaggggcaggcattcctgcccctkgtcccagagcctcgccgcctgcctgtggggcccctgctccgagcactggccacctgccatgccctcagccggctccaggacacccccgtgggcgaccccatggacttgaagatggtggagtctactggctgggtcctggaggaagagccggctgcagactcagcatttgggacccaggtcttggcagtgatgagaccyccactttgggagccccagctgcaggcaatggaggagcccccggtgccagtcagcgtcctccaccgcttccccttctcttcggctctgcagcgcatgagtgtggtggtggcgtggccaggggccactcagcccgaggcctacgtcaaaggctccccggagctggtggcagggctctgcaaccccgagacagtgcccaccgacttcgcccagatgctgcagagctatacagctgctggctaccgtgtcgtggccctggccagcaagccactgcccactgygcccagcctggaggcagcccagcaactgacgagggacactgtggaaggagacctgagcctcctgggkctgctggtcatgaggaacctactgaagccgcagacaacgccagttatccaggctctgcgaaggacccgcatccgcgccgtcatggtgacaggggacaacctgcagacagcggtgactgtggcccggggctgtggcatggtggccccccaggagcatctgatcatcgtccacgccacccaccctgagcggggtcagcctgcctctctcgagttcctgccgatggagtcccccacagccgtgaatggcgttaaggatcctgaccaggctgcaagctacaccgtggagccagacccccgatccaggcacctggccctcagcgggcccacctttggtatcattgtgaagcacttccccaagctgctgcccaaggtcctggtccagggcactgtctttgcccgcatggcccctgagcagaagacagagctggtgtgcgagctacagaagcttcagtactgcgtgggcatgtgcggagacggygccaatgactgtggggccctgaaggcggctgatgtcggcatctcgctgtcccaggcagaagcctcagtggtctcacccttcacctcgagcatggccagtattgagtgcgtgcccatggtcatcagggaggggcgctgttcccttgacacttcrttcagcgtcttcaagtacatggctctgtacagcctgacccagttcatctccgtcctgatcctctacacgatcaacaccaacctgggtgacctgcagttcctggccatcgacctggtcatcaccaccacagtggcagtgctcatgagccgcacggggccagcgctggtcctgggacgggtrcggccaccgggggcgctgctcagcgtgcccgtgctcagcagcctgctgctgcagatggtcctggtgaccggcgtgcagctagggggctacttcctgaccctggcccagccatggttcgtgcctctgaacaggacagtggccgcaccagacaacctgcccaactacgagaacaccgtggtcttctctctgtccagcttccagtacctcatcctggctgcagcygtgtccaagggggcgcccttccgccggccgctctacaccaatgtgcccttcctggtggccctggcgctcctgagctccgtcctggtgggccttgtcctggtccccggcctcctgcaggggccgctggcgctgaggaacatcactgacaccggcttcaagctgctgctgctgggtctggtcaccctcaacttcgtgggggccttcatgctggagagcgtgctagaccagtgcctccccgcctgcctgcgccgcctccggcccaagcgggcctccaagaagcgcttcaagcagctggaacgagagctggccgagcagccctggccrccgctgcccgccggccccctgaggtagtgcaggcccacgggcaccccagacactggaactccctgcctytgagccaccaactggacccctctccagcaacaccaccgccaccacctcccacatccctgaggttggcgactgtctacactcytcccccgagaccacccccaccctggggaagcgttgactactgtcccctaccttggaccatcccgcgtaggggtggcagcccccagctcccctcagtgctgctgtcagtgtagcaaataaagtcatgatattttcctggc

SEQ ID NO: 5051 - DNA, 3786 bp, Homo sapiens
cgcacggagggactgcggcagtgtcggagccgcgccgagcctggtggcccaggtgccccgcccgcgtcagccctgctccagccccgcgctagcccagcgcccctcgccccgggccgtccggaccgcgcccccgcccagggccttgcgcacgccggggcccaggccgagggccgcagcgccggggccggcgatgagcgcgaggagccggcatgagcgcagacagcagccctctcgtgggcagcacrcccaccggttatgggaccctgacgatagggacatcaatagatcccctcagctcctcagtttcatccgtgaggctcagcggctactgtggcagtccatggagggtcatcggctatcacgtcgtggtctggatgatggctgggatccctttgctgctcttccgttggaagcccctgtggggggtgcggctgcggctccggccctgcaacctggcccacgccgaaacactcgttatcgaaataagagacaaagaggatagttcctggcagctcttcactgtccaggtgcagactgaggccatcggcgagggcagcctggagccgtccccacagtcccaggcagaggatggccggagccaggcggcagttggggcggtaccagagggtgcctggaaggatacggcccagctccacaagagcgaggaggcgaagcgggtgctgcggtattacctcttccagggccagcgctatatctggatcgagacccagcaagccttctaccaggtcagcctcctggaccatggccgctcttgtgacgacgtccaccgctcccgccatggcctcagcctccaggaccaaatggtgaggaaggccatttacggccccaacgtgatcagcataccggtcaagtcctacccccagctgctggtggacgaggcactgaacccctactatgggttccaggccttcagcatcgcgctgtggctggctgaccactactactggtacgccctgtgcatcttcctcatttcctccatctccatctgcctgtcgctgtacaagaccagaaagcaaagccagactctaagggacatggtcaagttgtccatgcgggtgtgcgtgtgccggccagggggagaggaagagtgggtggactccagtgagctagtgcccggagactgcctggtgctgccccaggagggtgggctgatgccctgtgatgccgccctggtggccggcgagtgcatggtgaatgagagctctctgacaggagagagcattccagtgctgaagacggcactgccggaggggctggggccctactgtgcagagacacaccggcggcacacactcttctgcgggaccctcatcttgcaggcccgggcctatgtgggaccgcacgtcctggcagtggtgacccgcacagggttctgcacggcaaaagggggcctggtgagctccatcttgcacccccggcccatcaacttcaagttctataaacacagcatgaagtttgtggctgccctctctgtcctggctctcctcggcaccatctacagcatcttcatcctctaccgaaaccgggtgcctctgaatgagattgtaatccgggctctcgacctggtgaccgtggtggtgccacctgccctgcctgctgccatgactgtgtgcacgctctacgcccagagccgactgcggagacagggcattttctgcatccacccactgcgcatcaacctggggggcaagctgcagctggtgtgtttcgacaagacgggcaccctcactgaggacggcttagacgtgatgggggtggtgcccctgaaggggcaggcattcctgcccctkgtcccagagcctcgccgcctgcctgtggggcccctgctccgagcactggccacctgccatgccctcagccggctccaggacacccccgtgggcgaccccatggacttgaagatggtggagtctactggctgggtcctggaggaagagccggctgcagactcagcatttgggacccaggtcttggcagtgatgagaccyccactttgggagccccagctgcaggcaatggaggagcccccggtgccagtcagcgtcctccaccgcttccccttctcttcggctctgcagcgcatgagtgtggtggtggcgtggccaggggccactcagcccgaggcctacgtcaaaggctccccggagctggtggcagggctctgcaaccccgagacagtgcccaccgacttcgcccagatgctgcagagctatacagctgctggctaccgtgtcgtggccctggccagcaagccactgcccactgygcccagcctggaggcagcccagcaactgacgagggacactgtggaaggagacctgagcctcctgggkctgctggtcatgaggaacctactgaagccgcagacaacgccagttatccaggctctgcgaaggacccgcatccgcgccgtcatggtgacaggggacaacctgcagacagcggtgactgtggcccggggctgtggcatggtggccccccaggagcatctgatcatcgtccacgccacccaccctgagcggggtcagcctgcctctctcgagttcctgccgatggagtcccccacagccgtgaatggcgttaaggatcctgaccaggctgcaagctacaccgtggagccagacccccgatccaggcacctggccctcagcgggcccacctttggtatcattgtgaagcacttccccaagctgctgcccaaggtcctggtccagggcactgtctttgcccgcatggcccctgagcagaagacagagctggtgtgcgagctacagaagcttcagtactgcgtgggcatgtgcggagacggygccaatgactgtggggccctgaaggcggctgatgtcggcatctcgctgtcccaggcagaagcctcagtggtctcacccttcacctcgagcatggccagtattgagtgcgtgcccatggtcatcagggaggggcgctgttcccttgacacttcrttcagcgtcttcaagtacatggctctgtacagcctgacccagttcatctccgtcctgatcctctacacgatcaacaccaacctgggtgacctgcagttcctggccatcgacctggtcatcaccaccacagtggcagtgctcatgagccgcacggggccagcgctggtcctgggacgggtrcggccaccgggggcgctgctcagcgtgcccgtgctcagcagcctgctgctgcagatggtcctggtgaccggcgtgcagctagggggctacttcctgaccctggcccagccatggttcgtgcctctgaacaggacagtggccgcaccagacaacctgcccaactacgagaacaccgtggtcttctctctgtccagcttccagtacctcatcctggctgcagcygtgtccaagggggcgcccttccgccggccgctctacaccaatgagcgtgctagaccagtgcctccccgcctgcctgcgccgcctccggcccaagcgggcctccaagaagcgcttcaagcagctggaacgagagctggccgagcagccctggccrccgctgcccgccggccccctgaggtagtgcaggcccacgggcaccccagacactggaactccctgcctytgagccaccaactggacccctctccagcaacaccaccgccaccacctcccacatccctgaggttggcgactgtctacactcytcccccgagaccacccccaccctggggaagcgttgactactgtcccctaccttggaccatcccgcgtaggggtggcagcccccagctcccctcag

SEQ ID NO: 5052 - DNA, 4353 bp, Homo sapiens
tggagaaggcgcacctgctgcaggtgctcscggccgccccggaccagcgagcgcgggcactgcggcggggaggatgctgcgcgagcggaccgtgcggctgcagtacgggagccgcgtggaggcggtgtacgtgctgggcacctacctctggaccgatgtctacagcgcggccccagccggggcccaaaccttcagcctgaagcactcggaacacgtgtgggtggaggtggtgcgtgatggggaggctgaggaggtggccaccaatggcaagcagcgctggcttctctcgcccagcaccaccctgcgggtcaccatgagccaggcgagcaccgaggccagcagtgacaaggtcaccgtcaactactatgacgaggaagggagcattcccatcgaccaggcggggctcttcctcacrgccattgagatctccctggatgtggacgcagaccgggatggtgtggtggagaagaacaacccaaagaaggcatcctggacctggggccccgagggccaggggrccatcctgctggtgaactgtgaccgagagacaccctggttgcccaaggaggactgccgtgatgagaaggtctacagcaaggaagatctyaaggacatgtcccagatgatcctgcggaccaaaggccccgaccgcctccccgccggatacgagatagttctgtacatttccatgtcagactcagacaaagtgggcgtgttctacgtggagaacccgttcttcggccaacgctatatccacatcctgggccggcggaagctctaccatgtggtcaagtayacgggkggctccgcggagctgctgttcttcgtggaaggcctctgtttccccgacgagggcttctcaggcctggtctccatccatgtcagcctgctggagtacatggcccaggacattcccctgactcccatcttcacggacaccgtgatattccggattgctccgtggatcatgacccccaacatcctgcctcccgtgtcggtgtttgtgtgctgcatgaaggataattacctgttcctgaaagaggtgaagaaccttgtggagaaaaccaactgtgagctgaaggtctgcttccagtacctaaaccgaggcgatcgctggatccaggatgaaattgagtttggctacatcgaggccccccataaaggcttccccgtggtgctggactctccccgagatggaaacctaaaggacttccctgtgaaggagctcctgggcccagattttggctacgtgacccgggagcccctctttgagtctgtcaccagccttgactcatttggaaacctggaggtcagtcccccagtgaccgtgaayggcaagacatacccgcttggccgcatcctcatcgggagcagctttcctctgtctggtggtcggaggatgaccaaggtggtgcgtgacttcctgaaggcccagcaggtgcaggcrcccgtggagctctactcagactggctgactgtgggccacgtggatgagttcatgtcctttgtccccatccccggcacaaagaaattcctgctactcatggccagcacctcggcctgctacaagctcttccgagagaagcagaaggacggccatggagaggccatcatgttcaaaggcttgggtgggatgagcagcaagcgaatcaccatcaacaagattctgtccaacgagagccttgtgcaggagaacctgtacttccagcgctgcctrgactggaaccgtgacatcctcaagaaggagctgggactgacagagcaggacatcattgacctgcccgctctgttcaagatggacgaggaccaccgtgccagagccttcttyccaaacatggtgaacatgatcgtgctggacaaggacctgggcatccccaagccattcgggccacaggttgaggaggaatgctgcctggagatgcacgtgcgtggcctcctggagccyctgggcctcgaatgcaccttcatcgaygacatttctgcctaccacaaatttctgggggaagtccactgtggcaccaacgtccgcaggaagcccttcaccttcaagtggtggcacatggtgccctgacctgccaggggccctggygtttgcctccttcgcttagttctccagaccctccctcacaygcccagagccttctgctgacatggactggacagccccgctgggagacctttgggacgtggggtggaatttggggtatctgtgccttgccctccctgagaggggcctcagtgtcctctgaagccatccccagtgagcctcgactctgtccctgctgaaaatagctgggccagtgtctctgtagccctgacataaggaacrgaacacaacaaaacacagcaaaccatgtgcccaaactgctccccaaagaattttgagtctctaatctgacactgaatgaggggagaagggaaggagattctgggattgccagttcttccagcagccatgctctgaaaatcaaggtagaatccatggaaagggaccccaggaccccgggaccctagacgtatcttgaactgccatcgtcatttcaaatacatctccctcagggtttccaggtggccacccccaattattcattccttaccaacctctcaaatcctcttggctttctctctgcagtgtggacactgttggctagtcctccccactccctgagggtccagtaagttagcttagaaccttcctggaaacatttcatctgagcaggtttccccacgtgtgggatgctccttttgcctcatctgtctcagggatgcaggctcccccgcatgcatggggatttctccccagaccagcatacttgtgacctgagagttcaatgygtaaagatgcccctggtcagccatatccatcttctcttgcctggtccttgattctctggccgctccctgaccttcctccttccactgccttgactttcttcctttttattcctggtgccatctgtccaggcagctagacaagaacttgttcrccagcagccrgattcaggccttcccaggggcataataagtgaccagcccctcctctccggacatcagatccaacacataaggaccctggcctaccctccagcccaacagccagttctgggtcagctgccaacttaggggtggtttgattatcccattgaaattcaccagtgcctttgccaaagaccctctcatttggacatacccagattcattccctggctccaactgaaaagactcagtttcaatckttaaaagttcctttagggccagaagaataaatgaattataatcccattttgaagaaccgatttataaccaatgaaaaggttataatgtaatttatattcttggaggaacaagattttcatttgggattatttccttcaaccattcaacaaacatttgttgtatgccactaagcgccaggcacggcgttgggctctgcaaacacagtggttagtagcagtctggacctggtccctactggcatggaacccatcactccccaacatgcaaagcccacatttaaaggccagcctctgccccttcagtgatgcgctctttagaaatgccwgyccactatattcagaaatccgcagggcacaaaacttccagcaagtcactgttgtggtgaaatgggcagtgggggtggggggtcttctttaaacaggcccccttcccatctacctagccagtacccatccaatgagtccccagagcctccagaagctgytgtctcctctctggggacagcagctcctgcctttggaggccaaagccccagatctctccagccccagagctgaaaacaccaagtgcctatttgagggtgtctgtctggagacttagagtttgtcatgtgtgtgtgtgtgtttggttaatgtgggtttatgggttttctttcttttttttyttttttttttagtctacattagggggaagtgagcgcctcccatgtgcagacagtgtgtctttatagatttttctaaggctttccccaatgatgtcggtaatttctgatgtttctgaagttcccaggactcacacacccgttcccatctcacttgcccacccagtgtgacaaccctcggtgtggatatacccccgtggactcatggctcttccccacccccactttctataaatgtaggcctagaatacgcttctctgttgcaaaactcagctaagttcctgcttccaccttgatgttgaaatatcttatgtaagagggcaggggatgtcgtgaagatggcaagaagaacacagtttcaaatttctggaaaagagcctgtggtggagatctaaagatgtttagggaagagctcgactaaagaacaatgaaataaatggtccaaggggaagtca

SEQ ID NO: 5053 - DNA, 3984 bp, Homo sapiens
tggagaaggcgcacctgctgcaggtgctcscggccgccccggaccagcgagcgcgggcactgcggcggggaggatgctgcgcgagcggaccgtgcggctgcagtacgggagccgcgtggaggcggtgtacgtgctgggcacctacctctggaccgatgtctacagcgcggccccagccggggcccaaaccttcagcctgaagcactcggaacacgtgtgggtggaggtggtgcgtgatggggaggctgaggaggtggccaccaatggcaagcagcgctggcttctctcgcccagcaccaccctgcgggtcaccatgagccaggcgagcaccgaggccagcagtgacaaggtcaccgtcaactactatgacgaggaagggagcattcccatcgaccaggcggggctcttcctcacrgccattgagatctccctggatgtggacgcagaccgggatggtgtggtggagaagaacaacccaaagaaggcatcctggacctggggccccgagggccaggggrccatcctgctggtgaactgtgaccgagagacaccctggttgcccaaggaggactgccgtgatgagaaggtctacagcaaggaagatctyaaggacatgtcccagatgatcctgcggaccaaaggccccgaccgcctccccgccggatacgagatagttctgtacatttccatgtcagactcagacaaagtgggcgtgttctacgtggagaacccgttcttcggccaacgctatatccacatcctgggccggcggaagctctaccatgtggtcaagtayacgggkggctccgcggagctgctgttcttcgtggaaggcctctgtttccccgacgagggcttctcaggcctggtctccatccatgtcagcctgctggagtacatggcccaggacattcccctgactcccatcttcacggacaccgtgatattccggattgctccgtggatcatgacccccaacatcctgcctcccgtgtcggtgtttgtgtgctgcatgaaggataattacctgttcctgaaagaggtgaagaaccttgtggagaaaaccaactgtgagctgaaggtctgcttccagtacctaaaccgaggcgatcgctggatccaggatgaaattgagtttggctacatcgaggccccccataaaggcttccccgtggtgctggactctccccgagatggaaacctaaaggacttccctgtgaaggagctcctgggcccagattttggctacgtgacccgggagcccctctttgagtctgtcaccagccttgactcatttggaaacctggaggtcagtcccccagtgaccgtgaayggcaagacatacccgcttggccgcatcctcatcgggagcagctttcctctgtctggtggtcggaggatgaccaaggtggtgcgtgacttcctgaaggcccagcaggtgcaggcrcccgtggagctctactcagactggctgactgtgggccacgtggatgagttcatgtcctttgtccccatccccggcacaaagaaattcctgctactcatggccagcacctcggcctgctacaagctcttccgagagaagcagaaggacggccatggagaggccatcatgttcaaaggcttgggtgggatgagcagcaagcgaatcaccatcaacaagattctgtccaacgagagccttgtgcaggagaacctgtacttccagcgctgcctrgactggaaccgtgacatcctcaagaaggagctgggactgacagagcaggacatcattgacctgcccgctctgttcaagatggacgaggaccaccgtgccagagccttcttyccaaacatggtgaacatgatcgtgctggacaaggacctgggcatccccaagccattcgggccacaggttgaggaggaatgctgcctggagatgcacgtgcgtggcctcctggagccyctgggcctcgaatgcaccttcatcgaygacatttctgcctaccacaaatttctgggggaagtccactgtggcaccaacgtccgcaggaagcccttcaccttcaagtggtggcacatggtgccctgacctgccaggggccctggygtttgcctccttcgcttagttctccagaccctccctcacaygcccagagccttctgctgacatggactggacagccccgctgggagacctttgggacgtggggtggaatttggggtatctgtgccttgccctccctgagaggggcctcagtgtcctctgaagccatccccagtgagcctcgactctgtccctgctgaaaatagctgggccagtgtctctgtagccctgacataaggaacrgaacacaacaaaacacagcaaaccatgtgcccaaactgctccccaaagaattttgagtctctaatctgacactgaatgaggggagaagggaaggagattctgggattgccagttcttccagcagccatgctctgaaaatcaaggtagaatccatggaaagggaccccaggaccccgggaccctagacgtatcttgaactgccatcgtcatttcaaatacatctccctcagggtttccaggtggccacccccaattattcattccttaccaacctctcaaatcctcttggctttctctctgcagtgtggacactgttggctagtcctccccactccctgagggtccagtaagttagcttagaaccttcctggaaacatttcatctgagcaggtttccccacgtgtgggatgctccttttgcctcatctgtctcagggatgcaggctcccccgcatgcatggggatttctccccagaccagcatacttgtgacctgagagttcaatgygtaaagatgcccctggtcagccatatccatcttctcttgcctggtccttgattctctggccgctccctgaccttcctccttccactgccttgactttcttcctttttattcctggtgccatctgtccaggcagctagacaagaacttgttcrccagcagccrgattcaggccttcccaggggcataataagtgaccagcccctcctctccggacatcagatccaacacataaggaccctggcctaccctccagcccaacagccagttctgggtcagctgccaacttaggggtggtttgattatcccattgaaattcaccagtgcctttgccaaagaccctctcatttggacatacccagattcattccctggctccaactgaaaagactcagtttcaatckttaaaagttcctttagggccagaagaataaatgaattataatcccattttgaagaaccgatttataaccaatgaaaaggttataatgtaatttatattcttggaggaacaagattttcatttgggattatttccttcaaccattcaacaaacatttgttgtatgccactaagcgccaggcacggcgttgggctctgcaaacacagtggttagtagcagtctggacctggtccctactggcatggaacccatcactccccaacatgcaaagcccacatttaaaggccagcctctgccccttcagtgatgcgctctttagaaatgccwgyccactatattcagaaatccgcagggcacaaaacttccagcaagtcactgttgtggtgaaatgggcagtgggggtggggggtcttctttaaacaggcccccttcccatctacctagccagtacccatccaatgagtccccagagcctccagaagctgytgtctcctctctggggacagcagctcctgcctttggaggccaaagccccagatctctccagccccagagctgaaaacaccaagtgcctatttgagggtgtctgtctggagacttagagtttgtcatgtgtgtgtgtgtgtttggttaatgtgggtttatgggttttctttcttttttttyttttttttttaggctcttccccacccccactttctataaatgtaggcctagaatacgcttctctgttgcaaaactcagctaag

SEQ ID NO: 5054 - DNA, 1011 bp, Homo sapiens
caggctctgatgctggtctctggtagaagaaggttgctcacagctctgctgcaggctcagaagtggccctttcaaccctccagagacatgagactagtccagttccaggcaccccacctggtggggcctcacttgggcccagagatggagaatggtggaagggttatcaacctcaatgcctttgactctatgctccccaaaatgatgacacagttcctagagcagggagaggccatcctctcagtggcaagaagagccytgggtgcccagttgccagtcctaccatggttggaagtgacctccctggctccagccacatggccagataaggtggtgtgtgtgggcatgaattatgtggaccactgcaaagaacagaatgtgcccgtgcccacggaaccgatcaacttcagcaagtttgccaactccattgtggagccctatgatgagatggtcctcccatcagagagccaggaggtagactgggaagtggagcagctgtggtcattggaaagaaaggcaagcacatcaaggccacagatgccatggcccatgtggctggcttcactgcggctcataacgtgagtgctcatgactggcaaatgagacatgatgggaaacagtggctgctgggaaaaaccttcaacaccttctaccctctgggccttgccttggtgaccaaggacagtgtagcagatgcacacatcttaaagacctgctgccaagtgaatggggaagtggtccagagcaacaacaccaaccagatggtggtcaagacagaggagcggatagcgtgggtctcccagtttgtcaccttttacccaggggatgtcatcctgactgggacctccccaggtgttggtgtattcaggaaaccttctgtctttctcaagaagggagatgaagtccagtgtgaaattgaagaactaggtgtcatcatcagcaaggtggtgtgatggctcctgcacaggccctggtcataggatgggggcatctgctcccactcagcttagc

SEQ ID NO: 5055 - DNA, 8030 bp, Homo sapiens
gccatctccaactcttcccgcggcccctcccgctcagccatcttggaccgctgttcccaggcaccccgatggacctgctatgatcaggaaggcttccttgaggtggaaaatgcctctctctttctccagaaacaaggctccagagtagtggtcaagaaggccaggaaatacctccatagctggatgaaaatagatgtcaacaaggagggaaaactggtcaatgaaagcctctgtttacaaaaagctggcctgggagcagaagtttcggtgaggagcactagaaacacggctccaccccagattctcactacctttaatgcagttccagatggcctggtattccttattaggaataccacagaggccttcatcagaaatgctgcagaaaactacagccaaaacagcagcgagaggcagcatcccaatctgcacatgactggaattacagacacatcatgggttttgtcgactactcagcccttctccagcaccactgaagagactggactggcggagccagagagatgtaacttcaccctggcggagtccaaggcctccagccattctgtgtctatccagtggagaattttgggctcaccctgtaactttagcctcatctatagcagtgacaccctgggggccgcgttgtgccctacctttcggatagacaacaccacatacggatgtaaccttcaagatttacaagcaggaaccatctataacttcargattatttctctggatgaagagagaacwgtggtcttgcaaacagatcctttacctcctgctaggtttggagtcagtaaagagaagacgacttcaaccrgcttgcatgtttggtggactccttcttccggaaaagtcacctcatatgaggtgcaattatttgatgaaaataaccaraagatacagggggttcaaattcaagaaagtacttcatggaatgaatacacttttttcaatctcactgctggtagtaaatacaatattgccatcacagctgtttctggaggaaaacgttctttttcagtttataccaatggatcaacagtgccatctccagtgaaagatattggtatttccacaaaagccaattctctcctgatttcctggtcccatggttctgggaatgtggaacgataccggctgatgctaatggataaagggatcctagttcatggcggtgttgtggacaaacatgctacttcctatgcttttcacgggctgacccctggctacctctacaacctcactgttatgactgaggcygcagggctgcaaaactacaggtggaaactagtcaggacagcccccatggaagtctcaaatctgaaggtgacaaatgatggcagtttgacctctctaaaagtcaaatggcaaagacctcctggaaatgtggattcttacaatatcaccctgtctcacaaagggaccatcaaggaatccagagtattagcaccttggattactgaaactcactttaaagagttagtccccggtcgactttatcaagttactgtcagctgtgtctctggtgaactgtctgctcagaagatggcagtgggcagaacatttccagacaaagttgcaaacctggaggcaaacaataatggcaggatgaggtctcttgyagtgagctggtcgccccctgctggagactgggagcagtatcggatcctactcttcaatgaktctgtggtgctgctcaacatcactgtgggaaaggaagaaacacagtatgtcatggatgacacggggctcgtaccgggaagacagtatgaggtggaagtcattgttgagagtggaaatttgaagaattctgagcgttgccaaggcaggacagtccccctggctgtcctccagcttcgtgtcaaacatgccaatgaaacctcactgagtatcatgtggcagacccctgtakcagaatgggagaaatacatcatktccctagctgacagagacctcttactgatccacaagtcactctccaaaratgccaaagaattcacttttactgacctggtgcctggacgaaaatacatrgctacagtcaccagtattagtggagacttaaaaaattcctcttcagtaaaaggaagaacagtgcctgcccaagtgactgacttgcatgtggccaaccaaggaatgaccagtagtctgtttactaactggacccaggcacaaggagacgtagaattttaccaagtcttactgatccatgaaaatgtggtcattaaaaatgaaagcatctccagtgagaccagcagatacagcttccactctctcaagtccggcagcctgtactccgtggtggtaacaacagtgagtggagggatctcttcccgacaagtggttgtggagggaagaacagtcccttccagtgtgagtggagtaacggtgaacaattccggtcgtaatgactacctcagcgtttcctggctgctggcgcccggagatgtggataactatgaggtaacattgtctcatgacggcaaggtggttcagtcccttgtcattgccaagtctgtcagagaatgttccttcagctccctcaccccaggccgcctctacaccgtgaccataactacaaggagtggcaagtatgaaaatcactccttcagccaagagcggacagtgcctgacaaagtccagggagtcagtgttagcaactcagccaggagtgactatttaagggtatcctgggtgcatgccactggagactttgatcactatgaagtyaccattaaaaacaaaaacaacttcattcaaactaaaagcattcccaagtcagaaaacgaatgtgtatttgttcagctagtccctggacggttgtacagtgtyactgttactacaaaaagtggacaatatgaagccaatgaacaagggaatgggagaacaattccagagcctgttaaggatctaacattgcgcaacaggagcactgaggacttgcatgtgacttggtcaggagctaatggggatgtcgaccaatatgagatccagctgctcttcaatgacatgaaagtatttcctccttttcaccttgtaaataccgcaaccgagtatcgatttacttccctaacaccaggccgccaatacaaaattcttgtcttgacgattagcggggatgtacagcagtcagccttcattgagggcttcacagttcctagtgctgtcaaaaatattcacatttctcccaatggagcaacagatagcctgacggtgaactggactcctggtgggggagacgttgattcctacayggtgtcggcattcaggcacagtcaaaaggttgactctcagactattcccaagcacgtctttgagcacacgttccacagactggaggccggggagcagtaccagatcatgattgcctcagtcagcgggtccctgaagaatcagataaatgtggttgggcggacagttccagcatctgtccaaggagtaattgcagacaatgcatacagcagttattccttaatagtaagttggcaaaaagctgctggtgtggcagaaagatatgatatcctgcttctaaytgaaaatggaatccttctgcgcaacacatcagagccagccaccactaagcaacacaaatttgaagatctaacaccaggcaagaaatacaagatacagatcctaactgtcagtggaggcctctttagcaaggaagcccagactgaaggccgaacagtcccagcagctgtcaccgacctgaggatcacagagaactccaccaggcacctgtccttccgctggaccgcctcagagggggagctcagytggtacaacatctttttgtacaacccagatgggaatctccaggagagagctcaagttgacccactagtccagagcttctctttccagaacttgctacaaggcagaatgtacaagatggtgattgtaactcacagtggggagctgtctaatgagtctttcatatttggtagaacagtcccagcctctgtgagtcatctcagggggtccaatcggaacacgacagacagcctttggttcaactggagtccagcctctggggactttgacttttatgagctgattctctataatcccaatggcacaaagaaggaaaactggaaagacaaggacctgacggagtggcggtttcaaggccttgttcctggaaggaagtacgtgctgtgggtggtaactcacagtggagatctcagcaataaagtcacagcggagagcagaacagctccaagtcctcccagtcttatgtcatttgctgacattgcaaacacatccttggccatcacgtggaaagggcccccagactggacagactacaacgactttgagctgcagtggttgcccagagatgcrcttactgtcttcaacccctacaacaacagaaaatcagaaggacgcattgtgtatggtcttcgtccagggagatcctatcaattcaacgtcaagactgtcagtggtgattcctggaaaacttacagcaaaccaatttttggatctgtgaggacaaagcctgacaagatacaaaacctgcattgccggcctcagaactccacggccattgcctgttcttggatccctcctgattctgactttgatggttatagtattgaatgccggaaaatggacacccaagaagttgagttttccagaaagctggagaaagaaaaatctctgctcaacatcatgatgctagtgccccataagaggtacctggtgtccatcaaagtgcagtcggccggcatgaccagcgaggtggttgaagacagcactatcacaatgatagaccgcccccctcctccacccccacacattcgtgtgaatgaaaaggatgtgctaattagcaagtcttccatcaactttactgtcaactgcagctggttcagcgacacsaatggagctgtgaaatacttcacagtggtggtgagagaggctgatggcagtgatgagctgaagccagaacagcagcaccctctcccttcctacctggagtacaggcacaatgcctccattcgggtgtatcagactaattattttgccagcaaatgtgccgaaaatcctaacagcaactccaagagttttaacattaagcttggagcagagatggagagcctaggtggaaaatgcgatcccactcagcaaaaattctgtgatggaccactgaagccacacactgcctacagaatcagcattcgagcwtttacacagctctttgatgaggacctgaaggaattcacaaagccactctattcagacacatttttttctttacccatcactactgaatcagagcccttgtttggagctattgaaggtgtgagtgctggtctgtttttaattggcatgctagtggctgttgttgccttattgatctgcagacagaaagtgagccatggtcgagaaagaccctctgcccgtctgagcattcgtagggatcgaccattatctgtccacttaaacctgggccagaaaggtaaccggaaaacttcttgtccaataaaaataaatcagtttgaagggcatttcatgaagctacaggctgactccaactaccttctatccaaggaatacgaggagttaaaagacgtgggccgaaaccagtcatgtgacattgcactcttgccggagaatagagggaaaaatcgatacaacaatatattgccctatgatgccacgcgagtgaagctctccaatgtagatgatgatccttgctctgactacatcaatgccagctacatccctggcaacaacttcagaagagaatacattgtcactcagggaccgcttcctggcaccaaggatgacttctggaaaatggtgtgggaacaaaacgttcacaacatcgtcatggtgacccagtgtgttgagaagggccgagtaaagtgtgaycattactggccagcggaccaggattccctctactatggggacctcatcctgcagatgctctcagagtccgtcctgcctgagtggaccatccgggagtttaagatatgyggtgaggaacagcttgatgcacacagactcatccgccactttcactatacggtgtggccagaccatggagtcccagaaaccacccagtctctgatccagtttgtgagaactgtcagggactacatcaacagaagcccgggtgctgggcccactgtggtgcactgcagtgctggtgtgggtaggactggaacctttattgcattggaccgaatcctccagcagttagactccaaagactctgtggacatttatggagcagtgcacgacctaagacttcacagggttcacatggtccagactgagtgtcagtatgtctacctacatcagtgtgtaagagatgtcctcagagcaagaaagctacggagtgaacaagaaaaccccttgtttccaatctatgaaaatgtgaatccagagtatcacagagatccagtctattcaaggcattgagaatgyacctgaagagctcctggataaaaattattcactgtgtgatttgtttttaaaaacttgcttcatgccctacagaggtgccagctatttctgttgatactatgtataatttattaatctggagaatgtttaaaattttatataatttaaaggtaacagatattattgtacatagttgtattttgtagtttcttctgtaaatatgtatttttcataatgtttaatattaagctttatataatactatttttccacactaaagtgttcatgacttgttctacataaaactaattcaacctgtatgacaggactactggtaaaatgcatatggaggtggtggcagagacaatccttcaggccatgttttctacctgttttgatattcactggacaggaaaaagggcagggctagagagagcaaatactatggctagatttgctgcattgctgtcccatgaatctcgagagccaacagacatgtcctaacttgctattaggacaaatgtgacagtcaaaaaaaggattagagggagggagaaaaaagaattaagcagtaccaaagctgaactagatgcttgtgtctgaactagttgctctctctctcctttctccttccagggattcaagccaaagtggtcagctcagggatcatgtaacttgcagtgcaagcccaggatggtaggatgcagggttgagggttctgatagagaatgattccaaacagaagtgatgaattccttttgttaataagatgccagctatacccagactggaaacataacatgcaaagcactatctacagtgattagagatcctttcattgcattcatggtgtggagtgtgaacatccacacccatactgtaatgtatttatacacactagtttctgtctcattttcagtggtctccattcctagaaaagtcacaattatccattcctacttgatttcccattaaaagaatattatggtagcagattgtgcccctcattaaaaggcttaatgccaacattttcatagaaatgactacaaacatcatatatagtaaatttaaaaacaatagcaaaaacaaaaacagtggtcttcagtaaaattttcaaaacttcttttagtaaatcaatgaagtcaaaatgtcaagtaatcacccaaagttgcatttaataacaaaaggcactacatactgtaccaagtttatcttcaatatttgtgccttacttahtttgactataacaaattccaatgagtcagaaagtatttccttcatcaaggtccagttccgacagcattcctgggaaaaatttgaaaggagtttgtacggaatcttcatagatacctgagaagatgagctggagatgtttgcctttttcacactacaaatttttctgtaataaacttgggaattagaggtcaagtttgttgatggcatagcttcctttgcataaagagtayatttcttttcaaagtatatatttttgtaacctaccataaagtccgtaagtgaatacaacgaatgtaattgacataataattgaaaatcattgactatacctaaaatagttctttataattaaataactctacacccaa

SEQ ID NO: 5056 - DNA, 7758 bp, Homo sapiens
agcagcagcagcagcggtggccgcagtggcccctgcgcgtcgccagccccgagggaagcgcgctgcgcccacggggcgcgctgagcgcgcgcaacaggtgaccccctgccccggccctcgggccgtcccacgtccagccccctcggtctcctctggatcttaactactgagcgcaatgctgagccatggagccgggttggccttgtggatcacactgagcctgctgcagactggactggcggagccagagagatgtaacttcaccctggcggagtccaaggcctccagccattctgtgtctatccagtggagaattttgggctcaccctgtaactttagcctcatctatagcagtgacaccctgggggccgcgttgtgccctacctttcggatagacaacaccacatacggatgtaaccttcaagatttacaagcaggaaccatctataacttcargattatttctctggatgaagagagaacwgtggtcttgcaaacagatcctttacctcctgctaggtttggagtcagtaaagagaagacgacttcaaccrgcttgcatgtttggtggactccttcttccggaaaagtcacctcatatgaggtgcaattatttgatgaaaataaccaraagatacagggggttcaaattcaagaaagtacttcatggaatgaatacacttttttcaatctcactgctggtagtaaatacaatattgccatcacagctgtttctggaggaaaacgttctttttcagtttataccaatggatcaacagtgccatctccagtgaaagatattggtatttccacaaaagccaattctctcctgatttcctggtcccatggttctgggaatgtggaacgataccggctgatgctaatggataaagggatcctagttcatggcggtgttgtggacaaacatgctacttcctatgcttttcacgggctgacccctggctacctctacaacctcactgttatgactgaggcygcagggctgcaaaactacaggtggaaactagtcaggacagcccccatggaagtctcaaatctgaaggtgacaaatgatggcagtttgacctctctaaaagtcaaatggcaaagacctcctggaaatgtggattcttacaatatcaccctgtctcacaaagggaccatcaaggaatccagagtattagcaccttggattactgaaactcactttaaagagttagtccccggtcgactttatcaagttactgtcagctgtgtctctggtgaactgtctgctcagaagatggcagtgggcagaacatttccagacaaagttgcaaacctggaggcaaacaataatggcaggatgaggtctcttgyagtgagctggtcgccccctgctggagactgggagcagtatcggatcctactcttcaatgaktctgtggtgctgctcaacatcactgtgggaaaggaagaaacacagtatgtcatggatgacacggggctcgtaccgggaagacagtatgaggtggaagtcattgttgagagtggaaatttgaagaattctgagcgttgccaaggcaggacagtccccctggctgtcctccagcttcgtgtcaaacatgccaatgaaacctcactgagtatcatgtggcagacccctgtakcagaatgggagaaatacatcatktccctagctgacagagacctcttactgatccacaagtcactctccaaaratgccaaagaattcacttttactgacctggtgcctggacgaaaatacatrgctacagtcaccagtattagtggagacttaaaaaattcctcttcagtaaaaggaagaacagtgcctgcccaagtgactgacttgcatgtggccaaccaaggaatgaccagtagtctgtttactaactggacccaggcacaaggagacgtagaattttaccaagtcttactgatccatgaaaatgtggtcattaaaaatgaaagcatctccagtgagaccagcagatacagcttccactctctcaagtccggcagcctgtactccgtggtggtaacaacagtgagtggagggatctcttcccgacaagtggttgtggagggaagaacagtcccttccagtgtgagtggagtaacggtgaacaattccggtcgtaatgactacctcagcgtttcctggctgctggcgcccggagatgtggataactatgaggtaacattgtctcatgacggcaaggtggttcagtcccttgtcattgccaagtctgtcagagaatgttccttcagctccctcaccccaggccgcctctacaccgtgaccataactacaaggagtggcaagtatgaaaatcactccttcagccaagagcggacagtgcctgacaaagtccagggagtcagtgttagcaactcagccaggagtgactatttaagggtatcctgggtgcatgccactggagactttgatcactatgaagtyaccattaaaaacaaaaacaacttcattcaaactaaaagcattcccaagtcagaaaacgaatgtgtatttgttcagctagtccctggacggttgtacagtgtyactgttactacaaaaagtggacaatatgaagccaatgaacaagggaatgggagaacaattccagagcctgttaaggatctaacattgcgcaacaggagcactgaggacttgcatgtgacttggtcaggagctaatggggatgtcgaccaatatgagatccagctgctcttcaatgacatgaaagtatttcctccttttcaccttgtaaataccgcaaccgagtatcgatttacttccctaacaccaggccgccaatacaaaattcttgtcttgacgattagcggggatgtacagcagtcagccttcattgagggcttcacagttcctagtgctgtcaaaaatattcacatttctcccaatggagcaacagatagcctgacggtgaactggactcctggtgggggagacgttgattcctacayggtgtcggcattcaggcacagtcaaaaggttgactctcagactattcccaagcacgtctttgagcacacgttccacagactggaggccggggagcagtaccagatcatgattgcctcagtcagcgggtccctgaagaatcagataaatgtggttgggcggacagttccagcatctgtccaaggagtaattgcagacaatgcatacagcagttattccttaatagtaagttggcaaaaagctgctggtgtggcagaaagatatgatatcctgcttctaaytgaaaatggaatccttctgcgcaacacatcagagccagccaccactaagcaacacaaatttgaagatctaacaccaggcaagaaatacaagatacagatcctaactgtcagtggaggcctctttagcaaggaagcccagactgaaggccgaacagtcccagcagctgtcaccgacctgaggatcacagagaactccaccaggcacctgtccttccgctggaccgcctcagagggggagctcagytggtacaacatctttttgtacaacccagatgggaatctccaggagagagctcaagttgacccactagtccagagcttctctttccagaacttgctacaaggcagaatgtacaagatggtgattgtaactcacagtggggagctgtctaatgagtctttcatatttggtagaacagtcccagcctctgtgagtcatctcagggggtccaatcggaacacgacagacagcctttggttcaactggagtccagcctctggggactttgacttttatgagctgattctctataatcccaatggcacaaagaaggaaaactggaaagacaaggacctgacggagtggcggtttcaaggccttgttcctggaaggaagtacgtgctgtgggtggtaactcacagtggagatctcagcaataaagtcacagcggagagcagaacagctccaagtcctcccagtcttatgtcatttgctgacattgcaaacacatccttggccatcacgtggaaagggcccccagactggacagactacaacgactttgagctgcagtggttgcccagagatgcrcttactgtcttcaacccctacaacaacagaaaatcagaaggacgcattgtgtatggtcttcgtccagggagatcctatcaattcaacgtcaagactgtcagtggtgattcctggaaaacttacagcaaaccaatttttggatctgtgaggacaaagcctgacaagatacaaaacctgcattgccggcctcagaactccacggccattgcctgttcttggatccctcctgattctgactttgatggttatagtattgaatgccggaaaatggacacccaagaagttgagttttccagaaagctggagaaagaaaaatctctgctcaacatcatgatgctagtgccccataagaggtacctggtgtccatcaaagtgcagtcggccggcatgaccagcgaggtggttgaagacagcactatcacaatgatagaccgcccccctcctccacccccacacattcgtgtgaatgaaaaggatgtgctaattagcaagtcttccatcaactttactgtcaactgcagctggttcagcgacacsaatggagctgtgaaatacttcacagtggtggtgagagaggctgatggcagtgatgagctgaagccagaacagcagcaccctctcccttcctacctggagtacaggcacaatgcctccattcgggtgtatcagactaattattttgccagcaaatgtgccgaaaatcctaacagcaactccaagagttttaacattaagcttggagcagagatggagagcctaggtggaaaatgcgatcccactcagcaaaaattctgtgatggaccactgaagccacacactgcctacagaatcagcattcgagcwtttacacagctctttgatgaggacctgaaggaattcacaaagccactctattcagacacatttttttctttacccatcactactgaatcagagcccttgtttggagctattgaaggtgtgagtgctggtctgtttttaattggcatgctagtggctgttgttgccttattgatctgcagacagaaagtgagccatggtcgagaaagaccctctgcccgtctgagcattcgtagggatcgaccattatctgtccacttaaacctgggccagaaaggtaaccggaaaacttcttgtccaataaaaataaatcagtttgaagggcatttcatgaagctacaggctgactccaactaccttctatccaaggaatacgaggagttaaaagacgtgggccgaaaccagtcatgtgacattgcactcttgccggagaatagagggaaaaatcgatacaacaatatattgccctatgatgccacgcgagtgaagctctccaatgtagatgatgatccttgctctgactacatcaatgccagctacatccctggcaacaacttcagaagagaatacattgtcactcagggaccgcttcctggcaccaaggatgacttctggaaaatggtgtgggaacaaaacgttcacaacatcgtcatggtgacccagtgtgttgagaagggccgagtaaagtgtgaycattactggccagcggaccaggattccctctactatggggacctcatcctgcagatgctctcagagtccgtcctgcctgagtggaccatccgggagtttaagatatgyggtgaggaacagcttgatgcacacagactcatccgccactttcactatacggtgtggccagaccatggagtcccagaaaccacccagtctctgatccagtttgtgagaactgtcagggactacatcaacagaagcccgggtgctgggcccactgtggtgcactgcagtgctggtgtgggtaggactggaacctttattgcattggaccgaatcctccagcagttagactccaaagactctgtggacatttatggagcagtgcacgacctaagacttcacagggttcacatggtccagactgagtgtcagtatgtctacctacatcagtgtgtaagagatgtcctcagagcaagaaagctacggagtgaacaagaaaaccccttgtttccaatctatgaaaatgtgaatccagagtatcacagagatccagtctattcaaggcattgagaatgyacctgaagagctcctggataaaaattattcactgtgtgatttgtttttaaaaacttgcttcatgccctacagaggtgccagctatttctgttgatactatgtataatttattaatctggagaatgtttaaaattttatataatttaaaggtaacagatattattgtacatagttgtattttgtagtttcttctgtaaatatgtatttttcataatgtttaatattaagctttatataatactatttttccacactaaagtgttcatgacttgttctacataaaactaattcaacctgtatgacaggactactggtaaaatgcatatggaggtggtggcagagacaatccttcaggccatgttttctacctgttttgatattcactggacaggaaaaagggcagggctagagagagcaaatactatggctagatttgctgcattgctgtcccatgaatctcgagagccaacagacatgtcctaacttgctattaggacaaatgtgacagtcaaaaaaaggattagagggagggagaaaaaagaattaagcagtaccaaagctgaactagatgcttgtgtctgaactagttgctctctctctcctttctccttccagggattcaagccaaagtggtcagctcagggatcatgtaacttgcagtgcaagcccaggatggtaggatgcagggttgagggttctgatagagaatgattccaaacagaagtgatgaattccttttgttaataagatgccagctatacccagactggaaacataacatgcaaagcactatctacagtgattagagatcctttcattgcattcatggtgtggagtgtgaacatccacacccatactgtaatgtatttatacacactagtttctgtctcattttcagtggtctccattcctagaaaagtcacaattatccattcctacttgatttcccattaaaagaatattatggtagcagattgtgcccctcattaaaaggcttaatgccaacattttcatagaaatgactacaaacatcatatatagtaaatttaaaaacaatagcaaaaacaaaaacagtggtcttcagtaaaattttcaaaacttcttttagtaaatcaatgaagtcaaaatgtcaagtaatcacccaaagttgcatttaataacaaaaggcactacatactgtaccaagtttatcttcaatatttgtgccttacttahtttgactataacaaattccaatgagtcagaaagtatttccttcatcaaggtccagttccgacagcattcctgggaaaaatttgaaaggagtttgtacggaatcttcatagatacctgagaagatgagctggagatgtttgcctttttcacactacaaatttttctgtaataaacttgggaattagaggtcaagtttgttgatggcatagcttcctttgcataaagagtayatttcttttcaaagtatatatttttgtaacctaccataaagtccgtaagtgaatacaacgaatgtaattgacataataattgaaaatcattgactatacctaaaatagttctttataattaaataactctacacccaa

SEQ ID NO: 5057 - DNA, 2527 bp, Homo sapiens
agcgattgcgagccagcgcgcgcgcttcggcgttcccggcggtctgcgamgtttccggagcccsggtcccgccgcgggttcgcgcttgtgctcgcgctcgttcctggagtcggcggccgctgcgcgcgctcgttgcccaacccggtccccgcccccagacacgccgggctctcggggcaccacagccatgtgctcgttagcgtcaggcgctaccggttattcacatctgctgaagaaacattttcacactgtaagtctgagcatcagtttaatattgacagcatggttcataaacatggacttgaattttatggatacattaagctaataaattttattagacttaagaatcctacagttgagtacatgaattccatatacaacccagtgccttgggagaaagaagagtatttgaagccagtattagaagatgaccttttacttcaatttgatgtagaagatctttatgaaccggtgtcagtacccttctcataccccaatggactcagtgaaaatacatctgttgttgaaaaattgaaacatatggaagccagggcactgtctgctgaagccgcattggccagagcacgtgaggatctgcaaaaaatgaaacaatttgctcaggattttgtgatgcacacagatgtcagaacctgctcgtcatctactagtgtcattgcggacctccaggaggatgaggatggtgtttatttcagctcatacgggcattatgggatacatgaagaaatgctaaaggacaaaatacgaacagaaagctaccgagatttcatataccaaaatccacatatcttcaaagacaaggtagttttggatgttgggtgtggaactggaattctctctatgtttgctgctaaagctggggcgaagaaggttcttggagttgatcaatctgaaatactttaccaggcaatggatattataagactaaataaacttgaagatactattacactaattaaaggaaagattgaagaagttcatcttcctgtagaaaaagtagatgttatcatatctgagtggatgggctattttcttctgtttgagtctatgttagattctgtcctttatgcaaagaacaaatacttggcaaaaggaggctcggtctaccctgacatttgcactatcagccttgtagcagtgagtgatgtgaataaacatgctgatagaattgctttttgggatgatgtctatggcttcaagatgtcctgcatgaagaaagcagttatyccagaagctgttgtggaagttttagatccgaagactcttatttcagaaccttgtggtattaagcatatagattgccatacgacgtctatctcagatttggaattttcatcagattttaccstgaaaatcacaaggacatccatgtgcacggcaattgctggctactttgatatatattttgagaagaattgccacaacagggtcgtgttctctacgggccctcagagcaccaaaacacactggaaacaaacagtatttctactggaaaaaccattttcagttaaagcaggtgaagccttgaaaggaaaggtcacagttcacaagaataagaaagatccacgttctctcaccgtgaccctcacgttgaataattcaactcaaacttatggtctccagtgaaacagccataaaagcacactaccttgtagtttttaatgtgggggtagagtgggtcagcaggagggagctggttttatgtgagcagatggatggatgatggaccctttcctaatgagcctcctcaataagagagaagttctcattgtgggaatctgacatagttcagctgaggaagagaatcagctgatcctcatggtctgccacgtaatcattttcttagacgtttgctccaccagatttaaccaaatgtaactcccacattgagtttatctatattgaaaatcatttacattggcctatatttggaagagagatagtcttttgtttttaataagtttcttactataaattttaaacaaattggttagttatttggatattttattaaactagtaacacaggtactacacattttattatggactcctctgaggaggagtttttaattgtatttgctagaaaatcaggatgtaataaagatttgtataaaaaaactaaaatatggaaaagagcttcagccttcatatacaaatcatatatgcagacagcctagttgattatctagcatacttagggttctcattttgtagtttcttccctctttgtgactattccttagccttatagatttctagtactgcccaggaaatctaatttcaatacatttatcctaggtttcatgaaagtttttaaagattgggataaatatgtacttatttactaacgtattatctttttcaaaccagatttatgtgcaaaggttaaacatgtaactgttactaagcagtctataaagttgtcatttacaattactgattcaatttgaaatgtagaataaaattttaataaaatgtatccttataaaatattttaaaaatat

SEQ ID NO: 5058 - DNA, 2720 bp, Homo sapiens
atgtgctcgttagcgtcaggcgctaccggtgggtaccctggcccctcagcacccggctcgtccagccccaggccgcgccgctgtggggccggtggaagaccctccgggacacgggcccgggcagggtggggggctcgcagggatcatgaaggaggtgctgagtgagggccgcgggcgaacggggcggaggagagcccatcgtcacctgctcctcgagcccccgggccgcaccggtgtccgaggccgatctgattgttgtgtgtgtgtgttaggcggccggggcgctgtggagaatgaggaggacctgccagaactgtcggacagcggggacgaggccgcctgggaggatgaggacgatgcagatctcccccacggcaagcagcagaccccctgcctgttctgtaacaggttattcacatctgctgaagaaacattttcacactgtaagtctgagcatcagtttaatattgacagcatggttcataaacatggacttgaattttatggatacattaagctaataaattttattagacttaagaatcctacagttgagtacatgaattccatatacaacccagtgccttgggagaaagaagagtatttgaagccagtattagaagatgaccttttacttcaatttgatgtagaagatctttatgaaccggtgtcagtacccttctcataccccaatggactcagtgaaaatacatctgttgttgaaaaattgaaacatatggaagccagggcactgtctgctgaagccgcattggccagagcacgtgaggatctgcaaaaaatgaaacaatttgctcaggattttgtgatgcacacagatgtcagaacctgctcgtcatctactagtgtcattgcggacctccaggaggatgaggatggtgtttatttcagctcatacgggcattatgggatacatgaagaaatgctaaaggacaaaatacgaacagaaagctaccgagatttcatataccaaaatccacatatcttcaaagacaaggtagttttggatgttgggtgtggaactggaattctctctatgtttgctgctaaagctggggcgaagaaggttcttggagttgatcaatctgaaatactttaccaggcaatggatattataagactaaataaacttgaagatactattacactaattaaaggaaagattgaagaagttcatcttcctgtagaaaaagtagatgttatcatatctgagtggatgggctattttcttctgtttgagtctatgttagattctgtcctttatgcaaagaacaaatacttggcaaaaggaggctcggtctaccctgacatttgcactatcagccttgtagcagtgagtgatgtgaataaacatgctgatagaattgctttttgggatgatgtctatggcttcaagatgtcctgcatgaagaaagcagttatyccagaagctgttgtggaagttttagatccgaagactcttatttcagaaccttgtggtattaagcatatagattgccatacgacgtctatctcagatttggaattttcatcagattttaccstgaaaatcacaaggacatccatgtgcacggcaattgctggctactttgatatatattttgagaagaattgccacaacagggtcgtgttctctacgggccctcagagcaccaaaacacactggaaacaaacagtatttctactggaaaaaccattttcagttaaagcaggtgaagccttgaaaggaaaggtcacagttcacaagaataagaaagatccacgttctctcaccgtgaccctcacgttgaataattcaactcaaacttatggtctccagtgaaacagccataaaagcacactaccttgtagtttttaatgtgggggtagagtgggtcagcaggagggagctggttttatgtgagcagatggatggatgatggaccctttcctaatgagcctcctcaataagagagaagttctcattgtgggaatctgacatagttcagctgaggaagagaatcagctgatcctcatggtctgccacgtaatcattttcttagacgtttgctccaccagatttaaccaaatgtaactcccacattgagtttatctatattgaaaatcatttacattggcctatatttggaagagagatagtcttttgtttttaataagtttcttactataaattttaaacaaattggttagttatttggatattttattaaactagtaacacaggtactacacattttattatggactcctctgaggaggagtttttaattgtatttgctagaaaatcaggatgtaataaagatttgtataaaaaaactaaaatatggaaaagagcttcagccttcatatacaaatcatatatgcagacagcctagttgattatctagcatacttagggttctcattttgtagtttcttccctctttgtgactattccttagccttatagatttctagtactgcccaggaaatctaatttcaatacatttatcctaggtttcatgaaagtttttaaagattgggataaatatgtacttatttactaacgtattatctttttcaaaccagatttatgtgcaaaggttaaacatgtaactgttactaagcagtctataaagttgtcatttacaattactgattcaatttgaaatgtagaataaaattttaataaaatgtatccttataaaatattttaaaaatat

SEQ ID NO: 5059 - DNA, 2678 bp, Homo sapiens
cgcctcgaggccggaagcgattgcgagccagcgcgcgcgcttcggcgttcccggcggtctgcgamgtttccggagcccsggtcccgccgcgggttcgcgcttgtgctcgcgctcgttcctggagtcggcggccgctgcgcgcgctcgttgcccaacccggtccccgcccccagacacgccgggctctcggggcaccacagccatgtgctcgttagcgtcaggcgctaccggcggccggggcgctgtggagaatgaggaggacctgccagaactgtcggacagcggggacgaggccgcctgggaggatgaggacgatgcagatctcccccacggcaagcagcagaccccctgcctgttctgtaacaggttattcacatctgctgaagaaacattttcacactgtaagtctgagcatcagtttaatattgacagcatggttcataaacatggacttgaattttatggatacattaagctaataaattttattagacttaagaatcctacagttgagtacatgaattccatatacaacccagtgccttgggagaaagaagagtatttgaagccagtattagaagatgaccttttacttcaatttgatgtagaagatctttatgaaccggtgtcagtacccttctcataccccaatggactcagtgaaaatacatctgttgttgaaaaattgaaacatatggaagccagggcactgtctgctgaagccgcattggccagagcacgtgaggatctgcaaaaaatgaaacaatttgctcaggattttgtgatgcacacagatgtcagaacctgctcgtcatctactagtgtcattgcggacctccaggaggatgaggatggtgtttatttcagctcatacgggcattatgggatacatgaagaaatgctaaaggacaaaatacgaacagaaagctaccgagatttcatataccaaaatccacatatcttcaaagacaaggtagttttggatgttgggtgtggaactggaattctctctatgtttgctgctaaagctggggcgaagaaggttcttggagttgatcaatctgaaatactttaccaggcaatggatattataagactaaataaacttgaagatactattacactaattaaaggaaagattgaagaagttcatcttcctgtagaaaaagtagatgttatcatatctgagtggatgggctattttcttctgtttgagtctatgttagattctgtcctttatgcaaagaacaaatacttggcaaaaggaggctcggtctaccctgacatttgcactatcagccttgtagcagtgagtgatgtgaataaacatgctgatagaattgctttttgggatgatgtctatggcttcaagatgtcctgcatgaagaaagcagttatyccagaagctgttgtggaagttttagatccgaagactcttatttcagaaccttgtggtattaagcatatagattgccatacgacgtctatctcagatttggaattttcatcagattttaccstgaaaatcacaaggacatccatgtgcacggcaattgctggctactttgatatatattttgagaagaattgccacaacagggtcgtgttctctacgggccctcagagcaccaaaacacactggaaacaaacagtatttctactggaaaaaccattttcagttaaagcaggtgaagccttgaaaggaaaggtcacagttcacaagaataagaaagatccacgttctctcaccgtgaccctcacgttgaataattcaactcaaacttatggtctccagtgaaacagccataaaagcacactaccttgtagtttttaatgtgggggtagagtgggtcagcaggagggagctggttttatgtgagcagatggatggatgatggaccctttcctaatgagcctcctcaataagagagaagttctcattgtgggaatctgacatagttcagctgaggaagagaatcagctgatcctcatggtctgccacgtaatcattttcttagacgtttgctccaccagatttaaccaaatgtaactcccacattgagtttatctatattgaaaatcatttacattggcctatatttggaagagagatagtcttttgtttttaataagtttcttactataaattttaaacaaattggttagttatttggatattttattaaactagtaacacaggtactacacattttattatggactcctctgaggaggagtttttaattgtatttgctagaaaatcaggatgtaataaagatttgtataaaaaaactaaaatatggaaaagagcttcagccttcatatacaaatcatatatgcagacagcctagttgattatctagcatacttagggttctcattttgtagtttcttccctctttgtgactattccttagccttatagatttctagtactgcccaggaaatctaatttcaatacatttatcctaggtttcatgaaagtttttaaagattgggataaatatgtacttatttactaacgtattatctttttcaaaccagatttatgtgcaaaggttaaacatgtaactgttactaagcagtctataaagttgtcatttacaattactgattcaatttgaaatgtagaataaaattttaataaaatgtatccttataaaatattttaaaaatat

SEQ ID NO: 5060 - DNA, 2827 bp, Homo sapiens
gagaattacagacagcgaacttgcccctaagccctcgttgwgggtktgtgtttgagcatttaggagaggactccagtgctcctcagcgacagacacagctgcctctgcggtgtctgaaggccctggtcgtggtgacgctagatggccgccctgggcgcctcctgtgggcgtagaggcatcaccactctgcactggcagactcagcatggagttggagcagagtctgacacgagcacttgccatcccaggcgtttcagttctgactgagaaggtagatgcacaggggaggagagggccctttyragctccrctctgcctccaccactcattccctaaccccgcagcctcagcgccctcayctgtaaaatggggagttttgcctacagggttcagcacaatgccagcctgacataggaaccccagtggattgtcagttttgccattatcccctgcatcctggaggtgacaccgcctggttaataggcaacactcccracggcccagcacagccccaggrcagcaggaggctggcctgtggccaagaatgcatggtggagggggcctggagggggactgcagctcctcctcttcctgcttcctccctgctccaccccgtgcctagggcagcacaaaagccaatcgctagcaaactcsctgcctagcaaggcccagcctggggcagaaatggctgcaagtggccgaggtctctgcaaggctgtggccgcctctcccttcccggcgtggagacgagataacayggaagccaggggaggtctgaagcctgagtatgatgcggtggtgataggagcaggacacaacggactggtggctgcagcgtacctgcagagactgggggtgaacaccgccgtcttcgagaggcgccatgtgatcgggggtgcagctgtcactgaggagatcatcccagggtttaagttctcccgygcgtcctacctgctcagcctgctgaggccgcagatttacactgatctggagctgaagaaacatgggctgaggcttcatcttcgaaacccctactccttcacccccatgctggaagagggtgcaggcagcaaggtgcccaggtgccttctgctgggcacagacatggcagaaaaccagaagcagatcgcccagttctcccagaaggatgcccaggtctttcccaaatatgaggagttcatgcatcgcttggcattagccattgaccctctgctggatgcggcccccgtggacatggcggccttccagcatggctccttgctgcaaaggatgaggtcgctctccaccctcaagcccctgctgaaggcaggccgcatcctgggagcccagcttccccgatattatgaggtcctcacagctcccattaccaaggtgctggatcagtggttcgagtctgagcctttaaaagccactctagccacagatgcagtgattggagccatgacaagtccccacactccggggagtgggtatgtgctgctgcaccatgtgatggggggcctggagggaatgcagggggcctggggctacgtccaggggggcatgggtgccctctctgatgcgatcgcaagctcagccaccacacatggagcaagcatcttcactgaaaagacagtggcgaaggtgcaggtgaacagtgaaggctgtgttcaaggagttgtgctggaagatggcacagaggtgagaagcaaaatggtgctgtccaacacatcaccgcagatcaccttcctgaagctgacgccacaggagtggcttcctgaggagttcctggagagaatctctcagctggacacccggtcgcctgtcaccaagatcaatgtggccgtagacaggctgcccagcttcctggcggcccccaatgctcccaggggccagccgctgccccatcaccaatgctccatccacctgaactgtgaagacaccctcctccttcatcaggcctttgaagatgccatggatggcctgccttcccacaggcctgtgattgagctctgcatcccttcctcgctggaccccaccctggctccccctggctgccatgtagtctccctcttcactcagtacaygccctatacgctggctggaggcaaggcctgggacgagcaggagagagacgcttatgcagacagagtgttygattgcatcgaggtctatgcccctggcttcaaggactctgtggttggcagagacatcctcacaccaccagatttggagagaatcttcgggcttcctggagggaacatattccactgcgccatgtccctggaccagctctacttcrcccgccccgtgcccctgcattctggctaccgctgccctctccagggcctgtatctctgtggaagtggggctcatcctggaggaggtgtgatgggagctgctgggcgaaatgcagcacatgtggcctttagggacctcaagagcatgtgaccctgaaccagctctgacccaggaagaagactccacccctgaattccaagtgctccattggatcagcttcccaggaagttcagcttcggcataatcgtgcaggaatttcagttcctggctggccgtgaggaggcaggtagccctgttgaaaaccccatgtggcaagtaactgcagtagcctccagctgactgaagctctcagacctactacctcagagaatggatgctgccaacacatgtgagcaaggaaatggatgcttccccagttgagcttccagatgagaacacagcctggccggcactgtgagtatagccttgtgacaccctgaacagggagtccagctgtgcctagattcctgaacagtggaaactgtgagataataaatgtgtgttgttc

SEQ ID NO: 5061 - DNA, 2664 bp, Homo sapiens
gagaattacagacagcgaacttgcccctaagccctcgttgwgggtktgtgtttgagcatttaggagaggactccagtgctcctcagcgacagacacagctgcctctgcggtgtctgaaggccctggtcgtggtgacgctagatggccgccctgggcgcctcctgtgggcgtagaggcatcaccactctgcactggcagactcagcatggagttggagcagagtctgacacgagcacttgccatcccaggcgtttcagttctgactgagaaggtagatgcacaggggaggagagggccctttyragctccrctctgcctccaccactcattccctaaccccgcagcctcagcgccctcayctgtaaaatggggagttttgcctacagggttcagcacaatgccagcctgacataggaaccccagtggattgtcagttttgccattatcccctgcatcctggaggtgacaccgcctggttaataggcaacactcccracggcccagcacagccccaggrcagcaggaggctggcctgtggccaagaatgcatggtggagggggcctggagggggactgcagctcctcctcttcctgcttcctccctgctccaccccgtgcctagggcagcacaaaagccaatcgctagcaaactcsctgcctagcaaggcccagcctggggcagaaatggctgcaagtggccgaggtctctgcaaggctgtggccgcctctcccttcccggcgtggagacgagataacayggaagccaggggaggtctgaagcctgagtatgatgcggtggtgataggagcaggacacaacggactggtggctgcagcgtacctgcagagactgggggtgaacaccgccgtcttcgagaggcgccatgtgatcgggggtgcagctgtcactgaggagatcatcccagggtttaagttctcccgygcgtcctacctgctcagcctgctgaggccgcagatttacactgatctggagctgaagaaacatgggctgaggcttcatcttcgaaacccctactccttcacccccatgctggaagagggtgcaggcagcaaggtgcccaggtgccttctgctgggcacagacatggcagaaaaccagaagcagatcgcccagttctcccagaaggatgcccaggtctttcccaaatatgaggagttcatgcatcgcttggcattagccattgaccctctgctggatgcggcccccgtggacatggcggccttccagcatggctccttgctgcaaaggatgaggtcgctctccaccctcaagcccctgctgaaggcaggccgcatcctgggagcccagcttccccgatattatgaggtcctcacagctcccattaccaaggtgctggatcagtggttcgagtctgagcctttaaaagccactctagccacagatgcagtgattggagccatgacaagtccccacactccggggagtgggtatgtgctgctgcaccatgtgatggggggcctggagggaatgcagggggcctggggctacgtccaggggggcatgggtgccctctctgatgcgatcgcaagctcagccaccacacatggagcaagcatcttcactgaaaagacagtggcgaaggtgcaggtgaacagtgaaggctgtgttcaaggagttgtgctggaagatggcacagaggtgagaagcaaaatggtgctgtccaacacatcaccgcagatcaccttcctgaagctgacgccacaggagtggcttcctgaggagttcctggagagaatctctcagctggacacccggtcgcctgtcaccaagatcaatgtggccgtagacaggctgcccagcttcctggcggcccccaatgctcccaggggccagccgctgccccatcaccaatgctccatccacctgaactgtgaagacaccctcctccttcatcaggcctttgaagatgccatggatggcctgccttcccacaggcctgtgattgagctctgcatcccttcctcgctggaccccaccctggctccccctggctgccatgtagtctccctcttcactcagtacaygccctatacgctggctggaggcaaggcctgggacgagcaggagagagacgcttatgcagacagagtgttygattgcatcgaggtctatgcccctggcttcaaggactctgtggttggcagagacatcctcacaccaccagatttggagagaatcttcgggcttcctggagggaacatattccactgcgccatgtccctggaccagctctacttcrcccgccccgtgcccctgcattctggctaccgctgccctctccagggcctgtatctctgtggaagtggggctcatcctggaggaggtgtgatgggagctgctgggcgaaatgcagcacatgtggcctttagggacctcaagagcatgtgaccctgaaccagctctgacccaggaagaagactccacccctgaattccaagtgctccattggatcagcttcccaggaagttcagcttcgggttagtacataaggccaccacaatgctcaagaaattattttagaaaaaacgtacgagttacatttagtgcaagttgaccttatgcccatgcctccatacatggactggttctgttttattaaaactaatatttcatacagattat

SEQ ID NO: 5062 - DNA, 3665 bp, Homo sapiens
ggctggggggccgcgggcgggaggcggataaaaaggccccagggcgcccggggagggagcccgttagcgctgctccgccgcggcgcccgcccagccccggactgtccgcgctccatctggtatcttggcctcagctgtccttgaagtcaccatggcgtggtccccaccagccaccctctttctgttcctgctgctgctaggccagccccctcccagcaggccacagtcactgggcaccactaagctccggctggtgggcccagagagcaagccagaggagggccgcctggaggtgctgcaccagggccagtggggcaccgtgtgtgatgacaactttgctatccaggaggccacagtggcttgccgccagctgggcttcraagctgccttgacctgggcccacagtgccaagtacggccaaggggagggacccatctggctggacaatgtgcgctgtgtgggcacagagagctccttggaccagtgcgggtctaatggctggggagtcagtgactgcagtcactcagaagacgtaggggtgatatgccacccccggcgccatcgtggctacctttctgaaactgtctccaatgcccttgggccccagggccrgcggctggaggaggtgcggctcaagcccatccttgccagtgccaagcagcatagcccagtgaccgagggagccgtggaggtgaagtatgagggccactggcggcaggtgtgtgaccagggctggaccatgaacaacagcagggtggtgtgcgggatgctgggcttccccagcgaggtgcctgtcgacagccactactacaggaaagtctgggatctgaagatgagggaccctaagtctaggctgaagagcctgacgaataagaactccttctggatccaccaggtcacctgcctggggacagagccccacatggccaactgccaggtgcaggtggctccagcccggggcaagctgcggccagcctgcccaggtggcatgcaygctgtggtcagctgtgtggcagggcctcacttccgcccaccgaagacaaagccacaacgcaaagggtcctgggcagaggagccgagggtgcgcctgcgctccggggcccaggtgggcgagggccgggtggaagtgctcatgaaccgccagtggggcacggtctgtgaccacaggtggaacctcatctctgccagtgtcgtgtgtcgtcagctgggctttggctctgctcgggaggccctctttggggcccggctgggccaagggctagggcccatccacctgagtgaggtgcgctgcaggggatatgagcggaccctcagcgactgccctgccctggaagggtcccagaatggttgccaacatgagaatgmtgctgctgtcaggtgcaatgtccctaacatgggctttcagaatcaggtgcgcttggctggtgggcgtatccctgaggaggggctattggaggtgcaggtggaggtgaacggggtcccacgctgggggagcgtgtgcagtgaaaactgggggctcaccgaagccatggtggcctgccgacagctcggcctgggttttgccatccatgcctacaaggaaacctggttctggtcggggacgccaagggcccaggaggtggtgatgagtggggtgcgctgctcaggcacagagctggccctgcagcagtgccagaggcacgggccggtgcactgctcccacggtggcgggcgcttcctggctggagtctcctgcatggacagtgcaccagacctggtgatgaacgcccagctagtgcaggagacggcctacttggaggaccgcccgctcagccagctgtattgtgcccacgaggagaactgcctctccaagtctgcrgatcacatggactggccctacggataccgccgcctattgcgcttctccacacagatctacaatctgggccggactgactttcgtccaaagactggacgcgatagctgggtttggcaccagtgccacaggcattaccacagcattgargtcttcacccactacgacctcctcactctcaatggctccaaggtggctgaggggcacaaggccagcttctgtctggaggacacaaactgccccacaggactgcagcggcgctacgcatgtgccaactttggagaacagggagtgactgtaggctgctgggacacctaccggcatgacattgattgccagtgggtggatatcacagatgtgggccccgggaattatatcttccaggtgattgtgaacccccactatgaagtggcagagtcagatttctccaacaatatgctgcagtgccgctgcaagtatgatgggcaccgggtctggctgcacaactgccacacagggaattcatacccagccaatgcagaactctccctggagcaggaacagcgtctcaggaacaacctcatctgaagctgtcactgcacactcctagctgctgccgatacascagatacctcagcttattggagccatgcccttcacagagtcccaactcagaggaaaagggccagtgccaaggggcaccaagaacctgctcaggaagccttttgatggcaagatcaccaatccagatggtattgctccctcaggatggctctgggcctgcccctaagggcctgtggcctatggaatatgtcctccaggctttgctyagctgagctcctcttctgtaaggaaacccagtcatccctgaatcttgccacagagatccgggattcaggagctctcagtttcttagggatggactatggcccagtcccccatctaagtggtgctttgcaaatgtcttggaggagtataggacagaggaccaaaatacacagcaggtagtgttagctctctgctaggagctcaaagcaacacaacttgtatcaaaatcacaactggcagagaagctggtggatccaatcctttcttcatctgttgttatttagaactcacctctcacactctgttctttagtgtccttacctttatcttaccacacacatgggtgtttctattatccttggaagcacagacctcgggcatccccttattgcctgatgggccaacaccaacagttacggagtgcttgagaaggggcaagtttcacagaaatggccagatagggccttcctacagagcagcaagagtaggccaagcagaaagactgctgaggtaacacggaccccagcccctgtcagggcctctgccaaggaaataatatggaccatttacctggcaggcagtctgctctctctcaggatcaccacgcatctcaggattggtctaaacttcaagtctcaaccaagtgtctgaagtgaactttgcattgaataaatttttgccatggaaagaacatcaaacaagccactcatctctacagagataagaaaacaagtttggcagagcaagagacagaagaccgtggagaaatcagaagggggaacagtcagtttagttaaggatggaacctgggaaaggccaccattcctgcttgatggggctctgatttgctcttgctcaagtggaataaaaccccatggtcttcttgacatgattcttgatcttttctccactgagacacacttaagtgatgatccttacaggactgacaccctaatgccaataaaagttgctcattatggactgctacaaagaccagaccagc

SEQ ID NO: 5063 - DNA, 3917 bp, Homo sapiens
ggccctccctgcaaaacagccgcgggcccagcgccgccctttcccgagagctccgctccccgcgaccccccgccgcccccccgctccccccgccccccgggacttcccggccccgccggctgcggctgggcgcccccgccacctggcctgtgtcccgacggggggcgccgcgcggaaggccgggcggggcgcccgcggactccaggcccgcccggggcggggcctgcggggcctcctccgcggccagctcggggctggggggccgcgggcgggaggcggataaaaaggccccagggcgcccggggagggagcccgttagcgctgctccgccgcggcgcccgcccagccccggactgtccgcgctccatctggtatcttggcctcagctgtccttgaagtcaccatggcgtggtccccaccagccaccctctttctgttcctgctgctgctaggccagccccctcccagcaggccacagtcactgggcaccactaagctccggctggtgggcccagagagcaagccagaggagggccgcctggaggtgctgcaccagggccagtggggcaccgtgtgtgatgacaactttgctatccaggaggccacagtggcttgccgccagctgggcttcraagctgccttgacctgggcccacagtgccaagtacggccaaggggagggacccatctggctggacaatgtgcgctgtgtgggcacagagagctccttggaccagtgcgggtctaatggctggggagtcagtgactgcagtcactcagaagacgtaggggtgatatgccacccccggcgccatcgtggctacctttctgaaactgtctccaatgcccttgggccccagggccrgcggctggaggaggtgcggctcaagcccatccttgccagtgccaagcagcatagcccagtgaccgagggagccgtggaggtgaagtatgagggccactggcggcaggtgtgtgaccagggctggaccatgaacaacagcagggtggtgtgcgggatgctgggcttccccagcgaggtgcctgtcgacagccactactacaggaaagtctgggatctgaagatgagggaccctaagtctaggctgaagagcctgacgaataagaactccttctggatccaccaggtcacctgcctggggacagagccccacatggccaactgccaggtgcaggtggctccagcccggggcaagctgcggccagcctgcccaggtggcatgcaygctgtggtcagctgtgtggcagggcctcacttccgcccaccgaagacaaagccacaacgcaaagggtcctgggcagaggagccgagggtgcgcctgcgctccggggcccaggtgggcgagggccgggtggaagtgctcatgaaccgccagtggggcacggtctgtgaccacaggtggaacctcatctctgccagtgtcgtgtgtcgtcagctgggctttggctctgctcgggaggccctctttggggcccggctgggccaagggctagggcccatccacctgagtgaggtgcgctgcaggggatatgagcggaccctcagcgactgccctgccctggaagggtcccagaatggttgccaacatgagaatgmtgctgctgtcaggtgcaatgtccctaacatgggctttcagaatcaggtgcgcttggctggtgggcgtatccctgaggaggggctattggaggtgcaggtggaggtgaacggggtcccacgctgggggagcgtgtgcagtgaaaactgggggctcaccgaagccatggtggcctgccgacagctcggcctgggttttgccatccatgcctacaaggaaacctggttctggtcggggacgccaagggcccaggaggtggtgatgagtggggtgcgctgctcaggcacagagctggccctgcagcagtgccagaggcacgggccggtgcactgctcccacggtggcgggcgcttcctggctggagtctcctgcatggacagtgcaccagacctggtgatgaacgcccagctagtgcaggagacggcctacttggaggaccgcccgctcagccagctgtattgtgcccacgaggagaactgcctctccaagtctgcrgatcacatggactggccctacggataccgccgcctattgcgcttctccacacagatctacaatctgggccggactgactttcgtccaaagactggacgcgatagctgggtttggcaccagtgccacaggcattaccacagcattgargtcttcacccactacgacctcctcactctcaatggctccaaggtggctgaggggcacaaggccagcttctgtctggaggacacaaactgccccacaggactgcagcggcgctacgcatgtgccaactttggagaacagggagtgactgtaggctgctgggacacctaccggcatgacattgattgccagtgggtggatatcacagatgtgggccccgggaattatatcttccaggtgattgtgaacccccactatgaagtggcagagtcagatttctccaacaatatgctgcagtgccgctgcaagtatgatgggcaccgggtctggctgcacaactgccacacagggaattcatacccagccaatgcagaactctccctggagcaggaacagcgtctcaggaacaacctcatctgaagctgtcactgcacactcctagctgctgccgatacascagatacctcagcttattggagccatgcccttcacagagtcccaactcagaggaaaagggccagtgccaaggggcaccaagaacctgctcaggaagccttttgatggcaagatcaccaatccagatggtattgctccctcaggatggctctgggcctgcccctaagggcctgtggcctatggaatatgtcctccaggctttgctyagctgagctcctcttctgtaaggaaacccagtcatccctgaatcttgccacagagatccgggattcaggagctctcagtttcttagggatggactatggcccagtcccccatctaagtggtgctttgcaaatgtcttggaggagtataggacagaggaccaaaatacacagcaggtagtgttagctctctgctaggagctcaaagcaacacaacttgtatcaaaatcacaactggcagagaagctggtggatccaatcctttcttcatctgttgttatttagaactcacctctcacactctgttctttagtgtccttacctttatcttaccacacacatgggtgtttctattatccttggaagcacagacctcgggcatccccttattgcctgatgggccaacaccaacagttacggagtgcttgagaaggggcaagtttcacagaaatggccagatagggccttcctacagagcagcaagagtaggccaagcagaaagactgctgaggtaacacggaccccagcccctgtcagggcctctgccaaggaaataatatggaccatttacctggcaggcagtctgctctctctcaggatcaccacgcatctcaggattggtctaaacttcaagtctcaaccaagtgtctgaagtgaactttgcattgaataaatttttgccatggaaagaacatcaaacaagccactcatctctacagagataagaaaacaagtttggcagagcaagagacagaagaccgtggagaaatcagaagggggaacagtcagtttagttaaggatggaacctgggaaaggccaccattcctgcttgatggggctctgatttgctcttgctcaagtggaataaaaccccatggtcttcttgacatgattcttgatcttttctccactgagacacacttaagtgatgatccttacaggactgacaccctaatgccaataaaagttgctcattatggactgctacaaagaccagaccagc

SEQ ID NO: 5064 - DNA, 2349 bp, Homo sapiens
gcacccaccactaggctgggtaatttttttcttctgtagatacggagtctccctgcgttgcccaggctgatctagaactcttgggctcaagcctcccgcactcctgagctcaagccgcggcctcccgaagtgctgggattacagatgtgagccactgcgcctggccagtttcatccttttatcctgtaatctgtcaccatgaccctgacaaaagkttccttcacctactccagtggggaggaatatcgtggcgagtggaaggagggccgcaggcatggttttggtcaactgatgtttgcagatggtggcacctacctgggtcattttgagaatgggctctttaatggctttggggtattgaccttctcagatggttcaaggtatgagggggagtttgcccagggcaagtttaatggcgtcggagtcttcattcgatatgacaacatgacctttgagggggaatttaaaaatggcagagtagatggttttggcctgctgactttcccygatggttctcatggaatcccccgcaatgaaggtctctttgagaacaacaagctgctgcgrcgtgagaagtgttctgccattgttcagcgggcccagagcgcctccaagtcagccagaaatctcactgcctgacagcgcagtgggcaccagctgataagtattgggtaaagccagtgcccctgttgttgattcgaggtgaacaaatgaatcagagctgagatgagttgacaatgacagtggagcagaggccttgtatgtgccctgtcacctgccattccagaactggaccacagaaaagtgctgaggatgctggccagcagaccctgcagcagtcattggtggttctgtctttccctaacccttatgtgctggaggacagaggagccacctcttctcactggttgatactctgttcctaagacctcaggttacccagtgtagcctgctgtgacccttctgcttcattttctgccaagtgatacagaaccttcgttctgctgctttggggacaggtgatcctagccccagcttagggccagtgctctgtgccactctggagaaatagggaaaagataggggtggctcagtacagcagccctgtgaaagtcaaggccagagcttttcttttttaatttttttattattattattattattttattttttatttttgagatggagttttactctcgcccaggctagagtgcagtggcatgatctcagctcactgcaacttctgcctcccaggttcaagcaattcccctgcctcagcttcctgagtagctgggactacaggagcgcgccaccacacccagctaatttttgtatttttttttagtagagacggggtttcaccatattggccaggctggtctcaaactcctgacctcgtgatccacccgccttggtctcccaaagtgctgggattacaggcgtgagccaccacgctcagcctttaattttattattataaaaaattgagccagggtcttgctatgtggctcaggctcatctcaaaatcctgggctcaagtgatcctcctgcctgggcctgccaaagtgctaggattgcaggtgtgagccactgtgcctggctggcagagcttttccatatgttactcctcatgctggttggaatcatggctgcaggcttccacttggtctgatcagactggtattcattcctgcctatgtccccgtgaaggattcggtaagagtgctatttcctcctccctttagaagacaggctgtcttctttcatcaacttagagcagataatccccatgtgtgcctctctccttccttagatggggaacaggatccctttttgggacaatcaagaaaaaaactcatgtaaacagtaatcttattacttgtatttgtgactaactccagggaaaagggtagaatatttaggccacttcaggcactaccatggagtgaactgaattcatacggatggcttgggctgacacagtttcttcccagtggaccaataaatcagactcacccgaacccctggggttttggtagaattggacctactctaggactgtggggaactaaaggagcatttggctcactgtagctcttctatcatgagccttgaccgtcaggccgcaatcagaccttactgatgggatctctgcagtttattacgtaggcctcccgttaccctggtacccaaatacgtcccccacctctagctccctagcctcacattgaatgtctcttcaacagcagattgtggtggaagttatagccgygtgcctctatttattctctgaattgtactgtagaaaaaggtgtttataaagaataaagaaatcaccagaactgccta

SEQ ID NO: 5065 - DNA, 2632 bp, Homo sapiens
tggggactggagcaagatcagagccgctcgcgttgatggtcactgttgcttcgggcgcaggtttggttttctttggggttgccatttcaactagacggcctctgggtaggccagatctggatcctctgtctttatctgcgttgcagaggtgggaccacccctctttcacatagtcagcccrggttcgcaaacactcggcccmgcacaaagatggcgtggagccgggctgggccaatgcggagtggcgttgctcccggttgcctaggtaacagccaatgggcagcgggaattgtacccagtgcggtcgcccaggatggcggygtcaagtggggcaatcgctggtggargtggcggagagcaaggtggcagccgggagcccatcagaggaaaagtccgaggcgctggaaccctgcgtccaggcgtgacggtcatcccgaaaggccggccccagtttcatccttttatcctgtaatctgtcaccatgaccctgacaaaagkttccttcacctactccagtggggaggaatatcgtggcgagtggaaggagggccgcaggcatggttttggtcaactgatgtttgcagatggtggcacctacctgggtcattttgagaatgggctctttaatggctttggggtattgaccttctcagatggttcaaggtatgagggggagtttgcccagggcaagtttaatggcgtcggagtcttcattcgatatgacaacatgacctttgagggggaatttaaaaatggcagagtagatggttttggcctgctgactttcccygatggttctcatggaatcccccgcaatgaaggtctctttgagaacaacaagctgctgcgrcgtgagaagtgttctgccattgttcagcgggcccagagcgcctccaagtcagccagaaatctcactgcctgacagcgcagtgggcaccagctgataagtattgggtaaagccagtgcccctgttgttgattcgaggtgaacaaatgaatcagagctgagatgagttgacaatgacagtggagcagaggccttgtatgtgccctgtcacctgccattccagaactggaccacagaaaagtgctgaggatgctggccagcagaccctgcagcagtcattggtggttctgtctttccctaacccttatgtgctggaggacagaggagccacctcttctcactggttgatactctgttcctaagacctcaggttacccagtgtagcctgctgtgacccttctgcttcattttctgccaagtgatacagaaccttcgttctgctgctttggggacaggtgatcctagccccagcttagggccagtgctctgtgccactctggagaaatagggaaaagataggggtggctcagtacagcagccctgtgaaagtcaaggccagagcttttcttttttaatttttttattattattattattattttattttttatttttgagatggagttttactctcgcccaggctagagtgcagtggcatgatctcagctcactgcaacttctgcctcccaggttcaagcaattcccctgcctcagcttcctgagtagctgggactacaggagcgcgccaccacacccagctaatttttgtatttttttttagtagagacggggtttcaccatattggccaggctggtctcaaactcctgacctcgtgatccacccgccttggtctcccaaagtgctgggattacaggcgtgagccaccacgctcagcctttaattttattattataaaaaattgagccagggtcttgctatgtggctcaggctcatctcaaaatcctgggctcaagtgatcctcctgcctgggcctgccaaagtgctaggattgcaggtgtgagccactgtgcctggctggcagagcttttccatatgttactcctcatgctggttggaatcatggctgcaggcttccacttggtctgatcagactggtattcattcctgcctatgtccccgtgaaggattcggtaagagtgctatttcctcctccctttagaagacaggctgtcttctttcatcaacttagagcagataatccccatgtgtgcctctctccttccttagatggggaacaggatccctttttgggacaatcaagaaaaaaactcatgtaaacagtaatcttattacttgtatttgtgactaactccagggaaaagggtagaatatttaggccacttcaggcactaccatggagtgaactgaattcatacggatggcttgggctgacacagtttcttcccagtggaccaataaatcagactcacccgaacccctggggttttggtagaattggacctactctaggactgtggggaactaaaggagcatttggctcactgtagctcttctatcatgagccttgaccgtcaggccgcaatcagaccttactgatgggatctctgcagtttattacgtaggcctcccgttaccctggtacccaaatacgtcccccacctctagctccctagcctcacattgaatgtctcttcaacagcagattgtggtggaagttatagccgygtgcctctatttattctctgaattgtactgtagaaaaaggtgtttataaagaataaagaaatcaccagaactgccta

SEQ ID NO: 5066 - DNA, 1975 bp, Homo sapiens
tggaaacctggctgggcttctggcttcagagctgggaattgtgggaggagggcccagatcccactggagataccgaaggagatactctttagtattgggatcccagaaaccagtcctatatctggccagagggacactgggttgtggcatctctctagctgctacccagaaggaacagggccccctggggcctataggccttgcccctgaccctgggaacacccagctcaggcctgccccagtggccacaagtcagggaggccgcaaatttttaactagaaacattgatcattaatagggggttagaaagagttcaaactaagtctcactctgggacatagaccaattgtgcttcaggcctcctgcagagatgctgggtccccaagtctggtcttctgtgaggcaggggctaagcaggagcttgtccaggaatgtgggggtctgggcctcaggggaggggaagaaggtggacattgcgggtatctacccccctgtgaccacccccttcactgccactgcagaggtggactatgggaaactggaggagaatctgcacaaactgggcaccttccccttccgaggcttcgtggtccagggctccaatggcgagtttcctttcctgaccagcagtgagcgcctcgaggtggtgagccgtgtgcgccaggccatgcccaagaacaggctcctgctagctggctccggatgcgagtccactcaagccacagtggagatgaccgtcagcatggcccaggtcggggctgacgcggccatggtggtgaccccttgctactatcgtggccgcatgagcagtgcggccctcattcaccactacaccaaggttgctgatctctctccaatccctgtggtgctgtacagtgtcccagccaacacagggctggacctgcctgtggatgcagtggtcacgctttcccagcacccgaatattgtgggcatgaaggacagcggtggtgatgtgaccaggattgggctgattgttcacaagaccaggaagcaggattttcaggtgttggctggatcggctggctttctgatggccagctatgccttgggagctgtkgggggcgtctgcgccctggccaatgtcctgggggctcaggtgtgccagctggagcgactgtgctgcacrgggcaatgggaagatgcccagaaactgcagcaccgcctcattgagccaaacgctgcggtgacccggcgctttgggatcccagggctgaagaaaatcatggactggtttggctactatggaggcccctgccgcgcmcccttgcaggagctgagccccgctgaggaggaggcactgcgcatggatttcaccagcaacggctggctctgagggcaggcagggtccatggctggcctgagcccatctcagcctcctgccttgcacytgcagcctgaagcggagagcacagggggatgagggtggcaggyagcggggagccgatagaggctcctttgcctgctgtggtcctccaggcagcctttcacaggcacgcccatgcatatctcctattctaacggcccctgacctctcccttttggatcctaaactgtgtctctggtctgaagactgggaaggagcaatttctcaatttatctttctactgtggatgctttcctacgccctgaggcacatgaagtcagamaggaagggcagaggggcaagtaggcacagtaagggaatttttttttctttttttttttttttgagacagagtttcactctgtcacccaggctggagtgcaatggcgcgatctttgctcactccaacctccgcytcagcctcccaagtagctgggattacaggcatgcgccaccacgcctggctaattttgtattttcagtagagatggggtttcaccatgttggccaggctggtcttgaactcctgacctcaggtgatcctcccgccttggcctcccaaagtgctgggattacaggcatgagtcactg

SEQ ID NO: 5067 - DNA, 2002 bp, Homo sapiens
tggaaacctggctgggcttctggcttcagagctgggaattgtgggaggagggcccagatcccactggagataccgaaggagatactctttagtattgggatcccagaaaccagtcctatatctggccagagggacactgggttgtggcatctctctagctgctacccagaaggaacagggccccctggggcctataggccttgcccctgaccctgggaacacccagctcaggcctgccccagtggccacaagtcagggaggccgcaaatttttaactagaaacattgatcattaatagggggttagaaagagttcaaactaagtctcactctgggacatagaccaattgtgcttcaggcctcctgcagagatgctgggtccccaagtctggtcttctgtgaggcaggggctaagcaggagcttgtccaggaatgtgggggtctgggcctcaggggaggggaagaaggtggacattgcgggtatctacccccctgtgaccacccccttcactgccactgcagaggtggactatgggaaactggaggagaatctgcacaaactgggcaccttccccttccgaggagctgtkgggggcgtctgcgccctggccaatgtcctgggggctcaggtgtgccagctggagcgactgtgctgcacrgggcaatgggaagatgcccagaaactgcagcaccgcctcattgagccaaacgctgcggtgacccggcgctttgggatcccagggctgaagaaaatcatggactggtttggctactatggaggcccctgccgcgcmcccttgcaggagctgagccccgctgaggaggaggcactgcgcatggatttcaccagcaacggctggctctgagggcaggcagggtccatggctggcctgagcccatctcagcctcctgccttgcacytgcagcctgaagcggagagcacagggggatgagggtggcaggyagcggggagccgatagaggctcctttgcctgctgtggtcctccaggcagcctttcacaggcacgcccatgcatatctcctattctaacggcccctgacctctcccttttggatcctaaactgtgtctctggtctgaagactgggaaggagcaatttctcaatttatctttctactgtggatgctttcctacgccctgaggcacatgaagtcagamaggaagggcagaggggcaagtaggcacagtaagggaatttttttttctttttttttttttttgagacagagtttcactctgtcacccaggctggagtgcaatggcatgatctcgcctcctgggttcaagcgattctcctgcctcagcctcccgagtagctgggattacaggcgcctgccaccacrcccagctaatttttgtatttttagcagagatggggtttcaccgtgttggccaggctggtcttgaactcctgacctcaggtgatccaactgcctcggcctcccaaagtgctgggattacagctgtgagccactgcacccggccgggaatttatcaaaggggggactacttagatttggggcttcaaacctgagtctagcacaatgcagctggaggccagggctactcctacaaacccaagttctgactccttccagggaagtatcagcttaagaaacttgatcaggaaagtgacactggtctttcaaagagccctctttaccctcccatccctgccctccacactgcaagctgcattccagccacaacgcccttttctaaatctattttcattcatctcctattctggtctgtagccttgattccaaccattgaatgcacggagacagcccagtggcttgtcagattggtaaataatgacacctggtggataaatgttacattctagaagactattctggtcagcctaggtctgaaacactaaggagacttggcctgagatagggccatccacttgcctacaggcactctgcttttattattaaaaatagtcactttgttactataataaaatttaacag

SEQ ID NO: 5068 - DNA, 1486 bp, Homo sapiens
tggaaacctggctgggcttctggcttcagagctgggaattgtgggaggagggcccagatcccactggagataccgaaggagatactctttagtattgggatcccagaaaccagtcctatatctggccagagggacactgggttgtggcatctctctagctgctacccagaaggaacagggccccctggggcctataggccttgcccctgaccctgggaacacccagctcaggcctgccccagtggccacaagtcagggaggccgcaaatttttaactagaaacattgatcattaatagggggttagaaagagttcaaactaagtctcactctgggacatagaccaattgtgcttcaggcctcctgcagagatgctgggtccccaagtctggtcttctgtgaggcaggggctaagcaggagcttgtccaggaatgtgggggtctgggcctcaggggaggggaagaaggtggacattgcgggtatctacccccctgtgaccacccccttcactgccactgcagaggtggactatgggaaactggaggagaatctgcacaaactgggcaccttccccttccgaggagctgtkgggggcgtctgcgccctggccaatgtcctgggggctcaggtgtgccagctggagcgactgtgctgcacrgggcaatgggaagatgcccagaaactgcagcaccgcctcattgagccaaacgctgcggtgacccggcgctttgggatcccagggctgaagaaaatcatggactggtttggctactatggaggcccctgccgcgcmcccttgcaggagctgagccccgctgaggaggaggcactgcgcatggatttcaccagcaacggctggctctgagggcaggcagggtccatggctggcctgagcccatctcagcctcctgccttgcacytgcagcctgaagcggagagcacagggggatgagggtggcaggyagcggggagccgatagaggctcctttgcctgctgtggtcctccaggcagcctttcacaggcacgcccatgcatatctcctattctaacggcccctgacctctcccttttggatcctaaactgtgtctctggtctgaagactgggaaggagcaatttctcaatttatctttctactgtggatgctttcctacgccctgaggcacatgaagtcagamaggaagggcagaggggcaagtaggcacagtaagggaatttttttttctttttttttttttttgagacagagtttcactctgtcacccaggctggagtgcaatggcgcgatctttgctcactccaacctccgcytcagcctcccaagtagctgggattacaggcatgcgccaccacgcctggctaattttgtattttcagtagagatggggtttcaccatgttggccaggctggtcttgaactcctgacctcaggtgatcctcccgccttggcctcccaaagtgctgggattacaggcatgagtcactg

SEQ ID NO: 5069 - DNA, 1800 bp, Homo sapiens
ggtacctcgtggagaagacgggggaggggagcagcgagatttccttgcggagcaatattcctagggtacagacctcgtagcccgggcccgcgactccgccccgggagcgggcaggggcggggcgagcgctccagctggcgggaaggaggaagggccgggcgcggcgcagaggcgggcgcctaccagccggcagctccggagctgcycgcgccatgtccgcgcacaatcggggcaccgagctcgaccttagctggatctccaaaatacaagtgaatcacccggcagttctgaggcgtgcggaacaaatccaggctcgcagaaccgtgaaaaaggagtggcaggctgcttggctcctgaaagctgttacctttatagatcttactacactttcaggtgatgatacatcttccaacattcaaaggctctgttataaagccaaatacccaatccgggaagatctcttaaaagctttaaatatgcatgataaaggcattactacagcygccgtttgtgtttatcccgcccgggtgtgtgatgctgtaaaagcactcaaggctgcaggctgtaatatccctgtggcatcagtggccgctggatttccagctggacagactcatttgaagacacgattagaagagatcagattggctgtggaagatggagctacagaaatcgacgyggtaattaacagaagcttggtgctgacaggccagtgggaagccctgtatgatgagattcgtcagtttcgcaaggcctgtggggaggctcatcttaaaactatattagcgacaggagaacttggaactcttactaatgtctataaagccagtatgatagcaatgatggcaggatcagattttattaagacctctactggaaaagaaacagtaaatgccaccttcccggtagctatagtaatgctgcgggccattagagatttcttctggaaaactggaaacaagatagggtttaaaccagcaggaggcatccgcagtgcaaaggattcccttgcttggctctctcttgtaaaggaggagcttggagatgagtggctgaagccagaactctttcgaataggtgccagtactctgctctcggacattgagaggcagatttaccatcatgtgactggaagatatgcagcttatcatgatcttccaatgtcttaaatcagtcaccagtwccagaaaagttctttacgacaatgtttaaaaattatttttctacgtaattgctaaaattatttaattaaaaaattgggcagtaggtaactggcattcctctctttaaaatttctaccgaacttaatggaatggaaaaagcaaactcatccacatgtggtactcatttcaggcacatctgaaatgatcttaattactagaagatctgcactattaactttgtgaagagtttctcctaaaaactttaagtaaaatgttaatggtagctttgataacatcaaattctaagggagaaaaaaacaatattaaaccgcccaagcagtgtgccctagcagaggaaaatgcaacatctcgcaagcgctgctgtaacgacttcaggagtcactgattcagcactaatttcctgctgtgaaaactcatctttcatttttgccgtggataggcgcttttattaattgttgtcctaatgaaatttctgacattgtcatatacaacgatgaatatcattaaaatttttaaaataataaagttcctatagtttatttttttaaaaaacttaaaaattgttacaatacataatgaaaaaataatccattaaacataaaaagaggtttgatca

SEQ ID NO: 5070 - DNA, 1652 bp, Homo sapiens
ggtacctcgtggagaagacgggggaggggagcagcgagatttccttgcggagcaatattcctagggtacagacctcgtagcccgggcccgcgactccgccccgggagcgggcaggggcggggcgagcgctccagctggcgggaaggaggaagggccgggcgcggcgcagaggcgggcgcctaccagccggcagctccggagctgcycgcgccatgtccgcgcacaatcggggcaccgagctcgaccttagctggatctccaaaatacaagtgaatcacccggcagttctgaggcgtgcggaacaaatccaggctcgcagaaccgtgaaaaaggagtggcaggcattactacagcygccgtttgtgtttatcccgcccgggtgtgtgatgctgtaaaagcactcaaggctgcaggctgtaatatccctgtggcatcagtggccgctggatttccagctggacagactcatttgaagacacgattagaagagatcagattggctgtggaagatggagctacagaaatcgacgyggtaattaacagaagcttggtgctgacaggccagtgggaagccctgtatgatgagattcgtcagtttcgcaaggcctgtggggaggctcatcttaaaactatattagcgacaggagaacttggaactcttactaatgtctataaagccagtatgatagcaatgatggcaggatcagattttattaagacctctactggaaaagaaacagtaaatgccaccttcccggtagctatagtaatgctgcgggccattagagatttcttctggaaaactggaaacaagatagggtttaaaccagcaggaggcatccgcagtgcaaaggattcccttgcttggctctctcttgtaaaggaggagcttggagatgagtggctgaagccagaactctttcgaataggtgccagtactctgctctcggacattgagaggcagatttaccatcatgtgactggaagatatgcagcttatcatgatcttccaatgtcttaaatcagtcaccagtwccagaaaagttctttacgacaatgtttaaaaattatttttctacgtaattgctaaaattatttaattaaaaaattgggcagtaggtaactggcattcctctctttaaaatttctaccgaacttaatggaatggaaaaagcaaactcatccacatgtggtactcatttcaggcacatctgaaatgatcttaattactagaagatctgcactattaactttgtgaagagtttctcctaaaaactttaagtaaaatgttaatggtagctttgataacatcaaattctaagggagaaaaaaacaatattaaaccgcccaagcagtgtgccctagcagaggaaaatgcaacatctcgcaagcgctgctgtaacgacttcaggagtcactgattcagcactaatttcctgctgtgaaaactcatctttcatttttgccgtggataggcgcttttattaattgttgtcctaatgaaatttctgacattgtcatatacaacgatgaatatcattaaaatttttaaaataataaagttcctatagtttatttttttaaaaaacttaaaaattgttacaatacataatgaaaaaataatccattaaacataaaaagaggtttgatca

SEQ ID NO: 5071 - DNA, 1904 bp, Homo sapiens
cgccccgggagcgggcaggggcggggcgagcgctccagctggcgggaaggaggaagggccgggcgcggcgcagaggcgggcgcctaccagccggcagctccggagctgcycgcgccatgtccgcgcacaatcggggcaccgagctcgtttgtttcagagaagatgcaatttatcctgagggagaatggaaaagtccaaactttggtagattatgagagtagggttcgatgttagtgaagttttcaaggatggcatgtcaaaaccagacttcctcaggaactgcttcatgtggatatactgatgagcctcagagcatcatgtgatggtgaccagggagtgacctcaagaccttagctggatctccaaaatacaagtgaatcacccggcagttctgaggcgtgcggaacaaatccaggctcgcagaaccgtgaaaaaggagtggcaggctgcttggctcctgaaagctgttacctttatagatcttactacactttcaggtgatgatacatcttccaacattcaaaggctctgttataaagccaaatacccaatccgggaagatctcttaaaagctttaaatatgcatgataaaggcattactacagcygccgtttgtgtttatcccgcccgggtgtgtgatgctgtaaaagcactcaaggctgcaggctgtaatatccctgtggcatcagtggccgctggatttccagctggacagactcatttgaagacacgattagaagagatcagattggctgtggaagatggagctacagaaatcgacgyggtaattaacagaagcttggtgctgacaggccagtgggaagccctgtatgatgagattcgtcagtttcgcaaggcctgtggggaggctcatcttaaaactatattagcgacaggagaacttggaactcttactaatgtctataaagccagtatgatagcaatgatggcaggatcagattttattaagacctctactggaaaagaaacagtaaatgccaccttcccggtagctatagtaatgctgcgggccattagagatttcttctggaaaactggaaacaagatagggtttaaaccagcaggaggcatccgcagtgcaaaggattcccttgcttggctctctcttgtaaaggaggagcttggagatgagtggctgaagccagaactctttcgaataggtgccagtactctgctctcggacattgagaggcagatttaccatcatgtgactggaagatatgcagcttatcatgatcttccaatgtcttaaatcagtcaccagtwccagaaaagttctttacgacaatgtttaaaaattatttttctacgtaattgctaaaattatttaattaaaaaattgggcagtaggtaactggcattcctctctttaaaatttctaccgaacttaatggaatggaaaaagcaaactcatccacatgtggtactcatttcaggcacatctgaaatgatcttaattactagaagatctgcactattaactttgtgaagagtttctcctaaaaactttaagtaaaatgttaatggtagctttgataacatcaaattctaagggagaaaaaaacaatattaaaccgcccaagcagtgtgccctagcagaggaaaatgcaacatctcgcaagcgctgctgtaacgacttcaggagtcactgattcagcactaatttcctgctgtgaaaactcatctttcatttttgccgtggataggcgcttttattaattgttgtcctaatgaaatttctgacattgtcatatacaacgatgaatatcattaaaatttttaaaataataaagttcctatagtttatttttttaaaaaacttaaaaattgttacaatacataatgaaaaaataatccattaaacataaaaagaggtttgatca

SEQ ID NO: 5072 - DNA, 4931 bp, Homo sapiens
ctctttttattctgtttcattcaacagaatgctacagctttccatgtaactgtccaagatgataataacatcgttgtctcattagaagcttcagacgtcatcagtccagcatctgtgtatgttgtgaagataactggtgaatccaaaaattatttcttcgaatttgaggaattcaacagcactttgcctcctcctgttattttcaaggccagttatcatggcctttattatataatcactctggtagtggtaaatggaaatgtggtgaccaagccatccagatcaatcactgtgttaacaaaacctctacctgtaaccagtgtttccatatatgactataaaccttctcctgaaacaggagtcctgtttgaaatacattatccagaaaaatataacgttttcacaagagtgaacattagctactgggaaggtaaagacttccggacaatgctatataaagatttctttaagggaaaaacagtatttaatcactggctgccaggaatgtgttatagtaatatcacctttcagctggtatctgaggcaacttttaataaaagtacccttgttgagtacagtggtgtcagtcacgaacccaaacagcacagaactgccccttatccacctcaaaatatttccgttcgtatcgtaaacttgaacaaaaacaactgggaagaacagagtggcaatttcccagaagaatccttcatgagatcacaagatacaataggaaaagaaaaactcttccattttacagaagaaacccctgaaattccctcgggcaacatttcttccggttggcctgattttaatagcagtgactatgaaactacgtctcagccatattggtgggacagtgcatctgcagctcctgaaagtgaagatgaatttgtcagcgtacttcccatggaatacgaaaataacagtacactcagtgagacagagaagtcaacatcaggctctttctcctttttccctgtgcaaatgatattgacctggttaccacccaaaccacccactgcttttgatgggttccatatccatattgaacgagaagagaactttactgaatatttgatggtggatgaagaagcacatgaatttgttgcagaactgaaggaacctgggaaatataagttatctgtgacaacctttagttcctcaggatcttgtgaaactcgaaaaagtcagtcagcaaaatcactcagcttttatatcagtccttcaggagagtggattgaagaactgaccgagaagccgcagcacgtgagtgtccacgttttaagctcaaccactgccttgatgtcctggacatcttcccaagagaactacaacagcaccattgtgtctgtggtgtcgctgacctgccagaaacaaaaggagagccagaggcttgaaaagcagtactgcactcaggtgaactcaagcaaacctattattgaaaatctggttcctggtgcccagtaccaggttgtaatatacctaaggaaaggccctttgattggaccaccttcagatcctgtgacatttgctattgttcccacaggaataaaggatttaatgctctatcctttgggycctacggccgtggttctgagctggaccagaccttatttaggcgtgttcagaaaatacgtggttgaaatgttttatttcaaccctgctacaatgacatcagagtggaccacctactatgaaatagcagcaactgtttccttaactgcatccgtgagaatagctaatctgctgccagcatggtactacaacttccgggttaccatggtgacgtggggagatccagaattgagctgctgtgacagctctaccatcagcttcataacagccccagtggctccggaaatcacttctgtggaatatttcaacagtctgttatatatcagttggacatatggggatgatacaacggacttgtcccattctagaatgcttcactggatggtggttgcagaaggaaaaaagaaaattaaaaagagtgtaacacgcaatgtcatgactgcaattctcagcttgcctccaggmgacatctataacctctcagtaactgcttgtactgaaagaggaagtaatacctccatgctccgccttgtcaagctagaaccagctccacccaaatcactcttcgcagtgaacaaaacccagacttcagtgactttgctgtgggtggaagagggagtagctgatttcttygaagttttctgtcaacaagttggctccagtcagaaaaccaaacttcaggaaccagttgctgtttcttcccatgtcgtgaccatctccagccttcttcctgccactgcctacaattgtagtgtcaccagctttagccatgacagccccagygtccctacgttcatagccgtctcaacaatggttacagagatgaatcccaatgtggtagtgatctccgtgctggccatccttagcacacttttaattggactgttgcttgttaccctcattattcttaggaaaaagcatctgcagatggctagggagtgtggagctggtacatttgtcaattttgcatccttagagagggatggaaagcttccatacaactggcgtaggagtatatttgctttcttaaccctgctaccctcatgtctttggactgattatcttttggcattttatattaatccttggagtaaaaatggtttaaagaagaggaaactgacaaacccggttcaactggatgactttgatgcctatattaaggatatggccaaagactctgactataaattttctcttcagtttgaggagttgaaattgattggactggatatcccacactttgctgcagatcttccactgaatcgatgtaaaaaccgttacacaaacatcctaccatatgacttcagccgtgtgagattagtctccatgaatgaagaggaaggtgcagactacatcaatgccaactatattcctggatacaactcaccccaggagtatattgccacccagggrccactgcctgaaaccagaaatgacttctggaagatggtcctgcaacaaaagtctcagattattgtcatgctcactcagtgtaatgagaaaaggagggtgaaatgtgaccattactggccattcacggaagaacctatagcctatggagacatcactgtggagatgatttcagaggaagagcaggacgactgggcctgtagacacttccggatcaactatgctgacgagatgcaggatgtgatgcattttaactacactgcatggcctgatcatggtgtgcccacagcaaatgctgcagaaagtatcctgcagtttgtacacatggtccgacagcaagctaccaagagcaaaggtcccatgatcattcactgcagtgctggcgtgggacggacaggaacattcattgccctggacaggctcttgcagcacattcgggatcatgagwttgttgacatcttagggctggtgtcagaaatgaggtcataccggatgtctatggtacagacagaggagcagtacatttttatccatcagtgtgtgcaactgatgtggatgaagaagaagcagcagttctgcatcagtgatgtcatatacgagaatgttagcaagtcctagttcagaatccggagcagagaggacatgatgtgcgcccatcctcccttgcttccagattgttttagtgggccctgatggtcatttttctaaacagaggccctgctttgtaatatgtggccaaggagataatttatctcacagaagcaccgggaagacttagccttaaagagcctacagtgtccttttggactctttcacttcgggacatttaataatggaccaaattcaacagaacaccaggaaggtcaagacgctctccaaagggcaggaagtacagcacttccgaagagtttagttggccctttgctggttgggctgagttttttatttttaagtgtttgtttttcagtgcaataatttttgtgtgtgtgtgattcttatcagaaagttgaattgttttctgcctacaccgttcatcagccccataacccaggaaggaacaggcattgttagcatcagattatacctcattattaaaaggaggcatggccacacatgaagaaatggtcattctacttcaaagaaattgagccagcactatctgtactccaacattaccggatctggattggggaggttggtcagggaagagaggggttctacccacagatcaactgtgtaatcttttactattcaagctataattcagcttcaaagtagagtagaaaaaaaattgtcttaactgttctagttcttgatggttttcttccttattaacagttggtgtttcttccttggcccttttggactaatgttactgtccaagttctttctcaagaaaccacatctggttcagaagagtgtcaagttggactctttgaactctgttgctgtctgagcaatcgtggtgcstagactttgcattccttgttctgttgacctgcatacatgtgagagctatttctttaagaactatataggctgtgaaaacgcactttctttcccccaaagagctgggaatttatgaagttatggcaatgaactgcagcatgctgggacaattatttgactacttttttttgtaatattgtcaaatgtctctatggattctgacagagatttctttttgttttgttattcttttggttgtcagtttcattttaacgagtgtaactagtaacattttattctttggattttgtataattacagtacatgattgtgtattgtgacatgaatgctgtcaaaatgacattgatggcattgtgaagcctgttactttgtgtcacttcctgataaataagaggtgatgacatggatatacaacagaaaacactttgagttgaaagtaaacacaagctggctgcttccctgtggcaactgtggct

SEQ ID NO: 5073 - DNA, 3457 bp, Homo sapiens
aatgctacagctttccatgtaactgtccaagatgataataacatcgttgtctcattagaagcttcagacgtcatcagtccagcatctgtgtatgttgtgaagataactggtgaatccaaaaattatttcttcgaatttgaggaattcaacagcactttgcctcctcctgttattttcaaggccagttatcatggcctttattatataatcactctggtagtggtaaatggaaatgtggtgaccaagccatccagatcaatcactgtgttaacaaaacctctacctgtaaccagtgtttccatatatgactataaaccttctcctgaaacaggagtcctgtttgaaatacattatccagaaaaatataacgttttcacaagagtgaacattagctactgggaaggtaaagacttccggacaatgctatataaagatttctttaagggaaaaacagtatttaatcactggctgccaggaatgtgttatagtaatatcacctttcagctggtatctgaggcaacttttaataaaagtacccttgttgagtacagtggtgtcagtcacgaacccaaacagcacagaactgccccttatccacctcaaaatatttccgttcgtatcgtaaacttgaacaaaaacaactgggaagaacagagtggcaatttcccagaagaatccttcatgagatcacaagatacaataggaaaagaaaaactcttccattttacagaagaaacccctgaaattccctcgggcaacatttcttccggttggcctgattttaatagcagtgactatgaaactacgtctcagccatattggtgggacagtgcatctgcagctcctgaaagtgaagatgaatttgtcagcgtacttcccatggaatacgaaaataacagtacactcagtgagacagagaagtcaacatcaggctctttctcctttttccctgtgcaaatgatattgacctggttaccacccaaaccacccactgcttttgatgggttccatatccatattgaacgagaagagaactttactgaatatttgatggtggatgaagaagcacatgaatttgttgcagaactgaaggaacctgggaaatataagttatctgtgacaacctttagttcctcaggatcttgtgaaactcgaaaaagtcagtcagcaaaatcactcagcttttatatcagtccttcaggagagtggattgaagaactgaccgagaagccgcagcacgtgagtgtccacgttttaagctcaaccactgccttgatgtcctggacatcttcccaagagaactacaacagcaccattgtgtctgtggtgtcgctgacctgccagaaacaaaaggagagccagaggcttgaaaagcagtactgcactcaggtgaactcaagcaaacctattattgaaaatctggttcctggtgcccagtaccaggttgtaatatacctaaggaaaggccctttgattggaccaccttcagatcctgtgacatttgctattgttcccacaggaataaaggatttaatgctctatcctttgggycctacggccgtggttctgagctggaccagaccttatttaggcgtgttcagaaaatacgtggttgaaatgttttatttcaaccctgctacaatgacatcagagtggaccacctactatgaaatagcagcaactgtttccttaactgcatccgtgagaatagctaatctgctgccagcatggtactacaacttccgggttaccatggtgacgtggggagatccagaattgagctgctgtgacagctctaccatcagcttcataacagccccagtggctccggaaatcacttctgtggaatatttcaacagtctgttatatatcagttggacatatggggatgatacaacggacttgtcccattctagaatgcttcactggatggtggttgcagaaggaaaaaagaaaattaaaaagagtgtaacacgcaatgtcatgactgcaattctcagcttgcctccaggmgacatctataacctctcagtaactgcttgtactgaaagaggaagtaatacctccatgctccgccttgtcaagctagaaccagctccacccaaatcactcttcgcagtgaacaaaacccagacttcagtgactttgctgtgggtggaagagggagtagctgatttcttygaagttttctgtcaacaagttggctccagtcagaaaaccaaacttcaggaaccagttgctgtttcttcccatgtcgtgaccatctccagccttcttcctgccactgcctacaattgtagtgtcaccagctttagccatgacagccccagygtccctacgttcatagccgtctcaacaatggttacagagatgaatcccaatgtggtagtgatctccgtgctggccatccttagcacacttttaattggactgttgcttgttaccctcattattcttaggaaaaagcatctgcagatggctagggagtgtggagctggtacatttgtcaattttgcatccttagagagggatggaaagcttccatacaactggcgtaggagtatatttgctttcttaaccctgctaccctcatgtctttggactgattatcttttggcattttatattaatccttggagtaaaaatggtttaaagaagaggaaactgacaaacccggttcaactggatgactttgatgcctatattaaggatatggccaaagactctgactataaattttctcttcagtttgaggagttgaaattgattggactggatatcccacactttgctgcagatcttccactgaatcgatgtaaaaaccgttacacaaacatcctaccatatgacttcagccgtgtgagattagtctccatgaatgaagaggaaggtgcagactacatcaatgccaactatattcctggatacaactcaccccaggagtatattgccacccagggrccactgcctgaaaccagaaatgacttctggaagatggtcctgcaacaaaagtctcagattattgtcatgctcactcagtgtaatgagaaaaggagggtgaaatgtgaccattactggccattcacggaagaacctatagcctatggagacatcactgtggagatgatttcagaggaagagcaggacgactgggcctgtagacacttccggatcaactatgctgacgagatgcaggatgtgatgcattttaactacactgcatggcctgatcatggtgtgcccacagcaaatgctgcagaaagtatcctgcagtttgtacacatggtccgacagcaagctaccaagagcaaaggtcccatgatcattcactgcaggtaacctcatcaactgcattttctattaaatattaggagttggttttgtaaggggaacagctcaccattccataagcccttatcaggtttagttgaaaattaaataaactctgatgtttttt

SEQ ID NO: 5074 - DNA, 5343 bp, Homo sapiens
tgtccctgctgccagaggactacggcgggctgggcgcggggtccccgcctctcgctcaccacacagaccccgcgcctcctctggcagccgcggtggtggcggcggcagagcctcgcccactccaatccccaccctctccatccttagtcattaaagaacagcagcgcctggcacgttctyggaggaccccgggcgcagaggaggaaagggagcaggcgcagggggactggaaaggcagcatgcgctcgccaggagcaacctcggcgcccagggtctgaggctgcagccccagttcgccattgtgagccgccgccgggggagtccgctagcgcagccgtgcccccgagtccccgtccgcgcagcgatggggcacctgcccacggggatacacggcgcccgccgcctcctgcctctgctctggctctttgtgctgttcaagaatgctacagctttccatgtaactgtccaagatgataataacatcgttgtctcattagaagcttcagacgtcatcagtccagcatctgtgtatgttgtgaagataactggtgaatccaaaaattatttcttcgaatttgaggaattcaacagcactttgcctcctcctgttattttcaaggccagttatcatggcctttattatataatcactctggtagtggtaaatggaaatgtggtgaccaagccatccagatcaatcactgtgttaacaaaacctctacctgtaaccagtgtttccatatatgactataaaccttctcctgaaacaggagtcctgtttgaaatacattatccagaaaaatataacgttttcacaagagtgaacattagctactgggaaggtaaagacttccggacaatgctatataaagatttctttaagggaaaaacagtatttaatcactggctgccaggaatgtgttatagtaatatcacctttcagctggtatctgaggcaacttttaataaaagtacccttgttgagtacagtggtgtcagtcacgaacccaaacagcacagaactgccccttatccacctcaaaatatttccgttcgtatcgtaaacttgaacaaaaacaactgggaagaacagagtggcaatttcccagaagaatccttcatgagatcacaagatacaataggaaaagaaaaactcttccattttacagaagaaacccctgaaattccctcgggcaacatttcttccggttggcctgattttaatagcagtgactatgaaactacgtctcagccatattggtgggacagtgcatctgcagctcctgaaagtgaagatgaatttgtcagcgtacttcccatggaatacgaaaataacagtacactcagtgagacagagaagtcaacatcaggctctttctcctttttccctgtgcaaatgatattgacctggttaccacccaaaccacccactgcttttgatgggttccatatccatattgaacgagaagagaactttactgaatatttgatggtggatgaagaagcacatgaatttgttgcagaactgaaggaacctgggaaatataagttatctgtgacaacctttagttcctcaggatcttgtgaaactcgaaaaagtcagtcagcaaaatcactcagcttttatatcagtccttcaggagagtggattgaagaactgaccgagaagccgcagcacgtgagtgtccacgttttaagctcaaccactgccttgatgtcctggacatcttcccaagagaactacaacagcaccattgtgtctgtggtgtcgctgacctgccagaaacaaaaggagagccagaggcttgaaaagcagtactgcactcaggtgaactcaagcaaacctattattgaaaatctggttcctggtgcccagtaccaggttgtaatatacctaaggaaaggccctttgattggaccaccttcagatcctgtgacatttgctattgttcccacaggaataaaggatttaatgctctatcctttgggycctacggccgtggttctgagctggaccagaccttatttaggcgtgttcagaaaatacgtggttgaaatgttttatttcaaccctgctacaatgacatcagagtggaccacctactatgaaatagcagcaactgtttccttaactgcatccgtgagaatagctaatctgctgccagcatggtactacaacttccgggttaccatggtgacgtggggagatccagaattgagctgctgtgacagctctaccatcagcttcataacagccccagtggctccggaaatcacttctgtggaatatttcaacagtctgttatatatcagttggacatatggggatgatacaacggacttgtcccattctagaatgcttcactggatggtggttgcagaaggaaaaaagaaaattaaaaagagtgtaacacgcaatgtcatgactgcaattctcagcttgcctccaggmgacatctataacctctcagtaactgcttgtactgaaagaggaagtaatacctccatgctccgccttgtcaagctagaaccagctccacccaaatcactcttcgcagtgaacaaaacccagacttcagtgactttgctgtgggtggaagagggagtagctgatttcttygaagttttctgtcaacaagttggctccagtcagaaaaccaaacttcaggaaccagttgctgtttcttcccatgtcgtgaccatctccagccttcttcctgccactgcctacaattgtagtgtcaccagctttagccatgacagccccagygtccctacgttcatagccgtctcaacaatggttacagagatgaatcccaatgtggtagtgatctccgtgctggccatccttagcacacttttaattggactgttgcttgttaccctcattattcttaggaaaaagcatctgcagatggctagggagtgtggagctggtacatttgtcaattttgcatccttagagagggatggaaagcttccatacaactggcgtaggagtatatttgctttcttaaccctgctaccctcatgtctttggactgattatcttttggcattttatattaatccttggagtaaaaatggtttaaagaagaggaaactgacaaacccggttcaactggatgactttgatgcctatattaaggatatggccaaagactctgactataaattttctcttcagtttgaggagttgaaattgattggactggatatcccacactttgctgcagatcttccactgaatcgatgtaaaaaccgttacacaaacatcctaccatatgacttcagccgtgtgagattagtctccatgaatgaagaggaaggtgcagactacatcaatgccaactatattcctggatacaactcaccccaggagtatattgccacccagggrccactgcctgaaaccagaaatgacttctggaagatggtcctgcaacaaaagtctcagattattgtcatgctcactcagtgtaatgagaaaaggagggtgaaatgtgaccattactggccattcacggaagaacctatagcctatggagacatcactgtggagatgatttcagaggaagagcaggacgactgggcctgtagacacttccggatcaactatgctgacgagatgcaggatgtgatgcattttaactacactgcatggcctgatcatggtgtgcccacagcaaatgctgcagaaagtatcctgcagtttgtacacatggtccgacagcaagctaccaagagcaaaggtcccatgatcattcactgcagtgctggcgtgggacggacaggaacattcattgccctggacaggctcttgcagcacattcgggatcatgagwttgttgacatcttagggctggtgtcagaaatgaggtcataccggatgtctatggtacagacagaggagcagtacatttttatccatcagtgtgtgcaactgatgtggatgaagaagaagcagcagttctgcatcagtgatgtcatatacgagaatgttagcaagtcctagttcagaatccggagcagagaggacatgatgtgcgcccatcctcccttgcttccagattgttttagtgggccctgatggtcatttttctaaacagaggccctgctttgtaatatgtggccaaggagataatttatctcacagaagcaccgggaagacttagccttaaagagcctacagtgtccttttggactctttcacttcgggacatttaataatggaccaaattcaacagaacaccaggaaggtcaagacgctctccaaagggcaggaagtacagcacttccgaagagtttagttggccctttgctggttgggctgagttttttatttttaagtgtttgtttttcagtgcaataatttttgtgtgtgtgtgattcttatcagaaagttgaattgttttctgcctacaccgttcatcagccccataacccaggaaggaacaggcattgttagcatcagattatacctcattattaaaaggaggcatggccacacatgaagaaatggtcattctacttcaaagaaattgagccagcactatctgtactccaacattaccggatctggattggggaggttggtcagggaagagaggggttctacccacagatcaactgtgtaatcttttactattcaagctataattcagcttcaaagtagagtagaaaaaaaattgtcttaactgttctagttcttgatggttttcttccttattaacagttggtgtttcttccttggcccttttggactaatgttactgtccaagttctttctcaagaaaccacatctggttcagaagagtgtcaagttggactctttgaactctgttgctgtctgagcaatcgtggtgcstagactttgcattccttgttctgttgacctgcatacatgtgagagctatttctttaagaactatataggctgtgaaaacgcactttctttcccccaaagagctgggaatttatgaagttatggcaatgaactgcagcatgctgggacaattatttgactacttttttttgtaatattgtcaaatgtctctatggattctgacagagatttctttttgttttgttattcttttggttgtcagtttcattttaacgagtgtaactagtaacattttattctttggattttgtataattacagtacatgattgtgtattgtgacatgaatgctgtcaaaatgacattgatggcattgtgaagcctgttactttgtgtcacttcctgataaataagaggtgatgacatggatatacaacagaaaacactttgagttgaaagtaaacacaagctggctgcttccctgtggcaactgtggct

SEQ ID NO: 5075 - DNA, 3896 bp, Homo sapiens
tgtccctgctgccagaggactacggcgggctgggcgcggggtccccgcctctcgctcaccacacagaccccgcgcctcctctggcagccgcggtggtggcggcggcagagcctcgcccactccaatccccaccctctccatccttagtcattaaagaacagcagcgcctggcacgttctyggaggaccccgggcgcagaggaggaaagggagcaggcgcagggggactggaaaggcagcatgcgctcgccaggagcaacctcggcgcccagggtctgaggctgcagccccagttcgccattgtgagccgccgccgggggagtccgctagcgcagccgtgcccccgagtccccgtccgcgcagcgatggggcacctgcccacggggatacacggcgcccgccgcctcctgcctctgctctggctctttgtgctgttcaagaatgctacagctttccatgtaactgtccaagatgataataacatcgttgtctcattagaagcttcagacgtcatcagtccagcatctgtgtatgttgtgaagataactggtgaatccaaaaattatttcttcgaatttgaggaattcaacagcactttgcctcctcctgttattttcaaggccagttatcatggcctttattatataatcactctggtagtggtaaatggaaatgtggtgaccaagccatccagatcaatcactgtgttaacaaaacctctacctgtaaccagtgtttccatatatgactataaaccttctcctgaaacaggagtcctgtttgaaatacattatccagaaaaatataacgttttcacaagagtgaacattagctactgggaaggtaaagacttccggacaatgctatataaagatttctttaagggaaaaacagtatttaatcactggctgccaggaatgtgttatagtaatatcacctttcagctggtatctgaggcaacttttaataaaagtacccttgttgagtacagtggtgtcagtcacgaacccaaacagcacagaactgccccttatccacctcaaaatatttccgttcgtatcgtaaacttgaacaaaaacaactgggaagaacagagtggcaatttcccagaagaatccttcatgagatcacaagatacaataggaaaagaaaaactcttccattttacagaagaaacccctgaaattccctcgggcaacatttcttccggttggcctgattttaatagcagtgactatgaaactacgtctcagccatattggtgggacagtgcatctgcagctcctgaaagtgaagatgaatttgtcagcgtacttcccatggaatacgaaaataacagtacactcagtgagacagagaagtcaacatcaggctctttctcctttttccctgtgcaaatgatattgacctggttaccacccaaaccacccactgcttttgatgggttccatatccatattgaacgagaagagaactttactgaatatttgatggtggatgaagaagcacatgaatttgttgcagaactgaaggaacctgggaaatataagttatctgtgacaacctttagttcctcaggatcttgtgaaactcgaaaaagtcagtcagcaaaatcactcagcttttatatcagtccttcaggagagtggattgaagaactgaccgagaagccgcagcacgtgagtgtccacgttttaagctcaaccactgccttgatgtcctggacatcttcccaagagaactacaacagcaccattgtgtctgtggtgtcgctgacctgccagaaacaaaaggagagccagaggcttgaaaagcagtactgcactcaggtgaactcaagcaaacctattattgaaaatctggttcctggtgcccagtaccaggttgtaatatacctaaggaaaggccctttgattggaccaccttcagatcctgtgacatttgctattgttcccacaggaataaaggatttaatgctctatcctttgggycctacggccgtggttctgagctggaccagaccttatttaggcgtgttcagaaaatacgtggttgaaatgttttatttcaaccctgctacaatgacatcagagtggaccacctactatgaaatagcagcaactgtttccttaactgcatccgtgagaatagctaatctgctgccagcatggtactacaacttccgggttaccatggtgacgtggggagatccagaattgagctgctgtgacagctctaccatcagcttcataacagccccagtggctccggaaatcacttctgtggaatatttcaacagtctgttatatatcagttggacatatggggatgatacaacggacttgtcccattctagaatgcttcactggatggtggttgcagaaggaaaaaagaaaattaaaaagagtgtaacacgcaatgtcatgactgcaattctcagcttgcctccaggmgacatctataacctctcagtaactgcttgtactgaaagaggaagtaatacctccatgctccgccttgtcaagctagaaccagctccacccaaatcactcttcgcagtgaacaaaacccagacttcagtgactttgctgtgggtggaagagggagtagctgatttcttygaagttttctgtcaacaagttggctccagtcagaaaaccaaacttcaggaaccagttgctgtttcttcccatgtcgtgaccatctccagccttcttcctgccactgcctacaattgtagtgtcaccagctttagccatgacagccccagygtccctacgttcatagccgtctcaacaatggttacagagatgaatcccaatgtggtagtgatctccgtgctggccatccttagcacacttttaattggactgttgcttgttaccctcattattcttaggaaaaagcatctgcagatggctagggagtgtggagctggtacatttgtcaattttgcatccttagagagggatggaaagcttccatacaactggcgtaggagtatatttgctttcttaaccctgctaccctcatgtctttggactgattatcttttggcattttatattaatccttggagtaaaaatggtttaaagaagaggaaactgacaaacccggttcaactggatgactttgatgcctatattaaggatatggccaaagactctgactataaattttctcttcagtttgaggagttgaaattgattggactggatatcccacactttgctgcagatcttccactgaatcgatgtaaaaaccgttacacaaacatcctaccatatgacttcagccgtgtgagattagtctccatgaatgaagaggaaggtgcagactacatcaatgccaactatattcctggatacaactcaccccaggagtatattgccacccagggrccactgcctgaaaccagaaatgacttctggaagatggtcctgcaacaaaagtctcagattattgtcatgctcactcagtgtaatgagaaaaggagggtgaaatgtgaccattactggccattcacggaagaacctatagcctatggagacatcactgtggagatgatttcagaggaagagcaggacgactgggcctgtagacacttccggatcaactatgctgacgagatgcaggatgtgatgcattttaactacactgcatggcctgatcatggtgtgcccacagcaaatgctgcagaaagtatcctgcagtttgtacacatggtccgacagcaagctaccaagagcaaaggtcccatgatcattcactgcaggtaacctcatcaactgcattttctattaaatattaggagttggttttgtaaggggaacagctcaccattccataagcccttatcaggtttagttgaaaattaaataaactctgatgtttttt

SEQ ID NO: 5076 - DNA, 1585 bp, Homo sapiens
gaacattcttttgcagtgctggcgtgggacggacaggaacattcattgccctggacaggctcttgcagcacattcgggatcatgagwttgttgacatcttagggctggtgtcagaaatgaggtcataccggatgtctatggtacagacagaggagcagtacatttttatccatcagtgtgtgcaactgatgtggatgaagaagaagcagcagttctgcatcagtgatgtcatatacgagaatgttagcaagtcctagttcagaatccggagcagagaggacatgatgtgcgcccatcctcccttgcttccagattgttttagtgggccctgatggtcatttttctaaacagaggccctgctttgtaatatgtggccaaggagataatttatctcacagaagcaccgggaagacttagccttaaagagcctacagtgtccttttggactctttcacttcgggacatttaataatggaccaaattcaacagaacaccaggaaggtcaagacgctctccaaagggcaggaagtacagcacttccgaagagtttagttggccctttgctggttgggctgagttttttatttttaagtgtttgtttttcagtgcaataatttttgtgtgtgtgtgattcttatcagaaagttgaattgttttctgcctacaccgttcatcagccccataacccaggaaggaacaggcattgttagcatcagattatacctcattattaaaaggaggcatggccacacatgaagaaatggtcattctacttcaaagaaattgagccagcactatctgtactccaacattaccggatctggattggggaggttggtcagggaagagaggggttctacccacagatcaactgtgtaatcttttactattcaagctataattcagcttcaaagtagagtagaaaaaaaattgtcttaactgttctagttcttgatggttttcttccttattaacagttggtgtttcttccttggcccttttggactaatgttactgtccaagttctttctcaagaaaccacatctggttcagaagagtgtcaagttggactctttgaactctgttgctgtctgagcaatcgtggtgcstagactttgcattccttgttctgttgacctgcatacatgtgagagctatttctttaagaactatataggctgtgaaaacgcactttctttcccccaaagagctgggaatttatgaagttatggcaatgaactgcagcatgctgggacaattatttgactacttttttttgtaatattgtcaaatgtctctatggattctgacagagatttctttttgttttgttattcttttggttgtcagtttcattttaacgagtgtaactagtaacattttattctttggattttgtataattacagtacatgattgtgtattgtgacatgaatgctgtcaaaatgacattgatggcattgtgaagcctgttactttgtgtcacttcctgataaataagaggtgatgacatggatatacaacagaaaacactttgagttgaaagtaaacacaagctggctgcttccctgtggcaactgtggct

SEQ ID NO: 5077 - DNA, 2617 bp, Homo sapiens
gaacattcttttgcagtgctggcgtgggacggacaggaacattcattgccctggacaggctcttgcagcacattcgggatcatgagwttgttgacatcttagggctggtgtcagaaatgaggtcataccggatgtctatggtacagacagaggagcagtacatttttatccatcagtgtgtgcaactgatgtggatgaagaagaagcagcagttctgcatcagtgatgtcatatacgagaatgttagcaagtcctagttcagaatccggagcagtaagtggagaagagctctccacgagtgytcagtcttagaactattagagggggatgtgatggatgggacaaaagrcagcagtagccatttgtattgactctgacttcacatgagtatttcttcccagctcctggcctcacatgggtggtcacagggagaaacaagtactgtagcagatctttgagtttcaatgcaccttggttggtgttggcaacaaacaggagcttctgcacatcatgatgactttacctccattccctctacccagaaccctaaattattctgttattggatctgtgcctgtaatatcaggatactaccatccaaatctatctagatatcttgtgcaaatattttattgattacaagggctgtatacggggttacaaaaagacatgagctggattggacactcctaaaaccaaaaacaacagtgacaatagagtctcaggatagcagagtctgaaaataccttggtctcccccattatgtgagcccttayttgagagcttcatgaagacacttgtaacatattcaacgtcctgtactccagttttgactacgagatcagattttggaggtgtaagtaawcttggctgaggtaacagtaatctgcccatttagttcagtaaacagactgtagagtgtctgactatactgggggaagaggagccaatgacagggtagggagatgacagtggtgcatgatgggagaatcatgaaagtctgggaagcatatggaccagtgggaaggataggattagcactgcacctctacatccatcaagagagacagagcgcacaatggagcaggaaggataaaaaataaagaaagacagagacaaacaaatttgctgggagagggaaagacattcagacccacagaaaggaggcagcacacagagaaagatgcacagatcaacccacatctgcatgggttgtgagactgagcatagtgagagcagtggtggagcaatagaagattgctgtgacaccaggctgcttactgtctttctttgtctcattcacaggagaggacatgatgtgcgcccatcctcccttgcttccagattgttttagtgggccctgatggtcatttttctaaacagaggccctgctttgtaatatgtggccaaggagataatttatctcacagaagcaccgggaagacttagccttaaagagcctacagtgtccttttggactctttcacttcgggacatttaataatggaccaaattcaacagaacaccaggaaggtcaagacgctctccaaagggcaggaagtacagcacttccgaagagtttagttggccctttgctggttgggctgagttttttatttttaagtgtttgtttttcagtgcaataatttttgtgtgtgtgtgattcttatcagaaagttgaattgttttctgcctacaccgttcatcagccccataacccaggaaggaacaggcattgttagcatcagattatacctcattattaaaaggaggcatggccacacatgaagaaatggtcattctacttcaaagaaattgagccagcactatctgtactccaacattaccggatctggattggggaggttggtcagggaagagaggggttctacccacagatcaactgtgtaatcttttactattcaagctataattcagcttcaaagtagagtagaaaaaaaattgtcttaactgttctagttcttgatggttttcttccttattaacagttggtgtttcttccttggcccttttggactaatgttactgtccaagttctttctcaagaaaccacatctggttcagaagagtgtcaagttggactctttgaactctgttgctgtctgagcaatcgtggtgcstagactttgcattccttgttctgttgacctgcatacatgtgagagctatttctttaagaactatataggctgtgaaaacgcactttctttcccccaaagagctgggaatttatgaagttatggcaatgaactgcagcatgctgggacaattatttgactacttttttttgtaatattgtcaaatgtctctatggattctgacagagatttctttttgttttgttattcttttggttgtcagtttcattttaacgagtgtaactagtaacattttattctttggattttgtataattacagtacatgattgtgtattgtgacatgaatgctgtcaaaatgacattgatggcattgtgaagcctgttactttgtgtcacttcctgataaataagaggtgatgacatggatatacaacagaaaacactttgagttgaaagtaaacacaagctggctgcttccctgtggcaactgtggct

SEQ ID NO: 5078 - DNA, 4065 bp, Homo sapiens
gaagtaaaaaaatggaagggggaaaaggcaaagtattctgccttccaagttagatagctatctttatgaaaggacatatttcaaaggcaatataaagtctttatggtgctcttacctacctatatttgaattgggggatgcttcacctgcttattagtgaaagaagaaagaatacacttagtaaattaaattttttttaaaactttgtctttgmtcagaaccagctccacccaaatcactcttcgcagtgaacaaaacccagacttcagtgactttgctgtgggtggaagagggagtagctgatttcttygaagttttctgtcaacaagttggctccagtcagaaaaccaaacttcaggaaccagttgctgtttcttcccatgtcgtgaccatctccagccttcttcctgccactgcctacaattgtagtgtcaccagctttagccatgacagccccagygtccctacgttcatagccgtctcaacaatggttacagagatgaatcccaatgtggtagtgatctccgtgctggccatccttagcacacttttaattggactgttgcttgttaccctcattattcttaggaaaaagcatctgcagatggctagggagtgtggagctggtacatttgtcaattttgcatccttagagagggatggaaagcttccatacaactggcgtaggagtatatttgctttcttaaccctgctaccctcatgtctttggactgattatcttttggcattttatattaatccttggagtaaaaatggtttaaagaagaggaaactgacaaacccggttcaactggatgactttgatgcctatattaaggatatggccaaagactctgactataaattttctcttcagtttgaggagttgaaattgattggactggatatcccacactttgctgcagatcttccactgaatcgatgtaaaaaccgttacacaaacatcctaccatatgacttcagccgtgtgagattagtctccatgaatgaagaggaaggtgcagactacatcaatgccaactatattcctggatacaactcaccccaggagtatattgccacccagggrccactgcctgaaaccagaaatgacttctggaagatggtcctgcaacaaaagtctcagattattgtcatgctcactcagtgtaatgagaaaaggagggtgaaatgtgaccattactggccattcacggaagaacctatagcctatggagacatcactgtggagatgatttcagaggaagagcaggacgactgggcctgtagacacttccggatcaactatgctgacgagatgcaggatgtgatgcattttaactacactgcatggcctgatcatggtgtgcccacagcaaatgctgcagaaagtatcctgcagtttgtacacatggtccgacagcaagctaccaagagcaaaggtcccatgatcattcactgcagtgctggcgtgggacggacaggaacattcattgccctggacaggctcttgcagcacattcgggatcatgagwttgttgacatcttagggctggtgtcagaaatgaggtcataccggatgtctatggtacagacagaggagcagtacatttttatccatcagtgtgtgcaactgatgtggatgaagaagaagcagcagttctgcatcagtgatgtcatatacgagaatgttagcaagtcctagttcagaatccggagcagtaagtggagaagagctctccacgagtgytcagtcttagaactattagagggggatgtgatggatgggacaaaagrcagcagtagccatttgtattgactctgacttcacatgagtatttcttcccagctcctggcctcacatgggtggtcacagggagaaacaagtactgtagcagatctttgagtttcaatgcaccttggttggtgttggcaacaaacaggagcttctgcacatcatgatgactttacctccattccctctacccagaaccctaaattattctgttattggatctgtgcctgtaatatcaggatactaccatccaaatctatctagatatcttgtgcaaatattttattgattacaagggctgtatacggggttacaaaaagacatgagctggattggacactcctaaaaccaaaaacaacagtgacaatagagtctcaggatagcagagtctgaaaataccttggtctcccccattatgtgagcccttayttgagagcttcatgaagacacttgtaacatattcaacgtcctgtactccagttttgactacgagatcagattttggaggtgtaagtaawcttggctgaggtaacagtaatctgcccatttagttcagtaaacagactgtagagtgtctgactatactgggggaagaggagccaatgacagggtagggagatgacagtggtgcatgatgggagaatcatgaaagtctgggaagcatatggaccagtgggaaggataggattagcactgcacctctacatccatcaagagagacagagcgcacaatggagcaggaaggataaaaaataaagaaagacagagacaaacaaatttgctgggagagggaaagacattcagacccacagaaaggaggcagcacacagagaaagatgcacagatcaacccacatctgcatgggttgtgagactgagcatagtgagagcagtggtggagcaatagaagattgctgtgacaccaggctgcttactgtctttctttgtctcattcacaggagaggacatgatgtgcgcccatcctcccttgcttccagattgttttagtgggccctgatggtcatttttctaaacagaggccctgctttgtaatatgtggccaaggagataatttatctcacagaagcaccgggaagacttagccttaaagagcctacagtgtccttttggactctttcacttcgggacatttaataatggaccaaattcaacagaacaccaggaaggtcaagacgctctccaaagggcaggaagtacagcacttccgaagagtttagttggccctttgctggttgggctgagttttttatttttaagtgtttgtttttcagtgcaataatttttgtgtgtgtgtgattcttatcagaaagttgaattgttttctgcctacaccgttcatcagccccataacccaggaaggaacaggcattgttagcatcagattatacctcattattaaaaggaggcatggccacacatgaagaaatggtcattctacttcaaagaaattgagccagcactatctgtactccaacattaccggatctggattggggaggttggtcagggaagagaggggttctacccacagatcaactgtgtaatcttttactattcaagctataattcagcttcaaagtagagtagaaaaaaaattgtcttaactgttctagttcttgatggttttcttccttattaacagttggtgtttcttccttggcccttttggactaatgttactgtccaagttctttctcaagaaaccacatctggttcagaagagtgtcaagttggactctttgaactctgttgctgtctgagcaatcgtggtgcstagactttgcattccttgttctgttgacctgcatacatgtgagagctatttctttaagaactatataggctgtgaaaacgcactttctttcccccaaagagctgggaatttatgaagttatggcaatgaactgcagcatgctgggacaattatttgactacttttttttgtaatattgtcaaatgtctctatggattctgacagagatttctttttgttttgttattcttttggttgtcagtttcattttaacgagtgtaactagtaacattttattctttggattttgtataattacagtacatgattgtgtattgtgacatgaatgctgtcaaaatgacattgatggcattgtgaagcctgttactttgtgtcacttcctgataaataagaggtgatgacatggatatacaacagaaaacactttgagttgaaagtaaacacaagctggctgcttccctgtggcaactgtggct

SEQ ID NO: 5079 - DNA, 4847 bp, Homo sapiens
ctctttttattctgtttcattcaacagaatgctacagctttccatgtaactgtccaagatgataataacatcgttgtctcattagaagcttcagacgtcatcagtccagcatctgtgtatgttgtgaagataactggtgaatccaaaaattatttcttcgaatttgaggaattcaacagcactttgcctcctcctgttattttcaaggccagttatcatggcctttattatataatcactctggtagtggtaaatggaaatgtggtgaccaagccatccagatcaatcactgtgttaacaaaacctctacctgtaaccagtgtttccatatatgactataaaccttctcctgaaacaggagtcctgtttgaaatacattatccagaaaaatataacgttttcacaagagtgaacattagctactgggaaggtaaagacttccggacaatgctatataaagatttctttaagggaaaaacagtatttaatcactggctgccaggaatgtgttatagtaatatcacctttcagctggtatctgaggcaacttttaataaaagtacccttgttgagtacagtggtgtcagtcacgaacccaaacagcacagaactgccccttatccacctcaaaatatttccgttcgtatcgtaaacttgaacaaaaacaactgggaagaacagagtggcaatttcccagaagaatccttcatgagatcacaagatacaataggaaaagaaaaactcttccattttacagaagaaacccctgaaattccctcgggcaacatttcttccggttggcctgattttaatagcagtgactatgaaactacgtctcagccatattggtgggacagtgcatctgcagctcctgaaagtgaagatgaatttgtcagcgtacttcccatggaatacgaaaataacagtacactcagtgagacagagaagtcaacatcaggctctttctcctttttccctgtgcaaatgatattgacctggttaccacccaaaccacccactgcttttgatgggttccatatccatattgaacgagaagagaactttactgaatatttgatggtggatgaagaagcacatgaatttgttgcagaactgaaggaacctgggaaatataagttatctgtgacaacctttagttcctcaggatcttgtgaaactcgaaaaagtcagtcagcaaaatcactcagcttttatatcagtccttcaggagagtggattgaagaactgaccgagaagccgcagcacgtgagtgtccacgttttaagctcaaccactgccttgatgtcctggacatcttcccaagagaactacaacagcaccattgtgtctgtggtgtcgctgacctgccagaaacaaaaggagagccagaggcttgaaaagcagtactgcactcaggtgaactcaagcaaacctattattgaaaatctggttcctggtgcccagtaccaggttgtaatatacctaaggaaaggccctttgattggaccaccttcagatcctgtgacatttgctattgttcccacaggaataaaggatttaatgctctatcctttgggycctacggccgtggttctgagctggaccagaccttatttaggcgtgttcagaaaatacgtggttgaaatgttttatttcaaccctgctacaatgacatcagagtggaccacctactatgaaatagcagcaactgtttccttaactgcatccgtgagaatagctaatctgctgccagcatggtactacaacttccgggttaccatggtgacgtggggagatccagaattgagctgctgtgacagctctaccatcagcttcataacagccccagtggctccggaaatcacttctgtggaatatttcaacagtctgttatatatcagttggacatatggggatgatacaacggacttgtcccattctagaatgcttcactggatggtggttgcagaaggaaaaaagaaaattaaaaagagtgtaacacgcaatgtcatgactgcaattctcagcttgcctccaggmgacatctataacctctcagtaactgcttgtactgaaagaggaagtaatacctccatgctccgccttgtcaagctagaaccagctccacccaaatcactcttcgcagtgaacaaaacccagacttcagtgactttgctgtgggtggaagagggagtagctgatttcttygaagttttctgtcaacaagttggctccagtcagaaaaccaaacttcaggaaccagttgctgtttcttcccatgtcgtgaccatctccagccttcttcctgccactgcctacaattgtagtgtcaccagctttagccatgacagccccagygtccctacgttcatagccgtctcaacaatggttacagagatgaatcccaatgtggtagtgatctccgtgctggccatccttagcacacttttaattggactgttgcttgttaccctcattattcttaggaaaaagcatctgcagatggctagggagtgtggagctggtacatttgtcaattttgcatccttagagagggatggaaagcttccatacaactggagtaaaaatggtttaaagaagaggaaactgacaaacccggttcaactggatgactttgatgcctatattaaggatatggccaaagactctgactataaattttctcttcagtttgaggagttgaaattgattggactggatatcccacactttgctgcagatcttccactgaatcgatgtaaaaaccgttacacaaacatcctaccatatgacttcagccgtgtgagattagtctccatgaatgaagaggaaggtgcagactacatcaatgccaactatattcctggatacaactcaccccaggagtatattgccacccagggrccactgcctgaaaccagaaatgacttctggaagatggtcctgcaacaaaagtctcagattattgtcatgctcactcagtgtaatgagaaaaggagggtgaaatgtgaccattactggccattcacggaagaacctatagcctatggagacatcactgtggagatgatttcagaggaagagcaggacgactgggcctgtagacacttccggatcaactatgctgacgagatgcaggatgtgatgcattttaactacactgcatggcctgatcatggtgtgcccacagcaaatgctgcagaaagtatcctgcagtttgtacacatggtccgacagcaagctaccaagagcaaaggtcccatgatcattcactgcagtgctggcgtgggacggacaggaacattcattgccctggacaggctcttgcagcacattcgggatcatgagwttgttgacatcttagggctggtgtcagaaatgaggtcataccggatgtctatggtacagacagaggagcagtacatttttatccatcagtgtgtgcaactgatgtggatgaagaagaagcagcagttctgcatcagtgatgtcatatacgagaatgttagcaagtcctagttcagaatccggagcagagaggacatgatgtgcgcccatcctcccttgcttccagattgttttagtgggccctgatggtcatttttctaaacagaggccctgctttgtaatatgtggccaaggagataatttatctcacagaagcaccgggaagacttagccttaaagagcctacagtgtccttttggactctttcacttcgggacatttaataatggaccaaattcaacagaacaccaggaaggtcaagacgctctccaaagggcaggaagtacagcacttccgaagagtttagttggccctttgctggttgggctgagttttttatttttaagtgtttgtttttcagtgcaataatttttgtgtgtgtgtgattcttatcagaaagttgaattgttttctgcctacaccgttcatcagccccataacccaggaaggaacaggcattgttagcatcagattatacctcattattaaaaggaggcatggccacacatgaagaaatggtcattctacttcaaagaaattgagccagcactatctgtactccaacattaccggatctggattggggaggttggtcagggaagagaggggttctacccacagatcaactgtgtaatcttttactattcaagctataattcagcttcaaagtagagtagaaaaaaaattgtcttaactgttctagttcttgatggttttcttccttattaacagttggtgtttcttccttggcccttttggactaatgttactgtccaagttctttctcaagaaaccacatctggttcagaagagtgtcaagttggactctttgaactctgttgctgtctgagcaatcgtggtgcstagactttgcattccttgttctgttgacctgcatacatgtgagagctatttctttaagaactatataggctgtgaaaacgcactttctttcccccaaagagctgggaatttatgaagttatggcaatgaactgcagcatgctgggacaattatttgactacttttttttgtaatattgtcaaatgtctctatggattctgacagagatttctttttgttttgttattcttttggttgtcagtttcattttaacgagtgtaactagtaacattttattctttggattttgtataattacagtacatgattgtgtattgtgacatgaatgctgtcaaaatgacattgatggcattgtgaagcctgttactttgtgtcacttcctgataaataagaggtgatgacatggatatacaacagaaaacactttgagttgaaagtaaacacaagctggctgcttccctgtggcaactgtggct

SEQ ID NO: 5080 - DNA, 5259 bp, Homo sapiens
tgtccctgctgccagaggactacggcgggctgggcgcggggtccccgcctctcgctcaccacacagaccccgcgcctcctctggcagccgcggtggtggcggcggcagagcctcgcccactccaatccccaccctctccatccttagtcattaaagaacagcagcgcctggcacgttctyggaggaccccgggcgcagaggaggaaagggagcaggcgcagggggactggaaaggcagcatgcgctcgccaggagcaacctcggcgcccagggtctgaggctgcagccccagttcgccattgtgagccgccgccgggggagtccgctagcgcagccgtgcccccgagtccccgtccgcgcagcgatggggcacctgcccacggggatacacggcgcccgccgcctcctgcctctgctctggctctttgtgctgttcaagaatgctacagctttccatgtaactgtccaagatgataataacatcgttgtctcattagaagcttcagacgtcatcagtccagcatctgtgtatgttgtgaagataactggtgaatccaaaaattatttcttcgaatttgaggaattcaacagcactttgcctcctcctgttattttcaaggccagttatcatggcctttattatataatcactctggtagtggtaaatggaaatgtggtgaccaagccatccagatcaatcactgtgttaacaaaacctctacctgtaaccagtgtttccatatatgactataaaccttctcctgaaacaggagtcctgtttgaaatacattatccagaaaaatataacgttttcacaagagtgaacattagctactgggaaggtaaagacttccggacaatgctatataaagatttctttaagggaaaaacagtatttaatcactggctgccaggaatgtgttatagtaatatcacctttcagctggtatctgaggcaacttttaataaaagtacccttgttgagtacagtggtgtcagtcacgaacccaaacagcacagaactgccccttatccacctcaaaatatttccgttcgtatcgtaaacttgaacaaaaacaactgggaagaacagagtggcaatttcccagaagaatccttcatgagatcacaagatacaataggaaaagaaaaactcttccattttacagaagaaacccctgaaattccctcgggcaacatttcttccggttggcctgattttaatagcagtgactatgaaactacgtctcagccatattggtgggacagtgcatctgcagctcctgaaagtgaagatgaatttgtcagcgtacttcccatggaatacgaaaataacagtacactcagtgagacagagaagtcaacatcaggctctttctcctttttccctgtgcaaatgatattgacctggttaccacccaaaccacccactgcttttgatgggttccatatccatattgaacgagaagagaactttactgaatatttgatggtggatgaagaagcacatgaatttgttgcagaactgaaggaacctgggaaatataagttatctgtgacaacctttagttcctcaggatcttgtgaaactcgaaaaagtcagtcagcaaaatcactcagcttttatatcagtccttcaggagagtggattgaagaactgaccgagaagccgcagcacgtgagtgtccacgttttaagctcaaccactgccttgatgtcctggacatcttcccaagagaactacaacagcaccattgtgtctgtggtgtcgctgacctgccagaaacaaaaggagagccagaggcttgaaaagcagtactgcactcaggtgaactcaagcaaacctattattgaaaatctggttcctggtgcccagtaccaggttgtaatatacctaaggaaaggccctttgattggaccaccttcagatcctgtgacatttgctattgttcccacaggaataaaggatttaatgctctatcctttgggycctacggccgtggttctgagctggaccagaccttatttaggcgtgttcagaaaatacgtggttgaaatgttttatttcaaccctgctacaatgacatcagagtggaccacctactatgaaatagcagcaactgtttccttaactgcatccgtgagaatagctaatctgctgccagcatggtactacaacttccgggttaccatggtgacgtggggagatccagaattgagctgctgtgacagctctaccatcagcttcataacagccccagtggctccggaaatcacttctgtggaatatttcaacagtctgttatatatcagttggacatatggggatgatacaacggacttgtcccattctagaatgcttcactggatggtggttgcagaaggaaaaaagaaaattaaaaagagtgtaacacgcaatgtcatgactgcaattctcagcttgcctccaggmgacatctataacctctcagtaactgcttgtactgaaagaggaagtaatacctccatgctccgccttgtcaagctagaaccagctccacccaaatcactcttcgcagtgaacaaaacccagacttcagtgactttgctgtgggtggaagagggagtagctgatttcttygaagttttctgtcaacaagttggctccagtcagaaaaccaaacttcaggaaccagttgctgtttcttcccatgtcgtgaccatctccagccttcttcctgccactgcctacaattgtagtgtcaccagctttagccatgacagccccagygtccctacgttcatagccgtctcaacaatggttacagagatgaatcccaatgtggtagtgatctccgtgctggccatccttagcacacttttaattggactgttgcttgttaccctcattattcttaggaaaaagcatctgcagatggctagggagtgtggagctggtacatttgtcaattttgcatccttagagagggatggaaagcttccatacaactggagtaaaaatggtttaaagaagaggaaactgacaaacccggttcaactggatgactttgatgcctatattaaggatatggccaaagactctgactataaattttctcttcagtttgaggagttgaaattgattggactggatatcccacactttgctgcagatcttccactgaatcgatgtaaaaaccgttacacaaacatcctaccatatgacttcagccgtgtgagattagtctccatgaatgaagaggaaggtgcagactacatcaatgccaactatattcctggatacaactcaccccaggagtatattgccacccagggrccactgcctgaaaccagaaatgacttctggaagatggtcctgcaacaaaagtctcagattattgtcatgctcactcagtgtaatgagaaaaggagggtgaaatgtgaccattactggccattcacggaagaacctatagcctatggagacatcactgtggagatgatttcagaggaagagcaggacgactgggcctgtagacacttccggatcaactatgctgacgagatgcaggatgtgatgcattttaactacactgcatggcctgatcatggtgtgcccacagcaaatgctgcagaaagtatcctgcagtttgtacacatggtccgacagcaagctaccaagagcaaaggtcccatgatcattcactgcagtgctggcgtgggacggacaggaacattcattgccctggacaggctcttgcagcacattcgggatcatgagwttgttgacatcttagggctggtgtcagaaatgaggtcataccggatgtctatggtacagacagaggagcagtacatttttatccatcagtgtgtgcaactgatgtggatgaagaagaagcagcagttctgcatcagtgatgtcatatacgagaatgttagcaagtcctagttcagaatccggagcagagaggacatgatgtgcgcccatcctcccttgcttccagattgttttagtgggccctgatggtcatttttctaaacagaggccctgctttgtaatatgtggccaaggagataatttatctcacagaagcaccgggaagacttagccttaaagagcctacagtgtccttttggactctttcacttcgggacatttaataatggaccaaattcaacagaacaccaggaaggtcaagacgctctccaaagggcaggaagtacagcacttccgaagagtttagttggccctttgctggttgggctgagttttttatttttaagtgtttgtttttcagtgcaataatttttgtgtgtgtgtgattcttatcagaaagttgaattgttttctgcctacaccgttcatcagccccataacccaggaaggaacaggcattgttagcatcagattatacctcattattaaaaggaggcatggccacacatgaagaaatggtcattctacttcaaagaaattgagccagcactatctgtactccaacattaccggatctggattggggaggttggtcagggaagagaggggttctacccacagatcaactgtgtaatcttttactattcaagctataattcagcttcaaagtagagtagaaaaaaaattgtcttaactgttctagttcttgatggttttcttccttattaacagttggtgtttcttccttggcccttttggactaatgttactgtccaagttctttctcaagaaaccacatctggttcagaagagtgtcaagttggactctttgaactctgttgctgtctgagcaatcgtggtgcstagactttgcattccttgttctgttgacctgcatacatgtgagagctatttctttaagaactatataggctgtgaaaacgcactttctttcccccaaagagctgggaatttatgaagttatggcaatgaactgcagcatgctgggacaattatttgactacttttttttgtaatattgtcaaatgtctctatggattctgacagagatttctttttgttttgttattcttttggttgtcagtttcattttaacgagtgtaactagtaacattttattctttggattttgtataattacagtacatgattgtgtattgtgacatgaatgctgtcaaaatgacattgatggcattgtgaagcctgttactttgtgtcacttcctgataaataagaggtgatgacatggatatacaacagaaaacactttgagttgaaagtaaacacaagctggctgcttccctgtggcaactgtggct

SEQ ID NO: 5081 - DNA, 1073 bp, Homo sapiens
aactggagargggcggtgcctgcgtccggcccgcgcggccacagtccctgcattgcgcgcgacccggcggcgggacaggcttgctgcttcctcctcctcggcctcaccattccagaccaaaattgaaaaaatggttgacctcacccaggtaatggatgatgaagtattcatggcttttgcatcctatgcaacaattattctttcaaaaatgatgcttatgagtactgcaactgcattctatagattgacaagaaaggtttttgccaatccagaagactgtgtagcatttggcaaaggagaaaatgccaagaagtatcttcgaacagatgacagagtagaacgtgtacgcagtcattgtaaagctgttacgattagcatatttgaacggcagagccagaatggggctacaaatgaagtgaaaagtatgctttaccgtgtgcaacaattgtgaaagttaatacatacacatatggaacaattamctaaaaacttaagagcccacctgaatgaccttgaaaatattattccatttcttggaattggcctcctgtattccttgagtggtcccgacccctctacagccatcctgcacttcagactatttgtcggagcacggatctaccacaccattgcatatttgacaccccttccccagccaaatagagctttgagtttttttgttggatatggagttactctttccatggcttacaggttgctgaaaagtaaattgtacctgtaaagaaaatcatacaactcarcatccagttggctttttaagaattctgtacttccaatktataatgaatactttcttagattttaggtaggaggggagcagaggaattatgaactggggtaaacccattttgaatattagcattgccaatatcctgtattcttgttttacatttggattagaaatttaacatagtaattcttaagtctttttctgatttttaaagtactttcttataaatttggatcatgttatgatttgtaacattcacacaacacctcacttttgaatctataaaagaattgcacgtatgagaaacctatatttcaatact

SEQ ID NO: 5082 - DNA, 909 bp, Homo sapiens
gaattcaagtcctaaagcctacagttttgaatactactgaaatgacaagttattccagaccaaaattgaaaaaatggttgacctcacccaggtaatggatgatgaagtattcatggcttttgcatcctatgcaacaattattctttcaaaaatgatgcttatgagtactgcaactgcattctatagattgacaagaaaggtttttgccaatccagaagactgtgtagcatttggcaaaggagaaaatgccaagaagtatcttcgaacagatgacagagtagaacgtgtacgcagagcccacctgaatgaccttgaaaatattattccatttcttggaattggcctcctgtattccttgagtggtcccgacccctctacagccatcctgcacttcagactatttgtcggagcacggatctaccacaccattgcatatttgacaccccttccccagccaaatagagctttgagtttttttgttggatatggagttactctttccatggcttacaggttgctgaaaagtaaattgtacctgtaaagaaaatcatacaactcarcatccagttggctttttaagaattctgtacttccaatktataatgaatactttcttagattttaggtaggaggggagcagaggaattatgaactggggtaaacccattttgaatattagcattgccaatatcctgtattcttgttttacatttggattagaaatttaacatagtaattcttaagtctttttctgatttttaaagtactttcttataaatttggatcatgttatgatttgtaacattcacacaacacctcacttttgaatctataaaagaattgcacgtatgagaaacctatatttcaatactgctgaaacagacatkaaataaagaatttaaagaatga

SEQ ID NO: 5083 - DNA, 966 bp, Homo sapiens
aactggagargggcggtgcctgcgtccggcccgcgcggccacagtccctgcattgcgcgcgacccggcggcgggacaggcttgctgcttcctcctcctcggcctcaccattccagaccaaaattgaaaaaatggttgacctcacccaggtaatggatgatgaagtattcatggcttttgcatcctatgcaacaattattctttcaaaaatgatgcttatgagtactgcaactgcattctatagattgacaagaaaggtttttgccaatccagaagactgtgtagcatttggcaaaggagaaaatgccaagaagtatcttcgaacagatgacagagtagaacgtgtacgcagagcccacctgaatgaccttgaaaatattattccatttcttggaattggcctcctgtattccttgagtggtcccgacccctctacagccatcctgcacttcagactatttgtcggagcacggatctaccacaccattgcatatttgacaccccttccccagccaaatagagctttgagtttttttgttggatatggagttactctttccatggcttacaggttgctgaaaagtaaattgtacctgtaaagaaaatcatacaactcarcatccagttggctttttaagaattctgtacttccaatktataatgaatactttcttagattttaggtaggaggggagcagaggaattatgaactggggtaaacccattttgaatattagcattgccaatatcctgtattcttgttttacatttggattagaaatttaacatagtaattcttaagtctttttctgatttttaaagtactttcttataaatttggatcatgttatgatttgtaacattcacacaacacctcacttttgaatctataaaagaattgcacgtatgagaaacctatatttcaatactgctgaaacagacatkaaataaagaatttaaagaatga

SEQ ID NO: 5084 - DNA, 913 bp, Homo sapiens
caggaggggacatcgtgacaaagcaaattgtctggtatcatgaatttggaacaccattccagaccaaaattgaaaaaatggttgacctcacccaggtaatggatgatgaagtattcatggcttttgcatcctatgcaacaattattctttcaaaaatgatgcttatgagtactgcaactgcattctatagattgacaagaaaggtttttgccaatccagaagactgtgtagcatttggcaaaggagaaaatgccaagaagtatcttcgaacagatgacagagtagaacgtgtacgcagagcccacctgaatgaccttgaaaatattattccatttcttggaattggcctcctgtattccttgagtggtcccgacccctctacagccatcctgcacttcagactatttgtcggagcacggatctaccacaccattgcatatttgacaccccttccccagccaaatagagctttgagtttttttgttggatatggagttactctttccatggcttacaggttgctgaaaagtaaattgtacctgtaaagaaaatcatacaactcarcatccagttggctttttaagaattctgtacttccaatktataatgaatactttcttagattttaggtaggaggggagcagaggaattatgaactggggtaaacccattttgaatattagcattgccaatatcctgtattcttgttttacatttggattagaaatttaacatagtaattcttaagtctttttctgatttttaaagtactttcttataaatttggatcatgttatgatttgtaacattcacacaacacctcacttttgaatctataaaagaattgcacgtatgagaaacctatatttcaatactgctgaaacagacatkaaataaagaatttaaagaatga

SEQ ID NO: 5085 - DNA, 560 bp, Homo sapiens
aactggagargggcggtgcctgcgtccggcccgcgcggccacagtccctgcattgcgcgcgacccggcggcgggacaggcttgctgcttcctcctcctcggcctcaccattccagaccaaaattgaaaaaatggttgacctcacccaggtaatggatgatgaagtattcatggcttttgcatcctatgcaacaattattctttcaaaaatgatgcttatgagtactgcaactgcattctatagattgacaagaaaggtttttgccaatccagaagactgtgtagcatttggcaaaggagaaaatgccaagaagtatcttcgaacagatgacagagtagaacgtgtacgcagggcacaggagatcttaggcccagaaaggcagattcagaagaacctacatgtaaatgagactggagtggaaatgagaatggcaggaaatgcatggaaacagacttgtaactgtctcatggcctggtcgtccaaatcccagagtaggttagcctgactgtgctatcacagcataggagcaagacaggaaatggaactgcataaatctcctt

SEQ ID NO: 5086 - DNA, 957 bp, Homo sapiens
gtccccactcgacccaggaagtccagctggcttcacctctcaccaggccctgttttaagcactgtttatttatttaatcatgacaaaaatccccatgagattccagaccaaaattgaaaaaatggttgacctcacccaggtaatggatgatgaagtattcatggcttttgcatcctatgcaacaattattctttcaaaaatgatgcttatgagtactgcaactgcattctatagattgacaagaaaggtttttgccaatccagaagactgtgtagcatttggcaaaggagaaaatgccaagaagtatcttcgaacagatgacagagtagaacgtgtacgcagagcccacctgaatgaccttgaaaatattattccatttcttggaattggcctcctgtattccttgagtggtcccgacccctctacagccatcctgcacttcagactatttgtcggagcacggatctaccacaccattgcatatttgacaccccttccccagccaaatagagctttgagtttttttgttggatatggagttactctttccatggcttacaggttgctgaaaagtaaattgtacctgtaaagaaaatcatacaactcarcatccagttggctttttaagaattctgtacttccaatktataatgaatactttcttagattttaggtaggaggggagcagaggaattatgaactggggtaaacccattttgaatattagcattgccaatatcctgtattcttgttttacatttggattagaaatttaacatagtaattcttaagtctttttctgatttttaaagtactttcttataaatttggatcatgttatgatttgtaacattcacacaacacctcacttttgaatctataaaagaattgcacgtatgagaaacctatatttcaatactgctgaaacagacatkaaataaagaatttaaagaatga

SEQ ID NO: 5087 - DNA, 759 bp, Homo sapiens
attccagaccaaaattgaaaaaatggttgacctcacccaggtaatggatgatgaagtattcatggcttttgcatcctatgcaacaattattctttcaaaaatgatgcttatgagtactgcaactgcattctatagattgacaagaaaggtttttgccaatccagaagactgtgtagcatttggcaaaggagaaaatgccaagaagtatcttcgaacagatgacagagtagaacgtgtacgcagaatcaaacaaaccctgagcatttatcttgcctcttctatataaagtttaactcggcataaccaattgctgatgaagaagaaatgtttccttgtagaagcaaaccagtgaataattgaagaaaaaatttatcttttcaacatctaatgagttaatggattcaagcaaagattatccacggctgttaacaacacaaaaagacaatcggaaattagytattactgcgggaagtacccaataccatctatgaaactgtgtggacaaaaacactgacaaaaatctccacgaatctctaattttgaatacaaatttaaagaaaatgcaaaggattaaaatagaccatgatgaagtcagaaaaattcagacagagaaaaatgctccaggaccagaaacccatttcttccgcaaaagcttccaggtagagattgactgaccgagagaacagagacatagagagaacctagagattaaaagaaacttgagcgatttgtcagcattcagttgcaacgtatggatgt

SEQ ID NO: 5088 - DNA, 1371 bp, Homo sapiens
staaataaacctaactctggcaaaaatgacgacaaaggcaacaagggaagcagcaaacgtgaagctgctaccgaaagtggcaagacagcagttgttttctccttgaagaatgaagttggtggattggtaaaagcactgaggctctttcaggaaaaacgtgtcaacatggttcatattgaatccaggaaatctcggcgaagaagttctgaggttgaaatctttgtggactgtgagtgtgggaaaacagaattcaatgagctcattcagttgctgaaatttcaaaccactattgtgacgctgaatcctccagagaacatttggacagaggaagaaggcaaggagctagaggatgtgccctggttccctcggaagatctctgagttagacaaatgctctcacagagttctcatgtatggttctgagcttgatgctgaccacccaggatttaaggacaatgtctatcgacagagaagaaagtattttgtggatgtggccatgggttataaatatggtcagcccattcccagggtggagtatactgaagaagaaactaaaacttggggtgttgtattccgggagctctccaaactctatcccactcatgcttgccgagagtatttgaaaaacttccctctgctgactaaatactgtggctacagagaggacaatgtgcctcaactcgaagatgtctccatgtttctgaaagaaaggtctggcttcacggtgaggccggtggctggatacctgagcccacgagactttctggcaggactggcctacagagtgttccactgtacccagtacatccggcatggctcagatcccctctacaccccrgaaccagacacatgccatgaactcttgggacatgttccactactwgyggatcctaagtttgctcagttttcacaagaaataggtctggcgtctctgggagcatcagatgaagatgttcagaaactagccacgtgctatttcttcacaatcgagtttggcctttgcaagcaagaagggcaactgcgggcwtatggagcaggactcctttcctccattggagaattaaagcacgccctttctgacaaggcatgtgtgaaagcctttgacccaaagacaacttgcttacaggaatgccttatcaccaccttccaggaagcctactttgtttcagaaagttttgaagaagccaaagaaaagatgagggactttgcaaagtcaattacccgtcccttctcagtatacttcaatccctacacacagagtattgaaattctgaaagacaccagaagtattgaaaatgtggtgcaggaccttcgcagcgacttgaatacagtgtgtgatgctttaaacaaaatgaaccaatatctggggatt

SEQ ID NO: 5089 - DNA, 2310 bp, Homo sapiens
ttcgtgtcaggaagtcaaggctggatgatcgcttaagcccaggagttaaagaccggcccggacaacaaagcgagaccccgtctctccagaaaaagaaaaaaagagagagagagagagaaattagccgggcgtggtggcgtacgcttgtagtcccatctacttaggaggctgaggtgggaggatcgcttgagcccaggaggtggaggctgcactgagctatgatcgccccactgccctccagrgtgggcgacagagccagaccctgttgctaaaaaaaaaaaaaaaatccataaagccggggaccatctttgctccagggaggtcagctgacccgggctggcactggccctggggcagttcccgcccctcccgggagcgctggcaccgccccttggcaccaccccctccccgcgcccccgccttccaggaaggggcggggtctccgagacgggtggggccggagctccaagctggtttgaacaagccctgggcatgtttggcgggaagttggcttagctcggctacctgtggccccgcagttttgtagtccccgccttgtttctccccagaggcctctcaatcctccctccatgatcttcgcatagagcacagtaccccttcacacggaggacgcgatggctcccaagaaacgcccagaaacccagaagacctccgagattgtattacgccccaggaacaagaggagcaggagtcccctggagctggagcccgaggccaagaagctctgtgcgaagggctccggtcctagcagaagatgtgactcagactgcctctgggtggggctggctggcccacagatcctgccaccatgccgcagcatcgtcaggaccctccaccagcataagctgggcagagcttcctggccatctgtccagcaggggctccagcagtcctttttgcacactctggattcttaccggatattacaaaaggctgccccctttgacaggagggctacatccttggcgtggcacccaactcaccccagcacygtggctgtgggttccaaagggggagatatcatgctctggaattttggcatcaaggacaaacccaccttcatcaaagggattggagctggagggagcatcactgggctgaagtttaaccctctcaataccaaccagttttacgcctcctcaatggagggaacaactaggctgcaagactttaaaggcaacattctacgagtttttgccagctcagacaccatcaacatctggttttgtagcctggatgtgtctgctagtagccgaatggtggtcacaggagacaacgtggggaacgtgatcctgctgaacatggacggcaaagagctttggaatctcagaatgcacaaaaagaaagtgacgcatgtggccctgaacccatgctgtgattggttcctggccacagcctccgtagatcaaacagtgaaaatttgggacctgcrccaggttagagggaaagccagcttcctctactcgctgccgcacaggcatcctgtcaacgcagcttgtttcagtcccgatggagcccggctcctgaccacggaccagaagagcgagatcygagtttactctgcttcccagtgggactgccccctgggcctgatcccgcaccctcaccgtcacttccagcacctcacacccatcaaggcagcctggcatcctcgctacaacctcatygttgtgggccgatacccagatcctaatttcaaaagttgtaccccttatgaattgaggacgatcgacgtgttcgatggaaactcagggaagatgatgtgtcagctctatgacccagaatcttctggcatcagttcgcttaatgaattcaatcccatgggggacacgctggcctctgcaatgggttaccacattctcatctggagccaggaggaagccaggacacggaagtgagagacactaaagaaggtgtgggccagacaaggccttggagcccacacatgggatcaagtcctgcaagcagaggtggygatttgttaaagggccaaaagtatccaaggttagggttggagcaggggtgctgggacctggggcactgtgggactgggacacttttatgttaatgctctggacttgcctccagagactgctccagagttggtgacacagctgtcccaagggcccctctgtatctagcctggaaccaaggttatcttggaactaaatgacttttctcctctcagtgggtggtagcagagggatcaagcagttatttgatttgtgctcacttttgatatggccaataaaaccataccgactgagcttctgcgtggatcttccagaa

SEQ ID NO: 5090 - DNA, 1743 bp, Homo sapiens
ttcgtgtcaggaagtcaaggctggatgatcgcttaagcccaggagttaaagaccggcccggacaacaaagcgagaccccgtctctccagaaaaagaaaaaaagagagagagagagagaaattagccgggcgtggtggcgtacgcttgtagtcccatctacttaggaggctgaggtgggaggatcgcttgagcccaggaggtggaggctgcactgagctatgatcgccccactgccctccagrgtgggcgacagagccagaccctgttgctaaaaaaaaaaaaaaaatccataaagccggggaccatctttgctccagggaggtcagctgacccgggctggcactggccctggggcagttcccgcccctcccgggagcgctggcaccgccccttggcaccaccccctccccgcgcccccgccttccaggaaggggcggggtctccgagacgggtggggccggagctccaagctggtttgaacaagccctgggcatgtttggcgggaagttggcttagctcggctacctgtggccccgcagttttgtagtccccgccttgtttctccccagaggcctctcaatcctccctccatgatcttcgcatagagcacagtaccccttcacacggaggacgcgatggctcccaagaaacgcccagaaacccagaagacctccgagattgtattacgccccaggaacaagaggagcaggagtcccctggagctggagcccgaggccaagaagctctgtgcgaagggctccggtcctagcagaagatgtgactcagactgcctctgggtggggctggctggcccacagatcctgccaccatgccgcagcatcgtcaggaccctccaccagcataagctgggcagagcttcctggccatctgtccagcaggggctccagcagtcctttttgcacactctggattcttaccggatattacaaaaggctgccccctttgacaggagggctacatccttggcgtggcacccaactcaccccagcacygtggctgtgggttccaaagggggagatatcatgctctggaattttggcatcaaggacaaacccaccttcatcaaaggggcagcctggcatcctcgctacaacctcatygttgtgggccgatacccagatcctaatttcaaaagttgtaccccttatgaattgaggacgatcgacgtgttcgatggaaactcagggaagatgatgtgtcagctctatgacccagaatcttctggcatcagttcgcttaatgaattcaatcccatgggggacacgctggcctctgcaatgggttaccacattctcatctggagccaggaggaagccaggacacggaagtgagagacactaaagaaggtgtgggccagacaaggccttggagcccacacatgggatcaagtcctgcaagcagaggtggygatttgttaaagggccaaaagtatccaaggttagggttggagcaggggtgctgggacctggggcactgtgggactgggacacttttatgttaatgctctggacttgcctccagagactgctccagagttggtgacacagctgtcccaagggcccctctgtatctagcctggaaccaaggttatcttggaactaaatgacttttctcctctcagtgggtggtagcagagggatcaagcagttatttgatttgtgctcacttttgatatggccaataaaaccataccgactgagcttctgcgtggatcttccagaa

SEQ ID NO: 5091 - DNA, 3322 bp, Homo sapiens
ggttcgtgtcaggaagtcaaggctggatgatcgcttaagcccaggagttaaagaccggcccggacaacaaagcgagaccccgtctctccagaaaaagaaaaaaagagagagagagagagaaattagccgggcgtggtggcgtacgcttgtagtcccatctacttaggaggctgaggtgggaggatcgcttgagcccaggaggtggaggctgcactgagctatgatcgccccactgccctccagrgtgggcgacagagccagaccctgttgctaaaaaaaaaaaaaaaatccataaagccggggaccatctttgctccagggaggtcagctgacccgggctggcactggccctggggcagttcccgcccctcccgggagcgctggcaccgccccttggcaccaccccctccccgcgcccccgccttccaggaaggggcggggtctccgagacgggtggggccggagctccaagctggtttgaacaagccctgggcatgtttggcgggaagttggcttagctcggctacctgtggccccgcagttttgtagtccccgccttgtttctccccagaggcctctcaatcctccctccatgatcttcgcatagagcacagtaccccttcacacggaggacgcgatggctcccaagaaacgcccagaaacccagaagacctccgagattgtattacgccccaggaacaagaggagcaggagtcccctggagctggagcccgaggccaagaagctctgtgcgaagggctccggtackgcctgtgcctgctgcttgaatatttccgccttttagggtgctcgcgcaggaggctgcagcgggggatgggtgctccgaggctcccgaggcccgcgcaggtcacgggtgcctccggctgtgcattctacctgcaggtcctttgacaccagagtgtttaggtttcaacacctctcccgctaggtaacaggaagcagatgagctccgtaacaacagacacacggacttgtcagattccttgttcgtatcagggttcttgcacagttaggacggcttcagagaatcctacctttcctggcgctgtgtgtgctggatttcatagtcacgcttgttagctgcacgtcctcggtggtcagttgtgagagcccccaattccttcctccttagaaagctcattctctgaggtttactggggcttgaacctggggctataaggagtttcgagacactcaaaaacgagctggggcttgttaatcaagtggtttttgtccatgagaagaaagaattggttgtcaagacgtcggacctatagtgattgggtcctcaaatacagtttggtgatcaggagttgttgctttattgctattctaatttcacttacctccccagaagtaacctagttaagagcatttccaggccttcctattccttcttttcctaaacggtgacttctgccatgctgccctaaaatctttttattgtgcattatatgtgatttataaaattgtgacccagtcccatctcgagttttgcagcccaaactgggaagagttctgcattgtactttatccttgtgtgtttctttggctggggtctcaggaaccctgcacgactgtatttactttcacttcagacttactgttygtgggagtgttttggggaaggggccaaatcctcactcatttttttatttctggtgctcgttgagaccacacagacatggaaaggccgcaggaggtgatgagacagagattaaccgtgccgaakgaaacaaggcttcctttyggggaattcagcagaaaaacctttcgtgagattggagaggaaaatatgtctgttctgcttggcaggtcctagcagaagatgtgactcagactgcctctgggtggggctggctggcccacagatcctgccaccatgccgcagcatcgtcaggaccctccaccagcataagctgggcagagcttcctggccatctgtccagcaggggctccagcagtcctttttgcacactctggattcttaccggatattacaaaaggctgccccctttgacaggagggctacatccttggcgtggcacccaactcaccccagcacygtggctgtgggttccaaagggggagatatcatgctctggaattttggcatcaaggacaaacccaccttcatcaaagggattggagctggagggagcatcactgggctgaagtttaaccctctcaataccaaccagttttacgcctcctcaatggagggaacaactaggctgcaagactttaaaggcaacattctacgagtttttgccagctcagacaccatcaacatctggttttgtagcctggatgtgtctgctagtagccgaatggtggtcacaggagacaacgtggggaacgtgatcctgctgaacatggacggcaaagagctttggaatctcagaatgcacaaaaagaaagtgacgcatgtggccctgaacccatgctgtgattggttcctggccacagcctccgtagatcaaacagtgaaaatttgggacctgcrccagcttgtttcagtcccgatggagcccggctcctgaccacggaccagaagagcgagatcygagtttactctgcttcccagtgggactgccccctgggcctgatcccgcaccctcaccgtcacttccagcacctcacacccatcaagcctggcatcctcgctacaacctcatygttgtgggccgatacccagatcctaatttcaaaagttgtaccccttatgaattgaggacgatcgacgtgttcgatggaaactcagggaagatgatgtgtcagctctatgacccagaatcttctggcatcagttcgcttaatgaattcaatcccatgggggacacgctggcctctgcaatgggttaccacattctcatctggagccaggaggaagccaggacacggaagtgagagacactaaagaaggtgtgggccagacaaggccttggagcccacacatgggatcaagtcctgcaagcagaggtggygatttgttaaagggccaaaagtatccaaggttagggttggagcaggggtgctgggacctggggcactgtgggactgggacacttttatgttaatgctctggacttgcctccagagactgctccagagttggtgacacagctgtcccaagggcccctctgtatctagcctggaaccaaggttatcttggaactaaatgacttttctcctctcagtgggtggtagcagagggatcaagcagttatttgatttgtgctcacttttgatatggccaataaaaccataccgactgagcttctgcgtggatcttccagaa

SEQ ID NO: 5092 - DNA, 942 bp, Homo sapiens
tccgtgcccttggggctccgtgtcctgctgtctttccgtccgctgcctagtctgcatctgagtaacatggcggcggcggcggtagccaggctgtggtggcgcgggatcttgggggcctcggcgctgaccagggggactgggcgaccctccgttctgttgctgccggtgaggcgggagagcgccggggccgacacgcgccccactgtcagaccacggaatgatgtggcccacaagcagctctcagcttttggagagtatgtggctgaaatcttgcccaagtatgtccaacaagttcaggtgtcctgcttcaatgagttagaggtctgtatccatcctgatggcgtcatcccagtgctgactttcctcagggatcacaccaatgcacagttcaaatctctggttgacttgacagcagtggacgtcccaactcggcaaaaccgttttgagattgtctacaacctgttgtctctgcgcttcaactcacggatccgtgtgaagacctacacagatgagctgacgcccattgagtctgctgtctctgtgttcaaggcagccaactggtatgaaagggagatctgggacatgtttggagtcttctttgctaaccaccctgatctaagaaggatcctgacagattatggcttcgagggacatcctttccggaaagactttcctctatctggctatgttgagttacgttatgatgatgaagtgaagcgggtggtggcagagccggtggagttggcccaagagttccgcaaatttgacctgaacagcccctgggaggctttcccagtctatcgccaaccccmrgagagtctcaagcttgaagccggagacaagaagcctgatgccaagtagctccagggaacgcatgtggatcctagacagcgccttatctatgattgagtgtccgtgtaaataaattcctacttagactta

SEQ ID NO: 5093 - DNA, 659 bp, Homo sapiens
tccgtgcccttggggctccgtgtcctgctgtctttccgtccgctgcctagtctgcatctgagtaacatggcggcggcggcggtagccaggctgtggtggcgcgggatcttgggggcctcggcgctgaccagggggactgggcgaccctccgttctgttgctgccggtgaggcgggagagcgccggggccgacacgcgccccactgtcagaccacggaatgatgtggcccacaagcagctctcagcttttggagagtatgtggctgaaatcttgcccaagtatgtccaacaagttcaggtaatacttactaatgttatttgggtctgggtcaagaaagaaccatgttcgcagggcaygtgggagtgggcagacttgtttcaaagaaactacagattcctccatcccaagcttggacttttctctcagcattaaaccaggtgactccagctgaagttagctgttccctcagtagctctttgttccctctcccctcactttcatgtgtgcaggtgtcctgcttcaatgagttagaggtctgtatccatcctgatggcgtcatcccagtgctgactttcctcagggatcacaccaatgcacagttcaaatctctggttgacttgacagcagtggacgtcccaactcggcaaaaccgttttgag

SEQ ID NO: 5094 - DNA, 1013 bp, Homo sapiens
gacgctgcggggcgggcggacagactgcgggacggacggtggacgctgggacgcgtttgtagctccggccccgccgttccgacccccgccgccgtcgccgccatgacggggctagcactgctctactccggggtcttcgtggccttctgggcctgcgcsctggccgtgggagtctgctacaccatttttgatttgggcttccgctttgatgtggcatggttcctgacggagacttcgcccttcatgtggtccaacctgggcattggcctagctatctccctgtctgtggttggggcagcctggggcatctatattaccggctcctccatcattggtggaggagtgaaggcccccaggatcaagaccaagaacctggtcagcatcatcttctgtgaggctgtggccatctacggcatcatcatggcaattgtcattagcaacatggctgagcctttcagtgccacagaccccaaggccatcggccatcggaactaccatgcaggctactccatgtttggggctggcctcaccgtaggcctgtctaacctcttctgtggagtctgcgtgggcatcgtgggcagtggggctgccctggccgatgctcagaaccccagcctctttgtaaagattctcatcgtggagatctttggcagcgccattggcctctttggggtcatcgtcgcaattcttcagacctccagagtgaagatgggtgactagatgatatgtgtgggtgggrccgtgcctcamttttwtttattgctggttttcctgggacagctggagctgtgtcccttagcctttcagaggcttggtgttcagggccctccctgcactcccctcttgctgcgtgttgatttggaggcactgcagtccaggccgagtcctcagtgcggggagcrggctgctgctgctgactctgtgcagctgcgcacctgtgtcccccacctccaccctcaacccatcttcctagtgtttgtgaaataaacttggtatttgtctgggtcagtgca

SEQ ID NO: 5095 - DNA, 973 bp, Homo sapiens
gagttaggtgacgctgcggggcgggcggacagactgcgggacggacggtggacgctgggacgcgtttgtagctccggccccgccgttccgacccccgccgccgtcgccgccatgacggggctagcactgctctactccggggtcttcgtggccttctgggcctgcgcsctggccgtgggttcctgacggagacttcgcccttcatgtggtccaacctgggcattggcctagctatctccctgtctgtggttggggcagcctggggcatctatattaccggctcctccatcattggtggaggagtgaaggcccccaggatcaagaccaagaacctggtcagcatcatcttctgtgaggctgtggccatctacggcatcatcatggcaattgtcattagcaacatggctgagcctttcagtgccacagaccccaaggccatcggccatcggaactaccatgcaggctactccatgtttggggctggcctcaccgtaggcctgtctaacctcttctgtggagtctgcgtgggcatcgtgggcagtggggctgccctggccgatgctcagaaccccagcctctttgtaaagattctcatcgtggagatctttggcagcgccattggcctctttggggtcatcgtcgcaattcttcagacctccagagtgaagatgggtgactagatgatatgtgtgggtgggrccgtgcctcamttttwtttattgctggttttcctgggacagctggagctgtgtcccttagcctttcagaggcttggtgttcagggccctccctgcactcccctcttgctgcgtgttgatttggaggcactgcagtccaggccgagtcctcagtgcggggagcrggctgctgctgctgactctgtgcagctgcgcacctgtgtcccccacctccaccctcaacccatcttcctagtgtttgtgaaataaacttggtatttgtctgggtcagtgca

SEQ ID NO: 5096 - DNA, 2180 bp, Homo sapiens
cgcgcgcgggcgcgcgggccgggcctgcccctccgaggcgccgtagcgcgggagggaggcggcggcgctgtggtccgtgggtccgccggtccgtgggtctgcccggccgcccggccccgccctgccccccggggcggctcggctccatggccccgcggcggcggcggcggcggcggcggcgggaggcgacccgggggccgcggtggccgctgaccggacggccggaggcggcggggccggggccatgggggacggaaccgccgcagccgccggagccgggagccctgcccaagtcggagcggcgtcccctgctgagccccgagcgccgggccagcagccggatgcccgggcccactgggcgggccagtggccgcctgcgggatgagcagactgctgggggggacgctggagcgcgtctgcaaggctgtgctccttctctgcctgctgcacttcctcgtggccgtcatcctctactttgacgtctacgcccagcacctggccttcttcakccgcttcagtgcccgaggccctgcccatgccctccacccagctgctagcagcagcagcagcagcagcaactgctcccggcccaacgccaccgcctytagctccgggctccctgaggtccccagkgccctgcccggtcccacggctcccacgctgccaccctgtcctgactcgccacctggtcttgcgggtgcasagggagaacccaggcgtgctcatgggcggccgatacacaycgcccgactgcaccccagcccagacggtggcggtcatcatcccctttagacaccgggaacaccacctgcgctactggctccactatctacaccccatyttgaggcggcagcggctgcgctacggcgtctatgtcatcaaccagcatggtgaggacaccttcaaccgggccaagctgcttaacgtgggcttcctagaggcgctgaaggaggatgccgcctatgactgcttcatcttcagcgatgtggacctggtccccatggatgaccgcaacctataccgctgcggcgaccaaccccgccactttgccattgccatggacaagtttggcttccggcttccctatgctggctactttggaggtgtgtcaggcctgagtaaggctcagtttctgagaatcaatggcttccccaatgagtactggggctggggtggcgaggatgatgacatcttcaaccggatctccctgactgggatgaagatctcacgcccagacatccgaatyggccgctaccgcatgatcaagcacgaccgcgacaagcataacgaacctaaccctcagaggtttaccaagattcaaaacacgaagctgaccatgaagcgggacsgcattgggtcagtgcggtaccaggtcttggaggtgtctcggcaaccactcttcaccaatatcacagtggacattgggcggcctccgtcgtggccccctcgrggctgacactaatggacagaggctctcggtgccgaagattgcctgccagaggactgaccacagcctggctggcagctgctctgtggaggacctccaggactgagactgggctctgttttccaagggtcttcactaggccccctagctacacctggaagtttcagaacccactttggggggcctcctgcctgggcaggctcttcaagtgtggccctctttggagtcaaccctccttcccgaccccctccccctagcccagccccagtcactgtcagggtcgggccagcccctgcactgcctcgcagagtggcctgggctaggtcactccacctctctgtgcctcagtttcccccccttgagtcccctagggcctggaagggtgggaggtatgtctagggggcagtgtctcttccagggggaattctcagctcttgggaacccccttrctcccaggggaggggaaacctttttcattcaacattgtagggggcaagctttggtgcgccccctgctgaggagcagccccaggaggggaccagaggggatgctgtgtcgctgcctgggatcttggggttggcctttgcatgggaggcaggtggggcttggatcagtaagtctggttcccgcytccctgtctgagagaggaggcaggagccccagggccggcttgtgtttgtacattgcacagaaacttgtgtgggtgctttagtaaaaaacgtgaatggagcag

SEQ ID NO: 5097 - DNA, 1890 bp, Homo sapiens
cagccggatgcccgggcccactgggcgggccagtggccgcctgcgggatgagcagactgctgggggggacgctggagcgcgtctgcaaggctgtgctccttctctgcctgctgcacttcctcgtggccgtcatcctctactttgacgtctacgcccagcacctggccttcttcakccgcttcagtgcccgaggccctgcccatgccctccacccagctgctagcagcagcagcagcagcagcaactgctcccggcccaacgccaccgcctytagctccgggctccctgaggtccccagkgccctgcccggtcccacggctcccacgctgccaccctgtcctgactcgccacctggtcttgtgggcagactgctgatcgagttcacctcacccatgcccctggagcgggtgcasagggagaacccaggcgtgctcatgggcggccgatacacaycgcccgactgcaccccagcccagacggtggcggtcatcatcccctttagacaccgggaacaccacctgcgctactggctccactatctacaccccatyttgaggcggcagcggctgcgctacggcgtctatgtcatcaaccagcatggtgaggacaccttcaaccgggccaagctgcttaacgtgggcttcctagaggcgctgaaggaggatgccgcctatgactgcttcatcttcagcgatgtggacctggtccccatggatgaccgcaacctataccgctgcggcgaccaaccccgccactttgccattgccatggacaagtttggcttccggcttccctatgctggctactttggaggtgtgtcaggcctgagtaaggctcagtttctgagaatcaatggcttccccaatgagtactggggctggggtggcgaggatgatgacatcttcaaccggatctccctgactgggatgaagatctcacgcccagacatccgaatyggccgctaccgcatgatcaagcacgaccgcgacaagcataacgaacctaaccctcagaggtttaccaagattcaaaacacgaagctgaccatgaagcgggacsgcattgggtcagtgcggtaccaggtcttggaggtgtctcggcaaccactcttcaccaatatcacagtggacattgggcggcctccgtcgtggccccctcgrggctgacactaatggacagaggctctcggtgccgaagattgcctgccagaggactgaccacagcctggctggcagctgctctgtggaggacctccaggactgagactgggctctgttttccaagggtcttcactaggccccctagctacacctggaagtttcagaacccactttggggggcctcctgcctgggcaggctcttcaagtgtggccctctttggagtcaaccctccttcccgaccccctccccctagcccagccccagtcactgtcagggtcgggccagcccctgcactgcctcgcagagtggcctgggctaggtcactccacctctctgtgcctcagtttcccccccttgagtcccctagggcctggaagggtgggaggtatgtctagggggcagtgtctcttccagggggaattctcagctcttgggaacccccttrctcccaggggaggggaaacctttttcattcaacattgtagggggcaagctttggtgcgccccctgctgaggagcagccccaggaggggaccagaggggatgctgtgtcgctgcctgggatcttggggttggcctttgcatgggaggcaggtggggcttggatcagtaagtctggttcccgcytccctgtctgagagaggaggcaggagccccagggccggcttgtgtttgtacattgcacagaaacttgtgtgggtgctttagtaaaaaacgtgaatggagcag

SEQ ID NO: 5098 - DNA, 1780 bp, Homo sapiens
ggagggaggcggcggcgctgtggtccgtgggtccgccggtccgtgggtctgcccggccgcccggccccgccctgccccccggggcggctcccgcagccgccggagccgggagccctgcccaagtcggagcggcgtcccctgctgagccccgagcgccggcagccggatgcccgggcccactgggcgggccagtggccgcctgcgggatgagcagactgctgggggggacgctggagcgcgtctgcaaggctgtgctccttctctgcctgctgcacttcctcgtggccgtcatcctctactttgacgtctacgcccagcacctggccttcttcakccgcttcagtgcccgaggccctgcccatgccctccacccagctgctagcagcagcagcagcagcagcaactgctcccggcccaacgccaccgcctytagctccgggctccctgaggtccccagkgccctgcccggtcccacggctcccacgctgccaccctgtcctgactcgccacctggtcttgtgggcagactgctgatcgagttcacctcacccatgcccctggagcgggtgcasagggagaacccaggcgtgctcatgggcggccgatacacaycgcccgactgcaccccagcccagacggtggcggtcatcatcccctttagacaccgggaacaccacctgcgctactggctccactatctacaccccatyttgaggcggcagcggctgcgctacggcgtctatgtcatcaaccagcatggtgaggacaccttcaaccgggccaagctgcttaacgtgggcttcctagaggcgctgaaggaggatgccgcctatgactgcttcatcttcagcgatgtggacctggtccccatggatgaccgcaacctataccgctgcggcgaccaaccccgccactttgccattgccatggacaagtttggcttccggcttccctatgctggctactttggaggtgtgtcaggcctgagtaaggctcagtttctgagaatcaatggcttccccaatgagtactggggctggggtggcgaggatgatgacatcttcaaccggatctccctgactgggatgaagatctcacgcccagacatccgaatyggccgctaccgcatgatcaagcacgaccgcgacaagcataacgaacctaaccctcagaggtttaccaagattcaaaacacgaagctgaccatgaagcgggacsgcattgggtcagtgcggtaccaggtcttggaggtgtctcggcaaccactcttcaccaatatcacagtggacattgggcggcctccgtcgtggccccctcgrggctgacactaatggacagaggctctcggtgccgaagattgcctgccagaggactgaccacagcctggctggcagctgctctgtggaggacctccaggactgagactgggctctgttttccaagggtcttcactaggccccctagctacacctggaagtttcagaacccactttggggggcctcctgcctgggcaggctcttcaagtgtggccctctttggagtcaaccctccttcccgaccccctccccctagcccagccccagaggggaccagaggggatgctgtgtcgctgcctgggatcttggggttggcctttgcatgggaggcaggtggggcttggatcagtaagtctggttcccgcytccctgtctgagagaggaggcaggagccccagggccggcttgtgtttgtacattgcacagaaacttgtgtgggtgctttagtaaaaaacgtgaatgg

SEQ ID NO: 5099 - DNA, 2224 bp, Homo sapiens
cgcgcgcgggcgcgcgggccgggcctgcccctccgaggcgccgtagcgcgggagggaggcggcggcgctgtggtccgtgggtccgccggtccgtgggtctgcccggccgcccggccccgccctgccccccggggcggctcggctccatggccccgcggcggcggcggcggcggcggcggcgggaggcgacccgggggccgcggtggccgctgaccggacggccggaggcggcggggccggggccatgggggacggaaccgccgcagccgccggagccgggagccctgcccaagtcggagcggcgtcccctgctgagccccgagcgccgggccagcagccggatgcccgggcccactgggcgggccagtggccgcctgcgggatgagcagactgctgggggggacgctggagcgcgtctgcaaggctgtgctccttctctgcctgctgcacttcctcgtggccgtcatcctctactttgacgtctacgcccagcacctggccttcttcakccgcttcagtgcccgaggccctgcccatgccctccacccagctgctagcagcagcagcagcagcagcaactgctcccggcccaacgccaccgcctytagctccgggctccctgaggtccccagkgccctgcccggtcccacggctcccacgctgccaccctgtcctgactcgccacctggtcttgtgggcagactgctgatcgagttcacctcacccatgcccctggagcgggtgcasagggagaacccaggcgtgctcatgggcggccgatacacaycgcccgactgcaccccagcccagacggtggcggtcatcatcccctttagacaccgggaacaccacctgcgctactggctccactatctacaccccatyttgaggcggcagcggctgcgctacggcgtctatgtcatcaaccagcatggtgaggacaccttcaaccgggccaagctgcttaacgtgggcttcctagaggcgctgaaggaggatgccgcctatgactgcttcatcttcagcgatgtggacctggtccccatggatgaccgcaacctataccgctgcggcgaccaaccccgccactttgccattgccatggacaagtttggcttccggcttccctatgctggctactttggaggtgtgtcaggcctgagtaaggctcagtttctgagaatcaatggcttccccaatgagtactggggctggggtggcgaggatgatgacatcttcaaccggatctccctgactgggatgaagatctcacgcccagacatccgaatyggccgctaccgcatgatcaagcacgaccgcgacaagcataacgaacctaaccctcagaggtttaccaagattcaaaacacgaagctgaccatgaagcgggacsgcattgggtcagtgcggtaccaggtcttggaggtgtctcggcaaccactcttcaccaatatcacagtggacattgggcggcctccgtcgtggccccctcgrggctgacactaatggacagaggctctcggtgccgaagattgcctgccagaggactgaccacagcctggctggcagctgctctgtggaggacctccaggactgagactgggctctgttttccaagggtcttcactaggccccctagctacacctggaagtttcagaacccactttggggggcctcctgcctgggcaggctcttcaagtgtggccctctttggagtcaaccctccttcccgaccccctccccctagcccagccccagtcactgtcagggtcgggccagcccctgcactgcctcgcagagtggcctgggctaggtcactccacctctctgtgcctcagtttcccccccttgagtcccctagggcctggaagggtgggaggtatgtctagggggcagtgtctcttccagggggaattctcagctcttgggaacccccttrctcccaggggaggggaaacctttttcattcaacattgtagggggcaagctttggtgcgccccctgctgaggagcagccccaggaggggaccagaggggatgctgtgtcgctgcctgggatcttggggttggcctttgcatgggaggcaggtggggcttggatcagtaagtctggttcccgcytccctgtctgagagaggaggcaggagccccagggccggcttgtgtttgtacattgcacagaaacttgtgtgggtgctttagtaaaaaacgtgaatggagcag

SEQ ID NO: 5100 - DNA, 2049 bp, Homo sapiens
ggagggaggcggcggcgctgtggtccgtgggtccgccggtccgtgggtctgcccggccgcccggccccgccctgccccccggggcggctcccgcagccgccggagccgggagccctgcccaagtcggagcggcgtcccctgctgagccccgagcgccggcagccggatgcccgggcccactgggcgggccagtggccgcctgcgggatgagcagactgctgggggggacgctggagcgcgtctgcaaggctgtgctccttctctgcctgctgcacttcctcgtggccgtcatcctctactttgacgtctacgcccagcacctggccttcttcakccgcttcagtgcccgaggccctgcccatgccctccacccagctgctagcagcagcagcagcagcagcaactgctcccggcccaacgccaccgcctytagctccgggctccctgaggtccccagkgccctgcccggtcccacggctcccacgctgccaccctgtcctgactcgccacctggtcttgtgggcagactgctgatcgagttcacctcacccatgcccctggagcgggtgcasagggagaacccaggcgtgctcatgggcggccgatacacaycgcccgactgcaccccagcccagacggtggcggtcatcatcccctttagacaccgggaacaccacctgcgctactggctccactatctacaccccatyttgaggcggcagcggctgcgctacggcgtctatgtcatcaaccagcatggtgaggacaccttcaaccgggccaagctgcttaacgtgggcttcctagaggcgctgaaggaggatgccgcctatgactgcttcatcttcagcgatgtggacctggtccccatggatgaccgcaacctataccgctgcggcgaccaaccccgccactttgccattgccatggacaagtttggcttccggcttccctatgctggctactttggaggtgtgtcaggcctgagtaaggctcagtttctgagaatcaatggcttccccaatgagtactggggctggggtggcgaggatgatgacatcttcaaccggatctccctgactgggatgaagatctcacgcccagacatccgaatyggccgctaccgcatgatcaagcacgaccgcgacaagcataacgaacctaaccctcagaggtttaccaagattcaaaacacgaagctgaccatgaagcgggacsgcattgggtcagtgcggtaccaggtcttggaggtgtctcggcaaccactcttcaccaatatcacagtggacattgggcggcctccgtcgtggccccctcgrggctgacactaatggacagaggctctcggtgccgaagattgcctgccagaggactgaccacagcctggctggcagctgctctgtggaggacctccaggactgagactgggctctgttttccaagggtcttcactaggccccctagctacacctggaagtttcagaacccactttggggggcctcctgcctgggcaggctcttcaagtgtggccctctttggagtcaaccctccttcccgaccccctccccctagcccagccccagtcactgtcagggtcgggccagcccctgcactgcctcgcagagtggcctgggctaggtcactccacctctctgtgcctcagtttcccccccttgagtcccctagggcctggaagggtgggaggtatgtctagggggcagtgtctcttccagggggaattctcagctcttgggaacccccttrctcccaggggaggggaaacctttttcattcaacattgtagggggcaagctttggtgcgccccctgctgaggagcagccccaggaggggaccagaggggatgctgtgtcgctgcctgggatcttggggttggcctttgcatgggaggcaggtggggcttggatcagtaagtctggttcccgcytccctgtctgagagaggaggcaggagccccagggccggcttgtgtttgtacattgcacagaaacttgtgtgggtgctttagtaaaaaacgtgaatggagcag

SEQ ID NO: 5101 - DNA, 1736 bp, Homo sapiens
ggagggaggcggcggcgctgtggtccgtgggtccgccggtccgtgggtctgcccggccgcccggccccgccctgccccccggggcggctcccgcagccgccggagccgggagccctgcccaagtcggagcggcgtcccctgctgagccccgagcgccggcagccggatgcccgggcccactgggcgggccagtggccgcctgcgggatgagcagactgctgggggggacgctggagcgcgtctgcaaggctgtgctccttctctgcctgctgcacttcctcgtggccgtcatcctctactttgacgtctacgcccagcacctggccttcttcakccgcttcagtgcccgaggccctgcccatgccctccacccagctgctagcagcagcagcagcagcagcaactgctcccggcccaacgccaccgcctytagctccgggctccctgaggtccccagkgccctgcccggtcccacggctcccacgctgccaccctgtcctgactcgccacctggtcttgcgggtgcasagggagaacccaggcgtgctcatgggcggccgatacacaycgcccgactgcaccccagcccagacggtggcggtcatcatcccctttagacaccgggaacaccacctgcgctactggctccactatctacaccccatyttgaggcggcagcggctgcgctacggcgtctatgtcatcaaccagcatggtgaggacaccttcaaccgggccaagctgcttaacgtgggcttcctagaggcgctgaaggaggatgccgcctatgactgcttcatcttcagcgatgtggacctggtccccatggatgaccgcaacctataccgctgcggcgaccaaccccgccactttgccattgccatggacaagtttggcttccggcttccctatgctggctactttggaggtgtgtcaggcctgagtaaggctcagtttctgagaatcaatggcttccccaatgagtactggggctggggtggcgaggatgatgacatcttcaaccggatctccctgactgggatgaagatctcacgcccagacatccgaatyggccgctaccgcatgatcaagcacgaccgcgacaagcataacgaacctaaccctcagaggtttaccaagattcaaaacacgaagctgaccatgaagcgggacsgcattgggtcagtgcggtaccaggtcttggaggtgtctcggcaaccactcttcaccaatatcacagtggacattgggcggcctccgtcgtggccccctcgrggctgacactaatggacagaggctctcggtgccgaagattgcctgccagaggactgaccacagcctggctggcagctgctctgtggaggacctccaggactgagactgggctctgttttccaagggtcttcactaggccccctagctacacctggaagtttcagaacccactttggggggcctcctgcctgggcaggctcttcaagtgtggccctctttggagtcaaccctccttcccgaccccctccccctagcccagccccagaggggaccagaggggatgctgtgtcgctgcctgggatcttggggttggcctttgcatgggaggcaggtggggcttggatcagtaagtctggttcccgcytccctgtctgagagaggaggcaggagccccagggccggcttgtgtttgtacattgcacagaaacttgtgtgggtgctttagtaaaaaacgtgaatgg

SEQ ID NO: 5102 - DNA, 2177 bp, Homo sapiens
ctccgcccgccgctgcgtccccactatggcggcgcccatgcagcccagcgcgttgtgggctcccgccggggtcccccgcggctgtcgccgccgcctacgccgctgcctccgccttcctgccccgcgtcgggycgggcgccacctcccccctgcctccctctccgctgtggtcatttaggaaatcgtaaatcatgtgaagatgggactcttggtatttgtgcgcaatctgctgctagccctctgcctctttctggtactgggatttttgtattattctgcgtggaagctacacttactccagtgggaggaggactccaattcagtggttctttcctttgactccgctggacaaacactaggctcagagtatgatcggttgggcttcctcctgaatctggactctaaactgcctgctgaattagccaccaagtacgcaaacttttcagagggagcttgcaagcctggctatgcttcagccttgatgacggccatcttcccccggttctccaagccagcacccatgttcctggatgactcctttcgcaagtgggctagaatccgggagttcgtgccgccttttgggatcaaaggtcaagacaatctgatcaaagccatcttgtcagtcaccaaagagtaccgcctgacccctgccttggacagcctccgctgccgccgctgcatcatcgtgggcaatggaggcgttcttgccaacaagtctctggggtcacgaattgacgactatgacattgtggtgagactgaattcagcaccagtgaaaggctttgagaaggacgtgggcagcaaaacgacactgcgcatcacctaccccgagggygccatgcagcggcctgagcagtacgagcgcgattctctctttgtcctcgccggcttcaagtggcaggactttaagtggttgaaatacatcgtctacaaggagagagtgagtgcatcggatggcttctggaaatctgtggccactcgagtgcccaaggagccccctgagattcgaatcctcaacccatatttcatccaggaggccgccttcaccctcattggcctgcccttcaacaatggcctcatgggccgggggaacatccctacccttggcagtgtggcagtgaccatggcactacacggctgtgacgaggtggcagtcgcaggatttggctatgacatgagcacacccaacgcacccctgcactactatgagaccgttcgcatggcagccatcaaagagtcctggacgcacaatatccagcgagagaaagagtttctgcggaagctggtgaaagctcgcgtcatcactgatctaagcagtggcatctgagtgggcccagcacatggccatagaggcccaggcaccaccaggagcagcagccagcaccacctacacaggagtcttcagacccagagaaggacggtgccaagggccccaggggcagcaaggccttggtggagcagccagagctgtgcctgctcagcacccagcatgcaggtggtgggacactgggcagcaaggctgctgccggaatcacttctccartcagtgtttggtgtattaycattttgtgaatttgggtaggggggagggtagggataatttatttttaaataaggttggagatgtcaagttgggttcacttgccatgcaggaagaggcccactagagggcccatcaggcagtgttacctgttagctccctgtggggcaggagtgccaggaccagcctgtaccttgctgtggggctacaggatggtgggcaggatctcaagccagccccctccagctcatgacactgtttggcctttcttggggagaaggcggggtattcccactcaccagccctagctgtcccatgggraaaccctggagccatcccttyggagccaacaagaccgccccagggctatagcagaaagaactttaaagctcaggagggtgacgcccagctccgcctgctgggaagagctcccctccacagctgcagctgatscataggactaccgcaggcccggactcaccaacttgccacatgttytaggtttcagcaacaagactgccaggtggttggsttctgcctttagcctggaccaaagggaagtgaggcccaaggagcttacccaagctgtggcagccrtcccaggccacccccatggaagcaataaagctcttccctg

SEQ ID NO: 5103 - DNA, 2275 bp, Homo sapiens
ctccgcccgccgctgcgtccccactatggcggcgcccatgcagcccagcgcgttgtgggctcccgccggggtcccccgcggctgtcgccgccgcctacgccgctgcctccgccttcctgccccgcgtcgggycgggcgccacctcccccctgcctccctctccgctgtggtcatttaggaaatcgtaaatcatgtgaagatgggactcttggtatttgtgcgcaatctgctgctagccctctgcctctttctggtactgggatttttgtattattctgcgtggaagctacacttactccagtgggaggaggactccaattcagtggttctttcctttgactccgctggacaaacactaggctcagagtatgatcggttgggcttcctcctgaatctggactctaaactgcctgctgaattagccaccaagtacgcaaacttttcagagggagcttgcaagcctggctatgcttcagccttgatgacggccatcttcccccgttatattccaggttctccaagccagcacccatgttcctggatgactcctttcgcaagtgggctagaatccgggagttcgtgccgccttttgggatcaaaggtcaagacaatctgatcaaagccatcttgtcagtcaccaaagagtaccgcctgacccctgccttggacagcctccgctgccgccgctgcatcatcgtgggcaatggaggcgttcttgccaacaagtctctggggtcacgaattgacgactatgacattgtggtgagactgaattcagcaccagtgaaaggctttgagaaggacgtgggcagcaaaacgacactgcgcatcacctaccccgagggygccatgcagcggcctgagcagtacgagcgcgattctctctttgtcctcgccggcttcaagtggcaggactttaagtggttgaaatacatcgtctacaaggagagagtgagtgcatcggatggcttctggaaatctgtggccactcgagtgcccaaggagccccctgagattcgaatcctcaacccatatttcatccaggaggccgccttcaccctcattggcctgcccttcaacaatggcctcatgggccgggggaacatccctacccttggcagtgtggcagtgaccatggcactacacggctgtgacgaggtggcagtcgcaggatttggctatgacatgagcacacccaacgcacccctgcactactatgagaccgttcgcatggcagccatcaaagagtcctggacgcacaatatccagcgagagaaagagtttctgcggaagctggtgaaagctcgcgtcatcactgatctaagcagtggcatctgagtgggcccagcacatggccatagaggcccaggcaccaccaggagcagcagccagcaccacctacacaggagtcttcagacccagagaaggacggtgccaagggccccaggggcagcaaggccttggtggagcagccagagctgtgcctgctcagcagccagtctcagagaccagcactcagcctcattcagcatgggtccttgatgccagagggccagcaggctcctggctgtgcccagcaggcccagcatgcaggtggtgggacactgggcagcaaggctgctgccggaatcacttctccartcagtgtttggtgtattaycattttgtgaatttgggtaggggggagggtagggataatttatttttaaataaggttggagatgtcaagttgggttcacttgccatgcaggaagaggcccactagagggcccatcaggcagtgttacctgttagctccctgtggggcaggagtgccaggaccagcctgtaccttgctgtggggctacaggatggtgggcaggatctcaagccagccccctccagctcatgacactgtttggcctttcttggggagaaggcggggtattcccactcaccagccctagctgtcccatgggraaaccctggagccatcccttyggagccaacaagaccgccccagggctatagcagaaagaactttaaagctcaggagggtgacgcccagctccgcctgctgggaagagctcccctccacagctgcagctgatscataggactaccgcaggcccggactcaccaacttgccacatgttytaggtttcagcaacaagactgccaggtggttggsttctgcctttagcctggaccaaagggaagtgaggcccaaggagcttacccaagctgtggcagccrtcccaggccacccccatggaagcaataaagctcttccctg

SEQ ID NO: 5104 - DNA, 2264 bp, Homo sapiens
ctccgcccgccgctgcgtccccactatggcggcgcccatgcagcccagcgcgttgtgggctcccgccggggtcccccgcggctgtcgccgccgcctacgccgctgcctccgccttcctgccccgcgtcgggycgggcgccacctcccccctgcctccctctccgctgtggtcatttaggaaatcgtaaatcatgtgaagatgggactcttggtatttgtgcgcaatctgctgctagccctctgcctctttctggtactgggatttttgtattattctgcgtggaagctacacttactccagtgggaggaggactccaattcagtggttctttcctttgactccgctggacaaacactaggctcagagtatgatcggttgggcttcctcctgaatctggactctaaactgcctgctgaattagccaccaagtacgcaaacttttcagagggagcttgcaagcctggctatgcttcagccttgatgacggccatcttcccccggttctccaagccagcacccatgttcctggatgactcctttcgcaagtgggctagaatccgggagttcgtgccgccttttgggatcaaaggtcaagacaatctgatcaaagccatcttgtcagtcaccaaagagtaccgcctgacccctgccttggacagcctccgctgccgccgctgcatcatcgtgggcaatggaggcgttcttgccaacaagtctctggggtcacgaattgacgactatgacattgtggtgagactgaattcagcaccagtgaaaggctttgagaaggacgtgggcagcaaaacgacactgcgcatcacctaccccgagggygccatgcagcggcctgagcagtacgagcgcgattctctctttgtcctcgccggcttcaagtggcaggactttaagtggttgaaatacatcgtctacaaggagagagtgagtgcatcggatggcttctggaaatctgtggccactcgagtgcccaaggagccccctgagattcgaatcctcaacccatatttcatccaggaggccgccttcaccctcattggcctgcccttcaacaatggcctcatgggccgggggaacatccctacccttggcagtgtggcagtgaccatggcactacacggctgtgacgaggtggcagtcgcaggatttggctatgacatgagcacacccaacgcacccctgcactactatgagaccgttcgcatggcagccatcaaagagtcctggacgcacaatatccagcgagagaaagagtttctgcggaagctggtgaaagctcgcgtcatcactgatctaagcagtggcatctgagtgggcccagcacatggccatagaggcccaggcaccaccaggagcagcagccagcaccacctacacaggagtcttcagacccagagaaggacggtgccaagggccccaggggcagcaaggccttggtggagcagccagagctgtgcctgctcagcagccagtctcagagaccagcactcagcctcattcagcatgggtccttgatgccagagggccagcaggctcctggctgtgcccagcaggcccagcatgcaggtggtgggacactgggcagcaaggctgctgccggaatcacttctccartcagtgtttggtgtattaycattttgtgaatttgggtaggggggagggtagggataatttatttttaaataaggttggagatgtcaagttgggttcacttgccatgcaggaagaggcccactagagggcccatcaggcagtgttacctgttagctccctgtggggcaggagtgccaggaccagcctgtaccttgctgtggggctacaggatggtgggcaggatctcaagccagccccctccagctcatgacactgtttggcctttcttggggagaaggcggggtattcccactcaccagccctagctgtcccatgggraaaccctggagccatcccttyggagccaacaagaccgccccagggctatagcagaaagaactttaaagctcaggagggtgacgcccagctccgcctgctgggaagagctcccctccacagctgcagctgatscataggactaccgcaggcccggactcaccaacttgccacatgttytaggtttcagcaacaagactgccaggtggttggsttctgcctttagcctggaccaaagggaagtgaggcccaaggagcttacccaagctgtggcagccrtcccaggccacccccatggaagcaataaagctcttccctg

SEQ ID NO: 5105 - DNA, 2095 bp, Homo sapiens
gtcatttaggaaatcgtaaatcatgtgaagatgggactcttggtatttgtgcgcaatctgctgctagccctctgcctctttctggtactgggatttttgtattattctgcgtggaagctacacttactccagtgggaggaggactccaattcagtggttctttcctttgactccgctggacaaacactaggctcagagtatgatcggttgggcttcctcctgaatctggactctaaactgcctgctgaattagccaccaagtacgcaaacttttcagagggagcttgcaagcctggctatgcttcagccttgatgacggccatcttcccccggttctccaagccagcacccatgttcctggatgactcctttcgcaagtgggctagaatccgggagttcgtgccgccttttgggatcaaaggtcaagacaatctgatcaaagccatcttgtcagtcaccaaagagtaccgcctgacccctgccttggacagcctccgctgccgccgctgcatcatcgtgggcaatggaggcgttcttgccaacaagtctctggggtcacgaattgacgactatgacattgtggtgagactgaattcagcaccagtgaaaggctttgagaaggacgtgggcagcaaaacgacactgcgcatcacctaccccgagggygccatgcagcggcctgagcagtacgagcgcgattctctctttgtcctcgccggcttcaagtggcaggactttaagtggttgaaatacatcgtctacaaggagagagtgagtgcatcggatggcttctggaaatctgtggccactcgagtgcccaaggagccccctgagattcgaatcctcaacccatatttcatccaggaggccgccttcaccctcattggcctgcccttcaacaatggcctcatgggccgggggaacatccctacccttggcagtgtggcagtgaccatggcactacacggctgtgacgaggtggcagtcgcaggatttggctatgacatgagcacacccaacgcacccctgcactactatgagaccgttcgcatggcagccatcaaagagtcctggacgcacaatatccagcgagagaaagagtttctgcggaagctggtgaaagctcgcgtcatcactgatctaagcagtggcatctgagtgggcccagcacatggccatagaggcccaggcaccaccaggagcagcagccagcaccacctacacaggagtcttcagacccagagaaggacggtgccaagggccccaggggcagcaaggccttggtggagcagccagagctgtgcctgctcagcagccagtctcagagaccagcactcagcctcattcagcatgggtccttgatgccagagggccagcaggctcctggctgtgcccagcaggcccagcatgcaggtggtgggacactgggcagcaaggctgctgccggaatcacttctccartcagtgtttggtgtattaycattttgtgaatttgggtaggggggagggtagggataatttatttttaaataaggttggagatgtcaagttgggttcacttgccatgcaggaagaggcccactagagggcccatcaggcagtgttacctgttagctccctgtggggcaggagtgccaggaccagcctgtaccttgctgtggggctacaggatggtgggcaggatctcaagccagccccctccagctcatgacactgtttggcctttcttggggagaaggcggggtattcccactcaccagccctagctgtcccatgggraaaccctggagccatcccttyggagccaacaagaccgccccagggctatagcagaaagaactttaaagctcaggagggtgacgcccagctccgcctgctgggaagagctcccctccacagctgcagctgatscataggactaccgcaggcccggactcaccaacttgccacatgttytaggtttcagcaacaagactgccaggtggttggsttctgcctttagcctggaccaaagggaagtgaggcccaaggagcttacccaagctgtggcagccrtcccaggccacccccatggaagcaataaagctcttccctg

SEQ ID NO: 5106 - DNA, 1433 bp, Homo sapiens
atagcaatgccagtcaacagggcccacaaggatgctgacctgyggtcctcacatgacaagatgctggcgcagcccctcaaagacagcgatgttgaggtttacaacatcattaaggagagtaccrgcagagggctggattggagctgattacctcggagaatttcgccagctgggcagttttggaggccctaggctcttgcttaaataacaaatactctgaggggtacccgggccagagatactaaggcaggactgactttactcatgagctggagaccctctgtcagaagcgagccctgcaggcctataagctggacccacagtgctggggggtcaacgtccagccttgctcaggctcccctgcaaactttgagtgtaactgccctggtggaaacccatgggtgcatcatgggcctggacctgccagatgggggtcacctgacccacgggttcatgacagacaagaagaaaatctctgccacgtccatcttctttgaatctatgccctataaggtgaacccagacactggctacatcaactatgaccagctggaggagaacacccgcctcttccacccgaagctgatcagtgcaggaaccagctgctcctcctaaaacctggactatgccccgctgcagaaaaactgcagatgagaatggggtgtatctcatggtggacatggcacatatcagcaggctggtggcagctggcgtggtgccctccccatttgaacactgccaccamcactcacaagaacctgagaggctgccaagtccgcacgatcttctacaggaaaggagggcaaagtatggatcccaagactggcaaagagattctgtacaacctggagtctctcatcaactctgctgtgttccctggccttcagggaggtccccacaaccacaccattgctggggttgctgtggccctgaagcaagctatgactctggaatttgaagtttatcagcaccatgtggtggccaactgcagagctctgtctgaggcactgacggagctsggctaccaaacagtcacaggttgttctgataaacatttgatcctcgtggatctccattcaatcaaaggcacagatggcagaagggctgagaaggtcctagaagcctgttctattgcctgcaacaagaacacctgcccagatgatagaaacactctacggcccagtggactgcggctggggaacccagcactgacatctcttggacttttggaaaaaggcttccaaaaggtagcccactttatccacagagggatagagctaaccctgcagatccagagcaacgctggcatcagagccaccctgaaagagttcaaggagagactagcagggcataaataccaggggtgtgtgcaggctctccaggaggaggttgagagcttcactctcttccctctgcctggcctgcctgacttc

SEQ ID NO: 5107 - DNA, 7685 bp, Homo sapiens
gcgtgtgtggactgaaacccaaaagccagaaactctctgcatgtgtccctcatggagccatatggtctctagtctctgtttttcaaaatttgcaggactgatgactgattggacagtggtgcaggagggaaggtctctgcatgtcagtgattaaattgctgaagatgccactgcctgagacgggcagtattgaaggaaggagtggaggccctggtgcccggcccttggtgctgagtatccagcaagagtgaccggggtgaagaagcaaagactcggttgattgtcctgggctgtggctggctgtggagctagagccctggatggcccctgagccagccccagggaggacgatggtgccccttgtgcctgcactggtgatgcttggtttggtggcaggcgcccatggtgacagcaaacctgtcttcattaaagtccctgaggaccagactgggctgtcaggaggggtagcctccttcgtgtgccaagctacaggagaacccaagccgcgcatcacatggatgaagaaggggaagaaagtcagctcccagcgcttyraggtcattgagtttgatgatggggcagggtcagtgcttcggatccagccattgcgggtgcagcgagatgaagccatctatgagtgtacagctactaacagcctgggtgagatcaacactagtgccaagctctcagtgctcgaagaggaacagctgccccctgggttcccttccatcgacatggggcctcagctgaaggtggtggagaaggcacgcacagccaccatgctatgtgcygcaggcggaaatccagaccctgagatttcttggttcaaggacttccttcctgtagaccctgccacgagcaacggccgcatcaagcagctgcgttcaggtgccttgcagatagagagcagtgaggaatccgaccaaggcaagtacgagtgtgtggcgaccaactcggcaggcacacgttactcagcccctgcgaacctgtatgtgcgagtgcgccgcgtggctcctcgtttctccatccctcccagcagccaggaggtgatgccaggcggcagcgtgaacctgacatgcgtggcagtgggtgcacccatgccctacgtgaagtggatgatgggggccgaggagctcaccaaggaggatgagatgccagttggccgcaacgtcctggagctcagcaatgtcgtacgctctgccaactacacctgtgtggccatctcctcgctgggcatgatcgaggccacagcccaggtcacagtgaaagctcttccaaagcctccgattgatcttgtggtgacagagacaactgccaccagtgtcaccctcacctgggactctgggaactcggagcctgtaacctactatggcatccagtaccgcgcagcgggcacggagggcccctttcaggaggtggatggtgtggccacyacccgctacagcattggcggcctcagccctttctcggaatatgccttccgcgtgctggcggtgaacagcatcgggcgagggcygcccagcgaggcagtgcgggcacgcacgggagaacaggygccctccagcccaccgcgccgcgtgcaggcacgcatgctgagcgccagcaccatgctggtgcagtgggagcctcccgaggagcccaacggcctggtgcggggataccgcgtctrctatactccggactcccgccgccccccgaacgcctggcacaagcacaacaccgacgcggggctcctcacgaccgtgggcagcctgctgcctggcatcacctacagcctgcgcgtgcttgccttcaccgccgtgggcgatggccctcccagccccaccatccaggtcaagacgcagcagggagtgcctgcccagcccgcggacttccaggccgaggtggagtcggacaccaggatycagctctcgtggctgctgccccctcaggagcggatcatcatgtatgaactggtgtactgggcggcagaggacgaagaccaacagcacaaggtgaccttcracccaacctcctcctacacactagaggacctgaagcctgacacactctaccgcttccagctggctgcacgctcggatatgggggtgggcgtcttcacccccaccattgaggcccgcacagcmcagtccaccccctccgcccctccccagaaggtgatgtgtgtgagcatgggctccaccacggtccgggtaagttgggtcccgccgcctgccgacagccgcaacggcgttatcacccagtactcygtggcctacgaggcggtggacggcgaggaccgcgggcggcatgtggtggatggcatcagccgtgagcactccagctgggacctggtgggcctggagaagtggacggagtaccgggtgtgggtgcgggcacacacagacgtgggccccggccccgagagcagcccggtgctggtgcgcaccgatgaggacgtgcccagcgggcctccgcggaaggtggaggtggagccactgaactccactgctgtgcatgtctactggaagctgcctgtccccagcaagcagcatggccagatccgcggctaccaggtcacctacgtgcggctggagaatggcgagccccgtggactccccatcatccaagacgtcatgctagccgaggcccagtggcggccagaggagtccgaggactatgaaaccactatcagcggcctgaccccggagaccacctactccgttactgttgctgcctataccaccaagggggatggtgcccgcagcaagcccaaaattgtcactacaacaggtgcagtcccaggccggcccaccatgatgatcagcaccacggccatgaacactgcgctgctccagtggcacccacccaaggaactgcctggcgagctgctgggctaccggctgcagtactgccgggccgacgaggcgcggcccaacaccatagatttcggcaaggatgaccagcacttcacagtcaccggcctgcacaaggggaccacctacatcttccggcttgctgccaagaaccgggctggcttgggtgaggagttcgagaaggagatcaggacccccgaggacctgcccagcggcttcccccaaaacctgcatgtgacaggactgaccacgtctaccacagaactggcctgggacccgccagtgctggcggagaggaacgggcgcatcatcagctacaccgtggtgttccgagacatcaacagccaacaggagctgcagaacatcacgacagacacccgctttacccttactggcctcaagccagacaccacttaygacatcaaggtccgcgcatggaccagcaaaggctctggcccactcagccccagcatccagtcccggaccatgccggtggagcaagtgtttgccaagaacttccgggtggcggctgcaatgaagacgtctgtgctgctcagctgggaggttcccgactcctataagtcagctgtgccctttaagattctgtacaatgggcagagtgtggaggtggacgggcactcgatgcggaagctgatcgcagacctgcagcccaacacagagtactcgtttgtgctgatgaaccgtggcagcagcgcagggggcctgcagcacctggtgtccatccgcacagcccccgacctcctgcctcacaagccgctgcctgcctctgcctacatagaggacggccgcttcgatctctccatgccccatgtgcaagacccctcgcttgtcaggtggttctacattgttgtggtrcccattgaccgtgtgggcgggagcatgctgacgccaaggtggagcacacccgaggaactggagctggacgagcttctagaagccatcgagcaaggcggagaggagcagcggcggcggcggcggcaggcagaacgtctgaagccatatgtggctgctcaactggatgtgctcccggagacytttaccttgggggacaagaagaactaccggggcttctacaaccggccyctgtctccggacttgagctaccagtgctttgtgcttgcctccttgaaggaacccatggaccagaagcgctatgcctccagcccctactcggatgagatcgtggtccaggtgacaccagcccagcagcaggaggagccggagatgctgtgggtgacgggtcccgtgctggcagtcatcctcatcatcctcattgtcatcgccatcctcttgttcaaaaggaaaaggacccactctccgtcctctaaggatgagcagtcgatcggactgaaggactccttgctggcccactcctctgaccctgtggagatgcggaggctcaactaccagaccccaggtatgcgagaccacccacccatccccatcaccgacctggcggacaacatcgagcgcctcaaagccaacgatggcctcaagttctcccaggagtatgagtccatcgaccctggacagcagttcacgtgggagaattcaaacctggaggtgaacaagcccaagaaccgctatgcgaatgtcatcgcctacgaccactctcgagtcatccttacctctatcgatggcgtccccgggagtgactacatcaatgccaactacatcgatggctaccgcaagcagaatgcctacatcgccacgcagggccccctgcccgagaccatgggygatttctggagratggtgtgggaacagcgcacggccactgtggtcatgatgacacggctggaggagaagtcccgggtaaaatgtgatcagtactggccagcccgtggcaccgagacctgtggccttattcaggtgaccctgttggacacagtggagctggccacatacactgtgcgcaccttcgcactccacaagagtggctccagtgagaagcgygagctgcgtcagtttcagttcatggcctggccagaccatggagttcctgagtacccaactcccatcctggccttcctacgacgggtcaaggcctgcaaccccctagacgcagggcccatggtggtgcactgcagcgcgggcgtgggccgcaccggctgcttcatcgtgattgatgccatgttggagcggatgaagcacgagaagacggtggacatctatggccacgtgacctgcatgcgatcacagaggaactacatggtgcagacggaggaccagtacgtgttcatccatgaggcgctgctggaggctgccacgtgcggccacacagaggtgcctgcccgcaacctgtatgcccacatccagaagctgggccaagtgcctccaggggagagtgtgaccgccatggagctcgagttcaagttgctggccagctccaaggcccacacgtcccgcttcatcagcgcyaacctgccctgcaacaagttcaagaaccggctggtgaacatcatgccctacgaattgacccgtgtgtgtctgcagcccatccgtggtgtggagggctctgactacatcaatgccagcttcctggatggttatagacagcagaaggcctacatagctacacaggggcctctggcagagagcaccgaggacttctggcgcatgctatgggagcacaattccaccatcatcgtcatgctgaccaagcttcgggagatgggcagggagaaatgccaccagtactggccagcagagcgctctgctcgctaccagtactttgttgttgacccgatggctgagtacaacatgccccagtatatcctgcgtgagttcaaggtcacggatgcccgggatgggcagtcaaggacaatccggcagttccagttcacagactggccagagcagggcgtgcccaagacaggcgagggattcattgacttcatcgggcaggtgcataagaccaaggagcagtttggacaggatgggcctatcacggtgcactgcagtgctggcgtgggccgcaccggggtgttcatcactctgagcatcgtcctggagcgcatgcgctaygagggcgtggtcgacatgtttcagaccgtgaagaccctgcgtacacagcgtcctgccatggtgcagacagaggaccagtatcagctgtgctaccgtgcggccctggagtacctcggcagctttgaccactatgcaacgtaactaccgctcccctctcctccgccacccccgccgtggggctccggaggggacccagctcctctgagccataccgaccatcgtccagccctcctacgcagatgctgtcactggcagagcacagcccacggggatcacagcgtttcaggaacgttgccacaccaatcagagagcctagaacatccctgggcaagtggatggcccagcaggcaggcactgtggcccttctgtccaccagacccacctggagcccgcttcaagctctctgttgcgctcccgcatttctcatgcttcttctcatggggtggggttggggcaaagcctcctttttaatacattaagtggggtagactgagggattttagcctcttccctctgatttttcctttcgcgaatccgtatctgcagaatgggccactgtaggggttggggtttattttgttttgtttttttttttcttgatttgtatgacttctgctgaaggacagaacattgccttcctcgtgcagagctggggctgccagcctgagcggaggctcggccgtgggccgggaggcagtgctgatccggctgctcctccagcccttcagacgagatcctgtttcagctaaatgcagggaaactcaatgtttttttaagttttgttttccctttaaagcctttttttaggccacattgacagtggtgggcggggagaagatagggaacactcatccctggtcgtctatcccagtgtgtgtttaacattcacagcccagaaccacagatgtgtctgggagagcctggcaaggcattcctcatcaccatcgtgtttgcaaaggttaaaacaaaaacaaaaaaccacaaaaataaaaaacaaaaaaaacaaaaaacccragaaaaaaaaaaagagtcagcccttggcttctgcttcaaaccctcaagaggggaagcaactccgtgtgcctggggttcccgagggagctgctggctgacctgggcccacagagcctggctttggtccccagcattgcagtatggtgtggtgtttgtaggctgtggggtctggctgtgtggccaaggtgaatagcacaggttagggtgtgtgccacaccccatgcacctcagggccaagcgggggcgtggctggcctttcaggtccaggccagtgggcctggtagcacatgtctgtcctcagagcaggggccagatgattttcctccctggtttgcagctgttttcaaagcccccgataatcgctcttttccactccaagatgccctcataaaccaatgtggcaagactactggacttctatcaatggtactctaatcagtccttattatcccagcttgctgaggggcagggagagcgcctcttcctctgggcagcgctatctagataggtaagtgggggcggggaagggtgcatagctgttttagctgagggacgtggtgccgacgtccccaaacctagctaggctaagtcaagatcaacattccagggttggtaatgttggatgatgaaacattcatttttaccttgtggatgctagtgctgtagagttcmctgttgtacacagtctgttttctatttgttaagaaaaactacagcatcattgcataattcttgatggtaataaatttgaataatcagatttcttac

SEQ ID NO: 5108 - DNA, 7755 bp, Homo sapiens
ggcgccgccgggggcgcgcacggcaggggcaggggcgcgggcgcgagcgcgaggggagcgcgcggctggagctggcgcgggagcggcgggagcggtggcggcggcagaggcggcggctccagcttcggctccggctcgggctcgggctccggctccggctccggctccggctccagctcgggtggcggtggcgggagcgggaccaggtggaggcggcggcggcagaggagtgggagcagcggccctagcggcttgcggggggacatgcggaccgacggcccctggataggcggaaggagtggaggccctggtgcccggcccttggtgctgagtatccagcaagagtgaccggggtgaagaagcaaagactcggttgattgtcctgggctgtggctggctgtggagctagagccctggatggcccctgagccagccccagggaggacgatggtgccccttgtgcctgcactggtgatgcttggtttggtggcaggcgcccatggtgacagcaaacctgtcttcattaaagtccctgaggaccagactgggctgtcaggaggggtagcctccttcgtgtgccaagctacaggagaacccaagccgcgcatcacatggatgaagaaggggaagaaagtcagctcccagcgcttyraggtcattgagtttgatgatggggcagggtcagtgcttcggatccagccattgcgggtgcagcgagatgaagccatctatgagtgtacagctactaacagcctgggtgagatcaacactagtgccaagctctcagtgctcgaagaggaacagctgccccctgggttcccttccatcgacatggggcctcagctgaaggtggtggagaaggcacgcacagccaccatgctatgtgcygcaggcggaaatccagaccctgagatttcttggttcaaggacttccttcctgtagaccctgccacgagcaacggccgcatcaagcagctgcgttcaggtgccttgcagatagagagcagtgaggaatccgaccaaggcaagtacgagtgtgtggcgaccaactcggcaggcacacgttactcagcccctgcgaacctgtatgtgcgagtgcgccgcgtggctcctcgtttctccatccctcccagcagccaggaggtgatgccaggcggcagcgtgaacctgacatgcgtggcagtgggtgcacccatgccctacgtgaagtggatgatgggggccgaggagctcaccaaggaggatgagatgccagttggccgcaacgtcctggagctcagcaatgtcgtacgctctgccaactacacctgtgtggccatctcctcgctgggcatgatcgaggccacagcccaggtcacagtgaaagctcttccaaagcctccgattgatcttgtggtgacagagacaactgccaccagtgtcaccctcacctgggactctgggaactcggagcctgtaacctactatggcatccagtaccgcgcagcgggcacggagggcccctttcaggaggtggatggtgtggccacyacccgctacagcattggcggcctcagccctttctcggaatatgccttccgcgtgctggcggtgaacagcatcgggcgagggcygcccagcgaggcagtgcgggcacgcacgggagaacaggygccctccagcccaccgcgccgcgtgcaggcacgcatgctgagcgccagcaccatgctggtgcagtgggagcctcccgaggagcccaacggcctggtgcggggataccgcgtctrctatactccggactcccgccgccccccgaacgcctggcacaagcacaacaccgacgcggggctcctcacgaccgtgggcagcctgctgcctggcatcacctacagcctgcgcgtgcttgccttcaccgccgtgggcgatggccctcccagccccaccatccaggtcaagacgcagcagggagtgcctgcccagcccgcggacttccaggccgaggtggagtcggacaccaggatycagctctcgtggctgctgccccctcaggagcggatcatcatgtatgaactggtgtactgggcggcagaggacgaagaccaacagcacaaggtgaccttcracccaacctcctcctacacactagaggacctgaagcctgacacactctaccgcttccagctggctgcacgctcggatatgggggtgggcgtcttcacccccaccattgaggcccgcacagcmcagtccaccccctccgcccctccccagaaggtgatgtgtgtgagcatgggctccaccacggtccgggtaagttgggtcccgccgcctgccgacagccgcaacggcgttatcacccagtactcygtggcctacgaggcggtggacggcgaggaccgcgggcggcatgtggtggatggcatcagccgtgagcactccagctgggacctggtgggcctggagaagtggacggagtaccgggtgtgggtgcgggcacacacagacgtgggccccggccccgagagcagcccggtgctggtgcgcaccgatgaggacgtgcccagcgggcctccgcggaaggtggaggtggagccactgaactccactgctgtgcatgtctactggaagctgcctgtccccagcaagcagcatggccagatccgcggctaccaggtcacctacgtgcggctggagaatggcgagccccgtggactccccatcatccaagacgtcatgctagccgaggcccaggaaaccactatcagcggcctgaccccggagaccacctactccgttactgttgctgcctataccaccaagggggatggtgcccgcagcaagcccaaaattgtcactacaacaggtgcagtcccaggccggcccaccatgatgatcagcaccacggccatgaacactgcgctgctccagtggcacccacccaaggaactgcctggcgagctgctgggctaccggctgcagtactgccgggccgacgaggcgcggcccaacaccatagatttcggcaaggatgaccagcacttcacagtcaccggcctgcacaaggggaccacctacatcttccggcttgctgccaagaaccgggctggcttgggtgaggagttcgagaaggagatcaggacccccgaggacctgcccagcggcttcccccaaaacctgcatgtgacaggactgaccacgtctaccacagaactggcctgggacccgccagtgctggcggagaggaacgggcgcatcatcagctacaccgtggtgttccgagacatcaacagccaacaggagctgcagaacatcacgacagacacccgctttacccttactggcctcaagccagacaccacttaygacatcaaggtccgcgcatggaccagcaaaggctctggcccactcagccccagcatccagtcccggaccatgccggtggagcaagtgtttgccaagaacttccgggtggcggctgcaatgaagacgtctgtgctgctcagctgggaggttcccgactcctataagtcagctgtgccctttaagattctgtacaatgggcagagtgtggaggtggacgggcactcgatgcggaagctgatcgcagacctgcagcccaacacagagtactcgtttgtgctgatgaaccgtggcagcagcgcagggggcctgcagcacctggtgtccatccgcacagcccccgacctcctgcctcacaagccgctgcctgcctctgcctacatagaggacggccgcttcgatctctccatgccccatgtgcaagacccctcgcttgtcaggtggttctacattgttgtggtrcccattgaccgtgtgggcgggagcatgctgacgccaaggtggagcacacccgaggaactggagctggacgagcttctagaagccatcgagcaaggcggagaggagcagcggcggcggcggcggcaggcagaacgtctgaagccatatgtggctgctcaactggatgtgctcccggagacytttaccttgggggacaagaagaactaccggggcttctacaaccggccyctgtctccggacttgagctaccagtgctttgtgcttgcctccttgaaggaacccatggaccagaagcgctatgcctccagcccctactcggatgagatcgtggtccaggtgacaccagcccagcagcaggaggagccggagatgctgtgggtgacgggtcccgtgctggcagtcatcctcatcatcctcattgtcatcgccatcctcttgttcaaaaggaaaaggacccactctccgtcctctaaggatgagcagtcgatcggactgaaggactccttgctggcccactcctctgaccctgtggagatgcggaggctcaactaccagaccccaggtatgcgagaccacccacccatccccatcaccgacctggcggacaacatcgagcgcctcaaagccaacgatggcctcaagttctcccaggagtatgagtccatcgaccctggacagcagttcacgtgggagaattcaaacctggaggtgaacaagcccaagaaccgctatgcgaatgtcatcgcctacgaccactctcgagtcatccttacctctatcgatggcgtccccgggagtgactacatcaatgccaactacatcgatggctaccgcaagcagaatgcctacatcgccacgcagggccccctgcccgagaccatgggygatttctggagratggtgtgggaacagcgcacggccactgtggtcatgatgacacggctggaggagaagtcccgggtaaaatgtgatcagtactggccagcccgtggcaccgagacctgtggccttattcaggtgaccctgttggacacagtggagctggccacatacactgtgcgcaccttcgcactccacaagagtggctccagtgagaagcgygagctgcgtcagtttcagttcatggcctggccagaccatggagttcctgagtacccaactcccatcctggccttcctacgacgggtcaaggcctgcaaccccctagacgcagggcccatggtggtgcactgcagcgcgggcgtgggccgcaccggctgcttcatcgtgattgatgccatgttggagcggatgaagcacgagaagacggtggacatctatggccacgtgacctgcatgcgatcacagaggaactacatggtgcagacggaggaccagtacgtgttcatccatgaggcgctgctggaggctgccacgtgcggccacacagaggtgcctgcccgcaacctgtatgcccacatccagaagctgggccaagtgcctccaggggagagtgtgaccgccatggagctcgagttcaagttgctggccagctccaaggcccacacgtcccgcttcatcagcgcyaacctgccctgcaacaagttcaagaaccggctggtgaacatcatgccctacgaattgacccgtgtgtgtctgcagcccatccgtggtgtggagggctctgactacatcaatgccagcttcctggatggttatagacagcagaaggcctacatagctacacaggggcctctggcagagagcaccgaggacttctggcgcatgctatgggagcacaattccaccatcatcgtcatgctgaccaagcttcgggagatgggcagggagaaatgccaccagtactggccagcagagcgctctgctcgctaccagtactttgttgttgacccgatggctgagtacaacatgccccagtatatcctgcgtgagttcaaggtcacggatgcccgggatgggcagtcaaggacaatccggcagttccagttcacagactggccagagcagggcgtgcccaagacaggcgagggattcattgacttcatcgggcaggtgcataagaccaaggagcagtttggacaggatgggcctatcacggtgcactgcagtgctggcgtgggccgcaccggggtgttcatcactctgagcatcgtcctggagcgcatgcgctaygagggcgtggtcgacatgtttcagaccgtgaagaccctgcgtacacagcgtcctgccatggtgcagacagaggaccagtatcagctgtgctaccgtgcggccctggagtacctcggcagctttgaccactatgcaacgtaactaccgctcccctctcctccgccacccccgccgtggggctccggaggggacccagctcctctgagccataccgaccatcgtccagccctcctacgcagatgctgtcactggcagagcacagcccacggggatcacagcgtttcaggaacgttgccacaccaatcagagagcctagaacatccctgggcaagtggatggcccagcaggcaggcactgtggcccttctgtccaccagacccacctggagcccgcttcaagctctctgttgcgctcccgcatttctcatgcttcttctcatggggtggggttggggcaaagcctcctttttaatacattaagtggggtagactgagggattttagcctcttccctctgatttttcctttcgcgaatccgtatctgcagaatgggccactgtaggggttggggtttattttgttttgtttttttttttcttgatttgtatgacttctgctgaaggacagaacattgccttcctcgtgcagagctggggctgccagcctgagcggaggctcggccgtgggccgggaggcagtgctgatccggctgctcctccagcccttcagacgagatcctgtttcagctaaatgcagggaaactcaatgtttttttaagttttgttttccctttaaagcctttttttaggccacattgacagtggtgggcggggagaagatagggaacactcatccctggtcgtctatcccagtgtgtgtttaacattcacagcccagaaccacagatgtgtctgggagagcctggcaaggcattcctcatcaccatcgtgtttgcaaaggttaaaacaaaaacaaaaaaccacaaaaataaaaaacaaaaaaaacaaaaaacccragaaaaaaaaaaagagtcagcccttggcttctgcttcaaaccctcaagaggggaagcaactccgtgtgcctggggttcccgagggagctgctggctgacctgggcccacagagcctggctttggtccccagcattgcagtatggtgtggtgtttgtaggctgtggggtctggctgtgtggccaaggtgaatagcacaggttagggtgtgtgccacaccccatgcacctcagggccaagcgggggcgtggctggcctttcaggtccaggccagtgggcctggtagcacatgtctgtcctcagagcaggggccagatgattttcctccctggtttgcagctgttttcaaagcccccgataatcgctcttttccactccaagatgccctcataaaccaatgtggcaagactactggacttctatcaatggtactctaatcagtccttattatcccagcttgctgaggggcagggagagcgcctcttcctctgggcagcgctatctagataggtaagtgggggcggggaagggtgcatagctgttttagctgagggacgtggtgccgacgtccccaaacctagctaggctaagtcaagatcaacattccagggttggtaatgttggatgatgaaacattcatttttaccttgtggatgctagtgctgtagagttcmctgttgtacacagtctgttttctatttgttaagaaaaactacagcatcattgcataattcttgatggtaataaatttgaataatcagatttcttac

SEQ ID NO: 5109 - DNA, 7782 bp, Homo sapiens
ggcgccgccgggggcgcgcacggcaggggcaggggcgcgggcgcgagcgcgaggggagcgcgcggctggagctggcgcgggagcggcgggagcggtggcggcggcagaggcggcggctccagcttcggctccggctcgggctcgggctccggctccggctccggctccggctccagctcgggtggcggtggcgggagcgggaccaggtggaggcggcggcggcagaggagtgggagcagcggccctagcggcttgcggggggacatgcggaccgacggcccctggataggcggaaggagtggaggccctggtgcccggcccttggtgctgagtatccagcaagagtgaccggggtgaagaagcaaagactcggttgattgtcctgggctgtggctggctgtggagctagagccctggatggcccctgagccagccccagggaggacgatggtgccccttgtgcctgcactggtgatgcttggtttggtggcaggcgcccatggtgacagcaaacctgtcttcattaaagtccctgaggaccagactgggctgtcaggaggggtagcctccttcgtgtgccaagctacaggagaacccaagccgcgcatcacatggatgaagaaggggaagaaagtcagctcccagcgcttyraggtcattgagtttgatgatggggcagggtcagtgcttcggatccagccattgcgggtgcagcgagatgaagccatctatgagtgtacagctactaacagcctgggtgagatcaacactagtgccaagctctcagtgctcgaagaggaacagctgccccctgggttcccttccatcgacatggggcctcagctgaaggtggtggagaaggcacgcacagccaccatgctatgtgcygcaggcggaaatccagaccctgagatttcttggttcaaggacttccttcctgtagaccctgccacgagcaacggccgcatcaagcagctgcgttcaggtgccttgcagatagagagcagtgaggaatccgaccaaggcaagtacgagtgtgtggcgaccaactcggcaggcacacgttactcagcccctgcgaacctgtatgtgcgagtgcgccgcgtggctcctcgtttctccatccctcccagcagccaggaggtgatgccaggcggcagcgtgaacctgacatgcgtggcagtgggtgcacccatgccctacgtgaagtggatgatgggggccgaggagctcaccaaggaggatgagatgccagttggccgcaacgtcctggagctcagcaatgtcgtacgctctgccaactacacctgtgtggccatctcctcgctgggcatgatcgaggccacagcccaggtcacagtgaaagctcttccaaagcctccgattgatcttgtggtgacagagacaactgccaccagtgtcaccctcacctgggactctgggaactcggagcctgtaacctactatggcatccagtaccgcgcagcgggcacggagggcccctttcaggaggtggatggtgtggccacyacccgctacagcattggcggcctcagccctttctcggaatatgccttccgcgtgctggcggtgaacagcatcgggcgagggcygcccagcgaggcagtgcgggcacgcacgggagaacaggygccctccagcccaccgcgccgcgtgcaggcacgcatgctgagcgccagcaccatgctggtgcagtgggagcctcccgaggagcccaacggcctggtgcggggataccgcgtctrctatactccggactcccgccgccccccgaacgcctggcacaagcacaacaccgacgcggggctcctcacgaccgtgggcagcctgctgcctggcatcacctacagcctgcgcgtgcttgccttcaccgccgtgggcgatggccctcccagccccaccatccaggtcaagacgcagcagggagtgcctgcccagcccgcggacttccaggccgaggtggagtcggacaccaggatycagctctcgtggctgctgccccctcaggagcggatcatcatgtatgaactggtgtactgggcggcagaggacgaagaccaacagcacaaggtgaccttcracccaacctcctcctacacactagaggacctgaagcctgacacactctaccgcttccagctggctgcacgctcggatatgggggtgggcgtcttcacccccaccattgaggcccgcacagcmcagtccaccccctccgcccctccccagaaggtgatgtgtgtgagcatgggctccaccacggtccgggtaagttgggtcccgccgcctgccgacagccgcaacggcgttatcacccagtactcygtggcctacgaggcggtggacggcgaggaccgcgggcggcatgtggtggatggcatcagccgtgagcactccagctgggacctggtgggcctggagaagtggacggagtaccgggtgtgggtgcgggcacacacagacgtgggccccggccccgagagcagcccggtgctggtgcgcaccgatgaggacgtgcccagcgggcctccgcggaaggtggaggtggagccactgaactccactgctgtgcatgtctactggaagctgcctgtccccagcaagcagcatggccagatccgcggctaccaggtcacctacgtgcggctggagaatggcgagccccgtggactccccatcatccaagacgtcatgctagccgaggcccagtggcggccagaggagtccgaggactatgaaaccactatcagcggcctgaccccggagaccacctactccgttactgttgctgcctataccaccaagggggatggtgcccgcagcaagcccaaaattgtcactacaacaggtgcagtcccaggccggcccaccatgatgatcagcaccacggccatgaacactgcgctgctccagtggcacccacccaaggaactgcctggcgagctgctgggctaccggctgcagtactgccgggccgacgaggcgcggcccaacaccatagatttcggcaaggatgaccagcacttcacagtcaccggcctgcacaaggggaccacctacatcttccggcttgctgccaagaaccgggctggcttgggtgaggagttcgagaaggagatcaggacccccgaggacctgcccagcggcttcccccaaaacctgcatgtgacaggactgaccacgtctaccacagaactggcctgggacccgccagtgctggcggagaggaacgggcgcatcatcagctacaccgtggtgttccgagacatcaacagccaacaggagctgcagaacatcacgacagacacccgctttacccttactggcctcaagccagacaccacttaygacatcaaggtccgcgcatggaccagcaaaggctctggcccactcagccccagcatccagtcccggaccatgccggtggagcaagtgtttgccaagaacttccgggtggcggctgcaatgaagacgtctgtgctgctcagctgggaggttcccgactcctataagtcagctgtgccctttaagattctgtacaatgggcagagtgtggaggtggacgggcactcgatgcggaagctgatcgcagacctgcagcccaacacagagtactcgtttgtgctgatgaaccgtggcagcagcgcagggggcctgcagcacctggtgtccatccgcacagcccccgacctcctgcctcacaagccgctgcctgcctctgcctacatagaggacggccgcttcgatctctccatgccccatgtgcaagacccctcgcttgtcaggtggttctacattgttgtggtrcccattgaccgtgtgggcgggagcatgctgacgccaaggtggagcacacccgaggaactggagctggacgagcttctagaagccatcgagcaaggcggagaggagcagcggcggcggcggcggcaggcagaacgtctgaagccatatgtggctgctcaactggatgtgctcccggagacytttaccttgggggacaagaagaactaccggggcttctacaaccggccyctgtctccggacttgagctaccagtgctttgtgcttgcctccttgaaggaacccatggaccagaagcgctatgcctccagcccctactcggatgagatcgtggtccaggtgacaccagcccagcagcaggaggagccggagatgctgtgggtgacgggtcccgtgctggcagtcatcctcatcatcctcattgtcatcgccatcctcttgttcaaaaggaaaaggacccactctccgtcctctaaggatgagcagtcgatcggactgaaggactccttgctggcccactcctctgaccctgtggagatgcggaggctcaactaccagaccccaggtatgcgagaccacccacccatccccatcaccgacctggcggacaacatcgagcgcctcaaagccaacgatggcctcaagttctcccaggagtatgagtccatcgaccctggacagcagttcacgtgggagaattcaaacctggaggtgaacaagcccaagaaccgctatgcgaatgtcatcgcctacgaccactctcgagtcatccttacctctatcgatggcgtccccgggagtgactacatcaatgccaactacatcgatggctaccgcaagcagaatgcctacatcgccacgcagggccccctgcccgagaccatgggygatttctggagratggtgtgggaacagcgcacggccactgtggtcatgatgacacggctggaggagaagtcccgggtaaaatgtgatcagtactggccagcccgtggcaccgagacctgtggccttattcaggtgaccctgttggacacagtggagctggccacatacactgtgcgcaccttcgcactccacaagagtggctccagtgagaagcgygagctgcgtcagtttcagttcatggcctggccagaccatggagttcctgagtacccaactcccatcctggccttcctacgacgggtcaaggcctgcaaccccctagacgcagggcccatggtggtgcactgcagcgcgggcgtgggccgcaccggctgcttcatcgtgattgatgccatgttggagcggatgaagcacgagaagacggtggacatctatggccacgtgacctgcatgcgatcacagaggaactacatggtgcagacggaggaccagtacgtgttcatccatgaggcgctgctggaggctgccacgtgcggccacacagaggtgcctgcccgcaacctgtatgcccacatccagaagctgggccaagtgcctccaggggagagtgtgaccgccatggagctcgagttcaagttgctggccagctccaaggcccacacgtcccgcttcatcagcgcyaacctgccctgcaacaagttcaagaaccggctggtgaacatcatgccctacgaattgacccgtgtgtgtctgcagcccatccgtggtgtggagggctctgactacatcaatgccagcttcctggatggttatagacagcagaaggcctacatagctacacaggggcctctggcagagagcaccgaggacttctggcgcatgctatgggagcacaattccaccatcatcgtcatgctgaccaagcttcgggagatgggcagggagaaatgccaccagtactggccagcagagcgctctgctcgctaccagtactttgttgttgacccgatggctgagtacaacatgccccagtatatcctgcgtgagttcaaggtcacggatgcccgggatgggcagtcaaggacaatccggcagttccagttcacagactggccagagcagggcgtgcccaagacaggcgagggattcattgacttcatcgggcaggtgcataagaccaaggagcagtttggacaggatgggcctatcacggtgcactgcagtgctggcgtgggccgcaccggggtgttcatcactctgagcatcgtcctggagcgcatgcgctaygagggcgtggtcgacatgtttcagaccgtgaagaccctgcgtacacagcgtcctgccatggtgcagacagaggaccagtatcagctgtgctaccgtgcggccctggagtacctcggcagctttgaccactatgcaacgtaactaccgctcccctctcctccgccacccccgccgtggggctccggaggggacccagctcctctgagccataccgaccatcgtccagccctcctacgcagatgctgtcactggcagagcacagcccacggggatcacagcgtttcaggaacgttgccacaccaatcagagagcctagaacatccctgggcaagtggatggcccagcaggcaggcactgtggcccttctgtccaccagacccacctggagcccgcttcaagctctctgttgcgctcccgcatttctcatgcttcttctcatggggtggggttggggcaaagcctcctttttaatacattaagtggggtagactgagggattttagcctcttccctctgatttttcctttcgcgaatccgtatctgcagaatgggccactgtaggggttggggtttattttgttttgtttttttttttcttgatttgtatgacttctgctgaaggacagaacattgccttcctcgtgcagagctggggctgccagcctgagcggaggctcggccgtgggccgggaggcagtgctgatccggctgctcctccagcccttcagacgagatcctgtttcagctaaatgcagggaaactcaatgtttttttaagttttgttttccctttaaagcctttttttaggccacattgacagtggtgggcggggagaagatagggaacactcatccctggtcgtctatcccagtgtgtgtttaacattcacagcccagaaccacagatgtgtctgggagagcctggcaaggcattcctcatcaccatcgtgtttgcaaaggttaaaacaaaaacaaaaaaccacaaaaataaaaaacaaaaaaaacaaaaaacccragaaaaaaaaaaagagtcagcccttggcttctgcttcaaaccctcaagaggggaagcaactccgtgtgcctggggttcccgagggagctgctggctgacctgggcccacagagcctggctttggtccccagcattgcagtatggtgtggtgtttgtaggctgtggggtctggctgtgtggccaaggtgaatagcacaggttagggtgtgtgccacaccccatgcacctcagggccaagcgggggcgtggctggcctttcaggtccaggccagtgggcctggtagcacatgtctgtcctcagagcaggggccagatgattttcctccctggtttgcagctgttttcaaagcccccgataatcgctcttttccactccaagatgccctcataaaccaatgtggcaagactactggacttctatcaatggtactctaatcagtccttattatcccagcttgctgaggggcagggagagcgcctcttcctctgggcagcgctatctagataggtaagtgggggcggggaagggtgcatagctgttttagctgagggacgtggtgccgacgtccccaaacctagctaggctaagtcaagatcaacattccagggttggtaatgttggatgatgaaacattcatttttaccttgtggatgctagtgctgtagagttcmctgttgtacacagtctgttttctatttgttaagaaaaactacagcatcattgcataattcttgatggtaataaatttgaataatcagatttcttac

SEQ ID NO: 5110 - DNA, 7658 bp, Homo sapiens
gcgtgtgtggactgaaacccaaaagccagaaactctctgcatgtgtccctcatggagccatatggtctctagtctctgtttttcaaaatttgcaggactgatgactgattggacagtggtgcaggagggaaggtctctgcatgtcagtgattaaattgctgaagatgccactgcctgagacgggcagtattgaaggaaggagtggaggccctggtgcccggcccttggtgctgagtatccagcaagagtgaccggggtgaagaagcaaagactcggttgattgtcctgggctgtggctggctgtggagctagagccctggatggcccctgagccagccccagggaggacgatggtgccccttgtgcctgcactggtgatgcttggtttggtggcaggcgcccatggtgacagcaaacctgtcttcattaaagtccctgaggaccagactgggctgtcaggaggggtagcctccttcgtgtgccaagctacaggagaacccaagccgcgcatcacatggatgaagaaggggaagaaagtcagctcccagcgcttyraggtcattgagtttgatgatggggcagggtcagtgcttcggatccagccattgcgggtgcagcgagatgaagccatctatgagtgtacagctactaacagcctgggtgagatcaacactagtgccaagctctcagtgctcgaagaggaacagctgccccctgggttcccttccatcgacatggggcctcagctgaaggtggtggagaaggcacgcacagccaccatgctatgtgcygcaggcggaaatccagaccctgagatttcttggttcaaggacttccttcctgtagaccctgccacgagcaacggccgcatcaagcagctgcgttcaggtgccttgcagatagagagcagtgaggaatccgaccaaggcaagtacgagtgtgtggcgaccaactcggcaggcacacgttactcagcccctgcgaacctgtatgtgcgagtgcgccgcgtggctcctcgtttctccatccctcccagcagccaggaggtgatgccaggcggcagcgtgaacctgacatgcgtggcagtgggtgcacccatgccctacgtgaagtggatgatgggggccgaggagctcaccaaggaggatgagatgccagttggccgcaacgtcctggagctcagcaatgtcgtacgctctgccaactacacctgtgtggccatctcctcgctgggcatgatcgaggccacagcccaggtcacagtgaaagctcttccaaagcctccgattgatcttgtggtgacagagacaactgccaccagtgtcaccctcacctgggactctgggaactcggagcctgtaacctactatggcatccagtaccgcgcagcgggcacggagggcccctttcaggaggtggatggtgtggccacyacccgctacagcattggcggcctcagccctttctcggaatatgccttccgcgtgctggcggtgaacagcatcgggcgagggcygcccagcgaggcagtgcgggcacgcacgggagaacaggygccctccagcccaccgcgccgcgtgcaggcacgcatgctgagcgccagcaccatgctggtgcagtgggagcctcccgaggagcccaacggcctggtgcggggataccgcgtctrctatactccggactcccgccgccccccgaacgcctggcacaagcacaacaccgacgcggggctcctcacgaccgtgggcagcctgctgcctggcatcacctacagcctgcgcgtgcttgccttcaccgccgtgggcgatggccctcccagccccaccatccaggtcaagacgcagcagggagtgcctgcccagcccgcggacttccaggccgaggtggagtcggacaccaggatycagctctcgtggctgctgccccctcaggagcggatcatcatgtatgaactggtgtactgggcggcagaggacgaagaccaacagcacaaggtgaccttcracccaacctcctcctacacactagaggacctgaagcctgacacactctaccgcttccagctggctgcacgctcggatatgggggtgggcgtcttcacccccaccattgaggcccgcacagcmcagtccaccccctccgcccctccccagaaggtgatgtgtgtgagcatgggctccaccacggtccgggtaagttgggtcccgccgcctgccgacagccgcaacggcgttatcacccagtactcygtggcctacgaggcggtggacggcgaggaccgcgggcggcatgtggtggatggcatcagccgtgagcactccagctgggacctggtgggcctggagaagtggacggagtaccgggtgtgggtgcgggcacacacagacgtgggccccggccccgagagcagcccggtgctggtgcgcaccgatgaggacgtgcccagcgggcctccgcggaaggtggaggtggagccactgaactccactgctgtgcatgtctactggaagctgcctgtccccagcaagcagcatggccagatccgcggctaccaggtcacctacgtgcggctggagaatggcgagccccgtggactccccatcatccaagacgtcatgctagccgaggcccaggaaaccactatcagcggcctgaccccggagaccacctactccgttactgttgctgcctataccaccaagggggatggtgcccgcagcaagcccaaaattgtcactacaacaggtgcagtcccaggccggcccaccatgatgatcagcaccacggccatgaacactgcgctgctccagtggcacccacccaaggaactgcctggcgagctgctgggctaccggctgcagtactgccgggccgacgaggcgcggcccaacaccatagatttcggcaaggatgaccagcacttcacagtcaccggcctgcacaaggggaccacctacatcttccggcttgctgccaagaaccgggctggcttgggtgaggagttcgagaaggagatcaggacccccgaggacctgcccagcggcttcccccaaaacctgcatgtgacaggactgaccacgtctaccacagaactggcctgggacccgccagtgctggcggagaggaacgggcgcatcatcagctacaccgtggtgttccgagacatcaacagccaacaggagctgcagaacatcacgacagacacccgctttacccttactggcctcaagccagacaccacttaygacatcaaggtccgcgcatggaccagcaaaggctctggcccactcagccccagcatccagtcccggaccatgccggtggagcaagtgtttgccaagaacttccgggtggcggctgcaatgaagacgtctgtgctgctcagctgggaggttcccgactcctataagtcagctgtgccctttaagattctgtacaatgggcagagtgtggaggtggacgggcactcgatgcggaagctgatcgcagacctgcagcccaacacagagtactcgtttgtgctgatgaaccgtggcagcagcgcagggggcctgcagcacctggtgtccatccgcacagcccccgacctcctgcctcacaagccgctgcctgcctctgcctacatagaggacggccgcttcgatctctccatgccccatgtgcaagacccctcgcttgtcaggtggttctacattgttgtggtrcccattgaccgtgtgggcgggagcatgctgacgccaaggtggagcacacccgaggaactggagctggacgagcttctagaagccatcgagcaaggcggagaggagcagcggcggcggcggcggcaggcagaacgtctgaagccatatgtggctgctcaactggatgtgctcccggagacytttaccttgggggacaagaagaactaccggggcttctacaaccggccyctgtctccggacttgagctaccagtgctttgtgcttgcctccttgaaggaacccatggaccagaagcgctatgcctccagcccctactcggatgagatcgtggtccaggtgacaccagcccagcagcaggaggagccggagatgctgtgggtgacgggtcccgtgctggcagtcatcctcatcatcctcattgtcatcgccatcctcttgttcaaaaggaaaaggacccactctccgtcctctaaggatgagcagtcgatcggactgaaggactccttgctggcccactcctctgaccctgtggagatgcggaggctcaactaccagaccccaggtatgcgagaccacccacccatccccatcaccgacctggcggacaacatcgagcgcctcaaagccaacgatggcctcaagttctcccaggagtatgagtccatcgaccctggacagcagttcacgtgggagaattcaaacctggaggtgaacaagcccaagaaccgctatgcgaatgtcatcgcctacgaccactctcgagtcatccttacctctatcgatggcgtccccgggagtgactacatcaatgccaactacatcgatggctaccgcaagcagaatgcctacatcgccacgcagggccccctgcccgagaccatgggygatttctggagratggtgtgggaacagcgcacggccactgtggtcatgatgacacggctggaggagaagtcccgggtaaaatgtgatcagtactggccagcccgtggcaccgagacctgtggccttattcaggtgaccctgttggacacagtggagctggccacatacactgtgcgcaccttcgcactccacaagagtggctccagtgagaagcgygagctgcgtcagtttcagttcatggcctggccagaccatggagttcctgagtacccaactcccatcctggccttcctacgacgggtcaaggcctgcaaccccctagacgcagggcccatggtggtgcactgcagcgcgggcgtgggccgcaccggctgcttcatcgtgattgatgccatgttggagcggatgaagcacgagaagacggtggacatctatggccacgtgacctgcatgcgatcacagaggaactacatggtgcagacggaggaccagtacgtgttcatccatgaggcgctgctggaggctgccacgtgcggccacacagaggtgcctgcccgcaacctgtatgcccacatccagaagctgggccaagtgcctccaggggagagtgtgaccgccatggagctcgagttcaagttgctggccagctccaaggcccacacgtcccgcttcatcagcgcyaacctgccctgcaacaagttcaagaaccggctggtgaacatcatgccctacgaattgacccgtgtgtgtctgcagcccatccgtggtgtggagggctctgactacatcaatgccagcttcctggatggttatagacagcagaaggcctacatagctacacaggggcctctggcagagagcaccgaggacttctggcgcatgctatgggagcacaattccaccatcatcgtcatgctgaccaagcttcgggagatgggcagggagaaatgccaccagtactggccagcagagcgctctgctcgctaccagtactttgttgttgacccgatggctgagtacaacatgccccagtatatcctgcgtgagttcaaggtcacggatgcccgggatgggcagtcaaggacaatccggcagttccagttcacagactggccagagcagggcgtgcccaagacaggcgagggattcattgacttcatcgggcaggtgcataagaccaaggagcagtttggacaggatgggcctatcacggtgcactgcagtgctggcgtgggccgcaccggggtgttcatcactctgagcatcgtcctggagcgcatgcgctaygagggcgtggtcgacatgtttcagaccgtgaagaccctgcgtacacagcgtcctgccatggtgcagacagaggaccagtatcagctgtgctaccgtgcggccctggagtacctcggcagctttgaccactatgcaacgtaactaccgctcccctctcctccgccacccccgccgtggggctccggaggggacccagctcctctgagccataccgaccatcgtccagccctcctacgcagatgctgtcactggcagagcacagcccacggggatcacagcgtttcaggaacgttgccacaccaatcagagagcctagaacatccctgggcaagtggatggcccagcaggcaggcactgtggcccttctgtccaccagacccacctggagcccgcttcaagctctctgttgcgctcccgcatttctcatgcttcttctcatggggtggggttggggcaaagcctcctttttaatacattaagtggggtagactgagggattttagcctcttccctctgatttttcctttcgcgaatccgtatctgcagaatgggccactgtaggggttggggtttattttgttttgtttttttttttcttgatttgtatgacttctgctgaaggacagaacattgccttcctcgtgcagagctggggctgccagcctgagcggaggctcggccgtgggccgggaggcagtgctgatccggctgctcctccagcccttcagacgagatcctgtttcagctaaatgcagggaaactcaatgtttttttaagttttgttttccctttaaagcctttttttaggccacattgacagtggtgggcggggagaagatagggaacactcatccctggtcgtctatcccagtgtgtgtttaacattcacagcccagaaccacagatgtgtctgggagagcctggcaaggcattcctcatcaccatcgtgtttgcaaaggttaaaacaaaaacaaaaaaccacaaaaataaaaaacaaaaaaaacaaaaaacccragaaaaaaaaaaagagtcagcccttggcttctgcttcaaaccctcaagaggggaagcaactccgtgtgcctggggttcccgagggagctgctggctgacctgggcccacagagcctggctttggtccccagcattgcagtatggtgtggtgtttgtaggctgtggggtctggctgtgtggccaaggtgaatagcacaggttagggtgtgtgccacaccccatgcacctcagggccaagcgggggcgtggctggcctttcaggtccaggccagtgggcctggtagcacatgtctgtcctcagagcaggggccagatgattttcctccctggtttgcagctgttttcaaagcccccgataatcgctcttttccactccaagatgccctcataaaccaatgtggcaagactactggacttctatcaatggtactctaatcagtccttattatcccagcttgctgaggggcagggagagcgcctcttcctctgggcagcgctatctagataggtaagtgggggcggggaagggtgcatagctgttttagctgagggacgtggtgccgacgtccccaaacctagctaggctaagtcaagatcaacattccagggttggtaatgttggatgatgaaacattcatttttaccttgtggatgctagtgctgtagagttcmctgttgtacacagtctgttttctatttgttaagaaaaactacagcatcattgcataattcttgatggtaataaatttgaataatcagatttcttac

SEQ ID NO: 5111 - DNA, 2791 bp, Homo sapiens
gaaccatcattaattgaagtgagatttttctggcctgagacttgcagggaggcaagaagacactctggacaccactatggacagcctcttgatgaaccggaggaagtttctttaccaattcaaaaatgtccgctgggctaagggtyggcrtgagacctacctgtgctacgtagtgaagaggcgtgacagtgctacatccttttcactggactttggttatcttcgcaataagaacggctgccacgtggaattgctcttcctccgctacatctcggactrggacctagaccctggccgctgctaccgcgtcaccyggttcacctcctrgagcccctgctacgactgtgcccgacatgtggccgactttctgcgagggaaccccaacctcagtcygaggatcttcaccgcgyrcctctacttctgtgaggaccgcaaggctgagcccgaggggctgcggcggctgcaccgcgccggggtgcaaatagccatcrtgaccttcaaagattatttttactgmtggaatacttttgtagaaaaccaygaaagaactttcaaagcctgggaagggctgcatgaaaattcagttcgtctctccagacagcttcggcgcatccttttgcccctgtatgaggttgatgacttacgagacgcatttcgtactttgggactttgatagcaacttccaggaatgtcacacacgatgaaatatctctgctgaagacagtggataaaaaacagtccttcaagtcttctctgtttttmttcttcaactctcactttcttagagtttacagaaaaaatatttatatacgactctttaaaaagatctatgtcttgaaaatagagaaggaacacaggtctggccagggacgtgctgcaattggtgcagttttgaatgcaacattgtcccctactgggaataacagaactgcaggacctgggagcatcctaaagtgtcaacgtttttctatgacttttaggtaggatgagagcagaaggtagatcctaaaaagcatggtgagaggatcaaatgtttttatatcaacatcctttattatttgattcatttgagttaacagtggtgttagtgatagatttttctattcttttcccttgacgtttactttcaagtaacacaaactcttccatcaggccatgatctataggacctcctaatgagagtatctgggtgattgtgaccccaaaccatctctccaaagcattaatakccaatcatgcgctgtatgttttaatcagcagaagcatgtttttatgtttgtacaaaagaagattgttatgggtggggatggaggtatagaccatgcatggtcaccttcaagctactttaataaaggatcttaaaatgggcaggaggactgtgaacaagacaccctaataatgggttgatgtctgaagtagcaaatcttctggaaacgcaaactcttttaaggaagtccctaatttagaaacacccacaaacttcacatatcataattagcaaacaattggaaggaagttgcttgaatgttggggagaggaaaatctattggctctcgtgggtctcttcatctcagaaatgccaatcaggtcaaggtttgctacattttgtatgtgtgtgatgcttctcccaaaggtatattaactatataagagagttgtgacaaaacagaatgataaagctgcgaaccgtggcacacgctcatagttctagctgcttgggaggttgaggagggaggatggcttgaacacaggtgttcaaggccagcctgggcaacataacaagatcctgtctctcaaaaaaaaaaaaaaaaaaaagaaagagagagggccgggcgtggtggctcacgcctgtaatcccagcactttgggaggccgagccgggcggatcacctgtggtcaggagtttgagaccagcctggccaacatggcaaaaccccgtctgtactcaaaatgcaaaaattagccaggcgtggtagcaggcacctgtaatcccagctacttgggaggctgaggcaggagaatcgcttgaacccaggaggtggaggttgcagtaagctgagatcgtgccgttgcactccagcctgggcgacaagagcaagactctgtctcagaaaaaaaaaaaaaaaagagagagagagagaaagagaacaatatttgggagagaaggatggggaagcattgcaaggaaattgtgctttatccaacaaaatgtaaggagccaataagggatccctatttgtctcttttggtgtctatttgtccctaacaactgtctttgacagtgagaaaaatattcagaataaccatatccctgtgccgttattacctagcaacccttgcaatgaagatgagcagatccacaggaaaacttgaatgcacaactgtcttattttaatcttattgtacataagtttgtaaaagagttaaaaattgttacttcatgtattcatttatattttatattattttgcgtctaatgattttttattaacatgatttccttttctgatatattgaaatggagtctcaaagcttcataaatttataactttagaaatgattctaataacaacgtatgtaattgtaacattgcagtaatggtgctacgaagccatttctcttgatttttagtaaacttttatgacagcaaatttgcttctggctcactttcaatcagttaaataaatgataaataattttggaagctgtgaagataaaataccaaataaaataatataaaagtgatttatatgaagttaaaataaaaaatcagtatgatggaataaacttg

SEQ ID NO: 5112 - DNA, 2680 bp, Homo sapiens
gcccctgccccgtcgcctcccgggagcggctgcagtccccgttggctgcagacgggcagacacccgaagtgtccgcgccggcagccggaccgcaagcgaggaagagcgaaccgcgctcccgggcctggccgaagcgcttcctgtgccaggtttccggctccgggtcccgggaggaggatcgcgggccagaggcggagccgccgccctgccgcgactttcagactccgaccatggcctcgcgctggtggcggtggcggcgcggctgctcctggaagccggcggcgcggagccccgggcccggctcccccggccgtgcgggaccgttggggccgagcgccgctgccgaagtccgcgcgcaggttcataggcggaagggacttgacttgtctcagataccctatattaatcttgtgaagcatttaacatctgcctgtccaaatgtatgtcgtatatcacggtttcatcacacaaccccagacagtaaaacacacagtggtgaaaaatacaccgatcctttcaaactcggttggagagacttgaaaggtctgtatgaggacattagaaaggaactgcttatatcaacatcagaacttaaggaaatgtctgagtactactttgatgggaaagggaaagcctttcgaccaattattgtggcgctaatggcccgagcatgcaatattcatcataacaactcccgacatgtgcaagccagccagcgcgccatagccttaattgcagaaatgatccacactgctagtctggttcacgatgacgttattgacgatgcaagttctcgaagaggaaaacacacagttaataagatctggggtgaaaagaaggctgttcttgctggagatttaattctttctgcagcatctatagctctggcacgaattggaaatacaactgttatatctattttaacccaagttattgaagatttggtgcgtggtgaatttcttcagctcgggtcaaaagaaaatgagaatgaaagatttgcacactaccttgagaagacattcaagaagaccgccagcctgatagccaacagttgtaaagcagtctctgttctaggatgtcccgacccagtggtgcatgagatcgcctatcagtacggaaaaaatgtaggaatagcttttcagctaatagatgatgtattggacttcacctcgtgttctgaccagatgggcaaaccaacatcagctgatctgaagctcgggttagccactggtcctgtcctgtttgcctgtcagcagttcccagaaatgaatgctatgatcatgcgacggttcagtttgcctggagatgtagacagagctcgacagtatgtactacagagtgatggtgtgcaacaaacaacctacctcgcccagcagtactgccatgaagcaataagagagatcagtaaacttcgaccatccccagaaagagatgccctcattcagctttcagaaattgtactcacaagagataaatgacaactctttctgttctttctggcagctatcttaccagactgtgcctaaagaattttgtggaatacactttgtttgyttcatgtgcagataaccaaaaatcattttaaaagatatcaaacttattgatgggcaatttatttttttttattgcaaaagktttttcagaaaactttttaaatgtaattaataaaccacctgaatctgtcattctagtcctataaattataatcaaggtatcttgatggttatatgtggtattgtttacactgttaatatccacatgtaaggccattacacaaataaataaccaatgttaaaattcaaatggtttgtcttgatttaccgtaggagtaaaggtcagaaaaatgtgaagtctgcattgaagtccacatgagttatattttaacagtatccaaaatttcatataggagaatggtttattataaaagactgtacataaaatttagacaacaggttatatacaaattaagagaacaatccacttgaaaaatggaaagtagaaggtagctagctgatcactaatgatactttgtttgtttaaaattaacaaaggcaaaatgcatatgaaatagtcacattgatttggtagcaataatggtctttaattttcagaaataactgttttgcactagtcttaccattcactatgctgttataagtctgtagcatccagtacataactgtaatttgaattccaaacaaatcctcaataacacagaaacccacacttgagtgctctactttaatatcctaagcaatagagaattatacacaagacaagaagagaaaacatccctcagccctcccttcaattaagaggagacacacaaagtgcatgtgttgcattttgattatgtcaaaagacaatccaagtctgttggttaggtaaatctctgttcactgattaatacatgacccaccttctttcccaattattttattttaaaattctaatgttgctagtgccaggtaatggattaaagagtgcctactcacaaatcaactgtatccacttttacaatatgtaaaaggtacttttaacttcctttcattgaaccagtgtacaacagttcactgtacaactgaaggactgacatggcaatccttaagaattttacctacagaatgaatgcacacaatttgacacattttcttagtttcaaaagattatttaaaaaagg

SEQ ID NO: 5113 - DNA, 2473 bp, Homo sapiens
cgcgtcactgtccgccgccgtgtccgcggctgcgccagacagtgtagaacctgcggcctcgatgtycttctcccgtgccytattgtgggctcggctcccggcggggcgccaggctggccaccgggcagccatctgctctgcccttcgtmcccactttgggccctttcccggggttctggggcaagtttctgtccttgccaccgcytcctcctctgcctccggtggctccaaaataccaaacacgtccttgttcgtgcccctgactgtgaaacctcagggccccagcgccgacggcgacgtcggggccgagctaacccggcctctggayaagaatgaagtaaagaaggtcttagacaaattttacaagaggaaagaaattcagaaactgggtgctgattatggacttgatgctcgtctcttccaccaagctttcataagctttagaaattatattatgcagtctcattccctggatgtggacattcacattgttttgaatgatatttgcttcggtgcaggcaagtctcatgcggatgatttattcccatttttcttgagacatgccaaacaaatatttcctgtgttggactgtaaggatgatctacgtaaaatcagtgacttaagaataccacctaactggtacccagatgctagagccatgcagcggaagataatatttcattcaggccccacaaacagtggaaagacttatcacgcaatccagaaatacttctcagcaaagtctggagtgtattgtggccctctaaaattactggcacatgagatcttcgaaaagagtaatgctgctggtgtgccatgtgacttggtgacaggtgaagagcgtgtgacagttcagccaaatgggaaacaggcttcacatgtttcttgtacagttgagatgtgcagtgttacaactccttatgaagtggctgtaattgatgaaattcaaatgattagagatccagccagaggatgggcctggaccagagcacttctaggactgtgtgctgaagaggttcatttgtgtggagaacctgctgctattgacctggtgatggagcttatgtacacaacgggggaggaagtggaggttcgagactataagaggcttacccccatttctgtgctggaccatgcactagaatctttagataaccttcggcctggggactgcattgtctgttttagcaagaatgatatttattctgtgagtcggcagattgaaattcggggattagaatcagctgttatatatggcagtctcccacctgggaccaaacttgctcaagcaaaaaagtttaatgatcccaatgacccatgcaaaatcttggttgctacagatgcaattggcatgggacttaatttgagcataaggagaattattttttactcccttataaagcccagtatcaatgaaaagggagagagagaactagaaccaatcacaacctctcaagccctgcagattgctggcagagctggcagattcagctcacggtttaaagaaggagaggttacaacaatgaatcatgaagatctcagtttattaaaggaaattttgaagaggcctgtggatcctataagggcagctggtcttcatccaactgctgagcagattgaaatgtttgcctaccatctccctgatgcaacaytgtccaatctcattgatatttttgtagacttttcacaagttgatgggcagtattttgtctgcaatatggatgattttaaattttctgcagagttgatccagcatattccactaagtctgcgagtgaggtatgttttctgcacagctcctatcaacaagaagcagccttttgtgtgttcttcactgttacagtttgccaggcagtatagcaggaatgagcccctgacctttgcatggttacgccgatacatcaaatggcctttacttccacctaagaatattaaagacctcatggatcttgaagctgtccacgatgtcttggatctttacttgtggctaagctaccgatttatggatatgtttccagatgccagccttattcgagatctccagaaagaactagatggtattatccaagatggtgtgcacaatatcactaaattgattaaaatgtctgagacgcataagctgttgaatttggagggctttcyatcagggagccagtcacgattgtcaggaaccttaaagagccaagctagaaggacacgcggcaccaaagctctagggagtaaagctactgagccacccagccccgatgcaggagagctgtcccttgcttccagattggtgcagcaaggactcctcactccagacatgctgaaacagctagaaaaagagtggatgacacaacaaactgaacacaacaaagaaaaaacagagtctgggactcatccaaaagggacgagaagaaagaagaaggaacctgattcggactagttttctgttcctgtttttttttttttatttaattttgcaaataaa

SEQ ID NO: 5114 - DNA, 2467 bp, Homo sapiens
cgcgtcactgtccgccgccgtgtccgcggctgcgccagacagtgtagaacctgcggcctcgatgtycttctcccgtgccytattgtgggctcggctcccggcggggcgccaggctggccaccgggcagccatctgctctgcccttcgtmcccactttgggccctttcccggggttctggggcaagtttctgtccttgccaccgcytcctcctctgcctccggtggctccaaaataccaaacacgtccttgttcgtgcccctgactgtgaaacctcagggccccagcgccgacggcgacgtcggggccgagctaacccggcctctggayaagaatgaagtaaagaaggtcttagacaaattttacaagaggaaagaaattcagaaactgggtgctgattatggacttgatgctcgtctcttccaccaagctttcataagctttagaaattatattatgcagtctcattccctggatgtggacattcacattgttttgaatgatatttgcttcggtgcagctcatgcggatgatttattcccatttttcttgagacatgccaaacaaatatttcctgtgttggactgtaaggatgatctacgtaaaatcagtgacttaagaataccacctaactggtacccagatgctagagccatgcagcggaagataatatttcattcaggccccacaaacagtggaaagacttatcacgcaatccagaaatacttctcagcaaagtctggagtgtattgtggccctctaaaattactggcacatgagatcttcgaaaagagtaatgctgctggtgtgccatgtgacttggtgacaggtgaagagcgtgtgacagttcagccaaatgggaaacaggcttcacatgtttcttgtacagttgagatgtgcagtgttacaactccttatgaagtggctgtaattgatgaaattcaaatgattagagatccagccagaggatgggcctggaccagagcacttctaggactgtgtgctgaagaggttcatttgtgtggagaacctgctgctattgacctggtgatggagcttatgtacacaacgggggaggaagtggaggttcgagactataagaggcttacccccatttctgtgctggaccatgcactagaatctttagataaccttcggcctggggactgcattgtctgttttagcaagaatgatatttattctgtgagtcggcagattgaaattcggggattagaatcagctgttatatatggcagtctcccacctgggaccaaacttgctcaagcaaaaaagtttaatgatcccaatgacccatgcaaaatcttggttgctacagatgcaattggcatgggacttaatttgagcataaggagaattattttttactcccttataaagcccagtatcaatgaaaagggagagagagaactagaaccaatcacaacctctcaagccctgcagattgctggcagagctggcagattcagctcacggtttaaagaaggagaggttacaacaatgaatcatgaagatctcagtttattaaaggaaattttgaagaggcctgtggatcctataagggcagctggtcttcatccaactgctgagcagattgaaatgtttgcctaccatctccctgatgcaacaytgtccaatctcattgatatttttgtagacttttcacaagttgatgggcagtattttgtctgcaatatggatgattttaaattttctgcagagttgatccagcatattccactaagtctgcgagtgaggtatgttttctgcacagctcctatcaacaagaagcagccttttgtgtgttcttcactgttacagtttgccaggcagtatagcaggaatgagcccctgacctttgcatggttacgccgatacatcaaatggcctttacttccacctaagaatattaaagacctcatggatcttgaagctgtccacgatgtcttggatctttacttgtggctaagctaccgatttatggatatgtttccagatgccagccttattcgagatctccagaaagaactagatggtattatccaagatggtgtgcacaatatcactaaattgattaaaatgtctgagacgcataagctgttgaatttggagggctttcyatcagggagccagtcacgattgtcaggaaccttaaagagccaagctagaaggacacgcggcaccaaagctctagggagtaaagctactgagccacccagccccgatgcaggagagctgtcccttgcttccagattggtgcagcaaggactcctcactccagacatgctgaaacagctagaaaaagagtggatgacacaacaaactgaacacaacaaagaaaaaacagagtctgggactcatccaaaagggacgagaagaaagaagaaggaacctgattcggactagttttctgttcctgtttttttttttttatttaattttgcaaataaa

SEQ ID NO: 5115 - DNA, 3637 bp, Homo sapiens
tggactggaagcgtgcaacactccagagtcgtaggagtgaacactgcacaggaatctctgcccatctcaggagaaaccaaacttggggaaaatgtttgcggtccacttgatggcattttacttcagcaagctgaaggaggaccagatcaagaaggtggacaggttcctgtatcacatgcggctctccgatgacacccttttggacatcatgaggcggttccgggctgagatggagaagggcctggcaaaggrcaccaaccccacggctgcagtgaagatgttgcccaccttcgtcagggccattcccgatggttccgaaaatggggagttcctttccctggatctcggagggtccaagttccgagtgctgaaggtgcaagtcgctgaagaggggaagcgacacgtgcagatggagagtcagttctacccaaygcccaatgaaatcatccgcgggaacggcayagagctgtttgaatatgtagctgactgtctggcagatttcatgaagaccaaagatttaaagcataagaaattgccccttggcctaactttttctttcccctgtcgacagactaaactggaagagggtgtcctactttcgtggrcaaaaaagtttaaggcacgaggagttcaggacacggatgtggtgagccgtctgaccaaagccatgagaagacacaaggacatggacgtggacatccyggccctggtcaatgacaccgtggggaccatgatgacctgtgcctatgacgacccctactgcgaagttggtgtcatcatcggaactggcaccaatgcgtgttacatggaggacatgagcaacattgacctggtggagggcgacgagggcaggatgtgcatcaacacagagtggggggccttcggggacgacggggccctggaggacattcgcactgagttcgacagggagctggacctcggctctctcaacccaggaaagcaactgttcgagaagatgatcagtggcctgtacctgggggagcttgtcaggcttatcttgctgaagatggccaaggctggcctcctgtttggtggtgagaaatcttctgctctccacactaagggcaagatcgaaacacggcacgtggctgccatggagaagtataaagaaggccttgctaatacaagagagatcctggtggacctgggtctggaaccgtctgaggctgactgcattgccgtccagcatgtctgtaccatcgtctccttccgctcggccaatctctgtgcagcagctctggcggccatcctgacacgcctccgggagaacaagaaggtggaacggctccggaccacagtgggcatggacggcaccctctacaagatacaccctcagtacccaaaacgcctgcacaaggtggtgaggaaactggtcccaagctgtgatgtccgcttcctcctgtcasagagtggcagcaccaagggggccgccatggtgaccgcggtggcctcccgcgtgcaggcccagcggaagcagatcgacagggtgctggctttgttccagctgacccgagagcagctcgtggacgtgcaggccaagatgcgggctgagctggagtatgggctgaagaagaagagccacgggctggccacggtcaggatgctgcccacctacgtctgcgggctgccggacggcacagagaaaggaaagtttctcgccctggatcttgggggaaccaacttccgggtcctcctggtgaagatcagaagtggacggaggtcagtgcgaatgtacaacaagatcttcgccatccccctggagatcatgcagggcactggtgaggagctctttgatcacattgtgcagtgcatcgccgacttcctggactacatgggcctcaagggagcctccctacctttgggcttcacattytcatttccctgcaggcagatgagcattgacaagggaacactcatagggtggaccaaaggtttcaaggccactgactgtgaaggggaggacgtggtggacatgctcagggaagccatcaagaggagaaacgagtttgacctggacattgttgcagtcgtgaatgatacagtggggaccatgatgacctgtggctatgaagatcctaattgtgagattggcctgattgcaggaacaggcagcaacatgtgctacatggaggacatgaggaacatcgagatggtggaggggggtgaagggaagatgtgcatcaatacagagtggggaggatttggagacaatggctgcatagatgacatcyggacccgatacgacacggaggtggatgaggggtccttgaatcctggcaagcagagataygagaaaatgaccagtgggatgtacttgggggagattgtgcggcagatcctgatcgacctgaccaagcagggtctcctcttccgagggcagatttcagagcgtctccggaccaggggcatcttcgaaaccaagttcctgtcccagatcgaaagcgatcggctggcccttctccaggtcaggaggattctgcagcagctgggcctggacagcacgtgtgaggacagcatcgtggtgaaggaggtgtgcggagccgtgtcccggcgggcggcccagctctgcggtgctggcctggccgctatagtggaaaaaaggagagaagaccaggggctagagcacctgaggatcactgtgggtgtggacggcaccctgtacaagctgcaccctcacttttctagaatattgcaggaaactgtgaaggaactagcccctcgatgtgatgtgacattcatgctgtcagaagatggcagtggaaaaggggcagcactgatcactgctgtggccaagaggttacagcaggcacagaaggagaamtaggaacccctgggattggacctgatgcatcttggatactgaacagcttttcctctggcagatcagttggtcagagascaatgggcaccctcctggctgacctcaccttctggatggccgaaagagaaccccaggttctcgggtactcttagtatcttgtactggatttgcagtgacattacatgacatctctatttggtatatttgggccaaaatgggccaacttatgaaatcaaagtgtctgtcctgagagatcccctttcaacacattgttcaggtgaggcttgagctgtcaattctctatggctttcagtcttgtggctgcgggacttggaaatatatagaatctgcccatgtggctggcaggctgtttccccattgggatgcttaagccatctcttataggggattggaccctgtacttgtggatgaacattggagagcaagaggaactcacgttatgaactagggggatctcatctaacttgtccttaacttgccatgttgacttcaaacctrttaagagaacaaagactttgaagtatccagccccagggtgcagagaggttgattgccagggagcactgcaggaatcattgcatgcttaaagcgagttatgtcagcaccctgtaggattttgttccttattaagtgtgtgccatgtggtggggtgctgtctggggcatctgtttttcattttgcctgtggtttgtgttgcagstgttgatagttgttttaaggattgttaggtataggaaatccagtaaattaataaaaaaattttgattttccaat

SEQ ID NO: 5116 - DNA, 1629 bp, Homo sapiens
gacatggacgtggacatccyggccctggtcaatgacaccgtggggaccatgatgacctgtgcctatgacgacccctactgcgaagttggtgtcatcatcggaactggcaccaatgcgtgttacatggaggacatgagcaacattgacctggtggagggcgacgagggcaggatgtgcatcaacacagagtggggggccttcggggacgacggggccctggaggacattcgcactgagttcgacagggagctggacctcggctctctcaacccaggaaagcaactgttcgagaagatgatcagtggcctgtacctgggggagcttgtcaggcttatcttgctgaagatggccaaggctggcctcctgtttggtggtgagaaatcttctgctctccacactaagggcaagatcgaaacacggcacgtggctgccatggagaagtataaagaaggccttgctaatacaagagagatcctggtggacctgggtctggaaccgtctgaggctgactgcattgccgtccagcatgtctgtaccatcgtctccttccgctcggccaatctctgtgcagcagctctggcggccatcctgacacgcctccgggagaacaagaaggtggaacggctccggaccacagtgggcatggacggcaccctctacaagatacaccctcagtacccaaaacgcctgcacaaggtggtgaggaaactggtcccaagctgtgatgtccgcttcctcctgtcasagagtggcagcaccaagggggccgccatggtgaccgcggtggcctcccgcgtgcaggcccagcggaagcagatcgacagggtgctggctttgttccagctgacccgagagcagctcgtggacgtgcaggccaagatgcgggctgagctggagtatgggctgaagaagaagagccacgggctggccacggtcaggatgctgcccacctacgtctgcgggctgccggacggcacagagaaaggaaagtttctcgccctggatcttgggggaaccaacttccgggtcctcctggtgaagatcagaagtggacggaggtcagtgcgaatgtacaacaagatcttcgccatccccctggagatcatgcagggcactggtgaggagctctttgatcacattgtgcagtgcatcgccgacttcctggactacatgggcctcaagggagcctccctacctttgggcttcacattytcatttccctgcaggcagatgagcattgacaagggaacactcatagggtggaccaaaggtttcaaggccactgactgtgaaggggaggacgtggtggacatgctcagggaagccatcaagaggagaaacgagtttgacctggacattgttgcagtcgtgaatgatacagtggggaccatgatgacctgtggctatgaagatcctaattgtgagattggcctgattgcaggaacaggcagcaacatgtgctacatggaggacatgaggaacatcgagatggtggaggggggtgaagggaagatgggcatctgtttttcattttgcctgtggtttgtgttgcagstgttgatagttgttttaaggattgttaggtataggaaatccagtaaattaataaaaaaattttgattttccaat

SEQ ID NO: 5117 - DNA, 2311 bp, Homo sapiens
tggactggaagcgtgcaacactccagagtcgtaggagtgaacactgcacaggaatctctgcccatctcaggagaaaccaaacttggggaaaatgtttgcggtccacttgatggcattttacttcagcaagctgaaggaggaccagatcaagaaggtggacaggttcctgtatcacatgcggctctccgatgacacccttttggacatcatgaggcggttccgggctgagatggagaagggcctggcaaaggrcaccaaccccacggctgcagtgaagatgttgcccaccttcgtcagggccattcccgatggttccgaaaatggggagttcctttccctggatctcggagggtccaagttccgagtgctgaaggtgcaagtcgctgaagaggggaagcgacacgtgcagatggagagtcagttctacccaaygcccaatgaaatcatccgcgggaacggcayagagctgtttgaatatgtagctgactgtctggcagatttcatgaagaccaaagatttaaagcataagaaattgccccttggcctaactttttctttcccctgtcgacagactaaactggaagagggtgtcctactttcgtggrcaaaaaagtttaaggcacgaggagttcaggacacggatgtggtgagccgtctgaccaaagccatgagaagacacaaggacatggacgtggacatccyggccctggtcaatgacaccgtggggaccatgatgacctgtgcctatgacgacccctactgcgaagttggtgtcatcatcggaactggcaccaatgcgtgttacatggaggacatgagcaacattgacctggtggagggcgacgagggcaggatgtgcatcaacacagagtggggggccttcggggacgacggggccctggaggacattcgcactgagttcgacagggagctggacctcggctctctcaacccaggaaagcaactgttcgagaagatgatcagtggcctgtacctgggggagcttgtcaggcttatcttgctgaagatggccaaggctggcctcctgtttggtggtgagaaatcttctgctctccacactaagggcaagatcgaaacacggcacgtggctgccatggagaagtataaagaaggccttgctaatacaagagagatcctggtggacctgggtctggaaccgtctgaggctgactgcattgccgtccagcatgtctgtaccatcgtctccttccgctcggccaatctctgtgcagcagctctggcggccatcctgacacgcctccgggagaacaagaaggtggaacggctccggaccacagtgggcatggacggcaccctctacaagatacaccctcagtacccaaaacgcctgcacaaggtggtgaggaaactggtcccaagctgtgatgtccgcttcctcctgtcasagagtggcagcaccaagggggccgccatggtgaccgcggtggcctcccgcgtgcaggcccagcggaagcagatcgacagggtgctggctttgttccagctgacccgagagcagctcgtggacgtgcaggccaagatgcgggctgagctggagtatgggctgaagaagaagagccacgggctggccacggtcaggatgctgcccacctacgtctgcgggctgccggacggcacagagaaaggaaagtttctcgccctggatcttgggggaaccaacttccgggtcctcctggtgaagatcagaagtggacggaggtcagtgcgaatgtacaacaagatcttcgccatccccctggagatcatgcagggcactggtgaggagctctttgatcacattgtgcagtgcatcgccgacttcctggactacatgggcctcaagggagcctccctacctttgggcttcacattytcatttccctgcaggcagatgagcattgacaagggaacactcatagggtggaccaaaggtttcaaggccactgactgtgaaggggaggacgtggtggacatgctcagggaagccatcaagaggagaaacgagtttgacctggacattgttgcagtcgtgaatgatacagtggggaccatgatgacctgtggctatgaagatcctaattgtgagattggcctgattgcaggaacaggcagcaacatgtgctacatggaggacatgaggaacatcgagatggtggaggggggtgaagggaagatgggcatctgtttttcattttgcctgtggtttgtgttgcagstgttgatagttgttttaaggattgttaggtataggaaatccagtaaattaataaaaaaattttgattttccaat

SEQ ID NO: 5118 - DNA, 501 bp, Homo sapiens
aggtgccgctgttgctgctcgtgttaaatctagaaccgtagccagacatgggactggaggacragcaaaagatgcttaccgaatccggagatcctgaggasggatcccctaacaacagtgagagagcaatgcgagcagttggagaaatgtgtaaaggcccgggagcggctagagctctrtgatgagcatgtatcctctcgatcacatacagaagaggattgcacggaggagctctttgacttcttgcrtgysaaggaccattgcgtggcccacaaactctttaacaacttgaaataaatgtgtggacttaattcaccccagccttcawcatctgggcatcagaatatttccttatggtttcggatgtaccatttgtttcttatttgtgtaactgtaagttcacatgaacctcgtgggttttggcttaggctggtagcttctatgtaattcgcagtgattccatctaaataaaagttctgtgatctgcaaaaaaaaaaaaaa

SEQ ID NO: 5119 - DNA, 538 bp, Homo sapiens
ttgaggtgccgctgttgctgctcgtgttaaatctagaaccgtagccagacatgggactggaggacragcaaaagatgcttaccgaatccggagatcctgaggaggaggaagaggragaggagraattastggatcccctaacaacagtgagagagcaatgcgagcagttggagaaatgtgtaaaggcccgggagcggctagagctctrtgatgagcatgtatcctctcgatcacatacagaagaggattgcacggaggagctctttgacttcttgcrtgysaaggaccattgcgtggcccacaaactctttaacaacttgaaataaatgtgtggacttaattcaccccagccttcawcatctgggcatcagaatatttccttatggtttcggatgtaccatttgtttcttatttgtgtaactgtaagttcacatgaacctcgtgggttttggcttaggctggtagcttctatgtaattcgcagtgattccatctaaataaaagttctgtgatctgcaaaaaaaaaaaaaaattagccg

SEQ ID NO: 5120 - DNA, 1765 bp, Homo sapiens
tgacctttgagccggctcgggttccggctctggcgcgtgcacactcgcctcgccgttcgggaccagccagatcgcggcggcctcgcgggcggtttggtcggtgaggtcttggccgcgcgcggcaatgctgaggctgctggcgtccgggtgcgcccggggcccggggcccggcgtgggcgcgcgtcctgccgcagggctctttcatccggggcgccgccagagccgccaggcttccgaygcgccccggaaccagccccccagccccgagttcgtggcccggccggtgggcgtctgctccatgatgcgcctgccggtgcagacctcccccgaggggctggacgctgccttcatcggggtgcccctggatactgggacctccaaccggcctggggcgagattcggacctcgccgcatccrggaagaatcagtgatgcttsggacagtcaatcctagcacgggggccctccccttccagtccctcatggttgcagacctaggcgatgtgaatgtcaatctttacaaccttcaggacagctgccggcraattcaagaggcctatgagaaaattgtagcagctggctgtattcctctgaccttgggtggagatcacacaatcacatatcccatattgcaagcgatggcaaaaaagcatggcccagtggggctgctgcacgtggatgcgcacacggacacgacygacaaggccctaggagagaagctctaccacggggcgcccttccgccggtgtgtggatgagggtctcctggactgtaagcgtgtggtgcagattggcatccggggctcttccacgaccttggatccctacagatacaaccggagccagggcttccgggtagtcctggctgaagactgctggatgaagtcrctggttcctctgatgggggaagtcaggcagcagatgggaggcaaacccatttatatcagctttgatattgacgctctggatcctgcctatgcgccagggacagggacacctgaaattgctggtctcactcctagtcaggctctggagatcatcaggggttgtcaaggcctgaaygtgatgggctgtgatcttgtcgaagtttcaccaccgtatgatctttctgggaacacagccctgctggcggctaacctgctgtttgagatgctatgtgctctccccaaagtgacaaccgtctgagtcttgtgctcttcaagacaaaacagattgcgtcgctgacaagttctcaagaagaacttatgagtaagcagtctgagaactaaagagtttatgccaagaaaactttctgctgaaagtgtcattgctggctgtgaagtcgggataatcagtagaattctcacccaaacagcaacatttctaaggaacttggattaattgggggaaaaaaaaaggagtacttgtactgctttgattttttttcctttgatgaaagatggaggataaaggggaagtgaggagaatttctttcaagattatctaaacattagaaacatgacatttaaaaaaactatgaaataatactgtataagcactccatctcaaaaaaaaaaaaaaaaaatacagcttctcctatgaggtgcttagggctgcatcttggttttaggaccactgtgaacgtaagtaaaaagtataaagtaacacggagacctgggtgacagagtgagactccgtctccaaaaaaaaaaaaaaaaaaaaaaaaagcaggccggacccagtggctcacgcctgtaatcccaggcctaggcgggaggatcacctgag

SEQ ID NO: 5121 - DNA, 1729 bp, Homo sapiens
tgacctttgagccggctcgggttccggctctggcgcgtgcacactcgcctcgccgttcgggaccagccagatcgcggcggcctcgcgggcggtttggtcggtgaggtcttggccgcgcgcggcaatgctgaggctgctggcgtccgggtgcgcccggggcccggggcccggcgtgggcgcgcgtcctgccgcagggctctttcatccggggcgccgccagagccgccaggcttccgaygcgccccggaaccagccccccagccccgagttcgtggcccggccggtgggcgtctgctccatgatgcgcctgccggtgcagacctcccccgaggggctggacgctgccttcatcggggtgcccctggatactgggacctccaaccggcctggggcgagattcggacctcgccgcatccrggaagaatcagtgatgcttsggacagtcaatcctagcacgggggccctccccttccagtccctcatggttgcagacctaggcgatgtgaatgtcaatctttacaaccttcaggacagctgccggcraattcaagaggcctatgagaaaattgtagcagctggctgtattcctctgaccttgggtggagatcacacaatcacatatcccatattgcaagcgatggcaaaaaagcatggcccagtggggctgctgcacgtggatgcgcacacggacacgacygacaaggccctaggagagaagctctaccacggggcgcccttccgccggtgtgtggatgagggtctcctggactgtaagcgtgtggtgcagattggcatccggggctcttccacgaccttggatccctacagatacaaccggagccagggcttccgggtagtcctggctgaagactgctggatgaagtcrctggttcctctgatgggggaagtcaggcagcagatgggaggcaaacccatttatatcagctttgatattgacgctctggatcctgcctatgcgccagggacagggacacctgaaattgctggtctcactcctagtcaggctctggagatcatcaggggttgtcaaggcctgaaygtgatgggctgtgatcttgtcgaagtttcaccaccgtatgatctttctgggaacacagccctgctggcggctaacctgctgtttgagatgctatgtgctctccccaaagtgacaaccgtctgagtcttgtgctcttcaagacaaaacagattgcgtcgctgacaagttctcaagaagaacttatgagtaagcagtctgagaactaaagagtttatgccaagaaaactttctgctgaaagtgtcattgctggctgtgaagtcgggataatcagtagaattctcacccaaacagcaacatttctaaggaacttggattaattgggggaaaaaaaaaggagtacttgtactgctttgattttttttcctttgatgaaagatggaggataaaggggaagtgaggagaatttctttcaagattatctaaacattagaaacatgacatttaaaaaaactatgaaataatactgtataagcattccatatttctatatcttccttttaaacwtttttttttttgagatagagttttgcttgtcacccaggctggagtgcaatggcatgatctcgtggctcacgcctgtaatcccaggcctaggcgggaggatcacctgaggtcaggagttcaagaccagcctggccaacatggtgaaaccccgtctctactaaaaa

SEQ ID NO: 5122 - DNA, 2455 bp, Homo sapiens
tgacctttgagccggctcgggttccggctctggcgcgtgcacactcgcctcgccgttcgggaccagccagatcgcggcggcctcgcgggcggtttggtcggtgaggtcttggccgcgcgcggcaatgctgaggctgctggcgtccgggtgcgcccggggcccggggcccggcgtgggcgcgcgtcctgccgcagggctctttcatccggggcgccgccagagccgccaggcttccgaygcgccccggaaccagccccccagccccgagttcgtggcccggccggtgggcgtctgctccatgatgcgcctgccggtgcagacctcccccgaggggctggacgctgccttcatcggggtgcccctggatactgggacctccaaccggcctggggcgagattcggacctcgccgcatccrggaagaatcagtgatgcttsggacagtcaatcctagcacgggggccctccccttccagtccctcatggttgcagacctaggcgatgtgaatgtcaatctttacaaccttcaggacagctgccggcraattcaagaggcctatgagaaaattgtagcagctggctgtattcctctgaccttgggtggagatcacacaatcacatatcccatattgcaagcgatggcaaaaaagcatggcccagtggggctgctgcacgtggatgcgcacacggacacgacygacaaggccctaggagagaagctctaccacggggcgcccttccgccggtgtgtggatgagggtctcctggactgtaagcgtgtggtgcagattggcatccggggctcttccacgaccttggatccctacagatacaaccggagccagggcttccgggtagtcctggctgaagactgctggatgaagtcrctggttcctctgatgggggaagtcaggcagcagatgggaggcaaacccatttatatcagctttgatattgacgctctggatcctgcctatgcgccagggacagggacacctgaaattgctggtctcactcctagtcaggctctggagatcatcaggggttgtcaaggcctgaaygtgatgggctgtgatcttgtcgaagtttcaccaccgtatgatctttctgggaacacagccctgctggcggctaacctgctgtttgagatgctatgtgctctccccaaagtgacaaccgtctgagtcttgtgctcttcaagacaaaacagattgcgtcgctgacaagttctcaagaagaacttatgagtaagcagtctgagaactaaagagtttatgccaagaaaactttctgctgaaagtgtcattgctggctgtgaagtcgggataatcagtagaattctcacccaaacagcaacatttctaaggaacttggattaattgggggaaaaaaaaaggagtacttgtactgctttgattttttttcctttgatgaaagatggaggataaaggggaagtgaggagaatttctttcaagattatctaaacattagaaacatgacatttaaaaaaactatgaaataatactgtataagcactccatctcaaaaaaaaaaaaaaaaaatacagcttctcctatgaggtgcttagggctgcatcttggttttaggaccactgtgaacgtaagtaaaaagtataaagtaacacggagacctgggtgacagagtgagactccgtctccaaaaaaaaaaaaaaaaaaaaaaaaagcaggccggacccagtggctcacgcctgtaatcccaggcctaggcgggaggatcacctgaggccaggctggcagctgggctcttaatgttacttattgtaactcacttcctgtaagactcaatctactcttcaagttgatgtaccctctatgactgtaattcctgaaatctgcagttatgctgtggtgatcttaagcgtgtcttgagttccatgcaaattcaattctgttgataatgtgtccataatcaaatcatcatcttgcaatgcaagggctaccccataattatcagacattaaaatagtttatttctttttccattctgtaatcttaaaataacatcagcttcagtgcctgttcacaatacaaaaaaagtcaaaaaacaaaaacaacacccaaaacataaaaaagaaacaatttgccaaataagttatttgttcctaagagtatcaaaagtgcaaaatattcaccttcttttcagatctctcccaagcataattatcctccttgacaaactgaacagacagattcagcagctgccacactgcacttgtttttaggggacaatgtcagacaggtggatgtgaactacagttcctctgtaaagatgtttggcatcagcttttaaagaattctagttaacaaaacaggtctgagtatgtgcttccaatctctattcccaaacaaaggaaatcactaaaaaaacagatcacacttctttttataacagaaaaatatttatgtaatgatgg

SEQ ID NO: 5123 - DNA, 2761 bp, Homo sapiens
agaacagaactctcttacctatgaaccaggtagtttccaagagagacgctgagggatgtttagaaagcctgggacctgcagatgccatgtcaggcacgcttgctcctgcataggagactaaataatctcgatatataaggatggcagtctgttgtcttagatcagtttgagaagcagctctggcagcggggggtgtaggtgtgttgcactacactgaatggaataaggctaaaaatatgtttagtgtctgataagaacgccagttttctcaagctctcatttaacgtcggactttctgttttgcttttaaagaaaaatgttttacaagggcagcatgaagcggacaaaatctggagcaaagaaggattttatgctgttgtcatttttctcagcatctttgttattatagtaacgtgtttgatgattcttyacagattaaaagaaagatttcagctttccttaagacaagacaaagagaaaaaccaggagatccacctatcgcccatcacattacagccagcactgtccgaggcaaagacagtccacagcatggtccaacctgagcaggccccaaaggtactgaatgttgtcgtggaccctcaaggccgaggtgctcctgagatcaragctaccaccgctacctctgtttgcccttctcctttcaaaatgaagcccataggacttcaagagagaagagggtccaacgtatctcttacattggacatgagtagcttggggaacattgaaccctttgtgtctataccaacaccacgggagaaggtagcaatggagtatctgcagtcagccagccgaattctcacaaggtctcagctgagggacrtcgtggcaagttcacatttactccaaagtgaattcatggaaataccaatgaactttgtggatcccaaagaaattgatattccgcgtcatggaactaaaaatcgctataagaccattttaccaaatcccctcagcagagtgtgtttaagaccaaaaaatrtaaccgattcattgagcacctacattaatgctaattatattaggggctacagtggcaaggagaaagccttcattgccacgcagggccccatgatcaacaccgtggatgatttctggcagatggtttggcaggaagacagccctgtgattgttatgatcacaaaactcaaagaaaaaaatgagaaatgtgtgctatactggccggaaaagagagggatatatggaaaagttgaggttctggttatcagtgtaaatgaatgtgataactacaccattcgaaaccttgtcttaaagcaaggaagccacacccaacatgtgaagcattactggtacacctcatggcctgatcacaagactccagacagtgcccagcccctcctacagctcatgctggatgtagaagaagacagacttgcttcccagggccgagggcctgtggttgtccactgcagtgcaggaataggtagaacagggtgttttattgctacatccattggctgtcaacagctgaaagaagaaggagttgtggatgcactaagcattgtctgccagcttcgtatggatagaggtggaatggtgcaaaccagtgagmagtatgaatttgtgcaccatgctctgtgcctgtatgagagcagactttcagcagagactgtccagtgagtcattgaagacttgtcagaccatcaatctcttggggtgattaatcaaattacccacccaaggcttctagaaggagcttcctgcaatggaaggaaggagaagctctgaagcccatgtatggcatggattgtggaagactgggcaacatatttaagatttccagctccttgtgtatatgaatgcatttgtaagcatcccccaaattattctgaaggttttttgatgatggaggtatgataggtttatcacacagcctaaggcagattttgttttgtctgtactgactctatctgccacacagaatgtatgtatgtaatattcagtaataaatgtcatcaggtgatgactggatgagctgctgaagacattcgtattatgtgttagatgctttaatgtttgcaaaatctgycttgtgaatggactgtcagctgttaaactgttcctgttttgaagtgctattacctttctcagttaccagaatcttgctgctaaagttgcaagtgattgataatggatttttaacagagaagtctttgtttttgaaaaacaaaaatcaaaaacagtaactattttatatggaaatgtgtcttgataatattacctattaaatgtgtatttatagtccctcctatcaaacaattacagagcacaatgattgtcattgggtatatatgtatttactctctattattgggcataaaggtggcttctgctccagaactctatccactgtatttccacatcgtgagtcattttactttaaaagggaaaaacaaatttgtagcaactctgaagtatcaagagttttaactacttgwctctcttttgctaagaagggatttttgaatatgctatctacctggaatctctctctcaacaaaaggtatatgccttcaggaatgatataatctgtcccattttcgaggctccttataaggacatttccatgtatgtccttacatttctgaaagctttcaatcttcaagagacaaaaaaaattaaaataactaccctcagcaaacactagctgttctgctcatatatgaatttttaatgcagcaatgttgactttgtttcatactgccaataaactcttaatact

SEQ ID NO: 5124 - DNA, 3492 bp, Homo sapiens
ccgctaagacccggagaagcggaatttcactttgaaattcccttgcctcgtgagggccggcgctgggcatgctcagtagccgcggcgctgctgctgggctgctgggctggcgcggagtccaccctgccgtctccgccttggcttctgggcgtccagaaggccaggcatttgccgcctctgagcgcttctgttccccttacccgcaacctcctactgctcttcctctctccctctcttagggaggttgaagctggtgctggtttctgtcggcgccacagactgactgctctgcaaaccccagccgaggacctgaatcccggagactagaagacccttggcggtggctctttctaatagcactttacctgaagtggggtcgtggtggagtttctcctccacctctcaatgcaaacactatgcggagagcagtctgcttccctgcgctgtgcctgctccttaatcttcacgctgcagggtgcttttcaggaaacaatgatcattttttggcaattaatcagaagaagagtgggaagccggtrttcatttataagcattcacaagacattgagaagagcctggatatagccccacaaaaaatctacagacatagctaccattcctcttccgaagctcaagtaagcaaacgccaccagattgtcaattcagcatttcctagacccgcatatgacccgtctctcaatctgctggccatggatggtcaagatcttgaagtggaaaatctcccaatcccagcagcaaatgtaattgtggtgacactgcaaatggatgtaaacaagctgaacataaccttgcttcggatcttccgccaaggagtggctgcagctttaggactcttaccccagcaagtgcacatcaatcgcctcattggaaagaagaacagtattgaactgttygtgtctcccataaaccgaaaaacaggaatttctgatgctctgccctctgaggaagttcttcgttcacttaatatcaatgttttgcatcaaagtttatcccagtttggaattacagaagtctctcctgagaaaaatgttttacaagggcagcatgaagcggacaaaatctggagcaaagaaggattttatgctgttgtcatttttctcagcatctttgttattatagtaacgtgtttgatgattcttyacagattaaaagaaagatttcagctttccttaagacaagacaaagagaaaaaccaggagatccacctatcgcccatcacattacagccagcactgtccgaggcaaagacagtccacagcatggtccaacctgagcaggccccaaaggtactgaatgttgtcgtggaccctcaaggccgaggtgctcctgagatcaragctaccaccgctacctctgtttgcccttctcctttcaaaatgaagcccataggacttcaagagagaagagggtccaacgtatctcttacattggacatgagtagcttggggaacattgaaccctttgtgtctataccaacaccacgggagaaggtagcaatggagtatctgcagtcagccagccgaattctcacaaggtctcagctgagggacrtcgtggcaagttcacatttactccaaagtgaattcatggaaataccaatgaactttgtggatcccaaagaaattgatattccgcgtcatggaactaaaaatcgctataagaccattttaccaaatcccctcagcagagtgtgtttaagaccaaaaaatrtaaccgattcattgagcacctacattaatgctaattatattaggggctacagtggcaaggagaaagccttcattgccacgcagggccccatgatcaacaccgtggatgatttctggcagatggtttggcaggaagacagccctgtgattgttatgatcacaaaactcaaagaaaaaaatgagaaatgtgtgctatactggccggaaaagagagggatatatggaaaagttgaggttctggttatcagtgtaaatgaatgtgataactacaccattcgaaaccttgtcttaaagcaaggaagccacacccaacatgtgaagcattactggtacacctcatggcctgatcacaagactccagacagtgcccagcccctcctacagctcatgctggatgtagaagaagacagacttgcttcccagggccgagggcctgtggttgtccactgcagtgcaggaataggtagaacagggtgttttattgctacatccattggctgtcaacagctgaaagaagaaggagttgtggatgcactaagcattgtctgccagcttcgtatggatagaggtggaatggtgcaaaccagtgagmagtatgaatttgtgcaccatgctctgtgcctgtatgagagcagactttcagcagagactgtccagtgagtcattgaagacttgtcagaccatcaatctcttggggtgattaatcaaattacccacccaaggcttctagaaggagcttcctgcaatggaaggaaggagaagctctgaagcccatgtatggcatggattgtggaagactgggcaacatatttaagatttccagctccttgtgtatatgaatgcatttgtaagcatcccccaaattattctgaaggttttttgatgatggaggtatgataggtttatcacacagcctaaggcagattttgttttgtctgtactgactctatctgccacacagaatgtatgtatgtaatattcagtaataaatgtcatcaggtgatgactggatgagctgctgaagacattcgtattatgtgttagatgctttaatgtttgcaaaatctgycttgtgaatggactgtcagctgttaaactgttcctgttttgaagtgctattacctttctcagttaccagaatcttgctgctaaagttgcaagtgattgataatggatttttaacagagaagtctttgtttttgaaaaacaaaaatcaaaaacagtaactattttatatggaaatgtgtcttgataatattacctattaaatgtgtatttatagtccctcctatcaaacaattacagagcacaatgattgtcattgggtatatatgtatttactctctattattgggcataaaggtggcttctgctccagaactctatccactgtatttccacatcgtgagtcattttactttaaaagggaaaaacaaatttgtagcaactctgaagtatcaagagttttaactacttgwctctcttttgctaagaagggatttttgaatatgctatctacctggaatctctctctcaacaaaaggtatatgccttcaggaatgatataatctgtcccattttcgaggctccttataaggacatttccatgtatgtccttacatttctgaaagctttcaatcttcaagagacaaaaaaaattaaaataactaccctcagcaaacactagctgttctgctcatatatgaatttttaatgcagcaatgttgactttgtttcatactgccaataaactcttaatact

SEQ ID NO: 5125 - DNA, 3079 bp, Homo sapiens
tayaggagtattgaatagttgggaattggaacccctccagggggaaccaaacattgtcgttcagaagaagacaaagagagattgaaatgaagctgttgatttcaacacacaaattctggtggtagatgaaagcaaagcaagtaagtttctccgaatccctagtcaactggaggtagagacggactgcgcaggttaactacagctcccagcatgcctgaggggcgggctcagcggctgcgcagactggcgcgcgcggacggtcatgggacttcagcatggcggtgtttgcagatttggacctgcgagcgggttctgacctgaaggctctgcgcggacttgtggagacagccgctcaccttggctattcagttgttgctatcaatcatatcgttgactttaaggaaaagaaacaggaaattgaaaaaccagtagctgtttctgaactcttcacaactttgccaattgtacagggaaaatcaagaccaattaaaattttaactagattaacaattattgtctcggatccatctcactgcaatgttttgagagcaacttcttcaagggcccggctctatgatgttgttgcagtttttccaaagacagaaaagctttttcatattgcttgcacacatttagatgtggatttagtctgcataactgtaacagagaaactaccattttacttcaaaagacctcctattaatgtgrcgattgaccgaggcctggcttttgaacttgtctatagccctgctatcaaagactccacaatgagaaggtatacaatttccagtgccctcaatttgatgcaaatctgcaaaggaaagaatgtaattatatctagtgctgcagaaaggcctttagaaataagagggccatatgacgtggcaaatctaggcttgctgtttgggctctctgaaagtgacgccaaggctgcggtgtccaccaactgccgagcagcgcttctccatggagaaactagaaaaactgcttttggaattatctctacagtgaagaaacctcggccatcagaaggagatgaagattgtcttccagcttccaagaaagccaagtgtgagggctgaaaasaatgccccagtctctgtcagcactcccttcttcccttttatagttcatcagccacaacaaaaataaaacctttgtgtgatttactgttttcatttggagctagaaatcaatagtctataaaaacagttttacttgcaatccattaaaacaacaaacgaaacctagtgaagcatctttttaaaaggctgccagcttaatgaatttagatgtactttaagagagaaagactggttatttctcctttgtgtaagtgataaacaacagcaaatatacttgaataaaatgtttcaggtatttttgtttcattttgtttttgagatagggtctttgttgctcaggctggagtacagtggcataatcacagctcactgcaacctcaatcctgggctcaagtgatcctcccgcttcagcctctcaagcagcgggaactacaggtgtgcactaccacacctggctattttttttttttttttttttttcccttgtagagacatggtctcactatgttgctgaggctggtctcaaactcctaggatcaagccatcctcccgctttggcctcctaaagtgctgggattacatgagccaccacatgcagccagatgtttgaatattttaagagcttctttcgaaagtttcttgttcatactcaaatagtagttattttgaagatattcaaacttatattgaagaagtgactttagttcctcttgttttaagcttctttcatgtattcaaatcagcatttttttctaagaaattgctatagaatttgtggaaggagagaggatacacatgtaaaattacatctggtctcttccttcactgcttcatgcctacgtaaggtctttgaaataggattccttacttttagttagaaacccctaaaacgctaatattgattttcctgatagctgtattaaaaatagcaaagcatcggactgaaccaactttggaaataatttatttttataatgggatcatgttaagtagaagtagctttttatgcaaatacatgcatttatgcaatattaatgtaagggctctaaaacaatggagtagagccagaggtataactgaataagaaatttttttaagcaagagaaagacaactgttctgcgggttggagaaaatacaattttttttttttttttttgagacagtctcgctctgtcccccaggctggagtgcagtggctcgatctctgctcactgcaagctccgcctcctgggttcatgccattctcctgcctcagcctcctgagtagctgggactacaggcgctcgccatgtatttagcagagacggggtttcaccgtgttagccaggatggtctcaatctcctgacctcatattccacccgcctcggcctcccaaagtgctgggattacaggcgttagccactgcgcccggcccgagaaaatacagttttaaaaagagaaagctttataacctcaccaatgaatacaaatgtttaaataaaatattgattaaaaaaacattaaaagtgcatcatgaccaggtgaaatttattctttttttcttcttctttttgagacagggtctcactctgtcacccaggctggagtgcagtggcacaatctcggctcactgcaacctttgcctcttgggctcaagccatcctcccacctcagcctccmaagtaagtgggaccagaagcatgcaccaccacatcccagctaatttttgtatttttttgtagagatggggttttgccatgtccaggctagtctcaaactcctggcagattcaagcagtctgtccgcctcagcatcccaaagtgctgggattacaggcacaggcatgagccaccatacccggccttccagttctttttaatgcagtatcctttatcatattcataggtcaaaagagaaaaatcagaatatttttaatagatgccagaaagacatttaataaagttaaatccactcctgatttttaaaatgacaacaataaaaacccatggcaaa

SEQ ID NO: 5126 - DNA, 2319 bp, Homo sapiens
tttgtcagtgcacaaaatggctccctacagcccactggtgacccggctgcagaaagctctgggtgtgcggcaataccatgtggcctcagtcctgtgccaacgggccaagatggcgatgagccactttgagcccaatgagtacatccactatgacctgctagagaagaacattaacattgtttgcaaacgactgaactggcctctgaccctcttggagaagatcgtgtatggacacctggatgacccggccagccaggaaatcgagcagggcaagacacctgtggctgtggccggaccacgtggccatgctgcagttcatcagcagtgggctgcccaaggtggccatgccrtccaccatccactgtgaccatctgaaagaggcccagctcggaggcgagaaagacctgcgccaggccaaggacatcaaccaggaagtttataatttcctggcaactgcaggtgccaaatatggcgtggactgctggaggcttggatctggaatcattcattagattattctggaaaactatgcataccttagggttcttctgattggcactgactcccacacccccagtggtggcggcctggggggaatctgcattggagttgggggtgccgatgctgtggacatcatggctgagatcccctaggagatgaagtgccccaaggtgattggcatgaagctaacaggctccctctccaattggacctcaccctaagacgtgatcctgaaggtgtggcaggcatcctcaaagtgaaaggtggcacaggtgcaatcgtggaataccacaggcctggcatagactccatstcctgtgctggcatggcgacaatctgcaacatgggcgcagaaattggggccaccacttccgtgttcccttacaaccacaggatgaggaggtacctaagcaagacggccggacagacattgccaatctagctgatgaattccaggatcacttggtgcctgaccctggctgccattatgaccaactaattgaaattaacctcagtgagctgaagccgcacatcaatgggcccttcacccccgaccaggctcacccygtggcagaagtgggcaaggtggcagagaaggaaggatggcctctggacatccgagtaggtctgactggtacctgcaacagttaaagctatgaagatcccgggcgctcagcagctgtggccaagcaggcactggcccatgacttcaagtgcaagtcccacttcaccatcactccaggctcygagcagatccacgccaccattgagcrggacagctaygcacagattttgaggaatgtgggtggcatcgtcctggccaatgcttgtggcccctgcattggccgctgggacacgaaggacatcaagaaggggaagaagtacacaatcgtcacctcctacaacaggaacttcacgggctgcaatgatgcgaaycctgagacccatgtcttcgtcacrtccccagagattgtcacagccctggccattgtgggaatcctcaagttcaacccagagaccaactacctgatgggcaaagataggaagaagttcaagctagaggctctggatgcagacgacyttccccaagaggagtttgacccagggcaggacccctaccagcaccccccacaggacagcagtggccagcacgtggatgtgagccccactagccagcgcctgcagctcctggaggcttttgacaagtgggatagcaaggacctggaggaccygcagatactcatcaaggtcaaagggaagtgtactactgaccacatctcggctgctggcccctggctcaagttttgtgggcacttggacaacatctccaacaacctgctcactggtgccatcaacattgaaaacagccaggccaactccgtgtgcagtgccvtcacccaggagtttggccccgtccctgacactgcccgctactacaagaaacatggcatcaggtgggtggtgatcggggacgagaactcgagccgggagcacgcagtgctggagcctccccacctctggggccrggccatcatcaccaagagctttgccaggatccacaagaccaacccgaagaagcagggcctgctgcccctgacttttgctgacccaggcgactacaacaaggttcaccctgtggacaagctgactattcagggcctgaaggacttcgcccctgacaagcccctgaagtgcatcatcaagcaccccaatgggacccaggagaccatcctcctgaaccacaccttcaatgagatgcggatcaagtggttctgtgccggcagtgccctcaacagaatgaaggagctgcagcagtga

SEQ ID NO: 5127 - DNA, 4400 bp, Homo sapiens
atgtctgtgctcaggcggatgatgcgggtttccaatcgctctctcctcgccttcatcttcttcttctccctctcttcgtcctgtctgtacttcrtctatgtggccccaggcatcgattatcccgaaggcaataattcaagtgattatcttgttcaaacaacaacgtatctcccggaaaacttcacatactcaccatacctcccctgtccagaaaagctgccttatatgcgaggattcctcaatgtcaatgtaagcgaagtcagttttgatgaaattcatcaactcttctccaaggatttagatattgagccagggggtcattggaggccaaaagactgtaaacccagatggaaggtggcagttctcattcctttccgtaatcgccatgaacatcttccaatttttttcttacatctgattccaatgctccagaagcagcggctggaatttgcgttttatgtcattgaacagactggcacacaaccttttaaccgtgcgatgcttttcaatgtgggcttcaaagaggccatgaaagacagtgtctgggactgtgtaatcttccacgatgtggatcatctacctgaaaatgaccggaactattacggatgtggagaaatgccacgtcattttgctgcaaagctggataaatacatgtatattcttccatataaagaattttttggtggtgtaagtgggctgacagtggaacaatttagaaagatcaatggttttcctaatgccttctggggatggggaggagaagatgatgacctttggaacagagttcactatgctggatataatgtaaccagaccagagggagacttaggaaaatacaagtcaattcctcatcaccatagaggtgaagtccagtttttaggacggtataaattactaaggtattccaaggagcgtcagtacatcgatggactgaacaatttaatatataggccaaaaatactggttgataggttgtatacaaacatatctgtaaacctcatgccagagttagctccartcgaagactattaaaagaagtggctgtcgtggcaaggtagaccacaatgctggatcataaacttggagcgcgctcttagtggaggtcagtgattggctgtgtcacagtgcccttttctctgagaagagccagcagtccacagtgtttacagagtgggactatatacagtcacccttctctcacccgtcctccctgctctgagacacacccctgtggcgagcaccgcagaaaygggaagccactacttaagatcggaagttaagagagctccctccgaagagaaaatttttatactaaaatctataatttaattcaagmgaatgcttttatttccgtttaaacatattttgtatatatgtgatataaattaatgtgtgcaaattgtttaaaaattagatgtgttgcagttttgcatgtaatcggttatacctttattggacttttatagacattttttatttgcatgaaaaaaactcactaaatttacatcactaaacaaaggttaacccttgtgtgaaatgaaggaactgtcaataattgacagccaactaatacagtaaactgttatactagttttgagctttagacctcagccttttgtgtggaagaagtcacagctttcttaggctttaaaggaaaagaaggaaggacttaaatagcttttcttcctaccgggattacctatgtttttccttgcttgcaatctcatctgattttgctagaaatcacaaccatattgtttatgcatattgcatgagtattaccaagaaaaatcttaaaagttgtgatgtgacatgatataaaggatctctttatgttaaatgtctttccatgtacctctggtgtgtcagggattttgtgcctcaaaaaatgtttccaaggttgtgtgtttatactgtgtattttttttaaattcacggtgaacagcacttttattatttccagttcagaagagccaaaaaaaagtatcttcatttaaaaagaaatcaagtcagtttttttaaaagaatgatctatggaagaaaacccaatagtacttataatatacaaatgaattatactattagataagaattaaatattctatttttataaagataaatacttagtagataaaaacaaattttaagtttagttttcagacatagaatttcacttttggaggggacccttgaatgttagtttcattcaaactatattttgtttttttcacttttaagagattatatctctggtgttaattactaaaattttctttctaaaagtataatttaatagaattatcttaaaatacatgatcagtattcagtgcgctgatattataatgtcttctatatgtagtatctaaaagcataatttaatagcattgtcttaaaatacrtgatgagttatttggtgcactgatgccataatgtcttctatatgtaatatcttacatgtttgcatgagtgtcagggctttgtccagttatcttcatatgactgttctctgaraaaaggtcttactacctgatatcaagtacatatcttaattttggatgaatttttccacagtaaagccgaacagtattcttttttgaaaattagcaattataaagattgtttaaaatatcttgatattttcacaaattttaaacaaaaaattaaatatctataaagtgaatgttcaacaacaatgatgagcaatagaaatctatatatgagaaacgtttggataatatttgcctcaaggattgtttacctaaaacagaactatggttatttatctcagattgtaagttttattttgaagtgtcatttttatggcaatattgataacacaaatgaccacaaactaaatcataaaataattgaatccttacactttgagaaaatggatagcttctgtgttatgataccaaacaaaatattttcatatttatttcttagaactatttccaaaatatttatatttcagtttttttatggtactcgaaaaatcaaaccttctgaaaattatgatatttgtacttcatttgtgtattagttcattttctgtttctattacatagtttttmaagtcaatgaaagagattgagaatgttaacatttgttgatcaatgtggagctgtccacattcggtatcttttcatttttatatatattttacagtttcaagaaaacttagtactactagtatctgccttattttcttaagtytgatgttaatttttgtttcaggagtgagatataaacattttgctttttttcagttttgaaatatagtttgtcatcctgtgaaaaccacctcgtttgctttttgtttgtttgttttgcttttttagtgtagacctaaaattatttttgcctataaacagtgaacttaatatgtttctgtgagagtgacagagctgtgcccgtttatcttcattgtattaattattacataaagattaacaaatacattgcaaatgcaaattataggatgtttggaggatttattaatgagcatgtattgattgcctattccatatccagtgcaatgctaggtatgtctatggaaggagtattattacttcatttctaaacaaatgaagtcaagcaaattgagatctttctgaaattatgaagacatcttctgataacttatctgttgtatttcctagtctcaaagtcaagaaacccgtatatgtggacctagggctaataggaggtccctatggcactaactgggaaaattacatggtgcttttcaactacagaaagaagtaatgactaatgggcctgtctgtagagaagaaaaggagaagagtacacatttgctggaactatatataattcacagtggagatagttaattctttgctaaaactagggttttatgagtattttttaaatctacatttaagtttttgtttttgtgaaaagttattcagtaagaaaactttataatattaagtagatacagttatgtattaaaaatttccttatatacccttttgccagccaagatactgatattttaaaacaaaatggaaaaatgtccaatacaatattctctttctggaggcttcctacaagtgaaagcagattttgtcattttatttggcctttgcttgtctttgatatatttctttatgtgtttttcaaatacatactgttgtagatttattgtcttgtatttgcaagtatgccggttgagagaactaaaatggttatagtattgtttatcagaaagaggaagtgtacttaagattattttatttatttagatgaaaggcttctacataaatgcactgaaataaatgctagtaatttcttgtatcccacttctttttttgcttctcatggaaatgtttgtacttttttatcattgtcttttatgaaatataatgttctaaaga

SEQ ID NO: 5128 - DNA, 4814 bp, Homo sapiens
ccggctttcttccgtcctgccgtccccgggcccctagcccccagtcccctctcccccctccacctcttgtccctcggcctccgcgcctcccctcccccgactctctggcctcccattcattccgtccgctccctcccatttcctcttttccgctcgggccctctccccagagcctccccgcgcggaccccgctgcagtctcggggttctcagcacatttatggaagtttagggcctggacagtggccccgagtccggcctgagagcgcagcctgggctgctggcagggaagaggaagatgtctgtgctcaggcggatgatgcgggtttccaatcgctctctcctcgccttcatcttcttcttctccctctcttcgtcctgtctgtacttcrtctatgtggccccaggcatcgccaacacatatctctttatggtacaagctcgaggtataatgttgagagaaaatgtgaaaacaataggtcatatgatcaggctgtacacaaataaaaacagtacgctcaacggtacagattatcccgaaggcaataattcaagtgattatcttgttcaaacaacaacgtatctcccggaaaacttcacatactcaccatacctcccctgtccagaaaagctgccttatatgcgaggattcctcaatgtcaatgtaagcgaagtcagttttgatgaaattcatcaactcttctccaaggatttagatattgagccagggggtcattggaggccaaaagactgtaaacccagatggaaggtggcagttctcattcctttccgtaatcgccatgaacatcttccaatttttttcttacatctgattccaatgctccagaagcagcggctggaatttgcgttttatgtcattgaacagactggcacacaaccttttaaccgtgcgatgcttttcaatgtgggcttcaaagaggccatgaaagacagtgtctgggactgtgtaatcttccacgatgtggatcatctacctgaaaatgaccggaactattacggatgtggagaaatgccacgtcattttgctgcaaagctggataaatacatgtatattcttccatataaagaattttttggtggtgtaagtgggctgacagtggaacaatttagaaagatcaatggttttcctaatgccttctggggatggggaggagaagatgatgacctttggaacagagttcactatgctggatataatgtaaccagaccagagggagacttaggaaaatacaagtcaattcctcatcaccatagaggtgaagtccagtttttaggacggtataaattactaaggtattccaaggagcgtcagtacatcgatggactgaacaatttaatatataggccaaaaatactggttgataggttgtatacaaacatatctgtaaacctcatgccagagttagctccartcgaagactattaaaagaagtggctgtcgtggcaaggtagaccacaatgctggatcataaacttggagcgcgctcttagtggaggtcagtgattggctgtgtcacagtgcccttttctctgagaagagccagcagtccacagtgtttacagagtgggactatatacagtcacccttctctcacccgtcctccctgctctgagacacacccctgtggcgagcaccgcagaaaygggaagccactacttaagatcggaagttaagagagctccctccgaagagaaaatttttatactaaaatctataatttaattcaagmgaatgcttttatttccgtttaaacatattttgtatatatgtgatataaattaatgtgtgcaaattgtttaaaaattagatgtgttgcagttttgcatgtaatcggttatacctttattggacttttatagacattttttatttgcatgaaaaaaactcactaaatttacatcactaaacaaaggttaacccttgtgtgaaatgaaggaactgtcaataattgacagccaactaatacagtaaactgttatactagttttgagctttagacctcagccttttgtgtggaagaagtcacagctttcttaggctttaaaggaaaagaaggaaggacttaaatagcttttcttcctaccgggattacctatgtttttccttgcttgcaatctcatctgattttgctagaaatcacaaccatattgtttatgcatattgcatgagtattaccaagaaaaatcttaaaagttgtgatgtgacatgatataaaggatctctttatgttaaatgtctttccatgtacctctggtgtgtcagggattttgtgcctcaaaaaatgtttccaaggttgtgtgtttatactgtgtattttttttaaattcacggtgaacagcacttttattatttccagttcagaagagccaaaaaaaagtatcttcatttaaaaagaaatcaagtcagtttttttaaaagaatgatctatggaagaaaacccaatagtacttataatatacaaatgaattatactattagataagaattaaatattctatttttataaagataaatacttagtagataaaaacaaattttaagtttagttttcagacatagaatttcacttttggaggggacccttgaatgttagtttcattcaaactatattttgtttttttcacttttaagagattatatctctggtgttaattactaaaattttctttctaaaagtataatttaatagaattatcttaaaatacatgatcagtattcagtgcgctgatattataatgtcttctatatgtagtatctaaaagcataatttaatagcattgtcttaaaatacrtgatgagttatttggtgcactgatgccataatgtcttctatatgtaatatcttacatgtttgcatgagtgtcagggctttgtccagttatcttcatatgactgttctctgaraaaaggtcttactacctgatatcaagtacatatcttaattttggatgaatttttccacagtaaagccgaacagtattcttttttgaaaattagcaattataaagattgtttaaaatatcttgatattttcacaaattttaaacaaaaaattaaatatctataaagtgaatgttcaacaacaatgatgagcaatagaaatctatatatgagaaacgtttggataatatttgcctcaaggattgtttacctaaaacagaactatggttatttatctcagattgtaagttttattttgaagtgtcatttttatggcaatattgataacacaaatgaccacaaactaaatcataaaataattgaatccttacactttgagaaaatggatagcttctgtgttatgataccaaacaaaatattttcatatttatttcttagaactatttccaaaatatttatatttcagtttttttatggtactcgaaaaatcaaaccttctgaaaattatgatatttgtacttcatttgtgtattagttcattttctgtttctattacatagtttttmaagtcaatgaaagagattgagaatgttaacatttgttgatcaatgtggagctgtccacattcggtatcttttcatttttatatatattttacagtttcaagaaaacttagtactactagtatctgccttattttcttaagtytgatgttaatttttgtttcaggagtgagatataaacattttgctttttttcagttttgaaatatagtttgtcatcctgtgaaaaccacctcgtttgctttttgtttgtttgttttgcttttttagtgtagacctaaaattatttttgcctataaacagtgaacttaatatgtttctgtgagagtgacagagctgtgcccgtttatcttcattgtattaattattacataaagattaacaaatacattgcaaatgcaaattataggatgtttggaggatttattaatgagcatgtattgattgcctattccatatccagtgcaatgctaggtatgtctatggaaggagtattattacttcatttctaaacaaatgaagtcaagcaaattgagatctttctgaaattatgaagacatcttctgataacttatctgttgtatttcctagtctcaaagtcaagaaacccgtatatgtggacctagggctaataggaggtccctatggcactaactgggaaaattacatggtgcttttcaactacagaaagaagtaatgactaatgggcctgtctgtagagaagaaaaggagaagagtacacatttgctggaactatatataattcacagtggagatagttaattctttgctaaaactagggttttatgagtattttttaaatctacatttaagtttttgtttttgtgaaaagttattcagtaagaaaactttataatattaagtagatacagttatgtattaaaaatttccttatatacccttttgccagccaagatactgatattttaaaacaaaatggaaaaatgtccaatacaatattctctttctggaggcttcctacaagtgaaagcagattttgtcattttatttggcctttgcttgtctttgatatatttctttatgtgtttttcaaatacatactgttgtagatttattgtcttgtatttgcaagtatgccggttgagagaactaaaatggttatagtattgtttatcagaaagaggaagtgtacttaagattattttatttatttagatgaaaggcttctacataaatgcactgaaataaatgctagtaatttcttgtatcccacttctttttttgcttctcatggaaatgtttgtacttttttatcattgtcttttatgaaatataatgttctaaaga

SEQ ID NO: 5129 - DNA, 1471 bp, Homo sapiens
atccatatggcggccggccggcgcggtggctctcgcctgtgatcccgcgctttgggaggccgaggcgggaggttcttctgagctgaagagttcgagaccagcccgggaaacgtacccgccgccgccatgcccttctccaacagccacaacgcactgaagctgcgcttcccggccgaggacgagttccccgacctgagcgcccacaacaaccacatggccaaggtgctgacccccgagctgtacgcggasstgcgcgccaagagcacgccgagcggcttcacgctggacgacgtcatccagacaggcgtggacaacccgggccacccgtacatcatgaccgtgggctgcgtggcgggcgacgaggagtcctacgaagtgttcaaggatctcttcgaccccatcatcgaggaccggcacggcggctacaagcccagcgatgagcacaagaccgacctcaaccccgacaacctgcagggcggcgacgacctggaccccaactacgtgctgagctcgcgggtgcgcacgggccgcagcatccgtggcttctgcctccccccgcactgcagccgcggggagcgccgmgccatcgagaagctcgcggtggaagccctgtccagcctggacggcgacctggcgggccgatactacgcgctcaagagcatgacggaggcggagcagcagcagctcatcgacgaccacttcctcttcgacaagcccgtgtcgcccctgctgctggcctcgggcatggcccgcgactggcccgacgcccgcggtatctggcacaatgacaataagaccttcctggtgtgggtcaacgaggaggaccacctgcgggtcatctccatgcagaaggggggcaacatgaaggaggtgttcacccgcttctgcaccggcctcacccagattgaaactctcttcaagtctraggactatgagttcatgtggaaccctcacctgggctacatcctcacctgcccatccaacctgggcaccgggctgcgggcaggtgtgcatatcaagctgcccaacctgggcaagcatgagaagttctcggaggtgcttaagcggctgcgacttcagaagcgaggcacaggcggtgtggacacggctgcggtgggcggggtcttmgacgtctccaacgctgaccgcctgggcttctcagaggtggagctggtgcagatggtggtggacggagtgaagctgytcatcgagatggarcagcggctggagcagggccaggccatcgacgacctcatgcctgcycagaaatgaagcccggcccacacccgacaccagccctgctgcttcctaacttattgcctgggcagtgcccaccatgcacccctgatgttcgccgtctggcgagcccttagccttgctgtagagrcttccgtcacccttggtagagtttatttttttgatggctaagatactgctgatgctgaaataaactagggttttggcctgcctg

SEQ ID NO: 5130 - DNA, 1504 bp, Homo sapiens
agcggccgctgttcgcctgcgtcgctccgggagctgccgacggacggagcgcccccgcccccgcccggccgcccgcccgccgccgccatgcccttctccaacagccacaacgcactgaagctgcgcttcccggccgaggacgagttccccgacctgagcgcccacaacaaccacatggccaaggtgctgacccccgagctgtacgcggasstgcgcgccaagagcacgccgagcggcttcacgctggacgacgtcatccagacaggcgtggacaacccgggccacccgtacatcatgaccgtgggctgcgtggcgggcgacgaggagtcctacgaagtgttcaaggatctcttcgaccccatcatcgaggaccggcacggcggctacaagcccagcgatgagcacaagaccgacctcaaccccgacaacctgcaggtgcggggctgcgggcgggccgggcgggcggggccggggtcttcgggcgctcactcccgtctcgcctcccagggcggcgacgacctggaccccaactacgtgctgagctcgcgggtgcgcacgggccgcagcatccgtggcttctgcctccccccgcactgcagccgcggggagcgccgmgccatcgagaagctcgcggtggaagccctgtccagcctggacggcgacctggcgggccgatactacgcgctcaagagcatgacggaggcggagcagcagcagctcatcgacgaccacttcctcttcgacaagcccgtgtcgcccctgctgctggcctcgggcatggcccgcgactggcccgacgcccgcggtatctggcacaatgacaataagaccttcctggtgtgggtcaacgaggaggaccacctgcgggtcatctccatgcagaaggggggcaacatgaaggaggtgttcacccgcttctgcaccggcctcacccagattgaaactctcttcaagtctraggactatgagttcatgtggaaccctcacctgggctacatcctcacctgcccatccaacctgggcaccgggctgcgggcaggtgtgcatatcaagctgcccaacctgggcaagcatgagaagttctcggaggtgcttaagcggctgcgacttcagaagcgaggcacaggcggtgtggacacggctgcggtgggcggggtcttmgacgtctccaacgctgaccgcctgggcttctcagaggtggagctggtgcagatggtggtggacggagtgaagctgytcatcgagatggarcagcggctggagcagggccaggccatcgacgacctcatgcctgcycagaaatgaagcccggcccacacccgacaccagccctgctgcttcctaacttattgcctgggcagtgcccaccatgcacccctgatgttcgccgtctggcgagcccttagccttgctgtagagrcttccgtcacccttggtagagtttatttttttgatggctaagatactgctgatgctgaaataaactagggttttggcctgcctg

SEQ ID NO: 5131 - DNA, 1357 bp, Homo sapiens
cccgccgccgccatgcccttctccaacagccacaacgcactgaagctgcgcttcccggccgaggacgagttccccgacctgagcgcccacaacaaccacatggccaaggtgctgacccccgagctgtacgcggasstgcgcgccaagagcacgccgagcggcttcacgctggacgacgtcatccagacaggcgtggacaacccgggccacccgtacatcatgaccgtgggctgcgtggcgggcgacgaggagtcctacgaagtgttcaaggatctcttcgaccccatcatcgaggaccggcacggcggctacaagcccagcgatgagcacaagaccgacctcaaccccgacaacctgcagggcggcgacgacctggaccccaactacgtgctgagctcgcgggtgcgcacgggccgcagcatccgtggcttctgcctccccccgcactgcagccgcggggagcgccgmgccatcgagaagctcgcggtggaagccctgtccagcctggacggcgacctggcgggccgatactacgcgctcaagagcatgacggaggcggagcagcagcagctcatcgacgaccacttcctcttcgacaagcccgtgtcgcccctgctgctggcctcgggcatggcccgcgactggcccgacgcccgcggtatctggcacaatgacaataagaccttcctggtgtgggtcaacgaggaggaccacctgcgggtcatctccatgcagaaggggggcaacatgaaggaggtgttcacccgcttctgcaccggcctcacccagattgaaactctcttcaagtctraggactatgagttcatgtggaaccctcacctgggctacatcctcacctgcccatccaacctgggcaccgggctgcgggcaggtgtgcatatcaagctgcccaacctgggcaagcatgagaagttctcggaggtgcttaagcggctgcgacttcagaagcgaggcacaggcggtgtggacacggctgcggtgggcggggtcttmgacgtctccaacgctgaccgcctgggcttctcagaggtggagctggtgcagatggtggtggacggagtgaagctgytcatcgagatggarcagcggctggagcagggccaggccatcgacgacctcatgcctgcycagaaatgaagcccggcccacacccgacaccagccctgctgcttcctaacttattgcctgggcagtgcccaccatgcacccctgatgttcgccgtctggcgagcccttagccttgctgtagagrcttccgtcacccttggtagagtttatttttttgatggctaagatactgctgatgctgaaataaactagggttttggcctgcctg

SEQ ID NO: 5132 - DNA, 1429 bp, Homo sapiens
atccatatggcggccggccggcgcggtggctctcgcctgtgatcccgcgctttgggaggccgaggcgggaggttcttctgagctgaagagttcgagaccagcccgggaaacgtacccgccgccgccatgcccttctccaacagccacaacgcactgaagctgcgcttcccggccgaggacgagttccccgacctgagcgcccacaacaaccacatggccaaggtgctgacccccgagctgtacgcggasstgcgcgccaagagcacgccgagcggcttcacgctggacgacgtcatccagacaggcgtggacaacccgggccacccgtacatcatgaccgtgggctgcgtggcgggcgacgaggagtcctacgaagtgttcaaggatctcttcgaccccatcatcgaggaccggcacggcggctacaagcccagcgatgagcacaagaccgacctcaaccccgacaacctgcagggcggcgacgacctggaccccaactacgtgctgagctcgcgggtgcgcacgggccgcagcatccgtggcttctgcctccccccgcactgcagccgcggggagcgccgmgccatcgagaagctcgcggtggaagccctgtccagcctggacggcgacctggcgggccgatactacgcgctcaagagcatgacggaggcggagcagcagcagctcatcgacgaccacttcctcttcgacaagcccgtgtcgcccctgctgctggcctcgggcatggcccgcgactggcccgacgcccgcggtatctggcacaatgacaataagaccttcctggtgtgggtcaacgaggaggaccacctgcgggtcatctccatgcagaaggggggcaacatgaaggaggtgttcacccgcttctgcaccggcctcacccagattgaaactctcttcaagtctraggactatgagttcatgtggaaccctcacctgggctacatcctcacctgcccatccaacctgggcaccgggctgcgggcaggtgtgcatatcaagctgcccaacctgggcaagcatgagaagttctcggaggtgcttaagcggctgcgacttcagaagcgaggcacaggcggtgtggacacggctgcggtgggcggggtcttmgacgtctccaacgctgaccgcctgggcttctcagaggtggagctggtgcagatggtggtggacggagtgaagctgytcatcgagatggarcagcggctggagcagggccaggccatcgacgacctcatccctgctgcttcctaacttattgcctgggcagtgcccaccatgcacccctgatgttcgccgtctggcgagcccttagccttgctgtagagrcttccgtcacccttggtagagtttatttttttgatggctaagatactgctgatgctgaaataaactagggttttggcctgcc

SEQ ID NO: 5133 - DNA, 1432 bp, Homo sapiens
agcggccgctgttcgcctgcgtcgctccgggagctgccgacggacggagcgcccccgcccccgcccggccgcccgcccgccgccgccatgcccttctccaacagccacaacgcactgaagctgcgcttcccggccgaggacgagttccccgacctgagcgcccacaacaaccacatggccaaggtgctgacccccgagctgtacgcggasstgcgcgccaagagcacgccgagcggcttcacgctggacgacgtcatccagacaggcgtggacaacccgggccacccgtacatcatgaccgtgggctgcgtggcgggcgacgaggagtcctacgaagtgttcaaggatctcttcgaccccatcatcgaggaccggcacggcggctacaagcccagcgatgagcacaagaccgacctcaaccccgacaacctgcagggcggcgacgacctggaccccaactacgtgctgagctcgcgggtgcgcacgggccgcagcatccgtggcttctgcctccccccgcactgcagccgcggggagcgccgmgccatcgagaagctcgcggtggaagccctgtccagcctggacggcgacctggcgggccgatactacgcgctcaagagcatgacggaggcggagcagcagcagctcatcgacgaccacttcctcttcgacaagcccgtgtcgcccctgctgctggcctcgggcatggcccgcgactggcccgacgcccgcggtatctggcacaatgacaataagaccttcctggtgtgggtcaacgaggaggaccacctgcgggtcatctccatgcagaaggggggcaacatgaaggaggtgttcacccgcttctgcaccggcctcacccagattgaaactctcttcaagtctraggactatgagttcatgtggaaccctcacctgggctacatcctcacctgcccatccaacctgggcaccgggctgcgggcaggtgtgcatatcaagctgcccaacctgggcaagcatgagaagttctcggaggtgcttaagcggctgcgacttcagaagcgaggcacaggcggtgtggacacggctgcggtgggcggggtcttmgacgtctccaacgctgaccgcctgggcttctcagaggtggagctggtgcagatggtggtggacggagtgaagctgytcatcgagatggarcagcggctggagcagggccaggccatcgacgacctcatgcctgcycagaaatgaagcccggcccacacccgacaccagccctgctgcttcctaacttattgcctgggcagtgcccaccatgcacccctgatgttcgccgtctggcgagcccttagccttgctgtagagrcttccgtcacccttggtagagtttatttttttgatggctaagatactgctgatgctgaaataaactagggttttggcctgcctg

SEQ ID NO: 5134 - DNA, 691 bp, Homo sapiens
gtattcaatgcactggatttgatggaaaataagacattcttggaaaaactcaagtttggtataggagatggcaatttgcagtattacctgtacaattggaggtgtccaggtacagattctgaaaagggctctggtaacttcgttaacgccaatgrcaagctgcttcctgacgtgtgcaggcgtccaccctgacacttgctgcttagcatctgttttcttctccttcagattmtcactaayatcaacagcaatgctgcatttctctctgctttcttttttcagaaaaggtgttttgttctttttcttyttatcttcaatcttctgaagtccaatagctttaagcctgtcctcaagcgtctgtaggatgaagtgcatatcctcgctctccagagcgctccagcggatgatgtatgggttgttcaacgacgtcttcacaaccagaggtctygtcttacggagagatccccgccccggtgcttgaggagctgcagccattttgaaaatccttccaagaagcaaaatgacaacagaaaaaattcatgttagcgacaactgcatgacttaagaatatcttgactgtactctctgattcttatttatttatgtatttattttttgagacagaatttcactcttgttgcccaggctggagtgcagtggcacaatctcagctcactgcaacctccacctc

SEQ ID NO: 5135 - DNA, 2903 bp, Homo sapiens
agcagtacggcgggaggcactagagggagctgcggccgctccggcccggccccgagcaccgcctccccagccagcgccgccgcgatggcggaggacagcgagtctgcggccagccagcagagcctggaactggacgaccaggacacgtgcgggatagacggggacaatgaggaggagacggagcacgccaaaggaagtcctggagggtatttgggagccaaaaagaaaaagaagaaacagaagagaaaaaaggagaaaccaaattccggaggcaccaagtcagactcggcatctgattcccaggagattaaaattcagcagccttcgaaaaatcccagtgttccaatgcagaagttgcaggatatccagagagcaatggagctgctatccgcatgccagggcccagccaggaacattgatgaggctgcaaagcacagataccagttttgggacacacaaccggtaccaaaactagatgaagtcataacatctcatggtgcaattgaaccagataaagacaacgtacgccaagaaccgtattctttgccacagggttttatgtgggacactttagacttgagtgatgccgaagtgctcaaggagttatacacgttgttaaatgagaattacgtagaagatgatgacaatatgttccgatttgactattcaccygagttcctgttgtgggctctgcgtccaccaggctggctcctgcagtggcactgtggggtcagagtgtcttcaaataaaaaactggtcgggttcataagtgccatcccagcaaacattcggatttatgacagtgtgaagaagatggtagaaatcaactttctttgtgttcataagaagttgagatcgaaacgggtagccccagtgctaatccgagagatcactagaagagtgaacctggaagggatcttccaggctgtgtacaccgcgggagtggttcttcctaagcccatagccacatgcagatactggcatcgatcactaaaccccagaaaattggtagaagtgaaattttctcacttgagtagaaatatgactttacagagaacaatgaagctatacagacttccagatgttacaaagacttcaggtttgagaccaatggaaccaaaagatatcaaatcagttcgagaattaatcaacacttacctgaagcagtttcatctggctccagtgatggatgaagaggaagtagcccactggttcctcccccgggagcacattattgacacgtttgtagtggagagccccaacggtaaactgactgatttcctgagcttctatacgctcccctccacggtgatgcaccaccctgctcacaagagcctcaaagccgcctactcattctacaacatccacacagagacgcccctgctggacctcatgagcgacgcgctcatcctggctaaatcgaaaggatttgatgtattcaatgcactggatttgatggaaaataagacattcttggaaaaactcaagtttggtataggagatggcaatttgcagtattacctgtacaattggaggtgtccaggtacagattctgaaaaggttggactagtactacaatagatggatatttttatttctagaactctgacatcatcatttgttaatatttaatgatttctggaactgccattccaaagaagaataaaagcacaactcaagtgaaattgaagtagtcgataatcagaaaagatgacaaaagtccacatgtgacatttgtacgtttctagctagaatgttaaacttcatcctttttttactgttgacctatttgtgggagggatgaaaggctacaaagagcacattcttgtaattttcaaatttttgcctgtctcttgaagaggtattttttcacccttagaaaagggactgtttttctatggactaagtagaagttacagagtcatgtaagaaaatctttgctattgtgtggagagaaattgctgcatttctgtttcttaagtgatggtacatttgtccatgtaacagaacaaaagatccatttggaaattttttttactggtatcaccttacatggtatcactgggaacatttatggaatcaacacttctgtagctcagtgacaggtggtggttgtttaagtgcagagcaatattaaaatgtactggtgactagtacatgtatttctccataagcagagttgccgaatcaataaacatgcaagtttgtactttgatctttaccaggtcagtggattgcttcaaaagcagagttttgtgcaagcactcactgtgctctctgaaagagcctgaggccgggcgtggtggctcacgcctgtaatcccagcactttgggaggccaaggtgggcagatcatgaggtcaggagatcgagaccattctggccaacatagtgaaaccccatctctactaaaaatacaaaaattagccgggcgtggtggcgtgtgcctgtagtcccagctgcttgggaggctgaggcaggagaatcgcttgarcctgrgaggtgaggttgcagtgagccgagatcgagccactgcactccagcctgggtgacagagcgtgagactccgtctcaaaaaaaaaaaaaaagaaagagcctgtacccgcgactaactagacttttctgctgttgtgcaaagttcagtttcttctcagcaacatcaaggatatatgaagaaaaggaaataaaaaactgtaaagtcaaaagagatgcctggtggaacttattcgtgctatcagggcattgatagtttgaatgtttttattacttatgcaaaattgcacatactcctctatrctgattttatcatgaaaactgtcatgtgtcatgctaatggaaaatgtcttatttgtaaataagtattcataattttgttactgatggtgtttttaatctagaatttga

SEQ ID NO: 5136 - DNA, 3299 bp, Homo sapiens
agggttggagctggcggggcggggaggggcggggccatctgggaggggctgcggcggtgggcggggttagagggcgggtttgaagccggcagggtggggaaaggcggggctggaggggaggggtctcagaggcgggcggggttagagagctggattgaagccggcgggacggggagaggcggggcttggtggggagggacgaagaggtgggcggggttcaagcccgtggggcagggcggggccggcgggcagggcggggccggcgggctgggcgcggacggtgaggggcggggatggagggcggggcgggacggagggcggggagggggcgggacggagggcgggacggggcgcgggcggggcggggcggggcgtagcgcccgggctccgactccaagcagtacggcgggaggcactagagggagctgcggccgctccggcccggccccgagcaccgcctccccagccagcgccgccgcgatggcggaggacagcgagtctgcggccagccagcagagcctggaactggacgaccaggacacgtgcgggatagacggggacaatgaggaggagacggagcacgccaaaggaagtcctggagggtatttgggagccaaaaagaaaaagaagaaacagaagagaaaaaaggagaaaccaaattccggaggcaccaagtcagactcggcatctgattcccaggagattaaaattcagcagccttcgaaaaatcccagtgttccaatgcagaagttgcaggatatccagagagcaatggagctgctatccgcatgccagggcccagccaggaacattgatgaggctgcaaagcacagataccagttttgggacacacaaccggtaccaaaactagatgaagtcataacatctcatggtgcaattgaaccagataaagacaacgtacgccaagaaccgtattctttgccacagggttttatgtgggacactttagacttgagtgatgccgaagtgctcaaggagttatacacgttgttaaatgagaattacgtagaagatgatgacaatatgttccgatttgactattcaccygagttcctgttgtgggctctgcgtccaccaggctggctcctgcagtggcactgtggggtcagagtgtcttcaaataaaaaactggtcgggttcataagtgccatcccagcaaacattcggatttatgacagtgtgaagaagatggtagaaatcaactttctttgtgttcataagaagttgagatcgaaacgggtagccccagtgctaatccgagagatcactagaagagtgaacctggaagggatcttccaggctgtgtacaccgcgggagtggttcttcctaagcccatagccacatgcagatactggcatcgatcactaaaccccagaaaattggtagaagtgaaattttctcacttgagtagaaatatgactttacagagaacaatgaagctatacagacttccagatgttacaaagacttcaggtttgagaccaatggaaccaaaagatatcaaatcagttcgagaattaatcaacacttacctgaagcagtttcatctggctccagtgatggatgaagaggaagtagcccactggttcctcccccgggagcacattattgacacgtttgtagtggagagccccaacggtaaactgactgatttcctgagcttctatacgctcccctccacggtgatgcaccaccctgctcacaagagcctcaaagccgcctactcattctacaacatccacacagagacgcccctgctggacctcatgagcgacgcgctcatcctggctaaatcgaaaggatttgatgtattcaatgcactggatttgatggaaaataagacattcttggaaaaactcaagtttggtataggagatggcaatttgcagtattacctgtacaattggaggtgtccaggtacagattctgaaaaggttggactagtactacaatagatggatatttttatttctagaactctgacatcatcatttgttaatatttaatgatttctggaactgccattccaaagaagaataaaagcacaactcaagtgaaattgaagtagtcgataatcagaaaagatgacaaaagtccacatgtgacatttgtacgtttctagctagaatgttaaacttcatcctttttttactgttgacctatttgtgggagggatgaaaggctacaaagagcacattcttgtaattttcaaatttttgcctgtctcttgaagaggtattttttcacccttagaaaagggactgtttttctatggactaagtagaagttacagagtcatgtaagaaaatctttgctattgtgtggagagaaattgctgcatttctgtttcttaagtgatggtacatttgtccatgtaacagaacaaaagatccatttggaaattttttttactggtatcaccttacatggtatcactgggaacatttatggaatcaacacttctgtagctcagtgacaggtggtggttgtttaagtgcagagcaatattaaaatgtactggtgactagtacatgtatttctccataagcagagttgccgaatcaataaacatgcaagtttgtactttgatctttaccaggtcagtggattgcttcaaaagcagagttttgtgcaagcactcactgtgctctctgaaagagcctgaggccgggcgtggtggctcacgcctgtaatcccagcactttgggaggccaaggtgggcagatcatgaggtcaggagatcgagaccattctggccaacatagtgaaaccccatctctactaaaaatacaaaaattagccgggcgtggtggcgtgtgcctgtagtcccagctgcttgggaggctgaggcaggagaatcgcttgarcctgrgaggtgaggttgcagtgagccgagatcgagccactgcactccagcctgggtgacagagcgtgagactccgtctcaaaaaaaaaaaaaaagaaagagcctgtacccgcgactaactagacttttctgctgttgtgcaaagttcagtttcttctcagcaacatcaaggatatatgaagaaaaggaaataaaaaactgtaaagtcaaaagagatgcctggtggaacttattcgtgctatcagggcattgatagtttgaatgtttttattacttatgcaaaattgcacatactcctctatrctgattttatcatgaaaactgtcatgtgtcatgctaatggaaaatgtcttatttgtaaataagtattcataattttgttactgatggtgtttttaatctagaatttga

SEQ ID NO: 5137 - DNA, 4834 bp, Homo sapiens
taatactcctttattccctgttttaaaaatttttttaaatttgatacaataattatacataataatggagtaycatgtgagattcaatccacatatacattgtgaaatgatcaaattaggatagttagcatgcacatcacccccaaataattattacttttgtggtgagaacacttaaaattgtctcttttagaaatatacgttattattaaccatagtcacctygctgtgcaatagaacaccagaacttattcctcctaaatgtaactttttacccattgaccactccctcctcayccccctctctcctccccacccctggtaaccactgttctgttatctcctatgatagcaactttttagcttctgcatgtgagattgtacggtagttgcctttctgtgcctggattatttcatttagcataatgtccttcgggtatatccctgttgctgcaaaagacaggatttctctctctttttctggttgaatagtattccattgtcagagaagtgttgtaagactaggaaaggaacactgcaggctggagccctggggaaagtggtctgaggcaggtggtgggactagagctggggtctggcaaacaggctgggtttgattgtcagcataatagagagcactcatgtgccagctgggtgggaggagcagccgagtgaagaaggggaagcctctcaggaagcatgtgcagggtttatggtaatgagcagaccagcaggtacgtagtgggagaggggtgtgatggggcagaggaacttacgttatgatagtacaagacagaggttgagcctcattttaataggcattgtggtgggtgttgaatagtgatggaatgtatgggtctggaatcaggctgcctggtcaagggctctgaaacatgagtgtgcatcagaatcacctcgaggcttgttaaaggataggctgtggaccacatctcctcagttgctgattcagtgggtgtgggtggggcctgagaattcacatttcycactggtgatgctgctgttactgagtttgggaccacatttggagaaccactggtctagaattgagaggttggcaaaccttctctgttaagaggtagatagtaaatattttaggccttctgggctacaaagagtatctgttacatattttttattgcttttcatgacccattaagcatatatatatcattctctgccatatacaaacaggctgttgggggagtgaggatgatgtagggaaggtggggcatggtttaataacccctgggccatgcctagatgatcagtcctctgccacatagctggctgacctttgccaagttaatcaccttttacctttattttctcatgtttctaataaaacagagacgataatattcatacttcttaccatatagaacttctgaggattcagtgagcaaagccacaaaagatggtatgtcacaatatctgggatatagctagaatttataatttatttttactctgttgataggcaatgggaaaacagtaagaggcagaccaacagtgatccagggctctgaaagctaattgcttcaagatcctgctaccattttcttttgggccgcttgcaaagaagaatcctttgactgaagcatgtatgtacactctgaagtacagcctgggttagtctcttataagggatcggatcattgctcagcctctcccttgagtggcacttagaaaatggcgctattcrtaagctgactggtattgggcccaggactctggctgaaggggtgggcatgctggtaaccatttgcaacctatgctcaggtcctacttgttgggaagccctgattgagaagagtggcctggtctgtgctggcattagataggatctggctgcattaatattgaaactactctgccttttaatgtctcattttgcctcatggtgggagtgaaagtgagaaccacagaaaatctgcctgccaggtgttccacatttcttgtgctacagcatgcaagtgagcagtgaggtgtaccttttcctcatgtagctgggaaagcaatacccctgcttgtacctctggcatatcttctctgtgctggtgcacctagagaggttgcctggtggccctgagagagccatctcatcactaaacactgatggtgaaagctggccatgctcaaataagatgtagcaatctacctcttctttgtctagttacccccaagggggcatccactttcttgctcacctcaccagttgcatgttctagtccttgccagaagcacataataatgactttgtaagcttaagttacaggcacacaaaagggcctgatggtgatatgactccaccctccccgtttttgctgacattccgccaaatatccttctgtctcctccccaccttgcaaaacaaacttcctgttttgaatttggtccaggctggaacagccccacyacacctgttaacacacgcagacgcacacttcccccttcataattgcttagcttcttgttgcctagccagatttcccctcagcttacagttcctgaatcataagatattgaaccagcaaatttaagagttgacattttacttagaggtattcaagtgaaaacatggcttctggtttattttgctgtattgtgccatgaccacttggctaattcttctcctccttcacagcagaatggaagtgaggaaaggcaaccagctgacacaggagccagagtgagaccagcagactctcacactcaacctacaccatgaatttgtgtctatcttctacgcgttaagagccaaggacaggtgaagttgccagagagcaatggctctcttcactccgtggaagttgtcctctcagaagctgggctttttcctggtgacttttggcttcatttggggtatgatgcttctgcactttaccatccagcagcgaactcagcctgaaagcagctccatgctgcgcgagcagatcctggacctcagcaaaaggtacatcaaggcactggcagaagaaaacaggaatgtggtggatgggccatacgctggagtcatgacagcttatgatctgaagaaaacccttgctgtgttattagataacattttgcagcgcattggcaagttggagtcgaaggtggacaatcttgttgtcaatggcaccggaacaaactcaaccaactccactacagctgttcccagcttggttgcacttgagaaaattaatgtggcagatatcattaacggagctcaagaaaaatgtgtattgcctcctatggacggctaccctcactgtgagggaaagatcaagtggatgaaagacatgtggcgttcagatccctgctacgcagactatggagtggatggatccacctgctctttttttatttacctcagtgaggttgaaaattggtgtcctcatttaccttggagagcaaaaaatccctacgaagaagctgatcataattcattggcggaaattcgtacagattttaatattctctacagtatgatgaaaaagcatgaagaattccggtggatgagactacggatccggcgaatggctgacgcatggatccaagcaatcaagtccctggcagaaaagcagaaccttgaaaagagaaagcggaagaaagtcctcgttcacctgggactcctgaccaaggaatctggatttaagattgcagagacagctttcagtggtggccctcttggtgaattagttcaatggagtgatttaattacatctctgtacttactgggccatgacattaggatttcagcttcactggctgagctcaaggaaatcatgaagaaggttgtaggaaaccgatctggctgcccaactgtaggagacagaattgttgagctcatttacattgatattgtaggacttgctcaattcaagaaaactcttggaccatcctgggttcattaccagtgcatgctccgagtccttgattcrtttggtactgaacccgaatttaatcatgcaaattatgcccaatcgaaaggccacaagaccccttggggaaaatggaatctgaaccctcagcagttttataccatgttccctcataccccagacaacagctttctggggtttgtggttgagcagcacctgaactccagtgatatccaccacattaatgaaatcaaaaggcagaaccagtcccttgtgtatggcaaagtggatagcttctggaagaataagaagatctacttggacattattcacacatacatggaagtgcatgcaactgtttatggctccagcacaaagaatattcccagttacgtgaaaaaccatggtatcctcagtggacgggacctgcagttccttcttcgagaaaccaagttgtttgttggacttgggttcccttacgagggcccagctcccctggaagctatcgcaaatggatgtgcttttctgaatcccaagttcaacccacccaaaagcagcaaaaacacagactttttcattggcaagccaactctgagagagctgacatcccagcatccttacgctgaagttttcatcgggcggccacatgtgtggactgttgacctcaacaatcaggaggaagtagaggatgcagtgaaagcaattttaaatcagaagattgagccatacatgccatatgaatttacgtgcgaggggatgctacagagaatcaatgctttcattgaaaaacaggacttctgccatgggcaagtgatgtggccacccctcagcgccctacaggtcaagcttgctgagcccgggcagtcctgcaagcaggtgtgccaggagagccagctcatctgcgagccttctttcttccagcacctcaacaaggacaaggacatgctgaa

SEQ ID NO: 5138 - DNA, 5165 bp, Homo sapiens
taatactcctttattccctgttttaaaaatttttttaaatttgatacaataattatacataataatggagtaycatgtgagattcaatccacatatacattgtgaaatgatcaaattaggatagttagcatgcacatcacccccaaataattattacttttgtggtgagaacacttaaaattgtctcttttagaaatatacgttattattaaccatagtcacctygctgtgcaatagaacaccagaacttattcctcctaaatgtaactttttacccattgaccactccctcctcayccccctctctcctccccacccctggtaaccactgttctgttatctcctatgatagcaactttttagcttctgcatgtgagattgtacggtagttgcctttctgtgcctggattatttcatttagcataatgtccttcgggtatatccctgttgctgcaaaagacaggatttctctctctttttctggttgaatagtattccattgtcagagaagtgttgtaagactaggaaaggaacactgcaggctggagccctggggaaagtggtctgaggcaggtggtgggactagagctggggtctggcaaacaggctgggtttgattgtcagcataatagagagcactcatgtgccagctgggtgggaggagcagccgagtgaagaaggggaagcctctcaggaagcatgtgcagggtttatggtaatgagcagaccagcaggtacgtagtgggagaggggtgtgatggggcagaggaacttacgttatgatagtacaagacagaggttgagcctcattttaataggcattgtggtgggtgttgaatagtgatggaatgtatgggtctggaatcaggctgcctggtcaagggctctgaaacatgagtgtgcatcagaatcacctcgaggcttgttaaaggataggctgtggaccacatctcctcagttgctgattcagtgggtgtgggtggggcctgagaattcacatttcycactggtgatgctgctgttactgagtttgggaccacatttggagaaccactggtctagaattgagaggttggcaaaccttctctgttaagaggtagatagtaaatattttaggccttctgggctacaaagagtatctgttacatattttttattgcttttcatgacccattaagcatatatatatcattctctgccatatacaaacaggctgttgggggagtgaggatgatgtagggaaggtggggcatggtttaataacccctgggccatgcctagatgatcagtcctctgccacatagctggctgacctttgccaagttaatcaccttttacctttattttctcatgtttctaataaaacagagacgataatattcatacttcttaccatatagaacttctgaggattcagtgagcaaagccacaaaagatggtatgtcacaatatctgggatatagctagaatttataatttatttttactctgttgataggcaatgggaaaacagtaagaggcagaccaacagtgatccagggctctgaaagctaattgcttcaagatcctgctaccattttcttttgggccgcttgcaaagaagaatcctttgactgaagcatgtatgtacactctgaagtacagcctgggttagtctcttataagggatcggatcattgctcagcctctcccttgagtggcacttagaaaatggcgctattcrtaagctgactggtattgggcccaggactctggctgaaggggtgggcatgctggtaaccatttgcaacctatgctcaggtcctacttgttgggaagccctgattgagaagagtggcctggtctgtgctggcattagataggatctggctgcattaatattgaaactactctgccttttaatgtctcattttgcctcatggtgggagtgaaagtgagaaccacagaaaatctgcctgccaggtgttccacatttcttgtgctacagcatgcaagtgagcagtgaggtgtaccttttcctcatgtagctgggaaagcaatacccctgcttgtacctctggcatatcttctctgtgctggtgcacctagagaggttgcctggtggccctgagagagccatctcatcactaaacactgatggtgaaagctggccatgctcaaataagatgtagcaatctacctcttctttgtctagttacccccaagggggcatccactttcttgctcacctcaccagttgcatgttctagtccttgccagaagcacataataatgactttgtaagcttaagttacaggcacacaaaagggcctgatggtgatatgactccaccctccccgtttttgctgacattccgccaaatatccttctgtctcctccccaccttgcaaaacaaacttcctgttttgaatttggtccaggctggaacagccccacyacacctgttaacacacgcagacgcacacttcccccttcataattgcttagcttcttgttgcctagccagatttcccctcagcttacagttcctgaatcataagatattgaaccagcaaatttaagagttgacattttacttagaggtattcaagtgaaaacatggcttctggtttattttgctgtattgtgccatgaccacttggctaattcttctcctccttcacagcagaatggaagtgaggaaaggcaaccagctgacacaggagccagagtgagaccagcagactctcacactcaacctacaccatgaatttgtgtctatcttctacgcgttaagagccaaggacaggtgaagttgccagagagcaatggctctcttcactccgtggaagttgtcctctcagaagctgggctttttcctggtgacttttggcttcatttggggtatgatgcttctgcactttaccatccagcagcgaactcagcctgaaagcagctccatgctgcgcgagcagatcctggacctcagcaaaaggtacatcaaggcactggcagaagaaaacaggaatgtggtggatgggccatacgctggagtcatgacagcttatgatctgaagaaaacccttgctgtgttattagataacattttgcagcgcattggcaagttggagtcgaaggtggacaatcttgttgtcaatggcaccggaacaaactcaaccaactccactacagctgttcccagcttggttgcacttgagaaaattaatgtggcagatatcattaacggagctcaagaaaaatgtgtattgcctcctatggacggctaccctcactgtgagggaaagatcaagtggatgaaagacatgtggcgttcagatccctgctacgcagactatggagtggatggatccacctgctctttttttatttacctcagtgaggttgaaaattggtgtcctcatttaccttggagagcaaaaaatccctacgaagaagctgatcataattcattggcggaaattcgtacagattttaatattctctacagtatgatgaaaaagcatgaagaattccggtggatgagactacggatccggcgaatggctgacgcatggatccaagcaatcaagtccctggcagaaaagcagaaccttgaaaagagaaagcggaagaaagtcctcgttcacctgggactcctgaccaaggaatctggatttaagattgcagagacagctttcagtggtggccctcttggtgaattagttcaatggagtgatttaattacatctctgtacttactgggccatgacattaggatttcagcttcactggctgagctcaaggaaatcatgaagaaggttgtaggaaaccgatctggctgcccaactgtaggagacagaattgttgagctcatttacattgatattgtaggacttgctcaattcaagaaaactcttggaccatcctgggttcattaccagtgcatgctccgagtccttgattcrtttggtactgaacccgaatttaatcatgcaaattatgcccaatcgaaaggccacaagaccccttggggaaaatggaatctgaaccctcagcagttttataccatgttccctcataccccagacaacagctttctggggtttgtggttgagcagcacctgaactccagtgatatccaccacattaatgaaatcaaaaggcagaaccagtcccttgtgtatggcaaagtggatagcttctggaagaataagaagatctacttggacattattcacacatacatggaagtgcatgcaactgtttatggctccagcacaaagaatattcccagttacgtgaaaaaccatggtatcctcagtggacgggacctgcagttccttcttcgagaaaccaagttgtttgttggacttgggttcccttacgagggcccagctcccctggaagctatcgcaaatggatgtgcttttctgaatcccaagttcaacccacccaaaagcagcaaaaacacagactttttcattggcaagccaactctgagagagctgacatcccagcatccttacgctgaagttttcatcgggcggccacatgtgtggactgttgacctcaacaatcaggaggaagtagaggatgcagtgaaagcaattttaaatcagaagattgagccatacatgccatatgaatttacgtgcgaggggatgctacagagaatcaatgctttcattgaaaaacaggacttctgccatgggcaagtgatgtggccacccctcagcgccctacaggtcaagcttgctgagcccgggcagtcctgcaagcaggtgtgccaggagagccagctcatctgcgagccttctttcttccagcacctcaacaaggacaaggacatgctgaagtacaaggtgacctgccaaagctcagagctggccaaggacatcctggtgccctcctttgaccctaagaataagcactgtgtgtttcaaggtgacctcctgctcttcagctgtgcaggcgcmcaccccaggcaccagagggtctgcccctgccgggacttcatcaagggccaggtggctctctgcaaagactgcctatagcagctacctgctcagccctgcaccatgctgctggggaagacagtggccccagccccgtcaggcagggccagggacagaagtcatgcagggactctggcaagagcctgaactttttcgtagaaggttctgaat

SEQ ID NO: 5139 - DNA, 2617 bp, Homo sapiens
tgggaaaacagtaagaggcagaccaacagtgatccagggctctgaaagctaattgcttcaagatcctgctaccattttcttttgggccgcttgcaaagaagaatcctttgactgaagcataatggaagtgaggaaaggcaaccagctgacacaggagccagagtgagaccagcagactctcacactcaacctacaccatgaatttgtgtctatcttctacgcgttaagagccaaggacaggtgaagttgccagagagcaatggctctcttcactccgtggaagttgtcctctcagaagctgggctttttcctggtgacttttggcttcatttggggtatgatgcttctgcactttaccatccagcagcgaactcagcctgaaagcagctccatgctgcgcgagcagatcctggacctcagcaaaaggtacatcaaggcactggcagaagaaaacaggaatgtggtggatgggccatacgctggagtcatgacagcttatgatctgaagaaaacccttgctgtgttattagataacattttgcagcgcattggcaagttggagtcgaaggtggacaatcttgttgtcaatggcaccggaacaaactcaaccaactccactacagctgttcccagcttggttgcacttgagaaaattaatgtggcagatatcattaacggagctcaagaaaaatgtgtattgcctcctatggacggctaccctcactgtgagggaaagatcaagtggatgaaagacatgtggcgttcagatccctgctacgcagactatggagtggatggatccacctgctctttttttatttacctcagtgaggttgaaaattggtgtcctcatttaccttggagagcaaaaaatccctacgaagaagctgatcataattcattggcggaaattcgtacagattttaatattctctacagtatgatgaaaaagcatgaagaattccggtggatgagactacggatccggcgaatggctgacgcatggatccaagcaatcaagtccctggcagaaaagcagaaccttgaaaagagaaagcggaagaaagtcctcgttcacctgggactcctgaccaaggaatctggatttaagattgcagagacagctttcagtggtggccctcttggtgaattagttcaatggagtgatttaattacatctctgtacttactgggccatgacattaggatttcagcttcactggctgagctcaaggaaatcatgaagaaggttgtaggaaaccgatctggctgcccaactgtaggagacagaattgttgagctcatttacattgatattgtaggacttgctcaattcaagaaaactcttggaccatcctgggttcattaccagtgcatgctccgagtccttgattcrtttggtactgaacccgaatttaatcatgcaaattatgcccaatcgaaaggccacaagaccccttggggaaaatggaatctgaaccctcagcagttttataccatgttccctcataccccagacaacagctttctggggtttgtggttgagcagcacctgaactccagtgatatccaccacattaatgaaatcaaaaggcagaaccagtcccttgtgtatggcaaagtggatagcttctggaagaataagaagatctacttggacattattcacacatacatggaagtgcatgcaactgtttatggctccagcacaaagaatattcccagttacgtgaaaaaccatggtatcctcagtggacgggacctgcagttccttcttcgagaaaccaagttgtttgttggacttgggttcccttacgagggcccagctcccctggaagctatcgcaaatggatgtgcttttctgaatcccaagttcaacccacccaaaagcagcaaaaacacagactttttcattggcaagccaactctgagagagctgacatcccagcatccttacgctgaagttttcatcgggcggccacatgtgtggactgttgacctcaacaatcaggaggaagtagaggatgcagtgaaagcaattttaaatcagaagattgagccatacatgccatatgaatttacgtgcgaggggatgctacagagaatcaatgctttcattgaaaaacaggacttctgccatgggcaagtgatgtggccacccctcagcgccctacaggtcaagcttgctgagcccgggcagtcctgcaagcaggtgtgccaggagagccagctcatctgcgagccttctttcttccagcacctcaacaaggacaaggacatgctgaagtacaaggtgacctgccaaagctcagagctggccaaggacatcctggtgccctcctttgaccctaagaataagcactgtgtgtttcaaggtgacctcctgctcttcagctgtgcaggcgcmcaccccaggcaccagagggtctgcccctgccgggacttcatcaagggccaggtggctctctgcaaagactgcctatagcagctacctgctcagccctgcaccatgctgctggggaagacagtggccccagccccgtcaggcagggccagggacagaagtcatgcagggactctggcaagagcctgaactttttcgtagaaggttctgaat

SEQ ID NO: 5140 - DNA, 5142 bp, Homo sapiens
ggcggcgtcgggtacgcgcacacgttgcatcttcttcctttcgcggggtcctccgtagttctggcacgagccaggcgtactgacaggtggaccagcggactggtggagatggcgacgctctctctgaccgtgaattcaggagaccctccgctagctttgctggcagtagaacacgtgaaagacgatgtcagcatttccgttgaagaagggaaagagaatattcttcatgtttctgaaaatgtgatattcacagatgtgaattctatacttcgctacttggctagagttgcaactacagctgggttatatggctctaatctgatggaacwtactgagattgatcactggttggagttcagtgctacaaaattatcttcatgtgattcctttacttctacaattaatgaactcaatcattgcctgtctctgagaacatacttagttggaaactccttgagtttagcagatttatgtgtttgggccaccctaaaaggaaatgctgcctggcaagaayagttgaaacagaagaaagctccagttcatgtaaaacgttggtttggctttcttgaagcccagcaggccttccagtcagtaggtaccaagtgggatgtttcaacaaccaaagctcgagtggcacctgagaaaaagcaagatgttgggaaatttgttgagcttccaggtgcggagatgggaaaggttaccgtcagatttcctccagaggccagtggttacttacacattgggcatgcaaaagctgctcttctgaaccagcactaccaggttaactttaaagggaaactgatcatgagatttgatgacacaaatcctgaaaaagaaaaggaagattttgagaaggttatcttggaagatgttgcaatgttgcatatcaaaccagatcaatttacttatacttcggatcattttgaaactataatgaagtatgcagagaagctaattcaagaagggaaggcttatgtggatgatactcctsctgaacagatgaaagcagaacgtgagcagaggatagamtctaaacatagaaaaaaccctattgagaagaatctacaaatgtgggaagaaatgaaaaaagggagccagtttggtcastcctgttgtttgcgagcaaaaattgacatgagtagtaacaatggatgcatgagagatccaaccctttatcgctgcaaaattcaaccacatccaagaactggaaataaatacaatgtttatccaacatatgattttgcctgccccatagttgacagcatcgaaggtgttacacatgccctgagaacaacagaataccatgacagagatgagcagttttactggattattgaagctttaggcataagaaaaccatatatttgggaatatagtcggctaaatctcaacaacacagtgctatccaaaagaaaactcacatggtttgtcaatgaaggactagtagatggatgggatgacccaagatttcctacggttcgtggtgtactgagaagagggatgacagttgaaggactgaaacagtttattgctgctcagggctcctcacgttcagtcgtgaacatggagtgggacaaaatctgggcgtttaacaaaaaggttattgacccagtggctccacgatatgttgcattactgaagaaagaagtgatcccagtgaatgtacctgaagctcaggaggagatgaaagaagtagccaaacacccaaagaatcctgaggttggcttgaagcctgtgtggtatagtcccaaagttttcattgaaggtgctgatgcagagactttttcggagggtgagatggttacatttataaattggggcaacctcaacattacaaaaatacacaaaaatgcagatggaaaaatcatatctcttgatgcaaagttgaatttggaaaacaaagactacaagaaaaccactaaggtcacttggcttgcagagactacacatgctcttcctattccagtaatctgtgtcacttatgagcacttgatcacaaagccagtgctaggaaaagacgaggactttaagcagtatgtcaacaagaacagtaagcatgaagagctaatgctaggggatccctgccttaaggatttgaaaaaaggagatattatacaactccagagaagaggattcttcatatgtgatcaaccttatgaacctgttagcccatatagttgcaaggaagccccgtgtgttttgatatacattcctgatgggcacacaaaggaaatgccaacatcagggtcaaaggaaaagaccaaagtagaagccacaaaaaatgagacctctgctccttttaaggaaagaccaacaccttctctgaataataattgtactacatctgaggattccttggtcctttacaatagagtggctgttcaaggagatgtggttcgtgaattaaaagccaagaaagcaccaaaggaagatgtagatgcagctgtaaaacagcttttgtctttgaaagctgaatataaggagaaaactggccaggaatataaacctggaaaccctcctgctgaaataggacagaatatttcttctaattcctcagcaagtattctggaaagtaaatctctgtatgatgaagttgctgcacaaggggaggtggttcgtaagctaaaagctgaaaaatcccctaaggctaaaataaatgaagctgtagaatgcttactgtccctgaaggctcagtataaagaaaaaactgggaaggagtacatacctggtcagcccccattatctcaaagttcggattcaagcccaaccagaaattctgaacmtgctggtttagaaacaccagaagcraaagtactttttgacaaagtagcttctcaaggggaagtagttcggaaacttaaaactgaaaaagcccctmaggatcaagtagatatagctgttcaagaactccttcagctaaaggcacagtacaagtctttgataggagtagagtataagcctgtgtcggccactggagctgaggacaaagataagaagaagaaagaaaaagaaaataaatctgaaaagcagaataagcctcagaaacaaaatgatggccaaaggaaagacccttctaaaaaccaaggaggtgggctctcatcaagtggagcaggagaagggcaggggcctaagaaacagaccaggttgggtcttgaggcaaaaaaagaagaaaatcttgctgattggtattctcaggtcatcacaaartcagaaatgattgaataccatgacrtaagtggctgttatattcttcgtccctgggcctatgccatttgggaagccatcaaggacttttttgatgctgagatcaagaaacttggtgttgaaaactgctacttccccatgtttgtgtctcaaagtgcattagagaaagagaagactcatgttgctgactttgccccagaggttgcttgggttacaagatctggcaaaaccgagctggcagaaccaattgccattcgtcctactagtgaaacagtaatgtatcctgcatatgcaaaatgggtacartcacacagagacctgcccatcaagctcaatcagtggtgcaatgtggtgcgttgggaattcaagcatcctcagcctttcctacgtactcgtgaatttctttggcaggaagggcacagtgcttttgctaccatggaagaggcagcggaagaggtcttgcagatacttgacttatatgctcaggtatatgaagaactcctggcaattcctgttgttaaaggaagaaagacggaaaaggaaaaatttgcaggaggagactatacaactacaatagaagcatttatatctgctagtggaagagctatccagggaggaacatcacatcatttagggcagaatttttccaaaatgtttgaaatcgtttttgaagatccaaagataccaggagagaagcaatttgcctatcaaaactcctggggcctgacaactcgaactattggtgttatgaccatggttcatggggacaacatgggtttagtattaccaccccgtgtagcatgtgttcaggtggtgattattccttgtggcattaccaatgcactttctgaagaagacaaagaagcgctgattgcaaaatgcaatgattatcgaaggcgattactcagtgttaacatccgcgttagagctgatttacgagataattattctccaggttggaaattcaatcactgggagctcaagggagttcccattagacttgaagttgggccacgtgatatgaagagctgtcagtttgtagccgtcagacgagatactggagaaaagctgacagttgctgaaaatgaggcagagamtaaacttcaagctattttggaagacatccaggtcacccttttcacaagggcttctgaagaccttaagactcatatggttgtggctaatacaatggaagactttcagaagatactagattctggaaagattgttcagattccattctgtggggaaattgactgtgaggactggatcaaaaagaccactgccagggatcaagatcttgaacctggtgctccatccatgggagctaaaagcctttgcrtccccttcaaaccactctgtgaactgcagcctggagccaaatgtgtctgtggcaagaaccctgccaagtactacaccttatttggtcgcagctactgagggatgaacgaaagccccctcttcaactcctctcactttttaaagcattgataytagtatcttctcagatacagaccrttttatgattttttaaaaagtaaaagttctaaaatgaagtcacacarracaattattcttatgcctaagttaacagtggataaaagacttttctgtaaacaactccagtaataaatatcatgaactaatatggtttttgtattcatttgtttctgaaaaatgtgcattatgtactatgaggaaatttctacaaagagatgaagacaattgaaagccagmtatctgttattgatctaagcactcccaacatgtctcagaccctgaaccgccagttataccctacactgataggtctcgaagcactttctttccatagctcctaatacagaatctgaaattgtcctaaatctttctgtttaaaaaacaaagcaaacccacaaatggaaaaagcaacaataataaagatttcccttgaacttc

SEQ ID NO: 5141 - DNA, 5199 bp, Homo sapiens
ggcacgagccaggcgtactgacaggtggaccagcggactggtggagatggcgacgctctctctgaccgtgaattcaggagaccctccgctagtttcgctgtgtcattcaggcaggaacgcagtggtgcaatcakggctcactgcggccatgacttcccaggctcaagcagtcctgccacctcagccccctgggtagctgggaccacaggagctttgctggcagtagaacacgtgaaagacgatgtcagcatttccgttgaagaagggaaagagaatattcttcatgtttctgaaaatgtgatattcacagatgtgaattctatacttcgctacttggctagagttgcaactacagctgggttatatggctctaatctgatggaacwtactgagattgatcactggttggagttcagtgctacaaaattatcttcatgtgattcctttacttctacaattaatgaactcaatcattgcctgtctctgagaacatacttagttggaaactccttgagtttagcagatttatgtgtttgggccaccctaaaaggaaatgctgcctggcaagaayagttgaaacagaagaaagctccagttcatgtaaaacgttggtttggctttcttgaagcccagcaggccttccagtcagtaggtaccaagtgggatgtttcaacaaccaaagctcgagtggcacctgagaaaaagcaagatgttgggaaatttgttgagcttccaggtgcggagatgggaaaggttaccgtcagatttcctccagaggccagtggttacttacacattgggcatgcaaaagctgctcttctgaaccagcactaccaggttaactttaaagggaaactgatcatgagatttgatgacacaaatcctgaaaaagaaaaggaagattttgagaaggttatcttggaagatgttgcaatgttgcatatcaaaccagatcaatttacttatacttcggatcattttgaaactataatgaagtatgcagagaagctaattcaagaagggaaggcttatgtggatgatactcctsctgaacagatgaaagcagaacgtgagcagaggatagamtctaaacatagaaaaaaccctattgagaagaatctacaaatgtgggaagaaatgaaaaaagggagccagtttggtcastcctgttgtttgcgagcaaaaattgacatgagtagtaacaatggatgcatgagagatccaaccctttatcgctgcaaaattcaaccacatccaagaactggaaataaatacaatgtttatccaacatatgattttgcctgccccatagttgacagcatcgaaggtgttacacatgccctgagaacaacagaataccatgacagagatgagcagttttactggattattgaagctttaggcataagaaaaccatatatttgggaatatagtcggctaaatctcaacaacacagtgctatccaaaagaaaactcacatggtttgtcaatgaaggactagtagatggatgggatgacccaagatttcctacggttcgtggtgtactgagaagagggatgacagttgaaggactgaaacagtttattgctgctcagggctcctcacgttcagtcgtgaacatggagtgggacaaaatctgggcgtttaacaaaaaggttattgacccagtggctccacgatatgttgcattactgaagaaagaagtgatcccagtgaatgtacctgaagctcaggaggagatgaaagaagtagccaaacacccaaagaatcctgaggttggcttgaagcctgtgtggtatagtcccaaagttttcattgaaggtgctgatgcagagactttttcggagggtgagatggttacatttataaattggggcaacctcaacattacaaaaatacacaaaaatgcagatggaaaaatcatatctcttgatgcaaagttgaatttggaaaacaaagactacaagaaaaccactaaggtcacttggcttgcagagactacacatgctcttcctattccagtaatctgtgtcacttatgagcacttgatcacaaagccagtgctaggaaaagacgaggactttaagcagtatgtcaacaagaacagtaagcatgaagagctaatgctaggggatccctgccttaaggatttgaaaaaaggagatattatacaactccagagaagaggattcttcatatgtgatcaaccttatgaacctgttagcccatatagttgcaaggaagccccgtgtgttttgatatacattcctgatgggcacacaaaggaaatgccaacatcagggtcaaaggaaaagaccaaagtagaagccacaaaaaatgagacctctgctccttttaaggaaagaccaacaccttctctgaataataattgtactacatctgaggattccttggtcctttacaatagagtggctgttcaaggagatgtggttcgtgaattaaaagccaagaaagcaccaaaggaagatgtagatgcagctgtaaaacagcttttgtctttgaaagctgaatataaggagaaaactggccaggaatataaacctggaaaccctcctgctgaaataggacagaatatttcttctaattcctcagcaagtattctggaaagtaaatctctgtatgatgaagttgctgcacaaggggaggtggttcgtaagctaaaagctgaaaaatcccctaaggctaaaataaatgaagctgtagaatgcttactgtccctgaaggctcagtataaagaaaaaactgggaaggagtacatacctggtcagcccccattatctcaaagttcggattcaagcccaaccagaaattctgaacmtgctggtttagaaacaccagaagcraaagtactttttgacaaagtagcttctcaaggggaagtagttcggaaacttaaaactgaaaaagcccctmaggatcaagtagatatagctgttcaagaactccttcagctaaaggcacagtacaagtctttgataggagtagagtataagcctgtgtcggccactggagctgaggacaaagataagaagaagaaagaaaaagaaaataaatctgaaaagcagaataagcctcagaaacaaaatgatggccaaaggaaagacccttctaaaaaccaaggaggtgggctctcatcaagtggagcaggagaagggcaggggcctaagaaacagaccaggttgggtcttgaggcaaaaaaagaagaaaatcttgctgattggtattctcaggtcatcacaaartcagaaatgattgaataccatgacrtaagtggctgttatattcttcgtccctgggcctatgccatttgggaagccatcaaggacttttttgatgctgagatcaagaaacttggtgttgaaaactgctacttccccatgtttgtgtctcaaagtgcattagagaaagagaagactcatgttgctgactttgccccagaggttgcttgggttacaagatctggcaaaaccgagctggcagaaccaattgccattcgtcctactagtgaaacagtaatgtatcctgcatatgcaaaatgggtacartcacacagagacctgcccatcaagctcaatcagtggtgcaatgtggtgcgttgggaattcaagcatcctcagcctttcctacgtactcgtgaatttctttggcaggaagggcacagtgcttttgctaccatggaagaggcagcggaagaggtcttgcagatacttgacttatatgctcaggtatatgaagaactcctggcaattcctgttgttaaaggaagaaagacggaaaaggaaaaatttgcaggaggagactatacaactacaatagaagcatttatatctgctagtggaagagctatccagggaggaacatcacatcatttagggcagaatttttccaaaatgtttgaaatcgtttttgaagatccaaagataccaggagagaagcaatttgcctatcaaaactcctggggcctgacaactcgaactattggtgttatgaccatggttcatggggacaacatgggtttagtattaccaccccgtgtagcatgtgttcaggtggtgattattccttgtggcattaccaatgcactttctgaagaagacaaagaagcgctgattgcaaaatgcaatgattatcgaaggcgattactcagtgttaacatccgcgttagagctgatttacgagataattattctccaggttggaaattcaatcactgggagctcaagggagttcccattagacttgaagttgggccacgtgatatgaagagctgtcagtttgtagccgtcagacgagatactggagaaaagctgacagttgctgaaaatgaggcagagamtaaacttcaagctattttggaagacatccaggtcacccttttcacaagggcttctgaagaccttaagactcatatggttgtggctaatacaatggaagactttcagaagatactagattctggaaagattgttcagattccattctgtggggaaattgactgtgaggactggatcaaaaagaccactgccagggatcaagatcttgaacctggtgctccatccatgggagctaaaagcctttgcrtccccttcaaaccactctgtgaactgcagcctggagccaaatgtgtctgtggcaagaaccctgccaagtactacaccttatttggtcgcagctactgagggatgaacgaaagccccctcttcaactcctctcactttttaaagcattgataytagtatcttctcagatacagaccrttttatgattttttaaaaagtaaaagttctaaaatgaagtcacacarracaattattcttatgcctaagttaacagtggataaaagacttttctgtaaacaactccagtaataaatatcatgaactaatatggtttttgtattcatttgtttctgaaaaatgtgcattatgtactatgaggaaatttctacaaagagatgaagacaattgaaagccagmtatctgttattgatctaagcactcccaacatgtctcagaccctgaaccgccagttataccctacactgataggtctcgaagcactttctttccatagctcctaatacagaatctgaaattgtcctaaatctttctgtttaaaaaacaaagcaaacccacaaatggaaaaagcaacaataataaagatttcccttgaacttc

SEQ ID NO: 5142 - DNA, 6755 bp, Homo sapiens
  misc_feature (1)...(6755): n = A,T,C or G
cccttccgctcccggagcgcgtgcgccctcttactcggctccccttggtttcctggggtcctgccccttcaagctggggcgggagcggaggaccccgctctcaggggttgccggaccatgcgttgggggctgcgccctcgcgggccgggcgcggccgycctggccactgcccgaagtttgtgggggacgccccgccttccctgcagcccgggatggcaaggggcgacgaagaggcttctggtgcggtcggtctccggggccagtaaccaccagccgaactcgaatagtggcagataccgggacacggtgctgctgccgcagacgagcttccccatgaagctgctgggccgccagcagccggacacggagctggagatccagcagaaatgtggattttcagaactttattcatggcaaagagaaagaaaagtaaagacagaattttgccttcatgatggacctccttatgcaaacggtgaccctcatgttggacatgctttaaataagattttgaaagacatagccaatcgattccatatgatgaatggctccaaaatacattttgtgcccggctgggattgtcatgggttgcccattgaaataaaagtattatcagaacttggtagagaagctcagaatctttcagctatggaaattagaaagaaagctagatcatttgctaaagcagccattgagaaacagaaatcagcatttattcgttggggaataatggcagattggaataattgctactatacatttgatgggaagtatgaagccaaacagttgagaactttttaccaaatgtatgataagggcttggtttatcgatcttacaaacctgtgttttggtctccgtcatctaggactgcattggctgaagcagaacttgaatataatcctgagcatgtcagtcgttcaatatatgtaaaatttcctctcttaaagccttctccaaaattggcatctcttatagatggttcatctcctgttagtattttggtctggaccacacaaccttggacgattccagccaatgaagctgtttgctatatgcctgaatcaaagtatgctgttgtgaaatgttctaagtctggagacctctacgtactggcggcagataaagtagcatctgttgcttctactttggaaacaacatttgagactatttcaacactttcaggtgtagatttggaaaatggtacttgcagtcatccattaattcctgataaagcctctcctcttttacctgcaaatcatgtgaccatggcaaaaggaacgggattggttcacacagccccagctcatggtatggaagactacggtgtagcgtctcagcacaacctgcccatggattgtctagtggacgaagatggagttttcacagatgttgcaggtcctgaacttcaaaacaaggctgtccttgaagagggaactgatgtggttataaagatgcttcagactgcaaagaatttgttgaaagaggagaaattggtgcatagctatccgtatgactggaggaccaagaaacctgtggttattcgtgccagcaagcagtggtttataaacatcacggatattaagactgcagccaaggaattgttaaaaaaggtgaaatttattcctggatcagcactgaatggcatggttgaaatgatggacaggcggccatattggtgtntatcaaggcaaagagtttggggtgttccaattcctgtgtttcatcataagaccaaggatgaatacttgatcaacagccaaaccactgagcatattgttaaactagtggaacaacacggcagtgatatctggtggactcttccccctgaacaacttcttccaaaagaagtcttatctgaggttggtggccctgatgccttggaatatgtgccaggtcaggatattttggacatctggtttgatagcggaacttcatggtcttatgttcttccaggtcctgaccaaagagcagatttgtacttggaaggaaaagaccagctcgggggttggtttcagtcatccttattaacaagtgtggcagcaaggaagagagcaccttataagacagtgattgttcatggatttacccttggagaaaagggagaaaagatgtccaagtctcttgggaatgtcattcatcctgatgttgtcgttaatggaggacaagatcaaagcaaagagcctccgtatggtgctgatgtccttcgctggtgggtagctgattccaatgtcttcaccgaagttgcaattggcccatccgtgctcaatgctgccagagatgatattagcaagcttaggaatacacttcgctttcttttgggaaatgtggctgatttcaacccagaaacagattccatccctgtaaacgatatgtatgtcatagaccagtacatgctacacttactgcaggatttggcaaacaagattaccgaattatacaaacaatatgattttggaaaagttgttcggctgttacggacgttttataccagagagctctctaacttttatttcagtataatcaaagataggctctattgtgaaaaggaaaatgaccccaaacgacgctcttgtcagactgcattagttgaaattttggatgtaatagttcgttcttttgctcccattcttcctcacctggctgaagaggtgttccagcacataccttatattaaagagcccaagagtgttttccgtactgggtggattagtactagttctatctggaaaaagcccgggttggaagaagctgtggagagtgcgtgtgcaatgcgagactcatttcttggaagcatccctggcaaaaatgcagctgagtacaaggttatcactgtgatagaacctggactgctttttgagataatagagatgctgcagtctgaagagacttccagcacctctcagttgaatgaattaatgatggcttctgagtcaactttactggctcaggaaccacgagagatgactgcagatgtaatcgagcttaaagggaaattcctcatcaacttagaaggkggkgatattcgtgaagagtcttcctataaagtaattgtcatgccgactacgaaagaaaaatgcccccgttgttggaagtatacagcggagtcttcagatacactgtgtcctcgatgtgcagaagttgtcagtggaaaatagtattaacagctcactcgagcaagaaccctcctgacagtactggctrgaagtttggatggattatttacaatataggaaagaaagccaagatttaggtaatgagtggatgagtaaatggtggaggatgggagtcaaaatcagaattatagaagaagtatttcctgtaactatrgaaagaattatgtatatatacatgcagaaatatatatgtgtgtgtgtatctgtggatggatatatgtatatctcttcctatatatatccatagtggacttattcagaacatagatatgtattcagcttgtcttcaaatacggccaagcagaaaatgttttatattttataaatcatcttttgactctgtatttaaattctatgatactgaaaataaaggcattctggaaaaatactgactgattttggtgcagaagttttgagtatcaagtaaaagaagtatagttttgaaagggaatggcggaggcctgtttcccttaagaggtgaagggtcatttcattcttcccattagtgaacatcagccttttcagaatagctagtttttggggttggatcagaaagaatataatcaccaaatttgttactcaagaaaggaagaaatctcttaatagttagttatacttatgaatgtttaggaaacaacatgaaagctgaaaatttatttcactaatatacataagaagttcacaacaatgaacagacagaaaatagcagtatatacagaatttcactacttacagtacattacaatagagaaagcattttataaacagttcagtattggattaaaatcttttaaggatggctaattctattcagcaggaatctaacttctagacacccagcaaacccattcctatcagggtgagagagggcttttgctgttgctatagtgtactgtaaaaatatttgttccttataaatgaagtggaccacagcaacttctaaatgaacattatattcagtgtaagtctcatattattaaatttcagatttttgactttttagatcgcaattgtttttaaaaagcaatttaaatgtaacagtgtttactttgaccatagatgaagttttataataaaagtaaaactttttttttctgtttgcaaaagtatgaagcattaagaagcatggtgctatatatctctttatctacatttaccctggcccctctagttctgcatctaaacagaacctgtaatgtagaagttatgattatttgaacactttttgttttccttcagcattatacaatataatttaataagatacaaatgcatatttaatgtttgttaatgaagaaagttgtgtgagggtgggcatatatctaggaaaacactactggttactggcttctcatcaataactacaaagtaccacatacctttgtttcagaaaccacccattctacattaaaatctaattcctttatcatctatggctctttgttattatagaatgtctacataggtatttatttgcctttcttcctatcaatcagatttatttattttaaaagcccttgataagtagtaaaatatttaactgcttttcttaaccatacaagtcagaattagattttaaaattctatgaaaaattttaggataacaaatctaactagagacttaatgatttgtgttaggattctgtgagccatacttcagcttattattgttctcagcaatccccagatttgattgtctgttctaccagagtaagcttaaccagttttattatctaaaatgcttaataagtgccccctccccgccaagtgatgatggaattgaggatttattctttaaaaatacctataactccaagtttctttgactagcctccttaagttcatactactactttcagcgtacttggaaaaatcacaggaagaactaatctcttagaaaacatataacaagtgactgttaacacagagccagatatgtttacaagaattctaggatgtgtgtggctggggcagcggagacccaagcagaggctgggaggttggactagccctttccagtgctgctactctgtaaaatgtatgtctcaatcagactcacaggcccccatcccaaatactcaagacatcttaaccatttatcttgtaagatttcaagtttgatagttacttaacagtaattactaaattttagccagttaaattcttgtttggatgtgctcttttagctcaaaaaacagatttgtttttctttttatatccctgaaggacatactcctcaactttgcatgattactatagttggcttcttaaggggaagtgaagaaacaaacttctgtatcacaatgacttactatgaataataattgtgatccatgacagatacccataattacactgtatggctacattctaaaaatataccacaataaatacttggtatttgtagagctcaaagcactcttttacagagttttggttagtttggttttttcttttttttttttttttcgagacagggtcttgctatattgcccagaatggcctcaaactcctgggctcaagcgatcctcctccagcctcccgagtagctatagtttggttttaatcagtaaatatttatttagcacttggactgctctaggcactatagggtacaaaattagttgtattttatcctctcatcccagctgtgaggtaggtttgctaaagctgtaataccactaagcagttttttcaatactgttcccaaggacagataatattagcaaatcccagaagcatttctaaacacttgtaggaaaaataaagtcggacttaaaatttttagtatctttgccttttttttttttttttttttacataagttttacaagataatacatttttacagtgacctgatgtggatacaactttgcaacttggcaaaaagcaaatcttaacttacattataattaatttgctgcattttacacatctctgattctcaattttggcaagtacaacaggttaagggttctatttagtgtccccttctgatgaatatgatgatcttgaacccattcttcctcctcaagcacggtcatcctcctctgatggcaacagcagaacctctgggaaaggaacctttcggtatccagaactcccaggtggcagcccagtgtgggatttggagcatgacaacaaaggcattttctcaacatttactaaaggagagtggggtgttctatacgctrctgatggggactgtacatgaacacatttaaattgaattacaacaacattttagataggaaatatagaatcttataagaacataatctaaattataaccaattttaaatagcaaagtttaacaataaagctacttaagtgtttgaattagaaataaacagtaaaacatctgtattaattataacagagttgacatttgtttatattttatcttcagtattaaccaaaggagtggaatttagccagggttgcactttttaaaagttgtatatacttttatttattttacaaaaggaaaaaaaaagacatacttttcccataaaattccaggtcttactatgtaaaataaccatgcactacttcatgttataatcataattttagactat

SEQ ID NO: 5143 - DNA, 5656 bp, Homo sapiens
agagctattggggctcggtggcggccgcagtggggtggagggggcagggcgtggtgaggtaaggtgagtgccgtagtggggttccctggagccatggcctgctccattgtccagttctgctacttccaggacctccaggccgcccgggacttcctctttcctcacctgcgggaggagatcctcagcggcgccttgcggagggaccccagtaaatcaacagactgggaagatgatggttggggagcatgggaagaaaatgaaccacaagaacctgaagaagaaggaaatacttgcaaaacacaaaaaacttcctggctccaagattgtgttttatccttatctccaaccaatgatcttatggtgatagctcgagagcaaaaagctgtatttctagtgccaaaatggaaatatagtgataaaggaaaggaagaaatgcaatttgctgttggctggagtggttccttaaatgtcgaagaaggggaatgtgtaaccagtgctctatgtatcccactagcaagccaaaagaggagttccactgggcgtcctgactggacctgcattgtggtgggttttacttcaggttatgtacgcttctacactgagaatggtgtgctcttgcttgcacagcttttgaatgaggacccagtacttcaacttaaatgcagaacctatgaaataccacgacatcccggcgtgactgagcagaatgaagagttgagtatcttatatccagctgccattgtgactattgatggatttagcctttttcaatctcttcgtgcttgtcgaaatcaggtagcaaaagctgcagcatcaggcaatgagaacatacaaccaccaccattagcttataagaaatggggtctacaagatattgacactattattgatcatgctagtgttggtattatgactctgtccccctttgatcaaatgaagactgcctccaatataggtggatttaatgcagcaattaaaaatagtccacctgccatgtctcagtatatcactgtagggtccaatccatttactggcttcttctatgctttagagggaagcacacaaccattattatcccatgttgcactagcagttgcaagtaaactcacttctgctttatttaatgctgccagtggttggcttggttggaaaagtaagcacgaagaagaagctgtccaaaagcaaaagccgaaggttgagccagctaccccattagctgtaagatttggacttccagattctagacgccatggtgaaagcatatgtctgtctccatgtaacacactggcagcagtaacagatgatttcggcagagttattttattggatgtagctagaggaattgcaatacgcatgtggaaagggtaccgcgacgcacaaattggatggattcaaactgtagaggacctccatgaaagagtgccagaaaaggcagatttttccccctttggaaattctcagggtccaagtcgagtagctcaattccttgtgatctatgcgccaagaaggggaattttagaagtgtggagcacacagcagggacctagagtaggagctttcaatgtggggaagcactgcaggctgctgtatcctggctataaaataatgggtttaaataatgttaccagtcagagttggcagccacagacttatcagatctgtctggttgatccagtgtctggaagtgtgaaaacagtgaacgttcccttccatttagcactgagtgataagaagagtgaacgagccaaggatatgcacctagtgaagaaactagcagccttactgaaaacaaaatctcccaatcttgatttggttgaaacagaaataaaggaattaattcttgatattaaataccctgcaaccaaaaaacaagctttggaaagcattttggcaagtgaacgtttaccattttcttgccttagaaacatcactcagactttaatggacactttaaaaagtcaagaacttgagtctgttgatgaaggattgctacagttttgtgccaataaactaaaactgctgcaactctatgagtctgtcagtcaattaaattcccttgattttcatttagacacaccattctctgataatgacttggctctgttactaaggcttgatgaaaaagaactgcttaagctccaggcattactagagaaatataagcaagagaacaccaggacraatgttcgattttctgatgataaagatggtgtgttgcctgtaaaaacattcttggaatatttagaatatgaaaaggatgtgctcaacataaagaaaataagtgaagaggaatatgtggctttaggtagtttctttttttggaagtgtttgcatggagaaagctccactgaggatatgtgtcacactttggagtcggctggtcttagccctcagctgttgttgtctctgctcctgagtgtttggctttcaaaggaaaaggatattttggataaaccacagtcaatctgctgtcttcataccatgctgtccctcctgagcaagatgaaagtggccatcgatgagacctgggattctcagtctgtgtccccatggtggcagcagatgcgcacagcctgtattcagtctgagaacaatggagccgctctgttgtctgcgcatgttgggcattctgttgctgcacagatatcaaacaacatgacagagaaaaaattttcccaarcagttttgggtgctgattcagaggccctcactgattcctgggaggcactttctcttgacactgagtactggaaactccttctgaaacagctggaggattgtctcatacttcagactctgcttcacagcaaagggaacactcagacctccaaagtgtcatcactgcaggctgagccacttccaaggctttctgttaaaaagttattagaaggaggaaaaggtggcattgcagacagtgtagccaagtggatatttaaacaggacttcagccctgaagtattaaaactggctaatgaagaaagagatgcagaaaacccagatgaacccaaagaaggtgttaacagaagtttccttgaggtatcagagatggagatggacttaggagccataccagacttactgcatttagcctatgagcagtttccttgtagccttgagctcgatgtcttgcatgcacattgctgctgggagtacgttgttcagtggaataaagatccagaggaagcacgtttttttgttaggtcaatagaacacttgaagcaaatatttaatgcacatgttcaaaatggcattgcactgatgatgtggaatacgttcttagttaaaagattttctgctgctacatacttaatggataaggttggaaaatcaccaaaagataggttatgccgaagggatgtgggaatgastgacacagcaatgacatctttcctcggctcctgtttggatcttcttcagatcttaatggaggcagatgttagcagggatgaaatacaggtgcctgtgctggatactgaggatgcgtggctctccgtggaaggaccaatctccatagtggaactggcccttgaacagaagcacatccactacccactggtggagcaccactccatcctgtgctccatcttrtatgcagtcatgaggttttctctgaagaccgtgaagccactttcactttttgacagtaagggaaaaaatgcatttttcaaagacctaacttcaattcagttattacctagtggggaaatggatccaaattttatttctgtacgacaacagttcttattgaaagttgtcagtgcagctgtccaggcccaacattcagccacaaaggtcaaagatcccacagaagaggccacacccactccttttgggaaagaccaagattggccagctctagctgtggatttagcccatcaccttcaagttagtgaagatgttgttagaaggcattatgtgggggaactatacaactrtggagttgaccacttaggagaagaggccattctacaggttcatgacaaagaggtccttgcctctcagctgctggtgctcacggggcaaaggctggctcatgcgcttctccacacccagacaaaagaaggaatggagctgcttgccagacttccacccacactgtgtacttggctgaaagcaatggacccccaggaccttcaaaacactgaagtgccaattgcaacaacagctaaactagtaaataaagtaattgagcttttaccagaaaaacatgggcaatatggtctagccttacacctcattgaagctgtggaagccatatctcttccttctttatgacacttacctactggaaatagtctaaaattatgattataacatgaagtagtgcatggttattttacatagtaagacctggaattttatgggaaaagtatgtctttttttttccttttgtaaaataaataaaagtatatacaacttttaaaaagtgcaaccctggctaaattccactcctttggttaatactgaagataaaatataaacaaatgtcaactctgttataattaatacagatgttttactgtttatttctaattcaaacacttaagtagctttattgttaaactttgctatttaaaattggttataatttagattatgttcttataagattctatatttcctatctaaaatgttgttgtaattcaatttaaatgtgttcatgtacagtccccatcagyagcgtatagaacaccccactctcctttagtaaatgttgagaaaatgcctttgttgtcatgctccaaatcccacactgggctgccacctgggagttctggataccgaaaggttcctttcccagaggttctgctgttgccatcagaggaggatgaccgtgcttgaggaggaagaatgggttcaagatcatcatattcatcagaaggggacactaaatagaacccttaacctgttgtacttgccaaaattgagaatcagagatgtgtaaaatgcagcaaattaattataatgtaagttaagatttgctttttgccaagttgcaaagttgtatccacatcaggtcactgtaaaaatgtattatcttgtaaaacttatgtaaaaaaaaaaaaaaaaaaaaggcaaagatactaaaaattttaagtccgactttatttttcctacaagtgtttagaaatgcttctgggatttgctaatattatctgtccttgggaacagtattgaaaaaactgcttagtggtattacagctttagcaaacctacctcacagctgggatgagaggataaaatacaactaattttgtaccctatagtgcctagagcagtccaagtgctaaataaatatttactgattaaaaccaaactatagctactcgggaggctggaggaggatcgcttgagcccaggagtttgaggccattctgggcaatatagcaagaccctgtctcgaaaaaaaaaaaaaaaagaaaaaaccaaactaaccaaaactctgtaaaagagtgctttgagctctacaaataccaagtatttattgtggtatatttttagaatgtagccatacagtgtaattatgggtatctgtcatggatcacaattattattcatagtaagtcattgtgatacagaagtttgtttcttcacttccccttaagaagccaactatagtaatcatgcaaagttgaggagtatgtccttcagggat

SEQ ID NO: 5144 - DNA, 5656 bp, Homo sapiens; identical to SEQ ID NO: 5143

SEQ ID NO: 5145 - DNA, 2271 bp, Homo sapiens
ccgggatctcgagatagccgcagctctcgcgatctttctggagccgcacctccacrcggagtccgagcgcgtgtgctgagacccsagggycgggagggcggagactgggagggagggagaagcccctttggcctgccttacggaagcctgcgagggagggtggtgtccactgcccagttccgtgtcccgatgcccagcgccagcgccagccgcaagagtcaggagaagccgcgggagatcatggacgcggcggaagattatgctaaagagagatatggaatatcttcaatgatacaatcacaagaaaaaccagatcgagttttggttcgggttagagacttgacaatacaaaaagctgatgaagttgtttgggtacgtgcaagagttcatacaagcagagctaaagggaaacagtgcttcttagtcctacgtcagcagcagtttaatgtccaggctcttgtggcggtgggagaccatgcaagcaagcagatggttaaatttgctgccaacatcaacaaagagagcattgtggatgtagaaggtgttgtgagaaaagtgaatcasaaaattggaagctgtacacagcaagacgttgagttacatgttcagaagatttatgtgatcagtttggctgaaccccgtctgcccctgcagctggatgatgctgttcggcctgaggcagaaggagaagaggaaggaagagctactgttaaccaggatacaagattagacaacagagtcattgatcttaggacatcaactagtcaggcagtcttccgtctccagtctggcatctgccatctcttccgagaaactttaattaacaaaggttttgtggaaatccaaactcctaaaattatttcagctgccagtgaaggaggagccaatgtttttactgtgtcatattttaaaaataatgcatacctggctcagtccccacagctatataagcaaatgtgcatttgtgctgattttgagaaggttttctctattggaccagtattcagagcggaagactctaatacccatagacatctaactgagtttgttggtttggacattgaaatggcttttaattaccattaccacgaagttatggaagaaattgctgacaccatggtacaaatattcaaaggacttcaagaaaggtttcagactgaaattcaaacagtgaataaacagttcccatgtgagccattcaaatttttggagccaactctaagactagaatattgtgaagcattggctatgcttagggaagctggagtcgaaatgggagatgaagacgatctgagcacaccaaatgaaaagctgttgggtcatttggtaaaggaaaagtatgatacagatttttatattcttgataaatatccattggctgtaagacctttctataccatgcctgacccaagaaatcccaaacagtccaactcttacgatatgttcatgagaggagaagaaatattktcaggagctcaaagaatacatgatcctcaactgctaacagagagagctttacatcatggaattgatttggagaaaattaaggcttacattgattcyttccgctttggagcccctcctcatgctggtggaggcattggattggaacgagttactatgctgtttctgggattgcataatgttcgtcagacctccatgttccctcgtgatcccaaacgactcactccttaaattcacactttgccacttaactccagtgtggatgacagagcgagaccctgcctcaaaaaaaaaaaaaaaaaaagaaagccacacttattcttttcagtaacctgctagtgcacaggctgtactttaggtacttaaaatatgcactagaataaatttgcaaggccctaaaatatcactgttatttttggagtaattcagtataggttcgtttaaaagagatttttataacttcagacatgcatcagtaggaaataacttgagaaattcatatggttatgttacaaattcatattctgttactacagtaaacgttaagagttttaaacagttaagattgtacaatttttcttcttttctatattacaagggccccagtgttaatgtcttagattttcagtatttgaacttwtttttttaaattctgtcattgagataagaataattcaggtagcatctgaaattttaatgaatgtataattggcatatcatggaaaattaaccagaaagtatcatattcagtgtaatattgtattaatttgttaaattctaaacttgaatttcaataaaattttaaag

SEQ ID NO: 5146 - DNA, 3092 bp, Homo sapiens
acacagggactggtaacccatgctgccttggcaagccaactgcactcctctgtcccaacaagcagggcaatggattgcgaagaggcctcctccgtccccaagcagctacgtcgcccaggggaagagagaaggcgggaaagtccaagagaggagaaaccaaggcccgcgcttaggattatgctaaagagagatatggaatatcttcaatgatacaatcacaagaaaaaccagatcgagttttggttcgggttagagacttgacaatacaaaaagctgatgaagttgtttgggtacgtgcaagagttcatacaagcagagctaaagggaaacagtgcttcttagtcctacgtcagcagcagtttaatgtccaggctcttgtggcggtgggagaccatgcaagcaagcagatggttaaatttgctgccaacatcaacaaagagagcattgtggatgtagaaggtgttgtgagaaaagtgaatcasaaaattggaagctgtacacagcaagacgttgagttacatgttcagaagatttatgtgatcagtttggctgaaccccgtctgcccctgcagctggatgatgctgttcggcctgaggcagaaggagaagaggaaggaagagctactgttaaccaggatacaagattagacaacagagtcattgatcttaggacatcaactagtcaggcagtcttccgtctccagtctggcatctgccatctcttccgagaaactttaattaacaaaggttttgtggaaatccaaactcctaaaattatttcagctgccagtgaaggaggagccaatgtttttactgtgtcatattttaaaaataatgcatacctggctcagtccccacagctatataagcaaatgtgcatttgtgctgattttgagaaggttttctctattggaccagtattcagagcggaagactctaatacccatagacatctaactgagtttgttggtttggacattgaaatggcttttaattaccattaccacgaagttatggaagaaattgctgacaccatggtacaaatattcaaaggacttcaagaaaggtttcagactgaaattcaaacagtgaataaacagttcccatgtgagccattcaaatttttggagccaactctaagactagaatattgtgaagcattggctatgcttagggaagctggagtcgaaatgggagatgaagacgatctgagcacaccaaatgaaaagctgttgggtcatttggtaaaggaaaagtatgatacagatttttatattcttgataaatatccattggctgtaagacctttctataccatgcctgacccaagaaatcccaaacagtccaactcttacgatatgttcatgagaggagaagaaatattktcaggagctcaaagaatacatgatcctcaactgctaacagagagagctttacatcatggaattgatttggagaaaattaaggcttacattgattcyttccgctttggagcccctcctcatgctggtggaggcattggattggaacgagttactatgctgtttctgggattgcataatgttcgtcagacctccatgttccctcgtgatcccaaacgactcactccttaaattcacactttgccacttaactccagtgtggatgacagagcgagaccctgcctcaaaaaaaaaaaaaaaaaaagaaagccacacttattcttttcagtaacctgctagtgcacaggctgtactttaggtacttaaaatatgcactagaataaatttgcaaggccctaaaatatcactgttatttttggagtaattcagtataggttcgtttaaaagagatttttataacttcagacatgcatcagtaggaaataacttgagaaattcatatggttatgttacaaattcatattctgttactacagtaaacgttaagagttttaaacagttaagattgtacaatttttcttcttttctatattacaagggccccagtgttaatgtcttagattttcagtatttgaacttwtttttttaaattctgtcattgagataagaataattcaggtagcatctgaaattttaatgaatgtataattggcatatcatggaaaattaaccagaaagtatcagttcttaaaagttatgcctagaaattatgtaaagctaaactacyggttagaaagtattcagtgtaatattgtattaatttgttaaattctaaacttgaatttcaataaaattttaaagctaattgtagtttttgtgtaactttgtggccaactgattttgtaagtggtgctaggcattcataatttggtaaaagaaaaaatacacaactagtttatataaataaagactaatatgttgtcaacatgtattcatttcaggatattagtttagatgggcgtagggatagagctcttaaagttgacagcttgggtcggttgacagagttcatttcacatgggttaaaatatattgcagaattttgtttgatttttaactggaatggtactgatacttagtgaatgtcagtaaaatccagtcccatcttatccgtcaaaaagaaatttttgtgtaagaattagttagaaacactttccctctagattattacaaatgttgatgctaatgttaattttacatgaccacaaatattggggaggaacaaaacataacatatttttgtacaggaagaaaaaattacatgcagaaaaatatgagggtcaaaaagttaggaagttacccctggaccacgaacatctgcccattatgtttgaaagttaaagggggtgtttaccatctatattgtacagtctttgaaagtttagattcagttcttatttttttctttcatatcctaccagaataccttaaatatagaaggcaccccaaaagtatttcataatttaatccacagcaagaataaaatatccatcttctatagtgtgtaattgctagaccctaaaatagtacaataatattggccctagagctgttcttaatttcatgtaattatagcttgtttcaaaataaagtttgtaaagtcttagaatgatgtaatcttttttattgtgaaggttttcaaacatgctg

SEQ ID NO: 5147 - DNA, 3023 bp, Homo sapiens
gccgagcggagttgaaagggctgttagaagaatggagcagaagtcgcagttgggacgaagctgaagagagctggcattcgcccaggtctacagccagccacctggattatgctaaagagagatatggaatatcttcaatgatacaatcacaagaaaaaccagatcgagttttggttcgggttagagacttgacaatacaaaaagctgatgaagttgtttgggtacgtgcaagagttcatacaagcagagctaaagggaaacagtgcttcttagtcctacgtcagcagcagtttaatgtccaggctcttgtggcggtgggagaccatgcaagcaagcagatggttaaatttgctgccaacatcaacaaagagagcattgtggatgtagaaggtgttgtgagaaaagtgaatcasaaaattggaagctgtacacagcaagacgttgagttacatgttcagaagatttatgtgatcagtttggctgaaccccgtctgcccctgcagctggatgatgctgttcggcctgaggcagaaggagaagaggaaggaagagctactgttaaccaggatacaagattagacaacagagtcattgatcttaggacatcaactagtcaggcagtcttccgtctccagtctggcatctgccatctcttccgagaaactttaattaacaaaggttttgtggaaatccaaactcctaaaattatttcagctgccagtgaaggaggagccaatgtttttactgtgtcatattttaaaaataatgcatacctggctcagtccccacagctatataagcaaatgtgcatttgtgctgattttgagaaggttttctctattggaccagtattcagagcggaagactctaatacccatagacatctaactgagtttgttggtttggacattgaaatggcttttaattaccattaccacgaagttatggaagaaattgctgacaccatggtacaaatattcaaaggacttcaagaaaggtttcagactgaaattcaaacagtgaataaacagttcccatgtgagccattcaaatttttggagccaactctaagactagaatattgtgaagcattggctatgcttagggaagctggagtcgaaatgggagatgaagacgatctgagcacaccaaatgaaaagctgttgggtcatttggtaaaggaaaagtatgatacagatttttatattcttgataaatatccattggctgtaagacctttctataccatgcctgacccaagaaatcccaaacagtccaactcttacgatatgttcatgagaggagaagaaatattktcaggagctcaaagaatacatgatcctcaactgctaacagagagagctttacatcatggaattgatttggagaaaattaaggcttacattgattcyttccgctttggagcccctcctcatgctggtggaggcattggattggaacgagttactatgctgtttctgggattgcataatgttcgtcagacctccatgttccctcgtgatcccaaacgactcactccttaaattcacactttgccacttaactccagtgtggatgacagagcgagaccctgcctcaaaaaaaaaaaaaaaaaaagaaagccacacttattcttttcagtaacctgctagtgcacaggctgtactttaggtacttaaaatatgcactagaataaatttgcaaggccctaaaatatcactgttatttttggagtaattcagtataggttcgtttaaaagagatttttataacttcagacatgcatcagtaggaaataacttgagaaattcatatggttatgttacaaattcatattctgttactacagtaaacgttaagagttttaaacagttaagattgtacaatttttcttcttttctatattacaagggccccagtgttaatgtcttagattttcagtatttgaacttwtttttttaaattctgtcattgagataagaataattcaggtagcatctgaaattttaatgaatgtataattggcatatcatggaaaattaaccagaaagtatcagttcttaaaagttatgcctagaaattatgtaaagctaaactacyggttagaaagtattcagtgtaatattgtattaatttgttaaattctaaacttgaatttcaataaaattttaaagctaattgtagtttttgtgtaactttgtggccaactgattttgtaagtggtgctaggcattcataatttggtaaaagaaaaaatacacaactagtttatataaataaagactaatatgttgtcaacatgtattcatttcaggatattagtttagatgggcgtagggatagagctcttaaagttgacagcttgggtcggttgacagagttcatttcacatgggttaaaatatattgcagaattttgtttgatttttaactggaatggtactgatacttagtgaatgtcagtaaaatccagtcccatcttatccgtcaaaaagaaatttttgtgtaagaattagttagaaacactttccctctagattattacaaatgttgatgctaatgttaattttacatgaccacaaatattggggaggaacaaaacataacatatttttgtacaggaagaaaaaattacatgcagaaaaatatgagggtcaaaaagttaggaagttacccctggaccacgaacatctgcccattatgtttgaaagttaaagggggtgtttaccatctatattgtacagtctttgaaagtttagattcagttcttatttttttctttcatatcctaccagaataccttaaatatagaaggcaccccaaaagtatttcataatttaatccacagcaagaataaaatatccatcttctatagtgtgtaattgctagaccctaaaatagtacaataatattggccctagagctgttcttaatttcatgtaattatagcttgtttcaaaataaagtttgtaaagtcttagaatgatgtaatcttttttattgtgaaggttttcaaacatgctg

SEQ ID NO: 5148 - DNA, 3174 bp, Homo sapiens
ccgggatctcgagatagccgcagctctcgcgatctttctggagccgcacctccacrcggagtccgagcgcgtgtgctgagacccsagggycgggagggcggagactgggagggagggagaagcccctttggcctgccttacggaagcctgcgagggagggtggtgtccactgcccagttccgtgtcccgatgcccagcgccagcgccagccgcaagagtcaggagaagccgcgggagatcatggacgcggcggaagattatgctaaagagagatatggaatatcttcaatgatacaatcacaagaaaaaccagatcgagttttggttcgggttagagacttgacaatacaaaaagctgatgaagttgtttgggtacgtgcaagagttcatacaagcagagctaaagggaaacagtgcttcttagtcctacgtcagcagcagtttaatgtccaggctcttgtggcggtgggagaccatgcaagcaagcagatggttaaatttgctgccaacatcaacaaagagagcattgtggatgtagaaggtgttgtgagaaaagtgaatcasaaaattggaagctgtacacagcaagacgttgagttacatgttcagaagatttatgtgatcagtttggctgaaccccgtctgcccctgcagctggatgatgctgttcggcctgaggcagaaggagaagaggaaggaagagctactgttaaccaggatacaagattagacaacagagtcattgatcttaggacatcaactagtcaggcagtcttccgtctccagtctggcatctgccatctcttccgagaaactttaattaacaaaggttttgtggaaatccaaactcctaaaattatttcagctgccagtgaaggaggagccaatgtttttactgtgtcatattttaaaaataatgcatacctggctcagtccccacagctatataagcaaatgtgcatttgtgctgattttgagaaggttttctctattggaccagtattcagagcggaagactctaatacccatagacatctaactgagtttgttggtttggacattgaaatggcttttaattaccattaccacgaagttatggaagaaattgctgacaccatggtacaaatattcaaaggacttcaagaaaggtttcagactgaaattcaaacagtgaataaacagttcccatgtgagccattcaaatttttggagccaactctaagactagaatattgtgaagcattggctatgcttagggaagctggagtcgaaatgggagatgaagacgatctgagcacaccaaatgaaaagctgttgggtcatttggtaaaggaaaagtatgatacagatttttatattcttgataaatatccattggctgtaagacctttctataccatgcctgacccaagaaatcccaaacagtccaactcttacgatatgttcatgagaggagaagaaatattktcaggagctcaaagaatacatgatcctcaactgctaacagagagagctttacatcatggaattgatttggagaaaattaaggcttacattgattcyttccgctttggagcccctcctcatgctggtggaggcattggattggaacgagttactatgctgtttctgggattgcataatgttcgtcagacctccatgttccctcgtgatcccaaacgactcactccttaaattcacactttgccacttaactccagtgtggatgacagagcgagaccctgcctcaaaaaaaaaaaaaaaaaaagaaagccacacttattcttttcagtaacctgctagtgcacaggctgtactttaggtacttaaaatatgcactagaataaatttgcaaggccctaaaatatcactgttatttttggagtaattcagtataggttcgtttaaaagagatttttataacttcagacatgcatcagtaggaaataacttgagaaattcatatggttatgttacaaattcatattctgttactacagtaaacgttaagagttttaaacagttaagattgtacaatttttcttcttttctatattacaagggccccagtgttaatgtcttagattttcagtatttgaacttwtttttttaaattctgtcattgagataagaataattcaggtagcatctgaaattttaatgaatgtataattggcatatcatggaaaattaaccagaaagtatcagttcttaaaagttatgcctagaaattatgtaaagctaaactacyggttagaaagtattcagtgtaatattgtattaatttgttaaattctaaacttgaatttcaataaaattttaaagctaattgtagtttttgtgtaactttgtggccaactgattttgtaagtggtgctaggcattcataatttggtaaaagaaaaaatacacaactagtttatataaataaagactaatatgttgtcaacatgtattcatttcaggatattagtttagatgggcgtagggatagagctcttaaagttgacagcttgggtcggttgacagagttcatttcacatgggttaaaatatattgcagaattttgtttgatttttaactggaatggtactgatacttagtgaatgtcagtaaaatccagtcccatcttatccgtcaaaaagaaatttttgtgtaagaattagttagaaacactttccctctagattattacaaatgttgatgctaatgttaattttacatgaccacaaatattggggaggaacaaaacataacatatttttgtacaggaagaaaaaattacatgcagaaaaatatgagggtcaaaaagttaggaagttacccctggaccacgaacatctgcccattatgtttgaaagttaaagggggtgtttaccatctatattgtacagtctttgaaagtttagattcagttcttatttttttctttcatatcctaccagaataccttaaatatagaaggcaccccaaaagtatttcataatttaatccacagcaagaataaaatatccatcttctatagtgtgtaattgctagaccctaaaatagtacaataatattggccctagagctgttcttaatttcatgtaattatagcttgtttcaaaataaagtttgtaaagtcttagaatgatgtaatcttttttattgtgaaggttttcaaacatgctg

SEQ ID NO: 5149 - DNA, 3563 bp, Homo sapiens
cgcgcgcaaagctgcagcgtctggaaaaaagcgacttgtggcrgtcgagcgtggcgyaggcgaatcctcggcactaagcaaatatggacctcgcggcggcagcggagccgggcgccggcagccagcacctggaggtccgcgacgaggtggccgagaagtgccagaaactgttcctggacttcttggwggagtttcagagcagcgatggagaaattaaatacttgcaattagcagaggaactgattcgtcctgagagaaacacattggttgtgagttttgtggacctggaacaatttaaccagcaactttccaccaccattcaagaggagttctatagagtttacccttacctgtgtcgggccttgaaaacattcgtcaaagaccgtaaagagatccctcttgccaaggatttttatgttgcattccaagacctgcctaccagacacaagattcgagagctcacctcatccagaattggtttgctcactcgcatcagtgggcaggtggtgcggactcacccagttcacccagagcttgtgagcggaacttttctgtgcttggactgtcagacagtgatcagggatgtagaacagcagttcaaatacacacagccaaacatctgccgaaatccagtttgtgccaacaggaggagattcttactggatacaaataaatcaagatttgttgattttcaaaaggttcgtattcaagagacccaagctgagcttcctcgagggagtatcccccgcagtttagaagtaattttaagggctgaagctgtggaatcagctcaagctggtgacaagtgtgactttacagggacactgattgttgtgcctgaygtctccaagcttagcacaccaggagcacgtgcagaaactaattcccgtgtcagtggtgttgatggatatgagacagaaggcattcgaggactccgggcccttggtgttagggacctttcttataggctggtctttcttgcctgctgtgttgcrccaaccaacccaaggtttggggggaaagagctcagagatgaggaacagacagctgagagcattaagaaccaaatgactgtgaaagaatgggagaaagtgtttgagatgagtcaagataaaaatctataccacaatctttgtaccagcctgttccctactatacatggcaatgatgaagtaaaacggggtgtcctgctgatgctctttggtggcgttccaaagacaacaggagaagggacctctcttcgaggggacataaatgtttgcattgttggtgacccaagtacagctaagagccaatttctcaagcacgtggaggagttcagccccagagctgtctacaccagtggtaaagcgtccagtgctgctggcttaacagcagctgttgtgagagatgaagaatctcatgagtttgtcattgaggctggagctttgatgttggctgataatggtgtgtgttgtattgatgaatttgataagatggacgtgcgggatcaagttgctattcatgaagctatggaacagcagacyatatccatcactaaagcaggagtgaaggctactctgaacgcccggacgtccattttggcagcagcaaacccaatcagtggacactatgacagatcaaaatcattgaaacagaatataaatttgtcagctcccatcatgtcccgattcgatctcttctttatccttgtggatgaatgtaatgaggttacagattatgccattgccaggcgcatagtagatttgcattcaagaattgaggaatcaattgatcgtgtctattccctcgatgatatcagaagatatcttctctttgcaagacagtttaaacccaagatttccaaagagtcagaggacttcattgtggagcaatataaacatctccgccagagagatggttctggagtgaccaagtcttcatggaggattacagtgcgacagcttgagagcatgattcgtctctctgaagctatggctcggatgcactgctgtgatgaggtccaacctaaacatgtgaaggaagctttccggttactgaataaatcaatcatccgtgtggaaacacctgatgtcaatctagatcaagaggaagagatccagatggaggtagatgagggtgctggtggcatcaatggtcatgctgacagccctgctcctgtgaacgggatcaatggctacaatgaagacataaatcaagagtctgctcccaaagcctccttaaggctgggcttctctgagtactgccgaatctctaaccttattgtgcttcacctcagaaaggtggaagaagaagaggacgagtcagcattaaagaggagcgagcttgttaactggtacttgaaggaaatcgaatcagagatagactctgaagaagaacttataaataaaaaaagaatcatagagaaagttattcatcgactcacacactatgatcatgttctaattgagctcacccaggctggattgaaaggctccacagagggaagtgagagctatgaagaagatccctacttggtagttaacmctaactacttgctcgaagattgagatagtgaaagtaactgaccagagctgaggaactgtggcacagcaccycgtggcctggagcctggctggagctctgctagggacagaartgtttctggaagtgatgcttccaggatttgttttcagaaacaagaattgagttgatggtcctatgtgtcacattcatcacaggtttcataccaacacaggcttcagcacttcctttggtgtgtttcctgtcccagtgaagttggaaccaaataatgtgtagtctctataaccaatacctttgttttcatgtgtaagaaaaggcccattacttttaaggtatgtgctgtcctmttgagcaaataactttttttcaattgccagctwctgcttttattcatcaaaataaaataacttgttctgaagttgtctattggrtttctttctactgtaccctgattattacttccatctacttctgaatgtgagactttccctttttgcttaacctggagtgaagaggtakaactgtggtattatggatgaggtttctatgagaaggagtcattagagaactcatatgaaagctagaggccttagagatgactttccaaggttaattccagttgtttttttttttttttaagtttataaaagtttattatacttttttaaaattactctttagtaatttattttacttctgtgtcctaagggtaatttctcaggattgttttcaaattgcttttttaggggaaataggtcatttgctatattacaagcaatccccaaattttatggtcttccaggaaaagttattaccgtttatgatactaacagttcctgagacttagctatgatcagtatgttcatgaggtggagcagttcctgtgttgcagcttttaacaacasatggcattcattaaatcacaaagtatgttaaaggtcacaaaagcaaaataactgtctgaggctaaggcccacgtgggacagtctaatacccatgagtactcaacttgccttgatgtctgagctttccagtgcaat

SEQ ID NO: 5150 - DNA, 2818 bp, Homo sapiens
ctcgggggtggagccgggaccgcagcgcctgccgctcgctcggagctgtagccgccgctgccgccgctgctcttggctcggggacgcgggcgggcgctccgagaggctctggtgcctgcggctgctgctctcctccggcgcccggggctgcggcgctccgggtcccggcccctgtcccggcatctctcgggtccctgagccccggccccgggtcccgcgtccggccggagagaacgcactcagctgctcgagccgccccgggctcgcgcccccgggccatgaagaggggcccgtgaggcgcgcgcggagtcggaggaagaggagggaggagggaggccgaggaggagggcgcgggaggcggaggatgccgccgcggctgctgccgccgccgccacccgcgggtccccggcgaccctgactccagacccgaggatggagccggcgctgggcgctgcagctgctcccggcgcgtccccgaccagactctatgaggtgcatcgaggtcaggaatgctccctggtccactttcrctttgagtttcaggtagctggtgtcacttcggtgtggttggaagaagactttctccccagctgcattcccggaggcgccctttcgacctggaggccgggtctgctggccacagggctgccgcactggctgggactgccagctgggcctggagacgctggtggctgtggactccccagcttggagcagtccctctttgacctcaccccttggagaagcagccccatgaaggtgcccagccatgcaatgttcctggaaggccgtcctcctccttgccctggcctccattgccatccagtacacggccatccgcaccttcaccgccaagtcctttcacacctgccccgggctggcagaggccgggctggccgagcgactgtgcgaggagagccccaccttcgcctacaacctctcccgcaagacccacatcctcatcctggccaccacgcgcagyggctcctccttcgtgggccagctcttcaaccagcacctggacgtcttctacctgtttgagcccctctaccacgtccagaacacgctcatcccccgcttcacccagggcaagagcccggccgaccggcgggtcatgctaggcgccagccgcgacctcctgcggagcctctacgactgcgacctctacttcctggagaactacatcaagccgccgccggtcaaccacaccaccgacaggatcttccgccgcggggccagccgggtcctctgctcccggcctgtgtgcgaccctccggggccagccgacctggtcctggaggagggggactgtgtgcgcaagtgcgggctactcaacctgaccgtggcggccgaggcgtgccgcgagcgcagccacgtggccatcaagacggtgcgcgtgcccgaggtgaacgacctgcgcgccctggtggaagacccgcgattaaacctcaaggtcatccagctggtccgagacccccgcggcattctggcttcgcgcagcgagaccttccgcgacacgtaccggctctggcggctctggtacggcaccgggaggaaaccctacaacctggacgtgacgcagctgaccacggtgtgcgaggacttctccaactccgtgtccaccggcctcatgcggcccccgtggctcaagggcaagtacatgttggtgcgctacgaggacctggctcggaaccctatgaagaagaccgaggagatctacgggttcctgggcatcccgctggacagccacgtggcccgctggatccagaacaacacgcggggcgaccccaycctgggcaagcacaaatacggcaccgtgcgaaactcggcggccacggccgagaagtggcgcttccgcctctcctacgacatcgtggcctttgcccagaacgcctgccagcaggtgctggcccagctgggctacaagatcgccgcctcggaggaggagctgaagaacccctcggtcagcctggtggaggagcgggacttccgccccttctcstgaccygggcggtgcgggtgggggcgggaggcgcaaggtgtcggttttgataaaatggaccgtttttaactgttgccttattaacccctccctctcccacctcatcttcgtgtccttcctgcccccagctcaccccactcccttctgccccttttttgtctctgaaatttgcactacgtcttggacgggaatcactggggcagagggcgcctgaagtagggtcccgccccccccmmccccattcagacacatggatgttgggtctctgtgcggacggtgacaatgtttacaagcaccacatttacacatccacacacgcacacgggcactcgcgaggcgacttctcaagcttttgaatgggtgagtggtcgggtatctagtttttgcactgtcttactattcaaggtaagaggatacaaacaagaggaccacttgtctctaatttatgaatggtgtccatcctttccccatccctgcctcctgcccctgacgcccatttccccccttagagcagcgaaactgccccctcctgcccgcccttgcctgtcggtgaggcaggtttttactgtgaggtgaacgtggacctgtttctgtttccagtctgtggtgatgctgtctgtctgtctgagtctcgtggccgcccctggaccagtgatgactgatgaatcttatgagcttctgattgatctcggggtccatctgtgatatttctttgtgccaaaaagaaaaaaaaagagtggatcagtttgctaaatgaacattgaaattgaaatgctttatctgtgttttctgtaaataaaagagtgcaataatctc

SEQ ID NO: 5151 - DNA, 2757 bp, Homo sapiens
ctcgggggtggagccgggaccgcagcgcctgccgctcgctcggagctgtagccgccgctgccgccgctgctcttggctcggggacgcgggcgggcgctccgagaggctctggtgcctgcggctgctgctctcctccggcgcccggggctgcggcgctccgggtcccggcccctgtcccggcatctctcgggtccctgagccccggccccgggtcccgcgtccggccggagagaacgcactcagctgctcgagccgccccgggctcgcgcccccgggccatgaagaggggcccgtgaggcgcgcgcggagtcggaggaagaggagggaggagggaggccgaggaggagggcgcgggaggcggaggatgccgccgcggctgctgccgccgccgccacccgcgggtccccggcgaccctgactccagacccgaggatggagccggcgctgggcgctgcagctgctcccggcgcgtccccgaccaggtagctggtgtcacttcggtgtggttggaagaagactttctccccagctgcattcccggaggcgccctttcgacctggaggccgggtctgctggccacagggctgccgcactggctgggactgccagctgggcctggagacgctggtggctgtggactccccagcttggagcagtccctctttgacctcaccccttggagaagcagccccatgaaggtgcccagccatgcaatgttcctggaaggccgtcctcctccttgccctggcctccattgccatccagtacacggccatccgcaccttcaccgccaagtcctttcacacctgccccgggctggcagaggccgggctggccgagcgactgtgcgaggagagccccaccttcgcctacaacctctcccgcaagacccacatcctcatcctggccaccacgcgcagyggctcctccttcgtgggccagctcttcaaccagcacctggacgtcttctacctgtttgagcccctctaccacgtccagaacacgctcatcccccgcttcacccagggcaagagcccggccgaccggcgggtcatgctaggcgccagccgcgacctcctgcggagcctctacgactgcgacctctacttcctggagaactacatcaagccgccgccggtcaaccacaccaccgacaggatcttccgccgcggggccagccgggtcctctgctcccggcctgtgtgcgaccctccggggccagccgacctggtcctggaggagggggactgtgtgcgcaagtgcgggctactcaacctgaccgtggcggccgaggcgtgccgcgagcgcagccacgtggccatcaagacggtgcgcgtgcccgaggtgaacgacctgcgcgccctggtggaagacccgcgattaaacctcaaggtcatccagctggtccgagacccccgcggcattctggcttcgcgcagcgagaccttccgcgacacgtaccggctctggcggctctggtacggcaccgggaggaaaccctacaacctggacgtgacgcagctgaccacggtgtgcgaggacttctccaactccgtgtccaccggcctcatgcggcccccgtggctcaagggcaagtacatgttggtgcgctacgaggacctggctcggaaccctatgaagaagaccgaggagatctacgggttcctgggcatcccgctggacagccacgtggcccgctggatccagaacaacacgcggggcgaccccaycctgggcaagcacaaatacggcaccgtgcgaaactcggcggccacggccgagaagtggcgcttccgcctctcctacgacatcgtggcctttgcccagaacgcctgccagcaggtgctggcccagctgggctacaagatcgccgcctcggaggaggagctgaagaacccctcggtcagcctggtggaggagcgggacttccgccccttctcstgaccygggcggtgcgggtgggggcgggaggcgcaaggtgtcggttttgataaaatggaccgtttttaactgttgccttattaacccctccctctcccacctcatcttcgtgtccttcctgcccccagctcaccccactcccttctgccccttttttgtctctgaaatttgcactacgtcttggacgggaatcactggggcagagggcgcctgaagtagggtcccgccccccccmmccccattcagacacatggatgttgggtctctgtgcggacggtgacaatgtttacaagcaccacatttacacatccacacacgcacacgggcactcgcgaggcgacttctcaagcttttgaatgggtgagtggtcgggtatctagtttttgcactgtcttactattcaaggtaagaggatacaaacaagaggaccacttgtctctaatttatgaatggtgtccatcctttccccatccctgcctcctgcccctgacgcccatttccccccttagagcagcgaaactgccccctcctgcccgcccttgcctgtcggtgaggcaggtttttactgtgaggtgaacgtggacctgtttctgtttccagtctgtggtgatgctgtctgtctgtctgagtctcgtggccgcccctggaccagtgatgactgatgaatcttatgagcttctgattgatctcggggtccatctgtgatatttctttgtgccaaaaagaaaaaaaaagagtggatcagtttgctaaatgaacattgaaattgaaatgctttatctgtgttttctgtaaataaaagagtgcaataatctc

SEQ ID NO: 5152 - DNA, 3516 bp, Homo sapiens
tcgcctaccggggcggagmgggggtggctggagcagtctggacagtcatggcggcgactgtggcgacggcggcagctgtggccccggcgccagcgcccggcacggacagcgcctcttcggtgcactggttccgcaaagggctgcgactccacgacaacccggcgttgctggcggccgtgcgcggggcgcgctgcgtgcgctgcgtttacattctcgacccgtggttcgcggcctcctcctcagtcgggatcaaccgatggaggttcctacttcagtctctggaagatttggacacaagtttaaggaaactgaactcccgcctgtttgtagtccggggacagccagccgacgtgttcccaaggctgttcaaggaatggggagtgacccgcttgacctttgaatatgactctgaaccctttgggaaagaacgggatgcagccatcatgaagatggccaaggaggctggtgtggaagtagtgacggagaattctcataccctctatgacctggacaggatcattgagctgaatgggcagaagccaccccttacatacaagcgctttcaggccatcatcagccgcatggagctgcccaagaagccagtgggcttggtgaccagccagcagatggagagctgcagggccgagatccaggagaaccacgacgagacctacggcgtgccctccctggaggagctggggttccccactgaaggacttggtccagctgtctggcagggaggagagacagaagctctggcccgcctggataagcacttggaacggaaggcctgggttgccaactatgagagaccccgaatgaacgccaactccctcctggccagccccacaggyctcagcccctacctgcgctttggttgtctctcctgccgcctcttctactaccgcctgtgggacctgtataaaaaggtgaagcggaacagcacacctcccctctccctatttgggcaactcctatggcgagagttcttctacacggcagctaccaacaaccccaggtttgaccgcatggaggggaaccccatctgcatccagatcccckggkaccgcaatcctgaggccctggccaagtgggctgagggcaagacaggcttcccttggattgatgccatcatgacccaactgaggcaggagggctggatccaccacctggcccggcatgccgtggcctgcttcctgacccgcggggacctctgggtcagctgggagagcggggtccggrtatttgatgagctgctcctggatgcagatttcagcgtgaacgcaggcagctggatgtggctgtcctgcagtgctttcttccagcagttcttccactgctactgccctgtgggctttggccgtcgcacggaccccagtggggactacatcaggcgatacctgcccaaattgaaagcgttcccctctcgatacatctatgagccctggaatgccccagagtcaattcagaaggcagccaagtgcatcattggtgtggactacccacggcccatcgtcaaccatgccgagaccagccggcttaacattgaacgaatgaagcagatttaccagcagctttcgcgctaccggggactctgtctactggcatctgtcccttcctgtgtggaagacctcagtcaccctgtggcagagcccagctcgagccaggctggcagcatgagcagtgcaggcccaagaccactacccagtggcccagcatcccccaaacgcaagctggaagcagccgaggaaccacctggtgaagaactcagcaaacgggcccgggtggcagagttgccaaccccagagctgccgagcaaggatgcctgagactgcagagcccttgctccgtgagcaaagcctgggtgcccaagcagccaccgcagcagcagagtacaacctgcagagaagctgatcaccgggcagagatagagcgagcatgtgtgtgtgtgtgcgcgtgtgcagaggagggagtggtgtgcctgtttgtgtgtgcatgcatctgttgacactcatgattctgaatgttgcctgggctgggggagtacctgtagcacgccagtgctgtttcccggcctccagacacaaggctcgaggttatggcagtgactttcagctgagacctgttcctgcaagccagctgccttgtctgaacagaacgtagtggtaggaccctagctgggattctggcatctgcctccctagacctccttccctccctcctcacgtcaggctgtggagcaggagcacagcagttctggctgttgtccaaagcatgggattctggaggcagccagagccctgctgagttcctgctttctgacctggaggctgagcaggccggagtggatggatgctgtccagacgtagccacctggcctctgtttcttattttaaaattctctgctactgggctcagtcccaggcccttccttgggcttctgggactgagcatgaggccatagacagatctaaaaagtttccaccaccctacagaagtacacacagatacctgactggtgtggggtatgcctggtactgtaataggagcctaagacagcacacctaccttttcaggatttagaacctaaaattagaaagagaatcccagctgtcattgttccttccccagaagctaagagccagcctcagagcctacccaggagctgtgaaggggcaagggtcaaactgactcactctaccaggaggagaccaggttgcagtggcgtaaggccccctggtttctctggccacactccaaggcaccacagtgctgccagtgaggacagctgacacccagccagggaaaccattctagtctttattctgttggcttccagggcctgtcctggacttgtcagcatccagactgccatgtcagctatcccagtagctgagctccaaggactcaggcagagggactcagggatggggactgccaggggcagttggcaaaagtccaagtagagattacacccagmacaccattccttcyaggagcagtaggtgggaggtttgacccagagaagccaatccttgcattccaggagtggcctgtgcctcccacctcttccttcccactgccaaaggcctgtgttgagaaagatgtcatgcaaaaggacgacggtggccaactaaagcaagtcttccttccaccctgtggcctgcacttgagccacaaagtgtgtgtgtgtgtgtgcgtgtgtggtacgtgtgtgtgtgtgtggctatgaggctgattcctgtttggatttttgtcctcacgtgtatcattaagctggcctttgggccttttcctttctacctcccctgtgacctttcctagcctcagatctgtggccctgagggctccctcggaacagtgcctcaaatcctgacccaagggccagcatggggaagagatggttgcaggcaaaatgcactttatagagattttctattgctgggaaggtgtgtttctcccmcaatttgtttgtgaatattcacttgttttataaatgtctgacctgtcttgagt

SEQ ID NO: 5153 - DNA, 4168 bp, Homo sapiens
tcgcctaccggggcggagmgggggtggctggagcagtctggacagtcatggcggcgactgtggcgacggcggcagctgtggccccggcgccagcgcccggcacggacagcgcctcttcggtgcactggttccgcaaagggctgcgactccacgacaacccggcgttgctggcggccgtgcgcggggcgcgctgcgtgcgctgcgtttacattctcgacccgtggttcgcggcctcctcctcagtcgggatcaaccgatggaggttcctacttcagtctctggaagatttggacacaagtttaaggaaactgaactcccgcctgtttgtagtccggggacagccagccgacgtgttcccaaggctgttcaaggaatggggagtgacccgcttgacctttgaatatgactctgaaccctttgggaaagaacgggatgcagccatcatgaagatggccaaggaggctggtgtggaagtagtgacggagaattctcataccctctatgacctggacaggatcattgagctgaatgggcagaagccaccccttacatacaagcgctttcaggccatcatcagccgcatggagctgcccaagaagccagtgggcttggtgaccagccagcagatggagagctgcagggccgagatccaggagaaccacgacgagacctacggcgtgccctccctggaggagctggggttccccactgaaggacttggtccagctgtctggcagggaggagagacagaagctctggcccgcctggataagcacttggaacggaaggcctgggttgccaactatgagagaccccgaatgaacgccaactccctcctggccagccccacaggyctcagcccctacctgcgctttggttgtctctcctgccgcctcttctactaccgcctgtgggacctgtataaaaaggtgaagcggaacagcacacctcccctctccctatttgggcaactcctatggcgagagttcttctacacggcagctaccaacaaccccaggtttgaccgcatggaggggaaccccatctgcatccagatcccckggkaccgcaatcctgaggccctggccaagtgggctgagggcaagacaggcttcccttggattgatgccatcatgacccaactgaggcaggagggctggatccaccacctggcccggcatgccgtggcctgcttcctgacccgcggggacctctgggtcagctgggagagcggggtccggrtatttgatgagctgctcctggatgcagatttcagcgtgaacgcaggcagctggatgtggctgtcctgcagtgctttcttccagcagttcttccactgctactgccctgtgggctttggccgtcgcacggaccccagtggggactacatcaggcgatacctgcccaaattgaaagcgttcccctctcgatacatctatgagccctggaatgccccagagtcaattcagaaggcagccaagtgcatcattggtgtggactacccacggcccatcgtcaaccatgccgagaccagccggcttaacattgaacgaatgaagcagatttaccagcagctttcgcgctaccggggactctgtctactggcatctgtcccttcctgtgtggaagacctcagtcaccctgtggcagagcccagctcgagccaggctggcagcatgagcagtgcaggcccaagaccactacccagtggcccagcatcccccaaacgcaagctggaagcagccgaggaaccacctggtgaagaactcagcaaacgggcccgggtggcagagttgccaaccccagagctgccgagcaaggatgcctgagactgcagagcccttgctccgtgagcaaagcctgggtgcccaagcagccaccgcagcagcagagtacaacctgcagagaagctgatcaccgggcagagatagagcgagcatgtgtgtgtgtgtgcgcgtgtgcagaggagggagtggtgtgcctgtttgtgtgtgcatgcatctgttgacactcatgattctgaatgttgcctgggctgggggagtacctgtagcacgccagtgctgtttcccggcctccagacacaaggctcgaggttatggcagtgactttcagctgagacctgttcctgcaagccagctgccttgtctgaacagaacgtagtggtaggaccctagctgggattctggcatctgcctccctagacctccttccctccctcctcacgtcaggctgtggagcaggagcacagcagttctggctgttgtccaaagcatgggattctggaggcagccagagccctgctgagttcctgctttctgacctggaggctgagcaggccggagtggatggatgctgtccagacgtagccacctggcctctgtttcttattttaaaattctctgctactgggctcagtcccaggcccttccttgggcttctgggactgagcatgaggccatagacagatctaaaaagtttccaccaccctacagaagtacacacagatacctgactggtgtggggtatgcctggtactgtaataggagcctaagacagcacacctaccttttcaggatttagaacctaaaattagaaagagaatcccagctgtcattgttccttccccagaagctaagagccagcctcagagcctacccaggagctgtgaaggggcaagggtcaaactgactcactctaccaggaggagaccaggttgcagtggcgtaaggccccctggtttctctggccacactccaaggcaccacagtgctgccagtgaggacagctgacacccagccagggaaaccattctagtctttattctgttggcttccagggcctgtcctggacttgtcagcatccagactgccatgtcagctatcccagtagctgagctccaaggactcaggcagagggactcagggatggggactgccaggggcagttggcaaaagtccaagtagagattacacccagmacaccattccttcyaggagcagtaggtgggaggtttgacccagagaagccaatccttgcattccaggagtggcctgtgcctcccacctcttccttcccactgccaaaggcctgtgttgagaaagatgtcatgcaaaaggacgacggtggccaactaaagcaagtcttccttccaccctgtggcctgcacttgagccacaaagtgtgtgtgtgtgtgtgcgtgtgtggtacgtgtgtgtgtgtgtggctatgaggctgattcctgtttggatttttgtcctcacgtgtatcattaagctggcctttgggccttttcctttctacctcccctgtgacctttcctagcctcagatctgttaattcttttggccccagccctgtccctcactgtcctctgtccttggaccagaaccctggggtcagacccatctcctgtagctgtccatcacactgacaggcttcttcctgagatatcctcaggttttctcagccagagagctgcctttagagtccaactgttgtacgtatgtcaccttcactagaaatgtcccatcatcgtgggaggggagcagggcacaggggatggtgtgcattcagagcattgggttgggggcttccctgttccctcagccccagtcgagaggaaagagaatcgggccactgccagaaagagagtcaagcaaacctggaagggcaaatctgagagtgggaaggccaaaggccgaggcccagatttagtattcactagcagcgccttcgggtagcaggatgattccttttcctgcctgtctgctgctggctctcttccctaaggtacaggttggcaggaccacctccgcctacttytccaccatccctagcatgycagcccgttcccagatcaacctgccagtggagtcaggcagtgcactcctggagccaagagggaakggcagggtagagagggtatgtccagtascctggagctccatggtggcttcatgcctcccttctcccagctcaggtggccctgagggctccctcggaacagtgcctcaaatcctgacccaagggccagcatggggaagagatggttgcaggcaaaatgcactttatagagattttctattgctgggaaggtgtgtttctcccmcaatttgtttgtgaatattcacttgttttataaatgtctgacctgtcttgagtaagt

SEQ ID NO: 5154 - DNA, 2535 bp, Homo sapiens
cggcggctgcgagcgcagggcccagcccgggagccgctggagcagggcctgcgatggagcctgcagccccgggtcgcgtccctccctgagcgcccccgtcggcggccatgctgccccgagggcgcccccgggcgctgggggccgccgcgctgttgctgctgctgctgctgctcggattcctcctgttcggtggggacctggggtgtgagcgccgcgagcctggcgggcgagcgggggccccgggatgcttccccggcccgctcatgccacgtgtccccccagacgggaggctgcggagagccgccgccctcgacggagacccgggggccggccccggggaccacaaccgctccgactgcggcccgcagccgccgccgccgcccaagtgcgagctcttgcatgtggccatcgtgtgtgcggggcataactccagccgagacgtcatcaccctggtgaagtccatgctcttctacaggtacagccaggaaaaatccactgcacctccacttggtgactgacgccgtggccagaaacatcctggagacgctcttccacacatggatggtgcctgctgtccgtgtcagcttttatcatgccgaccagctcaagccccaggtctcctggatccccaacaagcactactccggcctctatgggctaatgaagctggtgctgcccagtgccttgcctgctgagctggcccgcgtcattgtcctggacacggatgtcaccttcgcctctgacatctcggagctctgggccctctttgctcacttttctgacacgcaggcgatcggtcttgtggagaaccagagtgactggtacctgggcaacctctggaagaaccacaggccctggcctgccttgggccggggatttaacacaggtgtgatcctgctgcggctggaccggctccggcaggctggctgggagcagatgtggaggctgacagccaggcgggagctccttagcctgcctgccacctcactggctgaccaggacatcttcaacgctgtgatcaaggagcacccggggctagtgcagcgtctgccttgtgtctggaatgtgcagctgtcagatcacacactggccgagcgctgctactctgaggcgtctgacctcaaggtgatccactggaactcaccaaagaagcttcgggtgaagaacaagcatgtggaattcttccgcaatttctacctgaccttcctggagtacgatgggaacctgctgcggagagagctctttgtgtgccccagccagcccccacctggtgctgagcagttgcagcaggccctggcacaactggacgaggaagacccctgctttgagttccggcagcagcagctcactgtgcaccgtgtgcatgtcactttcctgccccatgaaccgccacccccccggcctcacgatgtcacccttgtggcccagctgtccatggaccggctgcagatgttggaagccctgtgcaggcactggcctggccccatgagcctggccttgtacctgacagacgcagaagctcagcagttcctgcatttcgtcgaggcctcaccagtgcttgctgcccggcaggacgtggcctaccatgtggtgtaccgtgaggggcccctataccccgtcaaccagcttcgcaaygtggccttggcccaggccctcacgccttacgtcttcctcagtgacattgacttcctgcctgcctattctctctacgactacctcagggcctccattgagcagctggggctgggcagccggcgcaaggcagcactggtggtgccggcattygagaccctgcgctaccgcttcagcttcccccattccaaggtggagctgttggccttgctggatgcgggcactctctacaccttcaggtaccacgagtggccccrmggccacgcacccacagactatgcccgctggcgggaggctcaggccccgtaccgtgtgcaatgggcggccaactatgaaccctacgtggtggtgccacgagactgtccccgctatgatcctcgctttgtgggcttcggctggaacaaagtggcccacattgtggagctggatgcccaggaatatgagctcctggtrctgcccgaggccttcaccatccatctgccccacgctccaagcctggacatctcccgcttcygctccagccccacctatcgtgactgcctccaggccctcaaggacgaattccaccaggacttgtcccgccaccatggggctgctgccctcaaatacctcccagccctgcagcagccccagagccctgcccgaggctgaggctgggccggcgctgcccctcatcttagcattgggcagacaccagggcaacctgccctccgccatccctgctatttaaattatttaaggtctctgggaagggctggggcagagcatctgtggggtggggtcttccccttgctgctattgtatggctggggactggtctctctctgccccagccagtttggggctggttcccccatcttgaattgtttatccctttttcataattaaagttttaaaacatct

SEQ ID NO: 5155 - DNA, 1574 bp, Homo sapiens
gcggagagcggtccagagcgagtggaaagatttgggcgagaacttgcgcgggagccggactgagcggtgcgagcgcgcaggcgcggccgacggggcgggctgctactccggaatctgctaatcccagtcggtgccgcatccccagcccgccgccatggccgcctacaaactggtgctgatccggcacggcgagagcgcatggaacctggagaaccgcttcagcggctggtacgacgccgacctgagcccggcgggccacgaggaggcgaagcgcggcgggcaggcgctacgagatgctggctatgagtttgacatctgcytcacctcagtgaagatctggaggcgctcctatgatgtcccaccacctccgatggagcccgaccatcctttctacagcaacatcagtaaggatcgcaggtatgcagacctcacagaagatcagctaccctcctgtgagagtctgaaggatactattgccagagctctgcccttctggaatgaagaaatagttccccagatcaaggaggggaaacgtgtactgattgcagcccatggcaacagcctccggggcattgtcaagcatctggagggtctctctgaagaggctatcatggagctgaacctgccgactggtattcccattgtctatgaattggacaagaacttgaagcctatcaagcccatgcagtttctgggggatgaagagacggtgcgcaaagccatggaagctgtggctgcccagggcaaggccaagaagtgaaggccggcggggaggatactgtccccaggagcaccctccctgcccgtcttgtccctctgcccctcccacctgcacatgtcacactgaccacatctgtagacatcttgagttgtagctgcagatggggaccagtggctcccattttcattttagccattttgtcgcctgcacccactcccttcatacaatctagtcagaatagcagttctagagcacaggttctcagtctaagctatggaaaagctccccttatccaacagagtttaaaagaaccatgctaagccatgaccagtgaggagaagcaacagagcctgtctgtccccatgagcggagtctgtcctctgctcttctgcagtcaggtcactgcctactgcctgggggctctagtcattccagtggaagacgaatgtaacctgcgtggtgatgtgacaactgtttcctccctgaccccagaggatctggctctaggttgggatcaatcctgaatttcgaataacccttctggggtttcttgtggcggttgaaatagtcccacatgtggtcatcagaaaataagccattcctcataccaatataggatcagctccttgacctctgaggggcaggagtgcttcctggtgtgtgtattagaatcccttcctgccttgtttcatggcagtgaaatgcctcttggtcctgtccaagtgtatctttcactgatttctgaatcatgttctagttgcttgaccctgccacatgggyccagtgttcatctgagcataactgtactaaatccttttwccatatcagtataataaaggagtgatgtgcaata

SEQ ID NO: 5156 - DNA, 683 bp, Homo sapiens
tggccgcctacaaactggtgctgatccggcacggcgagagcgcatggaacctggagaaccgcttcagcggctggtacgacgccgacctgagcccggcgggccacgaggaggcgaagcgcggcgggcagatgctggctatgagtttgacatctgcytcacctcagtgcagaagagagcgatccggaccctctggacagtgctagatgccattgatcagatgtggctgccagtggtgaggacttggcgcctcaatgagcggcactatgggggtctaaccggtctcaataaagcagaaactgctgcaaagcatggtgaggcccaggtgaagatctggaggcgctcctatgatgtcccaccacctccgatggagcccgaccatcctttctacagcaacatcagtaaggatcgcaggtatgcagacctcacagaagatcagctaccctcctgtgagagtctgaaggatactattgggcaggagtgcttcctggtgtgtgtattagaatcccttcctgccttgtttcatggcagtgaaatgcctcttggtcctgtccaagtgtatctttcactgatttctgaatcatgttctagttgcttgaccctgccacatgggyccagtgttcatctgagcataactgtactaaatccttttwccatatcagtataataaaggagtgatgtgcaat

SEQ ID NO: 5157 - DNA, 694 bp, Homo sapiens
aaactggtgctgatccggcacggcgagagcgcatggaacctggagaaccgcttcagcggctggtacgacgccgacctgagcccggcgggccacgaggaggcgaagcgcggcgggcaggcgctacgaggatcgcaggtatgcagacctcacagaagatcagctaccctcctgtgagagtctgaaggatactattgccagagctctgcccttctggaatgaagaaatagttccccagatcaaggaggggaaacgtgtactgattgcagcccatggcaacagcctccggggcattgtcaagcatctggagggtctctctgaagaggctatcatggagctgaacctgccgactggtattcccattgtctatgaattggacaagaacttgaagcctatcaagcccatgcagtttctgggggatgaagagacggtgcgcaaagccatggaagctgtggctgcccagggcaaggccaagaagtgaaggccggggcaggagtgcttcctggtgtgtgtattagaatcccttcctgccttgtttcatggcagtgaaatgcctcttggtcctgtccaagtgtatctttcactgatttctgaatcatgttctagttgcttgaccctgccacatgggyccagtgttcatctgagcataactgtactaaatccttttwccatatcagtataataaaggagtgatgtg

SEQ ID NO: 5158 - DNA, 986 bp, Homo sapiens
tggccgcctacaaactggtgctgatccggcacggcgagagcgcatggaacctggagaaccgcttcagcggctggtacgacgccgacctgagcccggcgggccacgaggaggcgaagcgcggcgggcagatgctggctatgagtttgacatctgcytcacctcagtgcagaagagagcgatccggaccctctggacagtgctagatgccattgatcagatgtggctgccagtggtgaggacttggcgcctcaatgagcggcactatgggggtctaaccggtctcaataaagcagaaactgctgcaaagcatggtgaggcccaggtgaagatctggaggcgctcctatgatgtcccaccacctccgatggagcccgaccatcctttctacagcaacatcagtaaggatcgcaggtatgcagacctcacagaagatcagctaccctcctgtgagagtctgaaggatactattgccagagctctgcccttctggaatgaagaaatagttccccagatcaaggaggggaaacgtgtactgattgcagcccatggcaacagcctccggggcattgtcaagcatctggagggtctctctgaagaggctatcatggagctgaacctgccgactggtattcccattgtctatgaattggacaagaacttgaagcctatcaagcccatgcagtttctgggggatgaagagacggtgcgcaaagccatggaagctgtggctgcccagggcaaggccaagaagtgaaggccggcggggaggatactgtccccaggagtgcttcctggtgtgtgtattagaatcccttcctgccttgtttcatggcagtgaaatgcctcttggtcctgtccaagtgtatctttcactgatttctgaatcatgttctagttgcttgaccctgccacatgggyccagtgttcatctgagcataactgtactaaatccttttwccatatcagtataataaaggagtgatgtg

SEQ ID NO: 5159 - DNA, 2140 bp, Homo sapiens
gccgagctgctccggagcagcgcggcagccagcgaattggggccgcccccacaacccgccgccckccgccygccgccctccgccckccgccckccgccctccgccctccgccctccgccctccgccctccgccctccgccctccgccctccgccctccgcgtgcttacgtgcgctccgtgactgcggcgaccgacgcgggactggagagggaggacgcatgcgctctgccgtgccgaagcgcgccccctcctgtcgggggccgcagcgccaggatgcagcgcatgcgcacacctggagggcggagagcggtccagagcgagtggaaagatttgggcgagaacttgcgcgggagccggactgagcggtgcgagcgcgcaggcgcggccgacggggcgggctgctactccggaatctgctaatcccagtcggtgccgcatccccagcccgccgccatggccgcctacaaactggtgctgatccggcacggcgagagcgcatggaacctggagaaccgcttcagcggctggtacgacgccgacctgagcccggcgggccacgaggaggcgaagcgcggcgggcaggcgctacgagatgctggctatgagtttgacatctgcytcacctcagtgcagaagagagcgatccggaccctctggacagtgctagatgccattgatcagatgtggctgccagtggtgaggacttggcgcctcaatgagcggcactatgggggtctaaccggtctcaataaagcagaaactgctgcaaagcatggtgaggcccaggtgaagatctggaggcgctcctatgatgtcccaccacctccgatggagcccgaccatcctttctacagcaacatcagtaaggatcgcaggtatgcagacctcacagaagatcagctaccctcctgtgagagtctgaaggatactattgccagagctctgcccttctggaatgaagaaatagttccccagatcaaggaggggaaacgtgtactgattgcagcccatggcaacagcctccggggcattgtcaagcatctggagggtctctctgaagaggctatcatggagctgaacctgccgactggtattcccattgtctatgaattggacaagaacttgaagcctatcaagcccatgcagtttctgggggatgaagagacggtgcgcaaagccatggaagctgtggctgcccagggcaaggccaagaagtgaaggccggcggggaggatactgtccccaggagcaccctccctgcccgtcttgtccctctgcccctcccacctgcacatgtcacactgaccacatctgtagacatcttgagttgtagctgcagatggggaccagtggctcccattttcattttagccattttgtcgcctgcacccactcccttcatacaatctagtcagaatagcagttctagagcacaggttctcagtctaagctatggaaaagctccccttatccaacagagtttaaaagtagtgacttgggtttttgcgagtgctttgtttactaaggactttggggaggaaccatgctaagccatgaccagtgaggagaagcaacagagcctgtctgtccccatgagcggagtctgtcctctgctcttctgcagtcaggtcactgcctactgcctgggggctctagtcattccagtggaagacgaatgtaacctgcgtggtgatgtgacaactgtttcctccctgaccccagaggatctggctctaggttgggatcaatcctgaatttcgttatgtgttaatttacttttattaaaaaagtatagtatatataaataatacaaaacaataacccttctggggtttcttgtggcggttgaaatagtcccacatgtggtcatcagaaaataagccattcctcataccaatataggatcagctccttgacctctgaggggcaggagtgcttcctggtgtgtgtattagaatcccttcctgccttgtttcatggcagtgaaatgcctcttggtcctgtccaagtgtatctttcactgatttctgaatcatgttctagttgcttgaccctgccacatgggyccagtgttcatctgagcataactgtactaaatccttttwccatatcagtataataaaggagtgatgtgcaatag

SEQ ID NO: 5160 - DNA, 1715 bp, Homo sapiens
gccgagctgctccggagcagcgcggcagccagcgaattggggccgcccccacaacccgccgccckccgccygccgccctccgccckccgccckccgccctccgccctccgccctccgccctccgccctccgccctccgccctccgccctccgccctccgcgtgcttacgtgcgctccgtgactgcggcgaccgacgcgggactggagagggaggacgcatgcgctctgccgtgccgaagcgcgccccctcctgtcgggggccgcagcgccaggatgcagcgcatgcgcacacctggagggcggagagcggtccagagcgagtggaaagatttgggcgagaacttgcgcgggagccggactgagcggtgcgagcgcgcaggcgcggccgacggggcgggctgctactccggaatctgctaatcccagtcggtgccgcatccccagcccgccgccatggccgcctacaaactggtgctgatccggcacggcgagagcgcatggaacctggagaaccgcttcagcggctggtacgacgccgacctgagcccggcgggccacgaggaggcgaagcgcggcgggcaggcgctacgagatgctggctatgagtttgacatctgcytcacctcagtgcagaagagagcgatccggaccctctggacagtgctagatgccattgatcagatgtggctgccagtggtgaggacttggcgcctcaatgagcggcactatgggggtctaaccggtctcaataaagcagaaactgctgcaaagcatggtgaggcccaggtgaagatctggaggcgctcctatgatgtcccaccacctccgatggagcccgaccatcctttctacagcaacatcagtaaggatcgcaggtatgcagacctcacagaagatcagctaccctcctgtgagagtctgaaggatactattgccagagctctgcccttctggaatgaagaaatagttccccagatcaaggaggggaaacgtgtactgattgcagcccatggcaacagcctccggggcattgtcaagcatctggagggtctctctgaagaggctatcatggagctgaacctgccgactggtattcccattgtctatgaattggacaagaacttgaagcctatcaagcccatgcagtttctgggggatgaagagacggtgcgcaaagccatggaagctgtggctgcccagggcaaggccaagaagtgaaggccggcggggaggatactgtccccaggagcaccctccctgcccgtcttgtccctctgcccctcccacctgcacatgtcacactgaccacatctgtagacatcttgagttgtagctgcagatggggaccagtggctcccattttcattttagccattttgtcgcctgcacccactcccttcatacaatctagtcagaatagcagttctagagcacaggttctcagtctaagctatggaaaagctccccttatccaacagagtttaaaagtagtgacttgggtttttgcgatgcttcctggtgtgtgtattagaatcccttcctgccttgtttcatggcagtgaaatgcctcttggtcctgtccaagtgtatctttcactgatttctgaatcatgttctagttgcttgaccctgccacatgggyccagtgttcatctgagcataactgtactaaatccttttwccatatcagtataataaaggagtgatgtgcaata

SEQ ID NO: 5161 - DNA, 1733 bp, Homo sapiens
gcggagagcggtccagagcgagtggaaagatttgggcgagaacttgcgcgggagccggactgagcggtgcgagcgcgcaggcgcggccgacggggcgggctgctactccggaatctgctaatcccagtcggtgccgcatccccagcccgccgccatggccgcctacaaactggtgctgatccggcacggcgagagcgcatggaacctggagaaccgcttcagcggctggtacgacgccgacctgagcccggcgggccacgaggaggcgaagcgcggcgggcaggcgctacgagatgctggctatgagtttgacatctgcytcacctcagtgcagaagagagcgatccggaccctctggacagtgctagatgccattgatcagatgtggctgccagtggtgaggacttggcgcctcaatgagcggcactatgggggtctaaccggtctcaataaagcagaaactgctgcaaagcatggtgaggcccaggtgaagatctggaggcgctcctatgatgtcccaccacctccgatggagcccgaccatcctttctacagcaacatcagtaaggatcgcaggtatgcagacctcacagaagatcagctaccctcctgtgagagtctgaaggatactattgccagagctctgcccttctggaatgaagaaatagttccccagatcaaggaggggaaacgtgtactgattgcagcccatggcaacagcctccggggcattgtcaagcatctggagggtctctctgaagaggctatcatggagctgaacctgccgactggtattcccattgtctatgaattggacaagaacttgaagcctatcaagcccatgcagtttctgggggatgaagagacggtgcgcaaagccatggaagctgtggctgcccagggcaaggccaagaagtgaaggccggcggggaggatactgtccccaggagcaccctccctgcccgtcttgtccctctgcccctcccacctgcacatgtcacactgaccacatctgtagacatcttgagttgtagctgcagatggggaccagtggctcccattttcattttagccattttgtcgcctgcacccactcccttcatacaatctagtcagaatagcagttctagagcacaggttctcagtctaagctatggaaaagctccccttatccaacagagtttaaaagaaccatgctaagccatgaccagtgaggagaagcaacagagcctgtctgtccccatgagcggagtctgtcctctgctcttctgcagtcaggtcactgcctactgcctgggggctctagtcattccagtggaagacgaatgtaacctgcgtggtgatgtgacaactgtttcctccctgaccccagaggatctggctctaggttgggatcaatcctgaatttcgaataacccttctggggtttcttgtggcggttgaaatagtcccacatgtggtcatcagaaaataagccattcctcataccaatataggatcagctccttgacctctgaggggcaggagtgcttcctggtgtgtgtattagaatcccttcctgccttgtttcatggcagtgaaatgcctcttggtcctgtccaagtgtatctttcactgatttctgaatcatgttctagttgcttgaccctgccacatgggyccagtgttcatctgagcataactgtactaaatccttttwccatatcagtataataaaggagtgatgtgcaata

SEQ ID NO: 5162 - DNA, 4778 bp, Homo sapiens
cagtgcggagccttaggcggagcgaagagaaccggtcgcggcaatcctagcgcgcagcagcagcagcagcagcagcagcagcagcagcagcagcagcagcacccgcatccgctgcgggagtccgagccggaaccacacccaagtagctgccctttcctcttctgtcatctcaccgccccaccacagaccgcgttccccgaggaaaccggccgcccacgcccggagcatcctcccctgttgagcgggcgctgacggacccggcggcatgatgcggctgcgaggctcggggatgctgcgggacctgctcctgcggtcgcccgccggcgtgagcgcgactctgcggcgggcacagcccttggtcaccctgtgccggcgtccccgaggcgggggacggccggccgcgggcccggctgccgccgcgcgactccacccgtggtggggcgggggcggctggccggcggagcccctcgcgcggggcctgtccagctctccttcggagatcttgcaggagctgggcaaggggagcacgcatccgcagcccggggtgtcgccacccgctgccccggcggcgcccggccccaaggacggccccggggagacggacgcgtttggcaacagcgagggcaaagagctggtggcctcaggtgaaaataaaataaaacagggtctgttacctagcttggaagatttgctgttctatacaattgctgaaggacaagagaaaatacctgttcataaatttattacagcactcaaatctacaggattgcgaacgtctgatcccaggttgaaagagtgtatggatatgttaagattaactcttcaaacaacatcagatggtgtcatgctagacaaagatctttttaaaaaatgtgttcagagcaacattgttttgttgacacaagcatttagaagaaagtttgtgattcctgactttatgtcttttacctcacacattgatgagttatatgaaagtgctaaaaagcagtctggaggaaaggttgcagattatattcctcaactggccaaattcagtcccgatttgtggggtgtgtctgtttgtacagtagatggacagaggcattctactggagataccaaagttcccttctgtcttcagtcctgtgtaaaacctttgaaatatgccattgctgttaatgatcttggaactgaatatgtgcatcgatatgttggaaaagagccgagtggactaagattcaacaaactatttttgaatgaagatgataaaccacataatcctatggtaaatgctggagcaattgttgtgacttcactaataaagcaaggagtaaataatgctgttggattcagtaatgcaacgtttcagtctgaaagagaaagtggagatcgaaattttgcaataggatattacttaaaagaaaagaagtgttttccagaaggcacagacatggttggtatattagacttctacttccagctgtgctccattgaagtgacttgtgaatcagccagtgtgatggctgcgacactggctaatggtggtttctgcccaattactggtgaaagagtactgagccctgaagcagttcgaaatacattgagtttgatgcattcctgtggcatgtatgacttctcagggcagtttgctttccatgttggtcttcctgcaaaatctggagttgctgggggcattcttttagttgtccccaaygtyatgggyatgatgtgctggtctcctcctctkgataagatgggcaacagtgttaagggaattcacttttgtcacgatcttgtttctctgtgtaatttccataactatgataatttgagacactttgcaaaaamacttgatcctcgaagagaaggtggtgatcaaagggtaaagtcagtgataaatcttttgtttgctgcmtatactggagatgtgtctgcacttcgaagatttgctttgtcagctatggacatggaacagcgggactatgattctagaacagcactccatgtagctgctgcagagggtcatgttgaagttgttaaatttttgctggaagcctgcaaagtaaaccctttccccaaggacaggtggaataacactcccatggatgaagcactgcactttggacaccatgatgtatttaaaattctccaagaataccaagtccagtacacacctcaaggagattctgacarcgggaaggaaaatcaaaccgtccataagaatcttgatggattgttgtaatggtctcaaatcccaagatttaaatcacttacctatttaattgtggaaaatgattatgaagaacatgtgtatttctatctggtagtgatgtatattttacatttgtcatttcagtgttactggagttttcttcattgtgcacacaggacaaatctgatctctttgggaaaaaatagaaataaaacaatctccctccataatgtgagcaatattacctcgtgcattgtataatttgatgtaaaagaaatagttaccaatgctagcttgtgtggtcttccatgatttatttgtgttttgtgaattttcaatttatggtgatgatctgctgatatgcatttataaagtaagctctgttgtacagtctgtccaaatgggtcaaggttgcctttagaagcaaatagtgtgattttcaagacttcaaatacaaatttagtttaagtgtttgaacaactatatgcacttacggttgtgtgtttaaaatgtctctctcwcmccctagcttcatgatgtgactcttaaaaaactataatagttaacaactgttagtaagatagaccaattctgattagactttatcagggaatctgtttaagatatgtttggtgaccaaaacgtatgtgtgaatgtagttataatgcttttgaaaaattttcctttttctatatccccttagtccagcctctcttctcagacatttagctatctgcctctttcctttagctgggaaagtgagagctggcatactatgcagtttttatgttttccatagtaagtcagaaaatgcctcctatttctggcatcagaactttgccatttgtctacagaagacgaaccagagacaaaattactaagtataaattagtcaagtttatcagtctaaaaarcgaagggatgtgcaactgcagctctttaagaagttttttttttttagcttctagggtaaagataaattcagaaatgctctaagctaccaragttattctgaaagtatgggaactgctacaactaacaaacatttgtttccaagcctgtcattaagagtctgcatcaagagatttgtcctccttgggggaccactggatcattccagatttcttgtgatttttctattgtgtaattcttggtgggctctgtagtttaataataagaaaaaggccatttcattttaaattgtgacctataattctttgtcttgggttggtaattcaggattcatttggaaagtgggtaaaaggggcttcaaaaaacggatagaacaggattttctaggagttacacatacattttatcctgtcatacctcgagataaagtggcatgttagtgaggagttctgatattaagcacacacacacatgcacacaaatggacttctctgaagctgtgtttagtgaaatgagctcaagtacatgaatgttagttgttatcacatacagcaaattcctttttttttctttttctatgagcacactctgctgcttctaaactttacatgcctgatggcaccttactccagcagcctccaggtgctttcattttcacttccagtctaagccagtggctcctgccactgccctcccattacctagatggcacctcctttggtgaaaccacggccaatgttccttagctgcaccaggccsgaagctgttcccatgcttgagcttccatggggaggatgctgagtgagcagtttcctacsccgtggatctagcaagccatggagacaggtagcatttgtaagatgctgcacaggagcagcattatccccaaagatattacagggtagacacgttttaactgaaatcaatcaagataactttattcaaagagcagcccgctttgtgtgactaaaatgaaacaagacagttgaattgtgtgacttgaagattaccaatgattttgaggcttttctataataaaaagaggttctaaccattatttgggaacaaagagagttttcatcttttttcagatcaaaaccattctgtaaaatctttgttgtttaattaaatgtgccgttatttacccctgatgttatttatgactatgtgccgattcctgctygggctgtttgctgttggctggtaataatatatttgatttaaatgctgttgactgtgctattaactgctgccgtcagtaaactccaaagatctttttgttttggctttagtatcatatgtgctttttctgtatcctgagcgctctatatgatcatgttaatttaaagctttatacacattgttgtttttgctggtctcatctttggtaatatgctataccccactgctgcccgacactgccctttagctgcagagctggattagctgttgaccatttgatgctgttgtctgtctggcagggactgaatgacctgatgtcagatttagattcttcctggggattacacagctatgaatgtatttgcttctaaaacctcccaaagtgaatctaatcttaaaactacaagttgtaagtattctgaaattgggaaacatttattttaaatgcaatcaggtagtgttgctttttacagcataataaatatatgtatca

SEQ ID NO: 5163 - DNA, 4488 bp, Homo sapiens
cagtgcggagccttaggcggagcgaagagaaccggtcgcggcaatcctagcgcgcagcagcagcagcagcagcagcagcagcagcagcagcagcagcagcacccgcatccgctgcgggagtccgagccggaaccacacccaagtagctgccctttcctcttctgtcatctcaccgccccaccacagaccgcgttccccgaggaaaccggccgcccacgcccggagcatcctcccctgttgagcgggcgctgacggacccggcggcatgatgcggctgcgaggctcggggatgctgcgggacctgctcctgcggtcgcccgccggcgtgagcgcgactctgcggcgggcacagcccttggtcaccctgtgccggcgtccccgaggcgggggacggccggccgcgggcccggctgccgccgcgcgactccacccgtggtggggcgggggcggctggccggcggagcccctcgcgcggggcctgtccagctctccttcggagatcttgcaggagctgggcaaggggagcacgcatccgcagcccggggtgtcgccacccgctgccccggcggcgcccggccccaaggacggccccggggagacggacgcgtttggcaacagcgagggcaaagagctggtggcctcaggtgaaaataaaataaaacagggtctgttacctagcttggaagatttgctgttctatacaattgctgaaggacaagagaaaatacctgttcataaatttattacagcactcaaatctacaggattgcgaacgtctgatcccaggttgaaagagtgtatggatatgttaagattaactcttcaaacaacatcagatggtgtcatgctagacaaagatctttttaaaaaatgtgttcagagcaacattgttttgttgacacaagcatttagaagaaagtttgtgattcctgactttatgtcttttacctcacacattgatgagttatatgaaagtgctaaaaagcagtctggaggaaaggttgcagattatattcctcaactggccaaattcagtcccgatttgtggggtgtgtctgtttgtacagtagatggacagaggcattctactggagataccaaagttcccttctgtcttcagtcctgtgtaaaacctttgaaatatgccattgctgttaatgatcttggaactgaatatgtgcatcgatatgttggaaaagagccgagtggactaagattcaacaaactatttttgaatgaagatgataaaccacataatcctatggtaaatgctggagcaattgttgtgacttcactaataaagcaaggagtaaataatgctgaaaaatttgactatgtcatgcagtttttgaataagatggctggtaatgaatatgttggattcagtaatgcaacgtttcagtctgaaagagaaagtggagatcgaaattttgcaataggatattacttaaaagaaaagaagtgttttccagaaggcacagacatggttggtatattagacttctacttccagctgtgctccattgaagtgacttgtgaatcagccagtgtgatggctgcgacactggctaatggtggtttctgcccaattactggtgaaagagtactgagccctgaagcagttcgaaatacattgagtttgatgcattcctgtggcatgtatgacttctcagggcagtttgctttccatgttggtcttcctgcaaaatctggagttgctgggggcattcttttagttgtccccaaygtyatgggyatgatgtgctggtctcctcctctkgataagatgggcaacagtgttaagggaattcacttttgtcacgatcttgtttctctgtgtaatttccataactatgataatttgagacactttgcaaaaamacttgatcctcgaagagaaggtggtgatcaaaggcattcctttggaccattggactatgaaagtctccaacaagaacttgctttaaaagagacagtatggaaaaaagtgtcacctgagtcaaatgaggacatctctacaactgtagtatatagaatggaaagtctgggagagaaaagctaaagaaatgggttctagtttcagaatgtttcttcatttaatctttcaaacatctttagcttttttttgcaagttataaatatttatttgaggtattttttgttctcaatcttgggtgctggagccataaagcttttttttccttttaatctttgtataaaggcagtagattaagaagtgcatttgttggtctttaaaaagtatttacaagtacataaatttgctttatttttaaaaatacaaaaaggaaaaatttaaattttttttgatgtaattaaaatgttaactatgtggtcagataatcccattttacaatagtaacagaaaattgtaattcttagttctaaaattcacaaattaaactcataagttttgttgcattttgttttttcttttccatttttaaaactaatgtgatgtctttagtggcaatagaaggtacttctatgctaaatacaaaactaaaaaggcaaaataatgaaccccaaattattttatttaaaatagcagtggattataaaattagcttgtgtttacatttatgccatttttggtgatagattggctttacattttaaaaaatttatttaaaaatttatcaaatgctttaaaatatgactcctactttttttattttgcaactcctctgttctgtcagagttgttatatacaggagtgtcttatgttactaaaacattccagccaaagaatttcagatgtgagataatgatgtttcatcaataaaaagctataatggttagttactcagaaggagaaacagtgagtgtcttcaagtgaattgttcacctaaacaattttattttcatattatccacataactttttctatgttatatttaaatatgaatggcaaattttggtttttagcttttacattttattatcttaattttataaatgctaatatttcttttgtgataagttatagcatctcataaagtttgttctatttgaagttttttagagtacttgagaaatgaatttagtctgcaggtagtaagtatgctactaaaatacgttagatctaaatccttttatttggtataaaaatgcaatattgagaatcaaaacttgtttttaagagaactatagattctacacaacctgatttcaagtaattattcatagtatttatagttgtcttggcaaagtgattgtaaaattctgtaggacctattcacacttcttccttcttccatatacttctctggttttccccatagttcccctataatttcaagtttgttgaaacctgttaattttagtgggggattagaagaaaaacttggtggtttcttagcatgatggtgtatgtatgtggtaatggaaagtctgtaaaagtaaatatagtgtagcaaaaaagatttcactgagtattttagatactagtgcaaataaagatagaaaatcttgatcataatgtcttaagtttgggaactgtgatattaagaaaagaaattcccttctagaggtgctggccaaaaagccttttgggctaacttaagtattaaatttatatatttaaataattatattttaagttgtagaggattttcccaaggattttatgcttacttgaatgttctttgaatgttcagatgcatatcctaactggatgcttctcaaggccttactgcatatttgtgttgcatatttatgttagttgcaccagggccatttgtagtttgggcaaccgaatgccttaattggaaaaaaggcattgtggtttcccctatgatctaaattgttacattttaccatttcattccgaagttggttttactttattaaatgaagatttagttttcatatcgtatacatagctgtatagatttcaaaattaggttgttaatttgtgtcacttactatttttgtgttggtaatgctttaaatgcatacttaaaaatgaagtactgttatctaagctactgtgtttagaaaatgttaagaatgagcagaaatttttatagaaaagtataaacggargaagagataagatactgcgaataggccctcaaacttaaaaaagaaaaaactttgccagttttaaggacatattttgattctttcagtattcttaacacctttttaaacaaagttcttgatagtacccactattattgggtttgttttatgccattattgattcttgatattcaagcatttacaatgtagcatatttgattttcttttttctttctttttttggcatcattaacatttcatttgaaatgcatattgttcttgaagtactttgtttttagcataaatgttgtgcattttatcttagtgtttggatgaaaacatttgtgttgtttagctttcatttgctttgtatatttaataatgtacctttattttccagtatgcctacattttgtattgcacaataaatttattttaagctg

SEQ ID NO: 5164 - DNA, 4832 bp, Homo sapiens
cagtgcggagccttaggcggagcgaagagaaccggtcgcggcaatcctagcgcgcagcagcagcagcagcagcagcagcagcagcagcagcagcagcagcacccgcatccgctgcgggagtccgagccggaaccacacccaagtagctgccctttcctcttctgtcatctcaccgccccaccacagaccgcgttccccgaggaaaccggccgcccacgcccggagcatcctcccctgttgagcgggcgctgacggacccggcggcatgatgcggctgcgaggctcggggatgctgcgggacctgctcctgcggtcgcccgccggcgtgagcgcgactctgcggcgggcacagcccttggtcaccctgtgccggcgtccccgaggcgggggacggccggccgcgggcccggctgccgccgcgcgactccacccgtggtggggcgggggcggctggccggcggagcccctcgcgcggggcctgtccagctctccttcggagatcttgcaggagctgggcaaggggagcacgcatccgcagcccggggtgtcgccacccgctgccccggcggcgcccggccccaaggacggccccggggagacggacgcgtttggcaacagcgagggcaaagagctggtggcctcaggtgaaaataaaataaaacagggtctgttacctagcttggaagatttgctgttctatacaattgctgaaggacaagagaaaatacctgttcataaatttattacagcactcaaatctacaggattgcgaacgtctgatcccaggttgaaagagtgtatggatatgttaagattaactcttcaaacaacatcagatggtgtcatgctagacaaagatctttttaaaaaatgtgttcagagcaacattgttttgttgacacaagcatttagaagaaagtttgtgattcctgactttatgtcttttacctcacacattgatgagttatatgaaagtgctaaaaagcagtctggaggaaaggttgcagattatattcctcaactggccaaattcagtcccgatttgtggggtgtgtctgtttgtacagtagatggacagaggcattctactggagataccaaagttcccttctgtcttcagtcctgtgtaaaacctttgaaatatgccattgctgttaatgatcttggaactgaatatgtgcatcgatatgttggaaaagagccgagtggactaagattcaacaaactatttttgaatgaagatgataaaccacataatcctatggtaaatgctggagcaattgttgtgacttcactaataaagcaaggagtaaataatgctgaaaaatttgactatgtcatgcagtttttgaataagatggctggtaatgaatatgttggattcagtaatgcaacgtttcagtctgaaagagaaagtggagatcgaaattttgcaataggatattacttaaaagaaaagaagtgttttccagaaggcacagacatggttggtatattagacttctacttccagctgtgctccattgaagtgacttgtgaatcagccagtgtgatggctgcgacactggctaatggtggtttctgcccaattactggtgaaagagtactgagccctgaagcagttcgaaatacattgagtttgatgcattcctgtggcatgtatgacttctcagggcagtttgctttccatgttggtcttcctgcaaaatctggagttgctgggggcattcttttagttgtccccaaygtyatgggyatgatgtgctggtctcctcctctkgataagatgggcaacagtgttaagggaattcacttttgtcacgatcttgtttctctgtgtaatttccataactatgataatttgagacactttgcaaaaamacttgatcctcgaagagaaggtggtgatcaaagggtaaagtcagtgataaatcttttgtttgctgcmtatactggagatgtgtctgcacttcgaagatttgctttgtcagctatggacatggaacagcgggactatgattctagaacagcactccatgtagctgctgcagagggtcatgttgaagttgttaaatttttgctggaagcctgcaaagtaaaccctttccccaaggacaggtggaataacactcccatggatgaagcactgcactttggacaccatgatgtatttaaaattctccaagaataccaagtccagtacacacctcaaggagattctgacarcgggaaggaaaatcaaaccgtccataagaatcttgatggattgttgtaatggtctcaaatcccaagatttaaatcacttacctatttaattgtggaaaatgattatgaagaacatgtgtatttctatctggtagtgatgtatattttacatttgtcatttcagtgttactggagttttcttcattgtgcacacaggacaaatctgatctctttgggaaaaaatagaaataaaacaatctccctccataatgtgagcaatattacctcgtgcattgtataatttgatgtaaaagaaatagttaccaatgctagcttgtgtggtcttccatgatttatttgtgttttgtgaattttcaatttatggtgatgatctgctgatatgcatttataaagtaagctctgttgtacagtctgtccaaatgggtcaaggttgcctttagaagcaaatagtgtgattttcaagacttcaaatacaaatttagtttaagtgtttgaacaactatatgcacttacggttgtgtgtttaaaatgtctctctcwcmccctagcttcatgatgtgactcttaaaaaactataatagttaacaactgttagtaagatagaccaattctgattagactttatcagggaatctgtttaagatatgtttggtgaccaaaacgtatgtgtgaatgtagttataatgcttttgaaaaattttcctttttctatatccccttagtccagcctctcttctcagacatttagctatctgcctctttcctttagctgggaaagtgagagctggcatactatgcagtttttatgttttccatagtaagtcagaaaatgcctcctatttctggcatcagaactttgccatttgtctacagaagacgaaccagagacaaaattactaagtataaattagtcaagtttatcagtctaaaaarcgaagggatgtgcaactgcagctctttaagaagttttttttttttagcttctagggtaaagataaattcagaaatgctctaagctaccaragttattctgaaagtatgggaactgctacaactaacaaacatttgtttccaagcctgtcattaagagtctgcatcaagagatttgtcctccttgggggaccactggatcattccagatttcttgtgatttttctattgtgtaattcttggtgggctctgtagtttaataataagaaaaaggccatttcattttaaattgtgacctataattctttgtcttgggttggtaattcaggattcatttggaaagtgggtaaaaggggcttcaaaaaacggatagaacaggattttctaggagttacacatacattttatcctgtcatacctcgagataaagtggcatgttagtgaggagttctgatattaagcacacacacacatgcacacaaatggacttctctgaagctgtgtttagtgaaatgagctcaagtacatgaatgttagttgttatcacatacagcaaattcctttttttttctttttctatgagcacactctgctgcttctaaactttacatgcctgatggcaccttactccagcagcctccaggtgctttcattttcacttccagtctaagccagtggctcctgccactgccctcccattacctagatggcacctcctttggtgaaaccacggccaatgttccttagctgcaccaggccsgaagctgttcccatgcttgagcttccatggggaggatgctgagtgagcagtttcctacsccgtggatctagcaagccatggagacaggtagcatttgtaagatgctgcacaggagcagcattatccccaaagatattacagggtagacacgttttaactgaaatcaatcaagataactttattcaaagagcagcccgctttgtgtgactaaaatgaaacaagacagttgaattgtgtgacttgaagattaccaatgattttgaggcttttctataataaaaagaggttctaaccattatttgggaacaaagagagttttcatcttttttcagatcaaaaccattctgtaaaatctttgttgtttaattaaatgtgccgttatttacccctgatgttatttatgactatgtgccgattcctgctygggctgtttgctgttggctggtaataatatatttgatttaaatgctgttgactgtgctattaactgctgccgtcagtaaactccaaagatctttttgttttggctttagtatcatatgtgctttttctgtatcctgagcgctctatatgatcatgttaatttaaagctttatacacattgttgtttttgctggtctcatctttggtaatatgctataccccactgctgcccgacactgccctttagctgcagagctggattagctgttgaccatttgatgctgttgtctgtctggcagggactgaatgacctgatgtcagatttagattcttcctggggattacacagctatgaatgtatttgcttctaaaacctcccaaagtgaatctaatcttaaaactacaagttgtaagtattctgaaattgggaaacatttattttaaatgcaatcaggtagtgttgctttttacagcataataaatatatgtatca

SEQ ID NO: 5165 - DNA, 3719 bp, Homo sapiens
tcaacatatgggtattaaataacatgaaaaaaagtttatataaatgttaaattactttagaactatttcctrgatttaaaaatactaatgcagtatattataatagtagctttgaaattttgatattggcttgaaacttaactgtagtggtacctatattaacgtatttatgtctcttatttttttgcagcaaggagtaaataatgctgaaaaatttgactatgtcatgcagtttttgaataagatggctggtaatgaatatgttggattcagtaatgcaacgtttcagtctgaaagagaaagtggagatcgaaattttgcaataggatattacttaaaagaaaagaagtgttttccagaaggcacagacatggttggtatattagacttctacttccagctgtgctccattgaagtgacttgtgaatcagccagtgtgatggctgcgacactggctaatggtggtttctgcccaattactggtgaaagagtactgagccctgaagcagttcgaaatacattgagtttgatgcattcctgtggcatgtatgacttctcagggcagtttgctttccatgttggtcttcctgcaaaatctggagttgctgggggcattcttttagttgtccccaaygtyatgggyatgatgtgctggtctcctcctctkgataagatgggcaacagtgttaagggaattcacttttgtcacgatcttgtttctctgtgtaatttccataactatgataatttgagacactttgcaaaaamacttgatcctcgaagagaaggtggtgatcaaagggtaaagtcagtgataaatcttttgtttgctgcmtatactggagatgtgtctgcacttcgaagatttgctttgtcagctatggacatggaacagcgggactatgattctagaacagcactccatgtagctgctgcagagggtcatgttgaagttgttaaatttttgctggaagcctgcaaagtaaaccctttccccaaggacaggtggaataacactcccatggatgaagcactgcactttggacaccatgatgtatttaaaattctccaagaataccaagtccagtacacacctcaaggagattctgacarcgggaaggaaaatcaaaccgtccataagaatcttgatggattgttgtaatggtctcaaatcccaagatttaaatcacttacctatttaattgtggaaaatgattatgaagaacatgtgtatttctatctggtagtgatgtatattttacatttgtcatttcagtgttactggagttttcttcattgtgcacacaggacaaatctgatctctttgggaaaaaatagaaataaaacaatctccctccataatgtgagcaatattacctcgtgcattgtataatttgatgtaaaagaaatagttaccaatgctagcttgtgtggtcttccatgatttatttgtgttttgtgaattttcaatttatggtgatgatctgctgatatgcatttataaagtaagctctgttgtacagtctgtccaaatgggtcaaggttgcctttagaagcaaatagtgtgattttcaagacttcaaatacaaatttagtttaagtgtttgaacaactatatgcacttacggttgtgtgtttaaaatgtctctctcwcmccctagcttcatgatgtgactcttaaaaaactataatagttaacaactgttagtaagatagaccaattctgattagactttatcagggaatctgtttaagatatgtttggtgaccaaaacgtatgtgtgaatgtagttataatgcttttgaaaaattttcctttttctatatccccttagtccagcctctcttctcagacatttagctatctgcctctttcctttagctgggaaagtgagagctggcatactatgcagtttttatgttttccatagtaagtcagaaaatgcctcctatttctggcatcagaactttgccatttgtctacagaagacgaaccagagacaaaattactaagtataaattagtcaagtttatcagtctaaaaarcgaagggatgtgcaactgcagctctttaagaagttttttttttttagcttctagggtaaagataaattcagaaatgctctaagctaccaragttattctgaaagtatgggaactgctacaactaacaaacatttgtttccaagcctgtcattaagagtctgcatcaagagatttgtcctccttgggggaccactggatcattccagatttcttgtgatttttctattgtgtaattcttggtgggctctgtagtttaataataagaaaaaggccatttcattttaaattgtgacctataattctttgtcttgggttggtaattcaggattcatttggaaagtgggtaaaaggggcttcaaaaaacggatagaacaggattttctaggagttacacatacattttatcctgtcatacctcgagataaagtggcatgttagtgaggagttctgatattaagcacacacacacatgcacacaaatggacttctctgaagctgtgtttagtgaaatgagctcaagtacatgaatgttagttgttatcacatacagcaaattcctttttttttctttttctatgagcacactctgctgcttctaaactttacatgcctgatggcaccttactccagcagcctccaggtgctttcattttcacttccagtctaagccagtggctcctgccactgccctcccattacctagatggcacctcctttggtgaaaccacggccaatgttccttagctgcaccaggccsgaagctgttcccatgcttgagcttccatggggaggatgctgagtgagcagtttcctacsccgtggatctagcaagccatggagacaggtagcatttgtaagatgctgcacaggagcagcattatccccaaagatattacagggtagacacgttttaactgaaatcaatcaagataactttattcaaagagcagcccgctttgtgtgactaaaatgaaacaagacagttgaattgtgtgacttgaagattaccaatgattttgaggcttttctataataaaaagaggttctaaccattatttgggaacaaagagagttttcatcttttttcagatcaaaaccattctgtaaaatctttgttgtttaattaaatgtgccgttatttacccctgatgttatttatgactatgtgccgattcctgctygggctgtttgctgttggctggtaataatatatttgatttaaatgctgttgactgtgctattaactgctgccgtcagtaaactccaaagatctttttgttttggctttagtatcatatgtgctttttctgtatcctgagcgctctatatgatcatgttaatttaaagctttatacacattgttgtttttgctggtctcatctttggtaatatgctataccccactgctgcccgacactgccctttagctgcagagctggattagctgttgaccatttgatgctgttgtctgtctggcagggactgaatgacctgatgtcagatttagattcttcctggggattacacagctatgaatgtatttgcttctaaaacctcccaaagtgaatctaatcttaaaactacaagttgtaagtattctgaaattgggaaacatttattttaaatgcaatcaggtagtgttgctttttacagcataataaatatatgtatca

SEQ ID NO: 5166 - DNA, 6191 bp, Homo sapiens
ccggccggtgtttcaggccctttaagaggcgacgctggagccggagccattttccccccttcggccgcggcgaggaggagccggagcgggagtgacaccgagccggacccagcgcgacctgcggcggctccgggtgactcgggccagtgtagaggtccycaggccgccggcaggagcagctgggccaattccctggccsggagcggaaggggatggcgtcgggcytgggctccccgtccccctgctcggcgggcagtgaggaggaggatatggatgcacttttgaacaacagcctgcccccaccccacccagaggacccagaagaggatttgtcagaaacagagactccaaagctcaagaagaagaaaaagcctaagaaacctcgggaccctaaaatccctaagagcaagcgccaaaaaaaggagcgtatgctcttatgccggcagctgggggacagctctggggaggggccagagtttgtggaggaggaggaagaggtggctctgcgctcagacagtgagggcagcgactatactcctggcaagaagaagaagaagaagcttggacctaagaaagagaagaagagcaaatccaagcggaaggaggaggaggaggaggakgatgatgatgatgattcaaaggagcctaaatcatctgctcagctcctggaagactggggcatggaagacattgaccacgtgttctcagaggaggattatcgaaccctcaccaactacaaggccttcagccagtttgtcagacccctcattgctgccaaaaatcccaagattgctgtctccaagatgatgatggttttgggtgcaaaatggcgggagttcagtaccaataaccccttcaaaggcagttctggggcatcagtggcagctgcggcagcagcagcggtagctgtggtggagagcatggtgacagccactgaggttgcaccaccacctccccctgtggaggtgcctatccgcaaggccaagaccaaggagggcaaaggtcccaatgctcggaggaagcccaagggcagccctcgtgtacctgatgccaagaagcctaaacccaagaaagtagctcccctgaaaatcaagctgggaggttttggttccaagcgtaagagatcctcgagtgaggatgatgacttagatgtggaatctgacttcgatgatgccagtatcaatagctattctgtttctgatggttccaccagccgtagtagccgcagccgcaagaaactccgaaccactaaaaagaaaaagaaaggcgaggaggaggtgactgctgtggatggttatgagacagaccaccaggactattgcgaggtgtgccagcaaggcggtgagatcatcctgtgtgatacctgtccccgtgcttaccacatggtctgcctggatcccgacatggagaaggctcccgagggcaagtggagctgcccacactgcgagaaggaaggcatccagtgggaagctaaagaggacaattcggagggtgaggagatcctggaagaggttgggggagacctcgaagaggaggatgaccaccatatggaattctgtcgggtytgcaaggatggtggggaactgctctgctgtgatacctgtccttcttcctaccacatccactgcctgaatcccccacttccagagatccccaacggtgaatggctctgtccccgttgtacgtgtccagctctgaagggcaaagtgcagaagatcctaatctggaagtggggtcagccaccatctcccacaccagtgcctcggcctccagatgctgatcccaacacgccctccccaaagcccttggaggggcggccagagcggcagttctttgtgaaatggcaaggcatgtcttactggcactgctcctgggtttctgaactgcagctggagctgcactgtcaggtgatgttccgaaactatcagcggaagaatgatatggatgagccaccttctggggactttggtggtgatgaagagaaaagccgaaagcgaaagaacaaggaccctaaatttgcagagatggaggaacgcttctatcgctatgggataaaacccgagtggatgatgatccaccgaatcctcaaccacagtgtggacaagaagggccacgtccactacttgatcaagtggcgggacttaccttacgatcaggcttcttgggagagtgaggatgtggagatccaggattacgacctgttcaagcagagctattggaatcacagggagttaatgaggggtgaggaaggccgaccaggcaagaagctcaagaaggtgaagcttcggaagttggagaggcctccagaaacgccaacagttgatccaacagtgaagtatgagcgacagccagagtacctggatgctacaggtggaaccctgcacccctatcaaatggagggcctgaattggttgcgcttctcctgggctcagggcactgacaccatcttggctgatgagatgggccttgggaaaactgtacagacagcagtcttcctgtattccctttacaaggagggtcattccaaaggccccttcctagtgagcgcccctctttctaccatcatcaactgggagcgggagtttgaaatgtgggctccagacatgtatgtcgtaacctatgtgggtgacaaggacagccgtgccatcatccgagagaatgagttctcctttgaagacaatgccattcgtggtggcaagaaggcctcccgcatgaagaaagaggcatctgtgaaattccatgtgctgctgacatcctatgaattgatcaccattgacatggctattttgggctctattgattgggcctgcctcatcgtggatgaagcccatcggctgaagaacaatcagtctaagttcttccgggtattgaatggttactcactccagcacaagctgttgctgactgggacaccattacaaaacaatctggaagagttgtttcatctgctcaactttctcacccccgagaggttccacaatttggaaggttttttggaggagtttgctgacattgccaaggaggaccagataaaaaaactgcatgacatgctggggccgcacatgttgcggcggctcaaagccgatgtgttcaagaacatgccctccaagacagaactaattgtgcgtgtggagctgagccctatgcagaagaaatactacaagtacatcctcactcgaaattttgaagcactcaatgcccgaggtggtggcaaccaggtgtctctgctgaatgtggtgatggatcttaagaagtgctgcaaccatccatacctcttccctgtggctgcaatggaagctcctaagatgcctaatggcatgtatgatggcagtgccctaatcagagcatctgggaaattattgctgctgcagaaaatgctcaagaaccttaaggagggtgggcatcgtgtactcatcttttcccagatgaccaagatgctagacctgctagaggatttcttggaacatgaaggttataaatacgaacgcatcgatggtggaatcactgggaacatgcggcaagaggccattgaccgcttcaatgcaccgggtgctcagcagttctgcttcttgctttccactcgagctgggggccttggaatcaatctggccactgctgacacagttattatctatgactctgactggaacccccataatgacattcaggcctttagcagagctcaccggattgggcaaaataaaaaggtaatgatctaccggtttgtgacccgtgcgtcagtggaggagcgcatcacgcaggtggcaaagaagaaaatgatgctgacgcatctagtggtgcggcctgggctgggctccaagactggatctatgtccaaacaggagcttgatgatatcctcaaatttggcactgaggaactattcaaggatgaagccactgatggaggaggagacaacaaagagggagaagatagcagtgttatccactacgatgataaggccattgaacggctgctagaccgtaaccaggatgagactgaagacacagaattgcagggcatgaatgaatatttgagctcattcaaagtggcccagtatgtggtacgggaagaagaaatgggggaggaagaggaggtagaacgggaaatcattaaacaggaagaaagtgtggatcctgactactgggagaaattgctgcggcaccattatgagcagcagcaagaagatctagcccgaaatctgggcaaaggaaaaagaatccgtaaacaggtcaactacaatgatggctcccaggaggaccgagattggcaggacgaccagtccgacaaccagtccgattactcagtggcttcagaggaaggtgatgaagactttgatgaacgttcagaagctccccgtaggcccagtcgtaagggcctgcggaatgataaagataagccattgcctcctctgttggcccgtgttggtgggaatattgaagtacttggttttaatgctcgtcagcgaaaagcctttcttaatgcaattatgcgatatggtatgccacctcaggatgcttttactacccagtggcttgtaagagacctgcgaggcaaatcagagaaagagttcaaggcatatgtctctcttttcatgcggcatttatgtgagccgggggcagatggggctgagacctttgctgatggtgtcccccgagaaggcctgtctcgccagcatgtccttactagaattggtgttatgtctttgattcgcaagaaggttcaggagtttgaacatgttaatgggcgctggagcatgcctgaactggctgaggtggaggaaaacaagaaratgtcccagccagggtcaccctccccaaaaactcctacaccctccactccaggggacacgcagcccaacactcctgcacctgtcccacctgctgaagatgggataaaaatagaggaaaatagcctcaaagaagaagagagcatagaaggagaaaaggaggttaaatctacagcccctgagactgccattgagtgtacacaggcccctgcccctgcctcagaggatgaaaaggtcgttgttgaaccccctgagggagaggagaaagtggaaaaggcagaggtgaaggagagaacagaggaacctatggagacagagcccaaaggtgctgctgatgtagagaaggtggaggaaaagtyagcaatagatctgacccctattgtggtagaagacaaagaagagaagaaagaagaagaagagaaaaaagaggtgatgcttcagaatggagagacccccaaggacctgaatgatgagaaacagaagaaaaatattaaacaacgtttcatgtttaacattgcagatggtggttttactgagttgcactccctttggcagaatgaagagcgggcagccacagttaccaagaagacttatgagatctggcatcgacggcatgactactggctgctagcyggcattataaaccatggctatgcccggtggcaagacatccagaatgacccacgctatgccatcctcaatgagcctttcaagggtgaaatgaaccgtggcaatttcttagagatcaagaataaatttctagctcgaaggtttaagctcttagaacaagctctggtgattgaggaacagctgcgccgggctgcttacttgaacatgtcagaagacccttctcacccttccatggccctcaacacccgctttgctgaggtggagtgtttggcggaaagtcatcagcacctgtccaaggagtcaatggcaggaaacaagccagccaatgcagtcctgcacaaagttctgaaacagctggaagaactgctgagtgacatgaaagctgatgtgactcgactcccagctaccattgcccgaattcccccagttgctgtgaggttacagatgtcagagcgtaacattctcagccgcctggcaaaccgggcacccgaacctaccccacagcaggtagtccaccgctgagcagtgaccttcctcactttctcttgtcccagcttctcccctgggggcctgagagaccctcaccttcyttctgcccatcttccatgttgtaaaggaacagccccagtgcactgggggaggggagggagtgaggggcagtggtgcccttcctgcagaagagacatgcagcagtagcgctggcgccatctgcaggagctggcgggctggccttctggaccctggcttctccccactgtaacgcctgttacacac

SEQ ID NO: 5167 - DNA, 6545 bp, Homo sapiens
ccggccggtgtttcaggccctttaagaggcgacgctggagccggagccattttccccccttcggccgcggcgaggaggagccggagcgggagtgacaccgagccggacccagcgcgacctgcggcggctccgggtgactcgggccagtgtagaggtccycaggccgccggcaggagcagctgggccaattccctggccsggagcggaaggggatggcgtcgggcytgggctccccgtccccctgctcggcgggcagtgaggaggaggatatggatgcacttttgaacaacagcctgcccccaccccacccagaaaatgaagaggacccagaagaggatttgtcagaaacagagactccaaagctcaagaagaagaaaaagcctaagaaacctcgggaccctaaaatccctaagagcaagcgccaaaaaaaggagcgtatgctcttatgccggcagctgggggacagctctggggaggggccagagtttgtggaggaggaggaagaggtggctctgcgctcagacagtgagggcagcgactatactcctggcaagaagaagaagaagaagcttggacctaagaaagagaagaagagcaaatccaagcggaaggaggaggaggaggaggakgatgatgatgatgattcaaaggagcctaaatcatctgctcagctcctggaagactggggcatggaagacattgaccacgtgttctcagaggaggattatcgaaccctcaccaactacaaggccttcagccagtttgtcagacccctcattgctgccaaaaatcccaagattgctgtctccaagatgatgatggttttgggtgcaaaatggcgggagttcagtaccaataaccccttcaaaggcagttctggggcatcagtggcagctgcggcagcagcagcggtagctgtggtggagagcatggtgacagccactgaggttgcaccaccacctccccctgtggaggtgcctatccgcaaggccaagaccaaggagggcaaaggtcccaatgctcggaggaagcccaagggcagccctcgtgtacctgatgccaagaagcctaaacccaagaaagtagctcccctgaaaatcaagctgggaggttttggttccaagcgtaagagatcctcgagtgaggatgatgacttagatgtggaatctgacttcgatgatgccagtatcaatagctattctgtttctgatggttccaccagccgtagtagccgcagccgcaagaaactccgaaccactaaaaagaaaaagaaaggcgaggaggaggtgactgctgtggatggttatgagacagaccaccaggactattgcgaggtgtgccagcaaggcggtgagatcatcctgtgtgatacctgtccccgtgcttaccacatggtctgcctggatcccgacatggagaaggctcccgagggcaagtggagctgcccacactgcgagaaggaaggcatccagtgggaagctaaagaggacaattcggagggtgaggagatcctggaagaggttgggggagacctcgaagaggaggatgaccaccatatggaattctgtcgggtytgcaaggatggtggggaactgctctgctgtgatacctgtccttcttcctaccacatccactgcctgaatcccccacttccagagatccccaacggtgaatggctctgtccccgttgtacgtgtccagctctgaagggcaaagtgcagaagatcctaatctggaagtggggtcagccaccatctcccacaccagtgcctcggcctccagatgctgatcccaacacgccctccccaaagcccttggaggggcggccagagcggcagttctttgtgaaatggcaaggcatgtcttactggcactgctcctgggtttctgaactgcagctggagctgcactgtcaggtgatgttccgaaactatcagcggaagaatgatatggatgagccaccttctggggactttggtggtgatgaagagaaaagccgaaagcgaaagaacaaggaccctaaatttgcagagatggaggaacgcttctatcgctatgggataaaacccgagtggatgatgatccaccgaatcctcaaccacagtgtggacaagaagggccacgtccactacttgatcaagtggcgggacttaccttacgatcaggcttcttgggagagtgaggatgtggagatccaggattacgacctgttcaagcagagctattggaatcacagggagttaatgaggggtgaggaaggccgaccaggcaagaagctcaagaaggtgaagcttcggaagttggagaggcctccagaaacgccaacagttgatccaacagtgaagtatgagcgacagccagagtacctggatgctacaggtggaaccctgcacccctatcaaatggagggcctgaattggttgcgcttctcctgggctcagggcactgacaccatcttggctgatgagatgggccttgggaaaactgtacagacagcagtcttcctgtattccctttacaaggagggtcattccaaaggccccttcctagtgagcgcccctctttctaccatcatcaactgggagcgggagtttgaaatgtgggctccagacatgtatgtcgtaacctatgtgggtgacaaggacagccgtgccatcatccgagagaatgagttctcctttgaagacaatgccattcgtggtggcaagaaggcctcccgcatgaagaaagaggcatctgtgaaattccatgtgctgctgacatcctatgaattgatcaccattgacatggctattttgggctctattgattgggcctgcctcatcgtggatgaagcccatcggctgaagaacaatcagtctaagttcttccgggtattgaatggttactcactccagcacaagctgttgctgactgggacaccattacaaaacaatctggaagagttgtttcatctgctcaactttctcacccccgagaggttccacaatttggaaggttttttggaggagtttgctgacattgccaaggaggaccagataaaaaaactgcatgacatgctggggccgcacatgttgcggcggctcaaagccgatgtgttcaagaacatgccctccaagacagaactaattgtgcgtgtggagctgagccctatgcagaagaaatactacaagtacatcctcactcgaaattttgaagcactcaatgcccgaggtggtggcaaccaggtgtctctgctgaatgtggtgatggatcttaagaagtgctgcaaccatccatacctcttccctgtggctgcaatggaagctcctaagatgcctaatggcatgtatgatggcagtgccctaatcagagcatctgggaaattattgctgctgcagaaaatgctcaagaaccttaaggagggtgggcatcgtgtactcatcttttcccagatgaccaagatgctagacctgctagaggatttcttggaacatgaaggttataaatacgaacgcatcgatggtggaatcactgggaacatgcggcaagaggccattgaccgcttcaatgcaccgggtgctcagcagttctgcttcttgctttccactcgagctgggggccttggaatcaatctggccactgctgacacagttattatctatgactctgactggaacccccataatgacattcaggcctttagcagagctcaccggattgggcaaaataaaaaggtaatgatctaccggtttgtgacccgtgcgtcagtggaggagcgcatcacgcaggtggcaaagaagaaaatgatgctgacgcatctagtggtgcggcctgggctgggctccaagactggatctatgtccaaacaggagcttgatgatatcctcaaatttggcactgaggaactattcaaggatgaagccactgatggaggaggagacaacaaagagggagaagatagcagtgttatccactacgatgataaggccattgaacggctgctagaccgtaaccaggatgagactgaagacacagaattgcagggcatgaatgaatatttgagctcattcaaagtggcccagtatgtggtacgggaagaagaaatgggggaggaagaggaggtagaacgggaaatcattaaacaggaagaaagtgtggatcctgactactgggagaaattgctgcggcaccattatgagcagcagcaagaagatctagcccgaaatctgggcaaaggaaaaagaatccgtaaacaggtcaactacaatgatggctcccaggaggaccgagattggcaggacgaccagtccgacaaccagtccgattactcagtggcttcagaggaaggtgatgaagactttgatgaacgttcagaagctccccgtaggcccagtcgtaagggcctgcggaatgataaagataagccattgcctcctctgttggcccgtgttggtgggaatattgaagtacttggttttaatgctcgtcagcgaaaagcctttcttaatgcaattatgcgatatggtatgccacctcaggatgcttttactacccagtggcttgtaagagacctgcgaggcaaatcagagaaagagttcaaggcatatgtctctcttttcatgcggcatttatgtgagccgggggcagatggggctgagacctttgctgatggtgtcccccgagaaggcctgtctcgccagcatgtccttactagaattggtgttatgtctttgattcgcaagaaggttcaggagtttgaacatgttaatgggcgctggagcatgcctgaactggctgaggtggaggaaaacaagaaratgtcccagccagggtcaccctccccaaaaactcctacaccctccactccaggggacacgcagcccaacactcctgcacctgtcccacctgctgaagatgggataaaaatagaggaaaatagcctcaaagaagaagagagcatagaaggagaaaaggaggttaaatctacagcccctgagactgccattgagtgtacacaggcccctgcccctgcctcagaggatgaaaaggtcgttgttgaaccccctgagggagaggagaaagtggaaaaggcagaggtgaaggagagaacagaggaacctatggagacagagcccaaaggtgctgctgatgtagagaaggtggaggaaaagtyagcaatagatctgacccctattgtggtagaagacaaagaagagaagaaagaagaagaagagaaaaaagaggtgatgcttcagaatggagagacccccaaggacctgaatgatgagaaacagaagaaaaatattaaacaacgtttcatgtttaacattgcagatggtggttttactgagttgcactccctttggcagaatgaagagcgggcagccacagttaccaagaagacttatgagatctggcatcgacggcatgactactggctgctagcyggcattataaaccatggctatgcccggtggcaagacatccagaatgacccacgctatgccatcctcaatgagcctttcaagggtgaaatgaaccgtggcaatttcttagagatcaagaataaatttctagctcgaaggtttaagctcttagaacaagctctggtgattgaggaacagctgcgccgggctgcttacttgaacatgtcagaagacccttctcacccttccatggccctcaacacccgctttgctgaggtggagtgtttggcggaaagtcatcagcacctgtccaaggagtcaatggcaggaaacaagccagccaatgcagtcctgcacaaagttctgaaacagctggaagaactgctgagtgacatgaaagctgatgtgactcgactcccagctaccattgcccgaattcccccagttgctgtgaggttacagatgtcagagcgtaacattctcagccgcctggcaaaccgggcacccgaacctaccccacagcaggtagcccagcagcagtgaagatgcagactgataccacctccaccgctgagcagtgaccttcctcactttctcttgtcccagcttctcccctgggggcctgagagaccctcaccttcyttctgcccatcttccatgttgtaaaggaacagccccagtgcactgggggaggggagggagtgaggggcagtggtgcccttcctgcagaagagacatgcagcagtagcgctggcgccatctgcaggagctggcgggctggccttctggaccctggcttctccccactgtaacgcctgttacacacaaactgttgtgggttcctgccaggcttgaagaaaatgatctgaattttttcctccttttggttttattttgttggtttattttgtgttttyttttctcctttttggggggtattcagagtgggctgggcccctgggcgagacacagctacctctgttggcatctttttaataccaggaacccagcggctctagccactgagcggctaaatgaaataaagtggaaaaaaaaaaaaaggaaaaaaccaaaagcataaaaaaccmcagcaaatttcttgatgaaaattgaaaataaaagtttccttgtatttta

SEQ ID NO: 5168 - DNA, 6411 bp, Homo sapiens
tgactcgggccagtgtagaggtccycaggccgccggcaggagcagctgggccaattccctggccsggagcggaaggggatggcgtcgggcytgggctccccgtccccctgctcggcgggcagtgaggaggaggatatggatgcacttttgaacaacagcctgcccccaccccacccagaaaatgaagaggacccagaagaggatttgtcagaaacagagactccaaagctcaagaagaagaaaaagcctaagaaacctcgggaccctaaaatccctaagagcaagcgccaaaaaaaggagcgtatgctcttatgccggcagctgggggacagctctggggaggggccagagtttgtggaggaggaggaagaggtggctctgcgctcagacagtgagggcagcgactatactcctggcaagaagaagaagaagaagcttggacctaagaaagagaagaagagcaaatccaagcggaaggaggaggaggaggaggakgatgatgatgatgattcaaaggagcctaaatcatctgctcagctcctggaagactggggcatggaagacattgaccacgtgttctcagaggaggattatcgaaccctcaccaactacaaggccttcagccagtttgtcagacccctcattgctgccaaaaatcccaagattgctgtctccaagatgatgatggttttgggtgcaaaatggcgggagttcagtaccaataaccccttcaaaggcagttctggggcatcagtggcagctgcggcagcagcagcggtagctgtggtggagagcatggtgacagccactgaggttgcaccaccacctccccctgtggaggtgcctatccgcaaggccaagaccaaggagggcaaaggtcccaatgctcggaggaagcccaagggcagccctcgtgtacctgatgccaagaagcctaaacccaagaaagtagctcccctgaaaatcaagctgggaggttttggttccaagcgtaagagatcctcgagtgaggatgatgacttagatgtggaatctgacttcgatgatgccagtatcaatagctattctgtttctgatggttccaccagccgtagtagccgcagccgcaagaaactccgaaccactaaaaagaaaaagaaaggcgaggaggaggtgactgctgtggatggttatgagacagaccaccaggactattgcgaggtgtgccagcaaggcggtgagatcatcctgtgtgatacctgtccccgtgcttaccacatggtctgcctggatcccgacatggagaaggctcccgagggcaagtggagctgcccacactgcgagaaggaaggcatccagtgggaagctaaagaggacaattcggagggtgaggagatcctggaagaggttgggggagacctcgaagaggaggatgaccaccatatggaattctgtcgggtytgcaaggatggtggggaactgctctgctgtgatacctgtccttcttcctaccacatccactgcctgaatcccccacttccagagatccccaacggtgaatggctctgtccccgttgtacgtgtccagctctgaagggcaaagtgcagaagatcctaatctggaagtggggtcagccaccatctcccacaccagtgcctcggcctccagatgctgatcccaacacgccctccccaaagcccttggaggggcggccagagcggcagttctttgtgaaatggcaaggcatgtcttactggcactgctcctgggtttctgaactgcagctggagctgcactgtcaggtgatgttccgaaactatcagcggaagaatgatatggatgagccaccttctggggactttggtggtgatgaagagaaaagccgaaagcgaaagaacaaggaccctaaatttgcagagatggaggaacgcttctatcgctatgggataaaacccgagtggatgatgatccaccgaatcctcaaccacagtgtggacaagaagggccacgtccactacttgatcaagtggcgggacttaccttacgatcaggcttcttgggagagtgaggatgtggagatccaggattacgacctgttcaagcagagctattggaatcacagggagttaatgaggggtgaggaaggccgaccaggcaagaagctcaagaaggtgaagcttcggaagttggagaggcctccagaaacgccaacagttgatccaacagtgaagtatgagcgacagccagagtacctggatgctacaggtggaaccctgcacccctatcaaatggagggcctgaattggttgcgcttctcctgggctcagggcactgacaccatcttggctgatgagatgggccttgggaaaactgtacagacagcagtcttcctgtattccctttacaaggagggtcattccaaaggccccttcctagtgagcgcccctctttctaccatcatcaactgggagcgggagtttgaaatgtgggctccagacatgtatgtcgtaacctatgtgggtgacaaggacagccgtgccatcatccgagagaatgagttctcctttgaagacaatgccattcgtggtggcaagaaggcctcccgcatgaagaaagaggcatctgtgaaattccatgtgctgctgacatcctatgaattgatcaccattgacatggctattttgggctctattgattgggcctgcctcatcgtggatgaagcccatcggctgaagaacaatcagtctaagttcttccgggtattgaatggttactcactccagcacaagctgttgctgactgggacaccattacaaaacaatctggaagagttgtttcatctgctcaactttctcacccccgagaggttccacaatttggaaggttttttggaggagtttgctgacattgccaaggaggaccagataaaaaaactgcatgacatgctggggccgcacatgttgcggcggctcaaagccgatgtgttcaagaacatgccctccaagacagaactaattgtgcgtgtggagctgagccctatgcagaagaaatactacaagtacatcctcactcgaaattttgaagcactcaatgcccgaggtggtggcaaccaggtgtctctgctgaatgtggtgatggatcttaagaagtgctgcaaccatccatacctcttccctgtggctgcaatggaagctcctaagatgcctaatggcatgtatgatggcagtgccctaatcagagcatctgggaaattattgctgctgcagaaaatgctcaagaaccttaaggagggtgggcatcgtgtactcatcttttcccagatgaccaagatgctagacctgctagaggatttcttggaacatgaaggttataaatacgaacgcatcgatggtggaatcactgggaacatgcggcaagaggccattgaccgcttcaatgcaccgggtgctcagcagttctgcttcttgctttccactcgagctgggggccttggaatcaatctggccactgctgacacagttattatctatgactctgactggaacccccataatgacattcaggcctttagcagagctcaccggattgggcaaaataaaaaggtaatgatctaccggtttgtgacccgtgcgtcagtggaggagcgcatcacgcaggtggcaaagaagaaaatgatgctgacgcatctagtggtgcggcctgggctgggctccaagactggatctatgtccaaacaggagcttgatgatatcctcaaatttggcactgaggaactattcaaggatgaagccactgatggaggaggagacaacaaagagggagaagatagcagtgttatccactacgatgataaggccattgaacggctgctagaccgtaaccaggatgagactgaagacacagaattgcagggcatgaatgaatatttgagctcattcaaagtggcccagtatgtggtacgggaagaagaaatgggggaggaagaggaggtagaacgggaaatcattaaacaggaagaaagtgtggatcctgactactgggagaaattgctgcggcaccattatgagcagcagcaagaagatctagcccgaaatctgggcaaaggaaaaagaatccgtaaacaggtcaactacaatgatggctcccaggaggaccgagattggcaggacgaccagtccgacaaccagtccgattactcagtggcttcagaggaaggtgatgaagactttgatgaacgttcagaagctccccgtaggcccagtcgtaagggcctgcggaatgataaagataagccattgcctcctctgttggcccgtgttggtgggaatattgaagtacttggttttaatgctcgtcagcgaaaagcctttcttaatgcaattatgcgatatggtatgccacctcaggatgcttttactacccagtggcttgtaagagacctgcgaggcaaatcagagaaagagttcaaggcatatgtctctcttttcatgcggcatttatgtgagccgggggcagatggggctgagacctttgctgatggtgtcccccgagaaggcctgtctcgccagcatgtccttactagaattggtgttatgtctttgattcgcaagaaggttcaggagtttgaacatgttaatgggcgctggagcatgcctgaactggctgaggtggaggaaaacaagaaratgtcccagccagggtcaccctccccaaaaactcctacaccctccactccaggggacacgcagcccaacactcctgcacctgtcccacctgctgaagatgggataaaaatagaggaaaatagcctcaaagaagaagagagcatagaaggagaaaaggaggttaaatctacagcccctgagactgccattgagtgtacacaggcccctgcccctgcctcagaggatgaaaaggtcgttgttgaaccccctgagggagaggagaaagtggaaaaggcagaggtgaaggagagaacagaggaacctatggagacagagcccaaaggtgctgctgatgtagagaaggtggaggaaaagtyagcaatagatctgacccctattgtggtagaagacaaagaagagaagaaagaagaagaagagaaaaaagaggtgatgcttcagaatggagagacccccaaggacctgaatgatgagaaacagaagaaaaatattaaacaacgtttcatgtttaacattgcagatggtggttttactgagttgcactccctttggcagaatgaagagcgggcagccacagttaccaagaagacttatgagatctggcatcgacggcatgactactggctgctagcyggcattataaaccatggctatgcccggtggcaagacatccagaatgacccacgctatgccatcctcaatgagcctttcaagggtgaaatgaaccgtggcaatttcttagagatcaagaataaatttctagctcgaaggtttaagctcttagaacaagctctggtgattgaggaacagctgcgccgggctgcttacttgaacatgtcagaagacccttctcacccttccatggccctcaacacccgctttgctgaggtggagtgtttggcggaaagtcatcagcacctgtccaaggagtcaatggcaggaaacaagccagccaatgcagtcctgcacaaagttctgaaacagctggaagaactgctgagtgacatgaaagctgatgtgactcgactcccagctaccattgcccgaattcccccagttgctgtgaggttacagatgtcagagcgtaacattctcagccgcctggcaaaccgggcacccgaacctaccccacagcaggtagcccagcagcagtgaagatgcagactgataccacctccaccgctgagcagtgaccttcctcactttctcttgtcccagcttctcccctgggggcctgagagaccctcaccttcyttctgcccatcttccatgttgtaaaggaacagccccagtgcactgggggaggggagggagtgaggggcagtggtgcccttcctgcagaagagacatgcagcagtagcgctggcgccatctgcaggagctggcgggctggccttctggaccctggcttctccccactgtaacgcctgttacacacaaactgttgtgggttcctgccaggcttgaagaaaatgatctgaattttttcctccttttggttttattttgttggtttattttgtgttttyttttctcctttttggggggtattcagagtgggctgggcccctgggcgagacacagctacctctgttggcatctttttaataccaggaacccagcggctctagccactgagcggctaaatgaaataaagtggaaaaaaaaaaaaaggaaaaaaccaaaagcataaaaaaccmcagcaaatttcttgatgaaaattgaaaataaaagtttccttgtatttta

SEQ ID NO: 5169 - DNA, 6200 bp, Homo sapiens
ccggccggtgtttcaggccctttaagaggcgacgctggagccggagccattttccccccttcggccgcggcgaggaggagccggagcgggagtgacaccgagccggacccagcgcgacctgcggcggctccgggtgactcgggccagtgtagaggtccycaggccgccggcaggagcagctgggccaattccctggccsggagcggaaggggatggcgtcgggcytgggctccccgtccccctgctcggcgggcagtgaggaggaggatatggatgcacttttgaacaacagcctgcccccaccccacccagaaaatgaagaggacccagaagaggatttgtcagaaacagagactccaaagctcaagaagaagaaaaagcctaagaaacctcgggaccctaaaatccctaagagcaagcgccaaaaaaaggagcgtatgctcttatgccggcagctgggggacagctctggggaggggccagagtttgtggaggaggaggaagaggtggctctgcgctcagacagtgagggcagcgactatactcctggcaagaagaagaagaagaagcttggacctaagaaagagaagaagagcaaatccaagcggaaggaggaggaggaggaggakgatgatgatgatgattcaaaggagcctaaatcatctgctcagctcctggaagactggggcatggaagacattgaccacgtgttctcagaggaggattatcgaaccctcaccaactacaaggccttcagccagtttgtcagacccctcattgctgccaaaaatcccaagattgctgtctccaagatgatgatggttttgggtgcaaaatggcgggagttcagtaccaataaccccttcaaaggcagttctggggcatcagtggcagctgcggcagcagcagcggtagctgtggtggagagcatggtgacagccactgaggttgcaccaccacctccccctgtggaggtgcctatccgcaaggccaagaccaaggagggcaaaggtcccaatgctcggaggaagcccaagggcagccctcgtgtacctgatgccaagaagcctaaacccaagaaagtagctcccctgaaaatcaagctgggaggttttggttccaagcgtaagagatcctcgagtgaggatgatgacttagatgtggaatctgacttcgatgatgccagtatcaatagctattctgtttctgatggttccaccagccgtagtagccgcagccgcaagaaactccgaaccactaaaaagaaaaagaaaggcgaggaggaggtgactgctgtggatggttatgagacagaccaccaggactattgcgaggtgtgccagcaaggcggtgagatcatcctgtgtgatacctgtccccgtgcttaccacatggtctgcctggatcccgacatggagaaggctcccgagggcaagtggagctgcccacactgcgagaaggaaggcatccagtgggaagctaaagaggacaattcggagggtgaggagatcctggaagaggttgggggagacctcgaagaggaggatgaccaccatatggaattctgtcgggtytgcaaggatggtggggaactgctctgctgtgatacctgtccttcttcctaccacatccactgcctgaatcccccacttccagagatccccaacggtgaatggctctgtccccgttgtacgtgtccagctctgaagggcaaagtgcagaagatcctaatctggaagtggggtcagccaccatctcccacaccagtgcctcggcctccagatgctgatcccaacacgccctccccaaagcccttggaggggcggccagagcggcagttctttgtgaaatggcaaggcatgtcttactggcactgctcctgggtttctgaactgcagctggagctgcactgtcaggtgatgttccgaaactatcagcggaagaatgatatggatgagccaccttctggggactttggtggtgatgaagagaaaagccgaaagcgaaagaacaaggaccctaaatttgcagagatggaggaacgcttctatcgctatgggataaaacccgagtggatgatgatccaccgaatcctcaaccacagtgtggacaagaagggccacgtccactacttgatcaagtggcgggacttaccttacgatcaggcttcttgggagagtgaggatgtggagatccaggattacgacctgttcaagcagagctattggaatcacagggagttaatgaggggtgaggaaggccgaccaggcaagaagctcaagaaggtgaagcttcggaagttggagaggcctccagaaacgccaacagttgatccaacagtgaagtatgagcgacagccagagtacctggatgctacaggtggaaccctgcacccctatcaaatggagggcctgaattggttgcgcttctcctgggctcagggcactgacaccatcttggctgatgagatgggccttgggaaaactgtacagacagcagtcttcctgtattccctttacaaggagggtcattccaaaggccccttcctagtgagcgcccctctttctaccatcatcaactgggagcgggagtttgaaatgtgggctccagacatgtatgtcgtaacctatgtgggtgacaaggacagccgtgccatcatccgagagaatgagttctcctttgaagacaatgccattcgtggtggcaagaaggcctcccgcatgaagaaagaggcatctgtgaaattccatgtgctgctgacatcctatgaattgatcaccattgacatggctattttgggctctattgattgggcctgcctcatcgtggatgaagcccatcggctgaagaacaatcagtctaagttcttccgggtattgaatggttactcactccagcacaagctgttgctgactgggacaccattacaaaacaatctggaagagttgtttcatctgctcaactttctcacccccgagaggttccacaatttggaaggttttttggaggagtttgctgacattgccaaggaggaccagataaaaaaactgcatgacatgctggggccgcacatgttgcggcggctcaaagccgatgtgttcaagaacatgccctccaagacagaactaattgtgcgtgtggagctgagccctatgcagaagaaatactacaagtacatcctcactcgaaattttgaagcactcaatgcccgaggtggtggcaaccaggtgtctctgctgaatgtggtgatggatcttaagaagtgctgcaaccatccatacctcttccctgtggctgcaatggaagctcctaagatgcctaatggcatgtatgatggcagtgccctaatcagagcatctgggaaattattgctgctgcagaaaatgctcaagaaccttaaggagggtgggcatcgtgtactcatcttttcccagatgaccaagatgctagacctgctagaggatttcttggaacatgaaggttataaatacgaacgcatcgatggtggaatcactgggaacatgcggcaagaggccattgaccgcttcaatgcaccgggtgctcagcagttctgcttcttgctttccactcgagctgggggccttggaatcaatctggccactgctgacacagttattatctatgactctgactggaacccccataatgacattcaggcctttagcagagctcaccggattgggcaaaataaaaaggtaatgatctaccggtttgtgacccgtgcgtcagtggaggagcgcatcacgcaggtggcaaagaagaaaatgatgctgacgcatctagtggtgcggcctgggctgggctccaagactggatctatgtccaaacaggagcttgatgatatcctcaaatttggcactgaggaactattcaaggatgaagccactgatggaggaggagacaacaaagagggagaagatagcagtgttatccactacgatgataaggccattgaacggctgctagaccgtaaccaggatgagactgaagacacagaattgcagggcatgaatgaatatttgagctcattcaaagtggcccagtatgtggtacgggaagaagaaatgggggaggaagaggaggtagaacgggaaatcattaaacaggaagaaagtgtggatcctgactactgggagaaattgctgcggcaccattatgagcagcagcaagaagatctagcccgaaatctgggcaaaggaaaaagaatccgtaaacaggtcaactacaatgatggctcccaggaggaccgagattggcaggacgaccagtccgacaaccagtccgattactcagtggcttcagaggaaggtgatgaagactttgatgaacgttcagaagctccccgtaggcccagtcgtaagggcctgcggaatgataaagataagccattgcctcctctgttggcccgtgttggtgggaatattgaagtacttggttttaatgctcgtcagcgaaaagcctttcttaatgcaattatgcgatatggtatgccacctcaggatgcttttactacccagtggcttgtaagagacctgcgaggcaaatcagagaaagagttcaaggcatatgtctctcttttcatgcggcatttatgtgagccgggggcagatggggctgagacctttgctgatggtgtcccccgagaaggcctgtctcgccagcatgtccttactagaattggtgttatgtctttgattcgcaagaaggttcaggagtttgaacatgttaatgggcgctggagcatgcctgaactggctgaggtggaggaaaacaagaaratgtcccagccagggtcaccctccccaaaaactcctacaccctccactccaggggacacgcagcccaacactcctgcacctgtcccacctgctgaagatgggataaaaatagaggaaaatagcctcaaagaagaagagagcatagaaggagaaaaggaggttaaatctacagcccctgagactgccattgagtgtacacaggcccctgcccctgcctcagaggatgaaaaggtcgttgttgaaccccctgagggagaggagaaagtggaaaaggcagaggtgaaggagagaacagaggaacctatggagacagagcccaaaggtgctgctgatgtagagaaggtggaggaaaagtyagcaatagatctgacccctattgtggtagaagacaaagaagagaagaaagaagaagaagagaaaaaagaggtgatgcttcagaatggagagacccccaaggacctgaatgatgagaaacagaagaaaaatattaaacaacgtttcatgtttaacattgcagatggtggttttactgagttgcactccctttggcagaatgaagagcgggcagccacagttaccaagaagacttatgagatctggcatcgacggcatgactactggctgctagcyggcattataaaccatggctatgcccggtggcaagacatccagaatgacccacgctatgccatcctcaatgagcctttcaagggtgaaatgaaccgtggcaatttcttagagatcaagaataaatttctagctcgaaggtttaagctcttagaacaagctctggtgattgaggaacagctgcgccgggctgcttacttgaacatgtcagaagacccttctcacccttccatggccctcaacacccgctttgctgaggtggagtgtttggcggaaagtcatcagcacctgtccaaggagtcaatggcaggaaacaagccagccaatgcagtcctgcacaaagttctgaaacagctggaagaactgctgagtgacatgaaagctgatgtgactcgactcccagctaccattgcccgaattcccccagttgctgtgaggttacagatgtcagagcgtaacattctcagccgcctggcaaaccgggcacccgaacctaccccacagcaggtagtccaccgctgagcagtgaccttcctcactttctcttgtcccagcttctcccctgggggcctgagagaccctcaccttcyttctgcccatcttccatgttgtaaaggaacagccccagtgcactgggggaggggagggagtgaggggcagtggtgcccttcctgcagaagagacatgcagcagtagcgctggcgccatctgcaggagctggcgggctggccttctggaccctggcttctccccactgtaacgcctgttacacac

SEQ ID NO: 5170 - DNA, 2930 bp, Homo sapiens
tggccrcgrctgcgcgcagacactgaccttcagcgcctcggctccagcgccawggcgccctccaggaagttcttcgttgggggaaactggaagatgaacgggcggaagcagagtctgggggagctcatcggcactctgaacgcggccaaggtgccggccgacaccggtaagccctcgccgaggaggggtctggccgggccggggccggggccggggcaggagtggcagcgccctctcccgaggccccgaggccccgaggccggtatccgcgcggacctgatgcagggctgtgggacgagggccgctggggtccgggcaggggcctcgcagccgcagccccgtcggtgcgtcgagggggcagggcggagcacatgatgccccttggactayggggcaggtaaggacgttttgggtctcctggaggaaggtggccccggggcgcgcactggggctgtgcccgccaggcgacggggttaggagcggagcccgaggctctgcgggagaccgggggaggctgggccgcgtgggcttcccgctccctgcgccctggcctcccgcgccgtgcgccgccgcacgtagccccagactcctccccytcctcgccggcgtccgcgtccccgcgccgagctgctcgggctccctgagcccccagatctgaccccttcccttcggcaacctgarcgactcccgccttccacggaagggaccgagcccgtgccaaacaggctgagcgatttgggagtgaggagccatcctaccgctttccccaacctggaaacagcaaagcgcaaggcctctgagtcagttaggtctctgccacccacgggcaaaggatgctctcctccatcctccttcctccctccaccgaaatcggagagccgcgggcctgatccaaagaggcatccccttctcgttcattccccagaggcctcaatacaaaccccaggagttggcccctctccttttgctacaaatccttgccttgcaaaggggaggtgaggatgggctattttagargggaagcagggttgctccctggagaatgctgagtctgtgaggtgcctatgccgagaatagctcgaggaaattggagccccagctgttaaaagagcagagggcagggtgagggccgtggcctctcaggggtatctggaaggctcttcgagttgagtgcagacccagcctgggctggaaaatggacaaaggtcatcttgctggggtgaaaagggggagagcagaaccaagaagaagagggtgagggctggggggctccagggcactggttaggaattgtggggaatgaaggctttctttagtctcatccccctgtggtaccatcttgtcctcagaggtggtttgtgctccccctactgcctatatcgacttcgcccggcagaagctagatcccaagattgctgtggctgcgcagaactgctacaaagtgactaatggggcttttactggggagatcagccctggcatgatcaaagactgcggasccacgtgggtggtcctggggcactcagagagaaggcatgtctttggggagtcagatgaggttagtagccaagagagaagataagggatgtctttttccaagaaggatgtctcaccaagtctgtttctcaacagctgattgggcagaaagtggcccatgctctggcagagggactcggagtaatcgcctgcattggggagaagctagatgaaagggaagctggcatcactgagaaggttgttttcgagcagacaaaggtcatcgcaggtatctctggagaaagggacctttgagcctatccagggccacagagactcagagggtagggtcaggccctggagcctgtcttggtccccatgctgatccagaaaaggaaaaaggggagggggagtgacaatctttgcttggggcctatsacttctccagccccaaggtagatgccacctggaaatcccccaatgtccactagggggcagtaggccaccgttcttcgtactccggagaacctggctggagagctctttcttgttcacccttccctccatctgtatctctgccctgcagataacgtgaaggactggagcaaggtcgtcctggcctatgagcctgtgtgggccattggtactggcaagactgcaacaccccaacaggcccaggaagtacacgagaagctccgaggatggctgaagtccaacgtctctgatgcrgtggctcagagcacccgtatcatttatggaggctctgtgactggggcaacctgcaaggagctggccagccagcctgatgtggatggcttccttgtgggtggtgcttccctcaagcccgaaytcgtggacatcatcaatgccaaacaatgagccccatccatcttccctacccttcctgccaagccaggractaagcagcccagaagcccagtaactgccctttccctgcatatgcttctgatggtgtcatctgctccttcctgtggcctcatccaaactgtatcttcctttactgtttatatcttcaccctgtaatggttgggaccaggccaatcccttctccacttactataatggttggaactaaacgtcaccaaggtggcttctccttggctgaragayggaaggcgtggtgggatttgctcctgggttccctaggccctagtgagggcagaagagaaaccatcctctcccttcttacaccgtgaggycaagatcccctcagaaggcaggagtgctgccctctcccatggtgcccgtgcctctgtgctgtgtatgtgaaccacccatgtgagggaataaacctggcmctaggtcttgtggtttgtctgccttcactggacttgcccagataatcttcctttttgaggcagctatataaatgatcatttgtgcaagaaaaaaaaaaaaacaagaacaggtttctwtaacaacatctcttacta

SEQ ID NO: 5171 - DNA, 1761 bp, Homo sapiens
tcccacagttggagaggggccctctctgccccagtgggcgatctgggctacggccaagttgccaccagctagttccgcttgaaaaccacttctggccccgtgggggactcaagtcgccaagcgagggttcccctgagcgccggagctcacaggtctcgccttgtcccgaaagccccgcaatcgaggcggaggcgaccgagcccccgactctcctagaacgttgccacaagaagggggaacgtcggaacagtgcatcatcgggcggcggccggggcggcggcaggagggcgggcggggggcagggctccgggggactgggcgggccatggcggaggacggcgaggaggcggagttccacttcgcggcgctctatakaagtgggcagtggccrcgrctgcgcgcagacactgaccttcagcgcctcggctccagcgccawggcgccctccaggaagttcttcgttgggggaaactggaagatgaacgggcggaagcagagtctgggggagctcatcggcactctgaacgcggccaaggtgccggccgacaccgaggtggtttgtgctccccctactgcctatatcgacttcgcccggcagaagctagatcccaagattgctgtggctgcgcagaactgctacaaagtgactaatggggcttttactggggagatcagccctggcatgatcaaagactgcggasccacgtgggtggtcctggggcactcagagagaaggcatgtctttggggagtcagatgagctgattgggcagaaagtggcccatgctctggcagagggactcggagtaatcgcctgcattggggagaagctagatgaaagggaagctggcatcactgagaaggttgttttcgagcagacaaaggtcatcgcagataacgtgaaggactggagcaaggtcgtcctggcctatgagcctgtgtgggccattggtactggcaagactgcaacaccccaacaggcccaggaagtacacgagaagctccgaggatggctgaagtccaacgtctctgatgcrgtggctcagagcacccgtatcatttatggaggctctgtgactggggcaacctgcaaggagctggccagccagcctgatgtggatggcttccttgtgggtggtgcttccctcaagcccgaaytcgtggacatcatcaatgccaaacaatgagccccatccatcttccctacccttcctgccaagccaggractaagcagcccagaagcccagtaactgccctttccctgcatatgcttctgatggtgtcatctgctccttcctgtggcctcatccaaactgtatcttcctttactgtttatatcttcaccctgtaatggttgggaccaggccaatcccttctccacttactataatggttggaactaaacgtcaccaaggtggcttctccttggctgaragayggaaggcgtggtgggatttgctcctgggttccctaggccctagtgagggcagaagagaaaccatcctctcccttcttacaccgtgaggycaagatcccctcagaaggcaggagtgctgccctctcccatggtgcccgtgcctctgtgctgtgtatgtgaaccacccatgtgagggaataaacctggcmctaggtcttgtggtttgtctgccttcactggacttgcccagataatcttcctttttgaggcagctatataaatgatcatttgtgcaagaaaaaaaaaaaaacaagaacaggtttctwtaacaacatctcttacta

SEQ ID NO: 5172 - DNA, 1665 bp, Homo sapiens
tcccacagttggagaggggccctctctgccccagtgggcgatctgggctacggccaagttgccaccagctagttccgcttgaaaaccacttctggccccgtgggggactcaagtcgccaagcgagggttcccctgagcgccggagctcacaggtctcgccttgtcccgaaagccccgcaatcgaggcggaggcgaccgagcccccgactctcctagaacgttgccacaagaagggggaacgtcggaacagtgcatcatcgggcggcggccggggcggcggcaggagggcgggcggggggcagggctccgggggactgggcgggccatggcggaggacggcgaggaggcggagttccacttcgcggcgctctatakaagtgggcagtggccrcgrctgcgcgcagacactgaccttcagcgcctcggctccagcgccawggcgccctccaggaagttcttcgttgggggaaactggaagatgaacgggcggaagcagagtctgggggagctcatcggcactctgaacgcggccaaggtgccggccgacaccgaggtggtttgtgctccccctactgcctatatcgacttcgcccggcagaagctagatcccaagattgctgtggctgcgcagaactgctacaaagtgactaatggggcttttactggggagatcagccctggcatgatcaaagactgcggasccacgtgggtggtcctggggcactcagagagaaggcatgtctttggggagtcagatgagctgattgggcagaaagtggcccatgctctggcagagggactcggagtaatcgcctgcattggggagaagctagatgaaagggaagctggcatcactgagaaggttgttttcgagcagacaaaggtcatcgcagataacgtgaaggactggagcaaggtcgtcctggcctatgagcctgtgtgggccattggtactggcaagactgcaacaccccaacaggcccaggaagtacacgagaagctccgaggatggctgaagtccaacgtctctgatgcrgtggctcagagcacccgtatcatttatggaggctctgtgactggggcaacctgcaaggagctggccagccagcctgatgtggatggcttccttgtgggtggtgcttccctcaagcccgaaytcgtggacatcatcaatgccaaacaatgagccccatccatcttccctacccttcctgccaagccaggractaagcagcccagaagcccagtaactgccctttccctgcatatgcttctgatggtgtcatctgctcctttctccacttactataatggttggaactaaacgtcaccaaggtggcttctccttggctgaragayggaaggcgtggtgggatttgctcctgggttccctaggccctagtgagggcagaagagaaaccatcctctcccttcttacaccgtgaggycaagatcccctcagaaggcaggagtgctgccctctcccatggtgcccgtgcctctgtgctgtgtatgtgaaccacccatgtgagggaataaacctggcmctaggtcttgtggtttgtctgccttcactggacttgcccagataatcttcctttttgaggcagctatataaatgatcatttgtgcaagaaaaaaaaaaaaacaagaacaggtttctwt

SEQ ID NO: 5173 - DNA, 2424 bp, Homo sapiens
acccgcgctcgtacgtgcgcctccgccggcagctcctgactcatcgggggctccgggtcacatgcgcccgcgcggccctataggcgcctcctccgcccgccgcccgggagccgcagccgccgccgccactgccactcccgctctctcagcgccgccgtcgccaccgccaccgccaccgccactaccaccgkctgagtctgcagtcccgagatcccagccatcatgtccatagagaagatctgggcccgggagatcctggactcccgcgggaaccccacagtggaggtggatctctatactgccaaaggtcttttccgggctgcagtgcccagtggagcctctacgggcatctatgaggccctggagctgagggatggagacaaacagcgttacttaggcaaaggtgtcctgaaggcagtggaccacatcaactccaccatcgcgccagccctcatcagctcaggtctctctgtggtggagcaagagaaactggacaacctgatgctggagttggatgggactgagaacaaatccaagtttggggccaatgccatcctgggtgtgtctctggccgtgtgtaaggcaggggcagctgagcgggaactgcccctgtatcgccacattgctcagctggccgggaactcagacctcatcctgcctgtgccggccttcaacgtgatcaatggtggctctcatgctggcaacaagctggccatgcaggagttcatgatcctcccagtgggagctgagagctttcgggatgccatgcgactaggtgcagaggtctaccatacactcaagggagtcatcaaggacaaatacggcaaggatgccaccaatgtgggggatgaaggtggctttgcccccaatatcctggagaacagtgaagccttggagctggtgaaggaagccatcgacaaggctggctacacggaaaagatcgttattggcatggatgttgctgcytcagagttttatcgtgatggcaaatatgacttggacttcaagtctcccactgatccttcccgatacatcactggggaccagctgggggcactctaccaggactttgtcagggactatcctgtggtctccattgaggacccatttgaccaggatgattgggctgcctggtccaagttcacagccaatgtagggatccagattgtgggtgatgacctgacagtgaccaacccaaaacgtattgagcgggcagtggaagaaaaggcctgcaactgtctgctgctcaaggtcaaccagatcggctcggtcactgaagccatccaagcgtgcaagctggcccaggagaatggctggggggtcatggtgagtcatcgctcaggagagactgaggacacattcattgctgacctggtggtggggctgtgcacaggccagatcaagactggtgccccgtgccgttctgaacgtctggctaaatacaaccagctcatgagaattgaggaagagctgggggatgaagctcgctttgccggacataacttccgtaatcccagtgtgctgtgattcctctgcttgcctggagacgtggaacctctgtctcatcctcctggaaccttgctgtcctgatctgtgatagttcaccccctgagatcccctgagccccagggtgcccagaacttccctgattgacctgctccgctgctccttggcttacctgacctcttgctgtctctgctcgccctcctttctgtgccctactcattggggttccgcactttccacttcttcctttctctttctctcttccctcagaaactagaaatgtgaatgaggattattataaaagggggtcyrtggaagaatgatcagcatctgtgatgggagcgtcagggttggtgtgctgaggtgttagagagggaccatgtgtcacttgtgctttgctcttgtcccacgtgtcttccactttgcatatgagccgtgaactgtgcatagtgctgggatggaggggagtgttgggcatgtgatcacgcctggctaataaggctttagtgtatttatttatttatttattttatttgtttttcattcatcccattaatcatttccccataactcaatggcctaaaactggcctgacttgggggaacgatgtgtctgtatttcatgtggctgtagatcccaagatgactggggtgggaggtcttgctagaatgggaagggtcatagaaagggccttgacatcagttcctttgtgtgtactcactgaagcctgcgttggtccagagcggaggctgtgtgcctgggggagttttcctctatacatctctccccaaccctaggttccctgttcttcctccagctgcaccagagcaacctctcactccccatgccacgttccacagttgccaccmcctctgtggcattgaaatgagcacctccattaaagtctgaatcagtgca

SEQ ID NO: 5174 - DNA, 2029 bp, Homo sapiens
cgccaccgccactaccaccgkctgagtctgcagtcccgagcctcccgccccgcccattgatctcaggctccacccctctaagcctcttatctttctccttccttcccttccacccgaggagatcccagccatcatgtccatagagaagatctgggcccgggagatcctggactcccgcgggaaccccacagtggaggtggatctctatactgccaaaggtcttttccgggctgcagtgcccagtggagcctctacgggcatctatgaggccctggagctgagggatggagacaaacagcgttacttaggcaaaggtgtcctgaaggcagtggaccacatcaactccaccatcgcgccagccctcatcagctcaggtctctctgtggtggagcaagagaaactggacaacctgatgctggagttggatgggactgagaacaaatccaagtttggggccaatgccatcctgggtgtgtctctggccgtgtgtaaggcaggggcagctgagcgggaactgcccctgtatcgccacattgctcagctggccgggaactcagacctcatcctgcctgtgccggccttcaacgtgatcaatggtggctctcatgctggcaacaagctggccatgcaggagttcatgatcctcccagtgggagctgagagctttcgggatgccatgcgactaggtgcagaggtctaccatacactcaagggagtcatcaaggacaaatacggcaaggatgccaccaatgtgggggatgaaggtggctttgcccccaatatcctggagaacagtgaagccttggagctggtgaaggaagccatcgacaaggctggctacacggaaaagatcgttattggcatggatgttgctgcytcagagttttatcgtgatggcaaatatgacttggacttcaagtctcccactgatccttcccgatacatcactggggaccagctgggggcactctaccaggactttgtcagggactatcctgtggtctccattgaggacccatttgaccaggatgattgggctgcctggtccaagttcacagccaatgtagggatccagattgtgggtgatgacctgacagtgaccaacccaaaacgtattgagcgggcagtggaagaaaaggcctgcaactgtctgctgctcaaggtcaaccagatcggctcggtcactgaagccatccaagcgtgcaagctggcccaggagaatggctggggggtcatggtgagtcatcgctcaggagagactgaggacacattcattgctgacctggtggtggggctgtgcacaggccagatcaagactggtgccccgtgccgttctgaacgtctggctaaatacaaccagctcatgagaattgaggaagagctgggggatgaagctcgctttgccggacataacttccgtaatcccagtgtgctgtgattcctctgcttgcctggagacgtggaacctctgtctcatcctcctggaaccttgctgtcctgatctgtgatagttcaccccctgagatcccctgagccccagggtgcccagaacttccctgattgacctgctccgctgctccttggcttacctgacctcttgctgtctctgctcgccctcctttctgtgccctactcattggggttccgcactttccacttcttcctttctctttctctcttccctcagaaactagaaatgtgaatgaggattattataaaagggggtcyrtggaagaatgatcagcatctgtgatgggagcgtcagggttggtgtgctgaggtgttagagagggaccatatgagccgtgaactgtgcatagtgctgggatggaggggagtgttgggcatgtgatcacgcctggctaataaggctttagtgtatttatttatttatttattttatttgtttttcattcatcccattaatcatttccccataactcaatggcatcccaagatgactggggtgggaggtcttgctagaatgggaagggtcatagaaagggccttgacatcagttcctttgtgt

SEQ ID NO: 5175 - DNA, 2001 bp, Homo sapiens
gtggtttcaccgagacctcagtgggctggatgcagagaccctgctcaagggccgaggtgtccacggtagcttcctggctcggcccagtcgcaagaaccagggtgacttctcgctctccgtcagggtgggggatcaggtgacccatattcggatccagaactcaggggatttctatgacctgtatggaggggagaagtttgcgactctgacagagctggtggagtactacactcagcagcagggtgtsstgcaggaccgcgacggcaccatcatccacctcaagtacccgctgaactgctccgatcccactagtgagaggtggtaccatggccacatgtctggcgggcaggcagagacgctgctgcaggccaagggcgagccctggacgtttcttgtgcgtgagagcctcagccagcctggagacttcgwgctttctgtgctcagtgaccagcccaaggctggcccaggctccccgctcagggtcacccacatcaaggtcatgtgcgagggtggacgctacacagtgggtggtttggagaccttcgacagcctcacggacctggtrgagcatttcaagaagacggggattgaggaggcctcaggcgcctttgtctacctgcggcagccgtactatgccacgagggtgaatgcggctgacattgagaaccgagtgttggaactgaacaagaagcaggagtccgaggatacagccaaggctggcttctgggaggagtttgagagtttgcagaagcaggaggtgaagaacttgcaccagcgtctggaagggcagcggccagagaacaagggcaagaaccgctacaagaacattctcccctttgaccacagccgagtgatcctgcagggacgggacagtaacatccccgggtccgactacatcaatgccaactacatcaagaaccagctgctaggccctgatgagaacgctaagacctacatcgccagccagggytgtctggaggccacggtcaatgacttctggcagatggcgtggcaggagaacagccgtgtcatcgtcatgaccacccgagaggtggagaaaggccggaacaaatgcgtcccatactggcccgaggtgggcatgcagcgtgcttatgggccctactctgtgaccaactgcggggagcatgacacaaccgaatacaaactccgtaccttacaggtctccccvctggacaatggagacctgattcgggagatctggcattaccagtacctgagctggcccgaccatggggtccccagtgagcctgggggtgtcctcagcttcctggaccagatcaaccagcggcaggaaagtctgcctcacgcagggcccatcatcrtgcactgcagcgccggcatcggccgcacaggcaccatcattgtcatcgacatgctcatggagaacatctccaccaagggcctggactgtgacattgacatccagaagaccatccagatggtgcgggcgcagcgctcgggcatggtgcagacggaggcgcagtacaagttcatctacgtggccatcgcccagttcattgaaaccactaagaagaagctggaggtcctgcagtcgcagaagggccaggagtcggagtacgggaacatcacctatcccccagccatgaagaatgcccatgccaaggcctcccgcacctcgtccaaacacaaggaggatgtgtatgagaacctgcacactaagaacaagagggaggagaaagtgaagaagcagcggtcagcagacaaggagaagagcaagggttccctcaagaggaagtgagcrgtgctgtcctcaggtggccatgcctcagccctgaccctgtggaagcatttcgcgatggacagactcacaacctgaacctaggagtgccccattcttttgtaatttaaatggctgcatcccccccacctctccctgaccctgtatatakcccagccaggccccaggcagggccaacccttctcctcttgtaaataaagccctgggatcactgtgtgtcg

SEQ ID NO: 5176 - DNA, 2195 bp, Homo sapiens
tgtccccgccctgccggctgccccaggccagtggagtggcagccccagaactgggaccaccgggggtggtgaggcggcccggcactgggagctgcatctgaggcttagtccctgagctctctgcctgcccagactagctgcacctcctcattccctgcgcccccttcctctccggaagcccccaggatggtgaggtggtttcaccgagacctcagtgggctggatgcagagaccctgctcaagggccgaggtgtccacggtagcttcctggctcggcccagtcgcaagaaccagggtgacttctcgctctccgtcagggtgggggatcaggtgacccatattcggatccagaactcaggggatttctatgacctgtatggaggggagaagtttgcgactctgacagagctggtggagtactacactcagcagcagggtgtsstgcaggaccgcgacggcaccatcatccacctcaagtacccgctgaactgctccgatcccactagtgagaggtggtaccatggccacatgtctggcgggcaggcagagacgctgctgcaggccaagggcgagccctggacgtttcttgtgcgtgagagcctcagccagcctggagacttcgwgctttctgtgctcagtgaccagcccaaggctggcccaggctccccgctcagggtcacccacatcaaggtcatgtgcgagggtggacgctacacagtgggtggtttggagaccttcgacagcctcacggacctggtrgagcatttcaagaagacggggattgaggaggcctcaggcgcctttgtctacctgcggcagccgtactatgccacgagggtgaatgcggctgacattgagaaccgagtgttggaactgaacaagaagcaggagtccgaggatacagccaaggctggcttctgggaggagtttgagagtttgcagaagcaggaggtgaagaacttgcaccagcgtctggaagggcagcggccagagaacaagggcaagaaccgctacaagaacattctcccctttgaccacagccgagtgatcctgcagggacgggacagtaacatccccgggtccgactacatcaatgccaactacatcaagaaccagctgctaggccctgatgagaacgctaagacctacatcgccagccagggytgtctggaggccacggtcaatgacttctggcagatggcgtggcaggagaacagccgtgtcatcgtcatgaccacccgagaggtggagaaaggccggaacaaatgcgtcccatactggcccgaggtgggcatgcagcgtgcttatgggccctactctgtgaccaactgcggggagcatgacacaaccgaatacaaactccgtaccttacaggtctccccvctggacaatggagacctgattcgggagatctggcattaccagtacctgagctggcccgaccatggggtccccagtgagcctgggggtgtcctcagcttcctggaccagatcaaccagcggcaggaaagtctgcctcacgcagggcccatcatcrtgcactgcagcgccggcatcggccgcacaggcaccatcattgtcatcgacatgctcatggagaacatctccaccaagggcctggactgtgacattgacatccagaagaccatccagatggtgcgggcgcagcgctcgggcatggtgcagacggaggcgcagtacaagttcatctacgtggccatcgcccagttcattgaaaccactaagaagaagctggaggtcctgcagtcgcagaagggccaggagtcggagtacgggaacatcacctatcccccagccatgaagaatgcccatgccaaggcctcccgcacctcgtccaaacacaaggaggatgtgtatgagaacctgcacactaagaacaagagggaggagaaagtgaagaagcagcggtcagcagacaaggagaagagcaagggttccctcaagaggaagtgagcrgtgctgtcctcaggtggccatgcctcagccctgaccctgtggaagcatttcgcgatggacagactcacaacctgaacctaggagtgccccattcttttgtaatttaaatggctgcatcccccccacctctccctgaccctgtatatakcccagccaggccccaggcagggccaacccttctcctcttgtaaataaagccctgggatcactgtgtgtcg

SEQ ID NO: 5177 - DNA, 2642 bp, Homo sapiens
tgtccccgccctgccggctgccccaggccagtggagtggcagccccagaactgggaccaccgggggtggtgaggcggcccggcactgggagctgcatctgaggcttagtccctgagctctctgcctgcccagactagctgcacctcctcattccctgcgcccccttcctctccggaagcccccaggatggtgaggtggtttcaccgagacctcagtgggctggatgcagagaccctgctcaagggccgaggtgtccacggtagcttcctggctcggcccagtcgcaagaaccagggtgacttctcgctctccgtcaggtaggtgggccccccgcaaccccgggcattttggccactctcttgtgccatccaggccctgaaccactcattcctggttccccgtggcagtgctgactccccgtctgttcccttgcccccaacccccacactccccatccctgtctgtgcccacccatgcccatgtgtgcccccacccaggacctcagccgatccctgccctcctgcctctactcctgcaccgactggcctcaccgcctggtgccctgcagggtgggggatcaggtgacccatattcggatccagaactcaggggatttctatgacctgtatggaggggagaagtttgcgactctgacagagctggtggagtactacactcagcagcagggtgtsstgcaggaccgcgacggcaccatcatccacctcaagtacccgctgaactgctccgatcccactagtgagaggtggtaccatggccacatgtctggcgggcaggcagagacgctgctgcaggccaagggcgagccctggacgtttcttgtgcgtgagagcctcagccagcctggagacttcgwgctttctgtgctcagtgaccagcccaaggctggcccaggctccccgctcagggtcacccacatcaaggtcatgtgcgagggtggacgctacacagtgggtggtttggagaccttcgacagcctcacggacctggtrgagcatttcaagaagacggggattgaggaggcctcaggcgcctttgtctacctgcggcagccgtactatgccacgagggtgaatgcggctgacattgagaaccgagtgttggaactgaacaagaagcaggagtccgaggatacagccaaggctggcttctgggaggagtttgagtttgcagaagcaggaggtgaagaacttgcaccagcgtctggaagggcagcggccagagaacaagggcaagaaccgctacaagaacattctcccctttgaccacagccgagtgatcctgcagggacgggacagtaacatccccgggtccgactacatcaatgccaactacatcaaggtcagcagccctgatgagaacgctaagacctacatcgccagccagggytgtctggaggccacggtcaatgacttctggcagatggcgtggcaggagaacagccgtgtcatcgtcatgaccacccgagaggtggagaaaggccgggtagggcgcccccccttccccgcatccgcccccgtgcttgtggtcatgccattaagtcgaagagcagtcagatgccagggcagaaagggatctcaggggctccccctacacagcaccctctgtgctgccattgaagtgatcccatccgtgacacaaactgggtcaagttccttcctttctgaaatctcttccatggctcctgacctgattcgggagatctggcattaccagtacctgagctggcccgaccatggggtccccagtgagcctgggggtgtcctcagcttcctggaccagatcaaccagcggcaggaaagtctgcctcacgcagggcccatcatcrtgcactgcagcgccggcatcggccgcacaggcaccatcattgtcatcgacatgctcatggagaacatctccaccaagggcctggactgtgacattgacatccagaagaccatccagatggtgcgggcgcagcgctcgggcatggtgcagacggaggcgcagtacaagttcatctacgtggccatcgcccagttcattgaaaccactaagaagaagctggaggtcctgcagtcgcagaagggccaggagtcggagtacgggaacatcacctatcccccagccatgaagaatgcccatgccaaggcctcccgcacctcgtccaagagcttggagtctagtgcagggaccgtggctgcgtcacctgtgagacggggtggccagaggggactgccagtgccgggtccccctgtgctgtctcctgacctgcaccaactgcctgtacttgcccccctgcacccggctgcagacacaaggaggatgtgtatgagaacctgcacactaagaacaagagggaggagaaagtgaagaagcagcggtcagcagacaaggagaagagcaagggttccctcaagaggaagtgagcrgtgctgtcctcaggtggccatgcctcagccctgaccctgtggaagcatttcgcgatggacagactcacaacctgaacctaggagtgccccattcttttgtaatttaaatggctgcatcccccccacctctccctgaccctgtatatakcccagccaggccccaggcagggccaacccttctcctcttgtaaataaagccctgggatcactgtg

SEQ ID NO: 5178 - DNA, 2140 bp, Homo sapiens
gaggaagtggctgattactgagcggttcttcctcacctggcttgggccactgtgcacagctgtgccgctggctcagccccgccccctgcggccctcygccgtggcttccccctccctacagagagatgctgtcccgtgggtggtttcaccgagacctcagtgggctggatgcagagaccctgctcaagggccgaggtgtccacggtagcttcctggctcggcccagtcgcaagaaccagggtgacttctcgctctccgtcagggtgggggatcaggtgacccatattcggatccagaactcaggggatttctatgacctgtatggaggggagaagtttgcgactctgacagagctggtggagtactacactcagcagcagggtgtsstgcaggaccgcgacggcaccatcatccacctcaagtacccgctgaactgctccgatcccactagtgagaggtggtaccatggccacatgtctggcgggcaggcagagacgctgctgcaggccaagggcgagccctggacgtttcttgtgcgtgagagcctcagccagcctggagacttcgwgctttctgtgctcagtgaccagcccaaggctggcccaggctccccgctcagggtcacccacatcaaggtcatgtgcgagggtggacgctacacagtgggtggtttggagaccttcgacagcctcacggacctggtrgagcatttcaagaagacggggattgaggaggcctcaggcgcctttgtctacctgcggcagccgtactatgccacgagggtgaatgcggctgacattgagaaccgagtgttggaactgaacaagaagcaggagtccgaggatacagccaaggctggcttctgggaggagtttgagagtttgcagaagcaggaggtgaagaacttgcaccagcgtctggaagggcagcggccagagaacaagggcaagaaccgctacaagaacattctcccctttgaccacagccgagtgatcctgcagggacgggacagtaacatccccgggtccgactacatcaatgccaactacatcaagaaccagctgctaggccctgatgagaacgctaagacctacatcgccagccagggytgtctggaggccacggtcaatgacttctggcagatggcgtggcaggagaacagccgtgtcatcgtcatgaccacccgagaggtggagaaaggccggaacaaatgcgtcccatactggcccgaggtgggcatgcagcgtgcttatgggccctactctgtgaccaactgcggggagcatgacacaaccgaatacaaactccgtaccttacaggtctccccvctggacaatggagacctgattcgggagatctggcattaccagtacctgagctggcccgaccatggggtccccagtgagcctgggggtgtcctcagcttcctggaccagatcaaccagcggcaggaaagtctgcctcacgcagggcccatcatcrtgcactgcagcgccggcatcggccgcacaggcaccatcattgtcatcgacatgctcatggagaacatctccaccaagggcctggactgtgacattgacatccagaagaccatccagatggtgcgggcgcagcgctcgggcatggtgcagacggaggcgcagtacaagttcatctacgtggccatcgcccagttcattgaaaccactaagaagaagctggaggtcctgcagtcgcagaagggccaggagtcggagtacgggaacatcacctatcccccagccatgaagaatgcccatgccaaggcctcccgcacctcgtccaaacacaaggaggatgtgtatgagaacctgcacactaagaacaagagggaggagaaagtgaagaagcagcggtcagcagacaaggagaagagcaagggttccctcaagaggaagtgagcrgtgctgtcctcaggtggccatgcctcagccctgaccctgtggaagcatttcgcgatggacagactcacaacctgaacctaggagtgccccattcttttgtaatttaaatggctgcatcccccccacctctccctgaccctgtatatakcccagccaggccccaggcagggccaacccttctcctcttgtaaataaagccctgggatcactgtgtgtcg

SEQ ID NO: 5179 - DNA, 2333 bp, Homo sapiens
tgtccccgccctgccggctgccccaggccagtggagtggcagccccagaactgggaccaccgggggtggtgaggcggcccggcactgggagctgcatctgaggcttagtccctgagctctctgcctgcccagactagctgcacctcctcattccctgcgcccccttcctctccggaagcccccaggatggtgaggtggtttcaccgagacctcagtgggctggatgcagagaccctgctcaagggccgaggtgtccacggtagcttcctggctcggcccagtcgcaagaaccagggtgacttctcgctctccgtcagggtgggggatcaggtgacccatattcggatccagaactcaggggatttctatgacctgtatggaggggagaagtttgcgactctgacagagctggtggagtactacactcagcagcagggtgtsstgcaggaccgcgacggcaccatcatccacctcaagtacccgctgaactgctccgatcccactagtgagaggtggtaccatggccacatgtctggcgggcaggcagagacgctgctgcaggccaagggcgagccctggacgtttcttgtgcgtgagagcctcagccagcctggagacttcgwgctttctgtgctcagtgaccagcccaaggctggcccaggctccccgctcagggtcacccacatcaaggtcatgtgcgagggtggacgctacacagtgggtggtttggagaccttcgacagcctcacggacctggtrgagcatttcaagaagacggggattgaggaggcctcaggcgcctttgtctacctgcggcagccgtactatgccacgagggtgaatgcggctgacattgagaaccgagtgttggaactgaacaagaagcaggagtccgaggatacagccaaggctggcttctgggaggagtttgagagtttgcagaagcaggaggtgaagaacttgcaccagcgtctggaagggcagcggccagagaacaagggcaagaaccgctacaagaacattctcccctttgaccacagccgagtgatcctgcagggacgggacagtaacatccccgggtccgactacatcaatgccaactacatcaagaaccagctgctaggccctgatgagaacgctaagacctacatcgccagccagggytgtctggaggccacggtcaatgacttctggcagatggcgtggcaggagaacagccgtgtcatcgtcatgaccacccgagaggtggagaaaggccggaacaaatgcgtcccatactggcccgaggtgggcatgcagcgtgcttatgggccctactctgtgaccaactgcggggagcatgacacaaccgaatacaaactccgtaccttacaggtctccccvctggacaatggagacctgattcgggagatctggcattaccagtacctgagctggcccgaccatggggtccccagtgagcctgggggtgtcctcagcttcctggaccagatcaaccagcggcaggaaagtctgcctcacgcagggcccatcatcrtgcactgcagcgccggcatcggccgcacaggcaccatcattgtcatcgacatgctcatggagaacatctccaccaagggcctggactgtgacattgacatccagaagaccatccagatggtgcgggcgcagcgctcgggcatggtgcagacggaggcgcagtacaagttcatctacgtggccatcgcccagttcattgaaaccactaagaagaagctggaggtcctgcagtcgcagaagggccaggagtcggagtacgggaacatcacctatcccccagccatgaagaatgcccatgccaaggcctcccgcacctcgtccaagagcttggagtctagtgcagggaccgtggctgcgtcacctgtgagacggggtggccagaggggactgccagtgccgggtccccctgtgctgtctcctgacctgcaccaactgcctgtacttgcccccctgcacccggctgcagacacaaggaggatgtgtatgagaacctgcacactaagaacaagagggaggagaaagtgaagaagcagcggtcagcagacaaggagaagagcaagggttccctcaagaggaagtgagcrgtgctgtcctcaggtggccatgcctcagccctgaccctgtggaagcatttcgcgatggacagactcacaacctgaacctaggagtgccccattcttttgtaatttaaatggctgcatcccccccacctctccctgaccctgtatatakcccagccaggccccaggcagggccaacccttctcctcttgtaaataaagccctgggatcactgtg

SEQ ID NO: 5180 - DNA, 2278 bp, Homo sapiens
gaggaagtggctgattactgagcggttcttcctcacctggcttgggccactgtgcacagctgtgccgctggctcagccccgccccctgcggccctcygccgtggcttccccctccctacagagagatgctgtcccgtgggtggtttcaccgagacctcagtgggctggatgcagagaccctgctcaagggccgaggtgtccacggtagcttcctggctcggcccagtcgcaagaaccagggtgacttctcgctctccgtcagggtgggggatcaggtgacccatattcggatccagaactcaggggatttctatgacctgtatggaggggagaagtttgcgactctgacagagctggtggagtactacactcagcagcagggtgtsstgcaggaccgcgacggcaccatcatccacctcaagtacccgctgaactgctccgatcccactagtgagaggtggtaccatggccacatgtctggcgggcaggcagagacgctgctgcaggccaagggcgagccctggacgtttcttgtgcgtgagagcctcagccagcctggagacttcgwgctttctgtgctcagtgaccagcccaaggctggcccaggctccccgctcagggtcacccacatcaaggtcatgtgcgagggtggacgctacacagtgggtggtttggagaccttcgacagcctcacggacctggtrgagcatttcaagaagacggggattgaggaggcctcaggcgcctttgtctacctgcggcagccgtactatgccacgagggtgaatgcggctgacattgagaaccgagtgttggaactgaacaagaagcaggagtccgaggatacagccaaggctggcttctgggaggagtttgagagtttgcagaagcaggaggtgaagaacttgcaccagcgtctggaagggcagcggccagagaacaagggcaagaaccgctacaagaacattctcccctttgaccacagccgagtgatcctgcagggacgggacagtaacatccccgggtccgactacatcaatgccaactacatcaagaaccagctgctaggccctgatgagaacgctaagacctacatcgccagccagggytgtctggaggccacggtcaatgacttctggcagatggcgtggcaggagaacagccgtgtcatcgtcatgaccacccgagaggtggagaaaggccggaacaaatgcgtcccatactggcccgaggtgggcatgcagcgtgcttatgggccctactctgtgaccaactgcggggagcatgacacaaccgaatacaaactccgtaccttacaggtctccccvctggacaatggagacctgattcgggagatctggcattaccagtacctgagctggcccgaccatggggtccccagtgagcctgggggtgtcctcagcttcctggaccagatcaaccagcggcaggaaagtctgcctcacgcagggcccatcatcrtgcactgcagcgccggcatcggccgcacaggcaccatcattgtcatcgacatgctcatggagaacatctccaccaagggcctggactgtgacattgacatccagaagaccatccagatggtgcgggcgcagcgctcgggcatggtgcagacggaggcgcagtacaagttcatctacgtggccatcgcccagttcattgaaaccactaagaagaagctggaggtcctgcagtcgcagaagggccaggagtcggagtacgggaacatcacctatcccccagccatgaagaatgcccatgccaaggcctcccgcacctcgtccaagagcttggagtctagtgcagggaccgtggctgcgtcacctgtgagacggggtggccagaggggactgccagtgccgggtccccctgtgctgtctcctgacctgcaccaactgcctgtacttgcccccctgcacccggctgcagacacaaggaggatgtgtatgagaacctgcacactaagaacaagagggaggagaaagtgaagaagcagcggtcagcagacaaggagaagagcaagggttccctcaagaggaagtgagcrgtgctgtcctcaggtggccatgcctcagccctgaccctgtggaagcatttcgcgatggacagactcacaacctgaacctaggagtgccccattcttttgtaatttaaatggctgcatcccccccacctctccctgaccctgtatatakcccagccaggccccaggcagggccaacccttctcctcttgtaaataaagccctgggatcactgtg

SEQ ID NO: 5181 - DNA, 1683 bp, Homo sapiens
cctggccggcgcttacacaaagatcaccagctttggacgcctctgactcttgctgactttgaagccataaatcgctgtaacaggccattgcctaaaaactttaactttgctgcagatgtgctggaccagtggtcccaaaaggagaagacaggggagagaccagctaacccagccctgtggtgggtgaatggcaaaggggatgaggtaaaatggagcttcagagaactgggctccttgtcccgaaaagctgccaacgtgctcaccaagccctgtggcctgcagagaggagaccgtttggccgtgattctgcccagaatccctgagtggtggctggtcaatgtagcttgcatacgaacagggatcatcttcatgccgggaacaatccagctgacagcaaaagacatcctctaccggctgcgagcatccaaggccaagtgcattgtggccagtgaggaggtggccccwgcggtggagtccattgtattggagtgtcctgaccttaagacaaaactcctggtgtctccacaaagctggaatgggtggctcagcttccaggagttatttcaattcgcctctgaagagcacagctgtgtggaaacaggaagtcaagaaccaatgaccatttatttcaccagtgggaccacaggctttcctaaaatggcccagcactctcagagcagcctcggcattgggttcaccctctgcggaaggtattggctggacttgaagtcctcagatatcatatggaatatgtctgacacgggctgggtcaaggccgccattggcagtgtgttttcttcctggctgtgtggagcctgtgtttttgtgcatcgaatggcacagtttgacactgacaccttcctagacacacttactacttatcccatcacgaccctgtgcagtcctcccactgtgtaccggatgctcgtgcaaaaagaccttaagagatataaattcaagagtctgcggcactgcttgaccggaggggagccactcaacccagaagtgctggagyagtggagggtgcaaactgggctggagctatatgagggctatggacagacggaagtgggaatgatttgtgccaatcagaaaggccaagaaattaaaccaggttcaatggggaaaggaatgctgccctatgatgtccagattatagatgaaaatggcaatgttctaccacctggcaaagaaggggaaattgccctcagactcaaacctacacggcccttctgtttcttctctaaataygtggacaatccacagaaaactgctgccacgataagaggagatttttatgtcactggagacagaggagtgatggacagtgatgggtatttctggtttgtcggcagagctgatgatgtcattatatcctctgggtaccgtattgggccatttgaagtggagagtgcactcattgagcatccagcagttgttgaatcggctgttgtcagtagtccagatcaaatccgcggagaggtggtgaaagcttttgttgtcttagctgcaccctttaagtcctacaacccagagaaattaactcttgaacttcaggatcatgtgaaaaaatcaactgcaccttacaaatatccaagaaaggcaagtgctttgyccaaaaaactcccaaagacaatcactgggaaaatcaaacgcaacgttttaagagaccaagaatggaga

SEQ ID NO: 5182 - DNA, 1499 bp, Homo sapiens
ggagctgggggcggaagcggccggcggtctgcgccctgcgcgcctcggcttctttccgcccggctcyttcagaggcccggcgacctccagggctgggaagtcaaccgakgttcgggggcagcggcgagggctccgggcgagtaagggggatggtccatgctgaggcccaaakggggcgaactcgcgagagtctctggcgacctggatcagatggggcgagggcagatgaagggcccaggagctttggggcagcgaggagggaggagcgggcccgttggcaaacttgggtgaaaggatggggtacctgggtgacgagcccccgccaggattctgctcttcacrccccttttctcccarctcccttccaggtcaatccaaactggagctcaactttcagaagagaaagacgccccagcaagcctctttcggggagtcctctagctcctyacctccatgggccagacagctctggcagggggcagcagcagcacccccacgccacaggccctgtaccctgacctctcctgycccgagggcttggaagagctgctgtctgcaccccctcctgacctgggggcccagcggcgccacggttggaaccccaaagactgttcagagaacatcgaggtcaaggaaggagggttgtactttgagcggcggcccgtggcccagagcactgatggggcccggggtaagaggggctattcaargggcctgcacgcctgggagatcagctggcccctagagcagaggggcacgcatgccgtggtgggcgtggccacggccctcgccccgctgcagactgaccactacgcggcgctgctgggcagcaacagcgagtcgtggggctgggacatcgggcgggggaagctgtaccatcagagcaaggggcccggagccccccagtatccagcgggaactcagggtgagcagctggaggtgccagagagactgctggtggttctggacatggaggagggaactctgggctacgctattgggggcacctacctggggccagcattccgcggactgaagggcaggaccctctatccggcagtaagcgctgtctggggccagtgccaggtccgcatccgctacctgggcgaaaggagagcrgagccacactcccttctgcacctgagccgcctgtgtgtgygccacaacctgggggatacccggctcggccaggtgtctgccctgcccttgccccctgccatgaagcgctacctgctctaccagtgagccctgtgataccacagactgtgctgaggtcttgccaccacccctccccttggggaggtggggaggcactgctggcctagaccagctgctgaaagctggtgaggctgagcccctaccccaacccaagctctgsggaaatcaacagccccagagccacttggagggaggaagaaagggagccggcgttcaaggctatgacagtctgctacgcaaaacattttttcaagtaaaaatagtaagagatgttgttawag

SEQ ID NO: 5183 - DNA, 1245 bp, Homo sapiens
gggggcggaagcggccggcggtctgcgccctgcgcgcctcggcttctttccgcccggctcyttcagaggcccggcgacctccagggctgggaagtcaaccgakctcccttccaggtcaatccaaactggagctcaactttcagaagagaaagacgccccagcaagcctctttcggggagtcctctagctcctyacctccrtgggccagacagctctggcagggggcagcagcagcacccccacgccacaggccctgtaccctgacctctcctgycccgagggcttggaagagctgctgtctgcaccccctcctgacctgggggcccagcggcgccacggttggaaccccaaagactgttcagagaacatcgaggtcaaggaaggagggttgtactttgagcggcggcccgtggcccagagcactgatggggcccggggtaagaggggctattcaargggcctgcacgcctgggagatcagctggcccctagagcagaggggcacgcatgccgtggtgggcgtggccacggccctcgccccgctgcagactgaccactacgcggcgctgctgggcagcaacagcgagtcgtggggctgggacatcgggcgggggaagctgtaccatcagagcaaggggcccggagccccccagtatccagcgggaactcagggtgagcagctggaggtgccagagagactgctggtggttctggacatggaggagggaactctgggctacgctattgggggcacctacctggggccagcattccgcggactgaagggcaggaccctctatccggcagtaagcgctgtctggggccagtgccaggtccgcatccgctacctgggcgaaaggagagcrgagccacactcccttctgcacctgagccgcctgtgtgtgygccacaacctgggggatacccggctcggccaggtgtctgccctgcccttgccccctgccatgaagcgctacctgctctaccagtgagccctgtgataccacagactgtgctgaggtcttgccaccacccctccccttggggaggtggggaggcactgctggcctagaccagctgctgaaagctggtgaggctgagcccctaccccaacccaagctctgsggaaatcaacagccccagagccacttggagggaggaagaaagggagccggcgttcaaggctatgacagtctgctacgcaaaacattttttcaagtaaaaatagtaagagatgttgttawag

SEQ ID NO: 5184 - DNA, 4284 bp, Homo sapiens
  misc_feature (1)...(4284): n = A,T,C or G
gcggtacgggaagacagctttgggatgtcggaagatcctagaggtcccaaggtagctgacytgcgaagctgaggctccagccgagggctccaggcctstgaccggcccagcagtgagcgcggctgcccgacgcttcagggccgggagcagggagcgtgagtcgccatggcgacgccggcgggtctggagcgctgggttcaggacgagctgcactcggtgttggggctgagcgagcggcacgtcgcccagtttctgatcggtaccgcacagcgctgcacctctgccgaggagttcgtgcagcgcctrcgagacactgataccttggatctcagtgggccggcccgggacttcgccctgagactctggaacaaggtaccacgaaaggcagtggtagaaaagccagctcgggcagcagagcgagaggcccgggccctgctggagaagaaccgatcttataggttactggaagacagtgaagagagcagtgaggagactgtgagtagggctggaagcagcctccagaagaaacgtaaaaagcggaaacacctcaggaagaagcgtgaggaagaagaggaggaagaggcttctgagaaagggaagaagaaaacaggggggagtaaacagcagacagagaagccagagtcggaagatgagtgggaacggacagagcgtgaacgccttcaggacctggaggagcgtgatgcctttgctgagcgggttcgacagcgggacaaggatcggactcgaaatgtcctggaacggtcagacaagaaggcttatgaagaggctcagaagcgcctcaagatggccgaggaagaccggaaggccatggtccctgagctgcggaagaaatctcgccgagagtacctggctaagcgggagcgagagaagcttgaggacctggaggcggagctggctgatgaggagttcctttttggggacgtggagctgagccggcacgagcggcaggagctcaaatataagcggcgagtgcgggatctcgcccgggagtaccgggcagctggggagcaggagaagctggaggccaccaatcgctaccacatgcccaaggaaacccgargacagccagcccgagctgtggatctagtggaggaggaatcaggagcccctggggaggagcagcggcgctgggaggaggcgcggcttggggcagcgtccctgaagtttggggcccgagatgctgcctctcaggagcccragtatcaactggtgctggaggaggaggagaccattgagtttgtccgggccactcagctccagggtgatgaggagccrtcagctccacccacttcaactcaggcccagcagaaagagtccatccaggccgtccgccgcagcctcccggtgttcccatttcgagaggagctcctggctgctattgcaratcaccaagtcctcatcattgaaggcgagacaggctcagggaagaccacccagatcccgcagtatctctttgaggagggttatacaaacaagggtatgaagattgcctgcacccaaccccggagagtggctgccatgagtgtggccgcccgagtggcccgggagatgggtgtgaagcttgggaatgaggttggctacagcatccgctttgaggactgcacatcagagcgaactgtcctccgctacatgacagatgggatgcttctccgggagttcctctctgagcctgacctggcgagttacagcgtggtgatggtggatgaggcacacgaaaggaccctacacacagacattctctttggattgatcaaggatgttgctcgcttccgacctgagctcaaggtcctggtggcttcagccacaatggacactgcccgtttttccaccttctttgatgncgcccctgtgtttcgaatccccggacgcaggtttcctgtggacatcttctacaccaaggctccagaggctgactacttggaagcttgtgtagtatctgtgttgcagatccatgtgacccagccccctggggatatcctggtgttcctgacaggacaggaggagattgaggctgcctgtgagatgctccaggatcgctgccgccgcctgggctccaaaatccgggagctcctggtgctgcccatttatgccaatctgccctctgacatgcaggcccgtatcttccagcccacaccacctggggcacgaaakgtggttgtggcaacgaacattgctgagacatcactcaccattgagggcatcatttatgtgctggatccagggttctgtaagcagaagagctacaacccccgcacaggcatggaatcgctcactgtcacaccctgcagcaaggcctcagccaatcagcgagctggcagggcaggtcgggtggctgcagggaagtgcttccgcctgtataccgcctgggcctatcagcacgagcttgaggaaaccacagtgcctgagatccagaggaccagcttgggcaatgtcgtgttgctgctcaagagcttagggatccatgacctaatgcactttgatttcctggaccctccaccatatgagacactgctgctgrctttggagcagctgtatgctctgggagccctcaaccaccttggggagctcaccacgtctggtcgaaagatggcagagctgccggtggaccccatgctgtccaaaatgatcttagcctctgagaagtacagctgttcagaggagatcctgacagtggctgccatgctctctgtcaacaactccatcttctaccgaccaaaggacaaggtcgtccatgctgacaatgcccgtgtcaacttctttctccctggcggtgaccacctggttctgctaaatgtttacacacagtgggctgagagtggttactcttcccagtggtgctatgagaacttygtacagttcagatcgatgcgccgagcccgggatgtgcgggaacagctggaagggctcttggaacgtgtggaagttggtctcagttcctgccagggggactatatccgtgtacgcaaggccatcactgctggttacttttaccacacggcacggttgactcggagtggctaccgcacagtgaaacagcagcagacagtcttcattcatcccaactcctccctctttgagcaacagccacgctggctgctctaccacgaacttgtcttgaccaccaaagagttcatgagacaggtactggagattgagagcagttggcttctggaggtggctccccattattataaggccaaggagctagaagatccccatgctaagaaaatgcccaaaaaaataggcaaaacacgagaagagctagggtaagagaaggacgtaaacagaacctgacaccagctccttttccttytatacattatttaatacctattaaataaaattatttttggaataaagcttgtgggaacatttgggatctagagaaagtgatatgtgaaattctatctcatatagtcagttaaactttattatttacaagttaaattacacagcagctttacacagcatgagatggaaaggaaggaaggagagaaacgaggagaggaagctggctcctgagattcttggctgcctccacctccttctcttgggcgtagcagtcttcagtgctgcctccactccaaggtcaaggatcagggcttggaacacaggtttaagtcaggttctggctctgacagccccagggccaccagggctcccactagcagcttcttcacaggcgttggaggtgagtgtgaaggcatcagctgcagggagaaaggttaatgccagttgggggaggcacacaaatgttctaccctttaccccacccagccctacctaggactcamtttatctagacgatggcgacaaatgaggccactggaattcaggtagaaagtggagtaggcatcataggtccggtaatgctcgtctttgtcacgcttgtagaaccgcaaaaagagcaagtggacgggcagccccacaagccgccaccgggcttgcagggtccagttctcmgggtggcgggtcagctgtaaaacctccaaacgaaggtgtgcaaaataattccaggccaggaaacggcagagggtcagtgaaagaatgtaccattctcacttggtacgtatgttgaggatctcattgatgaattccacatccaaggaatacagactgtagtcgtgggactgaaggaagagcttgggaagctagtctcagtctctcatacatgacagacagatgttcctccatactaggatctcctgacggggtggcaggggaagggtgggcagttccagggacttggaaaggtatccaagr

SEQ ID NO: 5185 - DNA, 3885 bp, Homo sapiens
  misc_feature (1)...(3885): n = A,T,C or G
gcggtacgggaagacagctttgggatgtcggaagatcctagaggtcccaaggtagctgacytgcgaagctgaggctccagccgagggctccaggcctstgaccggcccagcagtgagcgcggctgcccgacgcttcagggccgggagcagggagcgtgagtcgccatggcgacgccggcgggtctggagcgctgggttcaggacgagctgcactcggtgttggggctgagcgagcggcacgtcgcccagtttctgatcggtaccgcacagcgctgcacctctgccgaggagttcgtgcagcgcctrcgagacactgataccttggatctcagtgggccggcccgggacttcgccctgagactctggaacaaggtaccacgaaaggcagtggtagaaaagccagctcgggcagcagagcgagaggcccgggccctgctggagaagaaccgatcttataggttactggaagacagtgaagagagcagtgaggagactgtgagtagggctggaagcagcctccagaagaaacgtaaaaagcggaaacacctcaggaagaagcgtgaggaagaagaggaggaagaggcttctgagaaagggaagaagaaaacaggggggagtaaacagcagacagagaagccagagtcggaagatgagtgggaacggacagagcgtgaacgccttcaggacctggaggagcgtgatgcctttgctgagcgggttcgacagcgggacaaggatcggactcgaaatgtcctggaacggtcagacaagaaggcttatgaagaggctcagaagcgcctcaagatggccgaggaagaccggaaggccatggtccctgagctgcggaagaaatctcgccgagagtacctggctaagcgggagcgagagaagcttgaggacctggaggcggagctggctgatgaggagttcctttttggggacgtggagctgagccggcacgagcggcaggagctcaaatataagcggcgagtgcgggatctcgcccgggagtaccgggcagctggggagcaggagaagctggaggccaccaatcgctaccacatgcccaaggaaacccgargacagccagcccgagctgtggatctagtggaggaggaatcaggagcccctggggaggagcagcggcgctgggaggaggcgcggcttggggcagcgtccctgaagtttggggcccgagatgctgcctctcaggagcccragtatcaactggtgctggaggaggaggagaccattgagtttgtccgggccactcagctccagggtgatgaggagccrtcagctccacccacttcaactcaggcccagcagaaagagtccatccaggccgtccgccgcagcctcccggtgttcccatttcgagaggagctcctggctgctattgcaratcaccaagtcctcatcattgaaggcgagacaggctcagggaagaccacccagatcccgcagtatctctttgaggagggttatacaaacaagggtatgaagattgcctgcacccaaccccggagagtggctgccatgagtgtggccgcccgagtggcccgggagatgggtgtgaagcttgggaatgaggttggctacagcatccgctttgaggactgcacatcagagcgaactgtcctccgctacatgacagatgggatgcttctccgggagttcctctctgagcctgacctggcgagttacagcgtggtgatggtggatgaggcacacgaaaggaccctacacacagacattctctttggattgatcaaggatgttgctcgcttccgacctgagctcaaggtcctggtggcttcagccacaatggacactgcccgtttttccaccttctttgatgncgcccctgtgtttcgaatccccggacgcaggtttcctgtggacatcttctacaccaaggctccagaggctgactacttggaagcttgtgtagtatctgtgttgcagatccatgtgacccagccccctggggatatcctggtgttcctgacaggacaggaggagattgaggctgcctgtgagatgctccaggatcgctgccgccgcctgggctccaaaatccgggagctcctggtgctgcccatttatgccaatctgccctctgacatgcaggcccgtatcttccagcccacaccacctggggcacgaaakgtggttgtggcaacgaacattgctgagacatcactcaccattgagggcatcatttatgtgctggatccagggttctgtaagcagaagagctacaacccccgcacaggcatggaatcgctcactgtcacaccctgcagcaaggcctcagccaatcagcgagctggcagggcaggtcgggtggctgcagggaagtgcttccgcctgtataccgcctgggcctatcagcacgagcttgaggaaaccacagtgcctgagatccagaggaccagcttgggcaatgtcgtgttgctgctcaagagcttagggatccatgacctaatgcactttgatttcctggaccctccaccatatgagacactgctgctgrctttggagcagctgtatgctctgggagccctcaaccaccttggggagctcaccacgtctggtcgaaagatggcagagctgccggtggaccccatgctgtccaaaatgatcttagcctctgagaagtacagctgttcagaggagatcctgacagtggctgccatgctctctgtcaacaactccatcttctaccgaccaaaggacaaggtcgtccatgctgacaatgcccgtgtcaacttctttctccctggcggtgaccacctggttctgctaaatgtttacacacagtgggctgagagtggttactcttcccagtggtgctatgagaacttygtacagttcagatcgatgcgccgagcccgggatgtgcgggaacagctggaagggctcttggaacgtgtggaagttggtctcagttcctgccagggggactatatccgtgtacgcaaggccatcactgctggttacttttaccacacggcacggttgactcggagtggctaccgcacagtgaaacagcagcagacagtcttcattcatcccaactcctccctctttgagcaacagccacgctggctgctctaccacgaacttgtcttgaccaccaaagagttcatgagacaggtactggagattgagagcagttggcttctggaggtggctccccattattataaggccaaggagctagaagatccccatgctaagaaaatgcccaaaaaaataggcaaaacacgagaagagctagggtaagagaaggacgtaaacagaacctgacaccagctccttttccttytatacattatttaatacctattaaataaaattatttttggaataaagcttgtgggaacatttgggatctagagaaagtgatatgtgaaattctatctcatatagtcagttaaactttattatttacaagttaaattacacagcagctttacacagcatgagatggaaaggaaggaaggagagaaacgaggagaggaagctggctcctgagattcttggctgcctccacctccttctcttgggcgtagcagtcttcagtgctgcctccactccaaggtcaaggatcagggcttggaacacaggtttaagtcaggttctggctctgacagccccagggccaccagggctcccactagcagcttcttcacaggcgttggaggtgagtgtgaaggcatcagctgcagggagaaaggttaatgccagttgggggaggcacacaaatgttctaccctttaccccacccagccctacctaggactcamtttatctagacgatggcgacaaatgaggccactggaattcaggtagaaagtggagtaggcatcataggtc

SEQ ID NO: 5186 - DNA, 4205 bp, Homo sapiens
  misc_feature (1)...(4205): n = A,T,C or G
gcggtacgggaagacagctttgggatgtcggaagatcctagaggtcccaaggtagctgacytgcgaagctgaggctccagccgagggctccaggcctstgaccggcccagcagtgagcgcggctgcccgacgcttcagggccgggagcagggagcgtgagtcgccatggcgacgccggcgggtctggagcgctgggttcaggacgagctgcactcggtgttggggctgagcgagcggcacgtcgcccagtttctgatcggtaccgcacagcgctgcacctctgccgaggagttcgtgcagcgcctrcgagacactgataccttggatctcagtgggccggcccgggacttcgccctgagactctggaacaaggtaccacgaaaggcagtggtagaaaagccagctcgggcagcagagcgagaggcccgggccctgctggagaagaaccgatcttataggttactggaagacagtgaagagagcagtgaggagactgtgagtagggctggaagcagcctccagaagaaacgtaaaaagcggaaacacctcaggaagaagcgtgaggaagaagaggaggaagaggcttctgagaaagggaagaagaaaacaggggggagtaaacagcagacagagaagccagagtcggaagatgagtgggaacggacagagcgtgaacgccttcaggacctggaggagcgtgatgcctttgctgagcgggttcgacagcgggacaaggatcggactcgaaatgtcctggaacggtcagacaagaaggcttatgaagaggctcagaagcgcctcaagatggccgaggaagaccggaaggccatggtccctgagctgcggaagaaatctcgccgagagtacctggctaagcgggagcgagagaagcttgaggacctggaggcggagctggctgatgaggagttcctttttggggacgtggagctgagccggcacgagcggcaggagctcaaatataagcggcgagtgcgggatctcgcccgggagtaccgggcagctggggagcaggagaagctggaggccaccaatcgctaccacatgcccaaggaaacccgargacagccagcccgagctgtggatctagtggaggaggaatcaggagcccctggggaggagcagcggcgctgggaggaggcgcggcttggggcagcgtccctgaagtttggggcccgagatgctgcctctcaggagcccragtatcaactggtgctggaggaggaggagaccattgagtttgtccgggccactcagctccagggtgatgaggagccrtcagctccacccacttcaactcaggcccagcagaaagagtccatccaggccgtccgccgcagcctcccggtgttcccatttcgagaggagctcctggctgctattgcaratcaccaagtcctcatcattgaaggcgagacaggctcagggaagaccacccagatcccgcagtatctctttgaggagggttatacaaacaagggtatgaagattgcctgcacccaaccccggagagtggctgccatgagtgtggccgcccgagtggcccgggagatgggtgtgaagcttgggaatgaggttggctacagcatccgctttgaggactgcacatcagagcgaactgtcctccgctacatgacagatgggatgcttctccgggagttcctctctgagcctgacctggcgagttacagcgtggtgatggtggatgaggcacacgaaaggaccctacacacagacattctctttggattgatcaaggatgttgctcgcttccgacctgagctcaaggtcctggtggcttcagccacaatggacactgcccgtttttccaccttctttgatgncgcccctgtgtttcgaatccccggacgcaggtttcctgtggacatcttctacaccaaggctccagaggctgactacttggaagcttgtgtagtatctgtgttgcagatccatgtgacccagccccctggggatatcctggtgttcctgacaggacaggaggagattgaggctgcctgtgagatgctccaggatcgctgccgccgcctgggctccaaaatccgggagctcctggtgctgcccatttatgccaatctgccctctgacatgcaggcccgtatcttccagcccacaccacctggggcacgaaakgtggttgtggcaacgaacattgctgagacatcactcaccattgagggcatcatttatgtgctggatccagggttctgtaagcagaagagctacaacccccgcacaggcatggaatcgctcactgtcacaccctgcagcaaggcctcagccaatcagcgagctggcagggcaggtcgggtggctgcagggaagtgcttccgcctgtataccgcctgggcctatcagcacgagcttgaggaaaccacagtgcctgagatccagaggaccagcttgggcaatgtcgtgttgctgctcaagagcttagggatccatgacctaatgcactttgatttcctggaccctccaccatatgagacactgctgctgrctttggagcagctgtatgctctgggagccctcaaccaccttggggagctcaccacgtctggtcgaaagatggcagagctgccggtggaccccatgctgtccaaaatgatcttagcctctgagaagtacagctgttcagaggagatcctgacagtggctgccatgctctctgtcaacaactccatcttctaccgaccaaaggacaaggtcgtccatgctgacaatgcccgtgtcaacttctttctccctggcggtgaccacctggttctgctaaatgtttacacacagtgggctgagagtggttactcttcccagtggtgctatgagaacttygtacagttcagatcgatgcgccgagcccgggatgtgcgggaacagctggaagggctcttggaacgtgtggaagttggtctcagttcctgccagggggactatatccgtgtacgcaaggccatcactgctggttacttttaccacacggcacggttgactcggagtggctaccgcacagtgaaacagcagcagacagtcttcattcatcccaactcctccctctttgagcaacagccacgctggctgctctaccacgaacttgtcttgaccaccaaagagttcatgagacaggtactggagattgagagcagttggcttctggaggtggctccccattattataaggccaaggagctagaagatccccatgctaagaaaatgcccaaaaaaataggcaaaacacgagaagagctagggtaagagaaggacgtaaacagaacctgacaccagctccttttccttytatacattatttaatacctattaaataaaattatttttggaataaagcttgtgggaacatttgggatctagagaaagtgatatgtgaaattctatctcatatagtcagttaaactttattatttacaagttaaattacacagcagctttacacagcatgagatggaaaggaaggaaggagagaaacgaggagaggaagctggctcctgagattcttggctgcctccacctccttctcttgggcgtagcagtcttcagtgctgcctccactccaaggtcaaggatcagggcttggaacacaggtttaagtcaggttctggctctgacagccccagggccaccagggctcccactagcagcttcttcacaggcgttggaggtgagtgtgaaggcatcagtttatctagacgatggcgacaaatgaggccactggaattcaggtagaaagtggagtaggcatcataggtccggtaatgctcgtctttgtcacgcttgtagaaccgcaaaaagagcaagtggacgggcagccccacaagccgccaccgggcttgcagggtccagttctcmgggtggcgggtcagctgtaaaacctccaaacgaaggtgtgcaaaataattccaggccaggaaacggcagagggtcagtgaaagaatgtaccatgtccggcccctttggtacgtatgttgaggatctcattgatgaattccacatccaaggaatacagactgtagtcgtgggactgaaggaagagcttgggaagctagtctcagtctctcatacatgacagacagatgttcctccatactaggatctcctgacggggtggcaggggaagggtgggcagttccagggacttggaaaggtatccaagm

SEQ ID NO: 5187 - DNA, 2724 bp, Homo sapiens
  misc_feature (1)...(2724): n = A,T,C or G
ctgaacaatatgtgcctttttgactcttcagaggctgtgaatttctggtcttggaagatcacagtggagcaattggacagataggattttatccttcatatcccttgcaaaaratctctaagaacccatggagagccagccagcgcaagagtgtctgatgcagatgtttttgcccatcgagccagcctgctttgtggaatggctggggacttcaccatcacagttaggcgtggtgatggtggatgaggcacacgaaaggaccctacacacagacattctctttggattgatcaaggatgttgctcgcttccgacctgagctcaaggtcctggtggcttcagccacaatggacactgcccgtttttccaccttctttgatgncgcccctgtgtttcgaatccccggacgcaggtttcctgtggacatcttctacaccaaggctccagaggctgactacttggaagcttgtgtagtatctgtgttgcagatccatgtgacccagccccctggggatatcctggtgttcctgacaggacaggaggagattgaggctgcctgtgagatgctccaggatcgctgccgccgcctgggctccaaaatccgggagctcctggtgctgcccatttatgccaatctgccctctgacatgcaggcccgtatcttccagcccacaccacctggggcacgaaakgtggttgtggcaacgaacattgctgagacatcactcaccattgagggcatcatttatgtgctggatccagggttctgtaagcagaagagctacaacccccgcacaggcatggaatcgctcactgtcacaccctgcagcaaggcctcagccaatcagcgagctggcagggcaggtcgggtggctgcagggaagtgcttccgcctgtataccgcctgggcctatcagcacgagcttgaggaaaccacagtgcctgagatccagaggaccagcttgggcaatgtcgtgttgctgctcaagagcttagggatccatgacctaatgcactttgatttcctggaccctccaccatatgagacactgctgctgrctttggagcagctgtatgctctgggagccctcaaccaccttggggagctcaccacgtctggtcgaaagatggcagagctgccggtggaccccatgctgtccaaaatgatcttagcctctgagaagtacagctgttcagaggagatcctgacagtggctgccatgctctctgtcaacaactccatcttctaccgaccaaaggacaaggtcgtccatgctgacaatgcccgtgtcaacttctttctccctggcggtgaccacctggttctgctaaatgtttacacacagtgggctgagagtggttactcttcccagtggtgctatgagaacttygtacagttcagatcgatgcgccgagcccgggatgtgcgggaacagctggaagggctcttggaacgtgtggaagttggtctcagttcctgccagggggactatatccgtgtacgcaaggccatcactgctggttacttttaccacacggcacggttgactcggagtggctaccgcacagtgaaacagcagcagacagtcttcattcatcccaactcctccctctttgagcaacagccacgctggctgctctaccacgaacttgtcttgaccaccaaagagttcatgagacaggtactggagattgagagcagttggcttctggaggtggctccccattattataaggccaaggagctagaagatccccatgctaagaaaatgcccaaaaaaataggcaaaacacgagaagagctagggtaagagaaggacgtaaacagaacctgacaccagctccttttccttytatacattatttaatacctattaaataaaattatttttggaataaagcttgtgggaacatttgggatctagagaaagtgatatgtgaaattctatctcatatagtcagttaaactttattatttacaagttaaattacacagcagctttacacagcatgagatggaaaggaaggaaggagagaaacgaggagaggaagctggctcctgagattcttggctgcctccacctccttctcttgggcgtagcagtcttcagtgctgcctccactccaaggtcaaggatcagggcttggaacacaggtttaagtcaggttctggctctgacagccccagggccaccagggctcccactagcagcttcttcacaggcgttggaggtgagtgtgaaggcatcagtttatctagacgatggcgacaaatgaggccactggaattcaggtagaaagtggagtaggcatcataggtccggtaatgctcgtctttgtcacgcttgtagaaccgcaaaaagagcaagtggacgggcagccccacaagccgccaccgggcttgcagggtccagttctcmgggtggcgggtcagctgtaaaacctccaaacgaaggtgtgcaaaataattccaggccaggaaacggcagagggtcagtgaaagaatgtaccatgtccggcccctttggtacgtatgttgaggatctcattgatgaattccacatccaaggaatacagactgtagtcgtgggactgaaggaagagcttgggaagctagtctcagtctctcatacatgacagacagatgttcctccatactaggatctcctgacggggtggcaggggaagggtgggcagttccagggacttggaaaggtatccaagm

SEQ ID NO: 5188 - DNA, 2671 bp, Homo sapiens
ggtgcattgccctgaagagcgctcctccttccggtgaaagtcgtcgggttcccagccgggagtctgcggagttctcatactctgttacccagcttcctttgtatgagkgctgttgcgcacttccggtggaagcgctgaagcgagtgggtggagtttacggagccggtgggcggtaggcggtgctacgggtagctgggtgctgtccaaaggcgacagggcgtcgttaggggagcgagtcgtgaccggttgggccacactcaacgtgggacgaagcttcgcctactgtttgactacgtgcgtgcagcctcccctcgatgtcggccctcgaaaagagcatgcacctcggccgccttccctctcgcccacctctacccggcagcgggggcagtcagagcggagccaagatgcgaatgggccctggaagaaagcgggacttttcccctgttccttggagtcagtattttgagtccatggaagatgtagaagtagagaatgaaactggcaaggatacttttcgagtctacaagagtggttcagagggtccagtcctgctccttctgcatggaggaggtcattctgccctttcttgggcygtgttcacggcagcgattattagtagagttcagtgtaggattgtagctttggatctgcgaagtcatggtgaaacaaaggtcaagaatcctgaagatctgtctgcagaaacaatggcaaaagacgttggcaatgtggttgaagccatgtatggggaccttcctcctccaattatgctgattggacatagcatgggtggtgctattgcagtccacacagcatcatccaacctggtaccaagcctcttgggtctgtgcatgattgatgttgtagaaggtacagctatggatgcacttaatagcatgcagaatttcttacggggtcgtcctaaaaccttcaagtctctggagaatgctattgaatggagtgtgaagagtggccagattcgaaatctggagtctgcccgtgtctcaatggttggccaagtcaaacagtgtgaaggaattacaagtccagaaggctcaaaatctatagtggaaggaatcatagaggaagaagaagaagatgaggaaggaagtgagtctataagcaagaggaaaaaggaagatgacatggagaccaagaaagaccatccatacacctggagaattgaactggcaaaaacagaaaaatactgggacggctggttccgaggcttatccaatctctttcttagttgtcccattcctaaattgctgctcttggctggtgttgatagattggataaagatctgaccattggccagatgcaagggaagttccagatgcaggtcctaccccagtgtggccatgcagtccatgaggatgcccctgacaaggtagctgaagctgttgccactttcctgatccggcacaggtttgcagaacccatcggtggattccagtgtgtgtttcctggctgttagtgacctgctgtccacccctcctcaacatcgagctctgttgtaaatacgtcgcaccagaggccactgtgatgccactgtctcctctccatcccgcccagccatgtgacactggctcccggtagacgggcaccccragatgtaccaaccttttcatgtattctgccaaaagcattgttttccagggcccttgaccaacatcggcttccccagtccagggctyccctgctcctttcccttccctgtactggggtagctcctgcctgctctccctgcgttgcctagggtaaagcctccagatttgccatactgagcccctcttcctagcatcaggcgatacatctgagttcaaatgtcttcccaggctcagggacctccattccttgagattgtcttggcatggcccagccctgcctcatgggatggacaatgcatggggtggtctttatttttccctttcaaataaaacactagtcaggtaccgttttatcccagtcgtactcttccaggtttggaagacccagagaggccaagatcccatccttagccatagcgagcggtggtggtggatagcatcacaagaaacgagcctgaaaatcaggtccagccggtccaagcacatggcctcccatctgggagagcccactgtcccactcccacatgtctgggcacctgccctgggctgaggccaggctgctccaggggcctcctgcgccctcacctgccacagagcaacccaggttaaatacagcccatgcacaaagccacaggccaaagcctatggaattgtttttaatcatcaaatttaaccattttcataactggttcctggaggtgtgcagtgcccccttgcctcttcaaacctacagcttctctttgccatttgtggatttcacatcactccacacagaaacattacagcctggcatccccagtctttgccttcttccagctgcctcgacacagcactgtggcctgtccctattgcccaggcacgccatttccaagggcaggaaggggcagtgtcctgaagcccatcttttctgtgactgtcttaggtgatgtgtagccccctccacctttccactcaacaacctcccacccctgtcctgctgcatggtccggagtctgggacctactttgttttttgttatttatgaccttgtttaaagaaaataaatatctcccaacctttattg

SEQ ID NO: 5189 - DNA, 2481 bp, Homo sapiens
tgwggtaggagtggttgcgcgtgttgcggcccgggttctgttcgtaggtttacaattgtcgcgggtagtggggcgccccagctgccaactgcacgtggtttctttctggcgtttgcctagtgtcctgtccattccgccccgttgggaagtgggaagcggagaggttctgtggggacagagctgggagtcctgaaggagaaagcgcgcagccgaggggctctggagtgccttagagcagagctgcggccgcggaaggggagcagctgagaaaggagggccgctgcaggcggggttcgaaccgtggggtctgggctgctcccgcggagggcctgggcggacgcgggatgctgggggtccgctgcctgctgcggtccgtgcgcttctgttcctccgcccccttccccaagcacaaaccttcagccaaactgagcgtgcgggacgctctcggggctcagaacgcgagtggggagcgcattaagatccagggatggattcgttctgtccgatcccagaaggaagtcttgttcctgcatgtaaatgatgggtcatctttggaaagccttcaggttgttgcagattcaggccttgacagtagagaattaamttttgggagttctgtggaagtacaagggcagctgataaaaagtccatccaaaaggcaaaatgtggaactgaaggcagaaaaaattaaagttattggaaattgtgatgccaaggatttccccatcaaatataaagagaggcatcctctggagtayctgcgacaatatcctcactttaggtgtaggactaacgttctgggttctatattgaggattcgcagtgaagcgacagctgctattcattctttctttaaggacagtggctttgtacatattcatactccaataatcacatccaatgactctgagggagctggagaactttttcaacttgaaccttcaggcaaacttaaggtacctgaggagaatttcttcaatgttcctgctttcttaactgtctcaggacaacttcatctagaagtgatgtcaggagcttttactcaagtgtttacctttggtccgaccttccgagctgaaaattctcagagccggaggcacctggcagagttttatatgatagaagcagagatttcttttgttgacagccttcaagatcttatgcaggttatagaggaactgttcaaggctacaacaatgatggttctctcaaaatgtcctgaagatgttgaactctgtcacaaattcatagcacctggccaaaaggacagattagaacatatgctaaaaaacaactttttaatcatttcttatactgaagcagtggagatcttaaagcaagcatcccagaasttcacctttaccccagagtggggtgctgacctacggactgaacatgaaaagtacctggtgaagcactgtggcaacatacctgtcttcgttattaattatccattaacactcaagcctttctacatgagggataatgaagatggccctcagcacacggttgctgctgttgatcttctggttcctggagttggggaactctttggaggaggcctcagagaagaacgataccatttcttagaggagcgcttagccagatcgggacttacagaagtctaccaatggtatctggaccttcgtcgatttggatctgtgccacatggaggttttgggatgggatttgaacgctacctgcagtgcatcttgggtgttgacaatatcaaagatgttatccctttcccaaggtttcctcattcatgccttttatagctgraagattggttaaggaaaagcaccccccrtggcagagacactgcacatgattgtgcatacagcagaatgcatgtttggattttagaaatgcagatttcaatatgtaattgttgtgccataagatatcatagaaaaaatataagtggttgtgattttcttagaaagttgagggtatttcacgtaaggatgagctcccgcaagaagaggtacttatagcaaggggactctcaaatccattacctcaattaagaaatgaagaaattgaattagtctcaaagtttcttttaaactctaaaacagaatgagataatgtattttacgttgtctataatcattaaatcactccctgtgtaatttgtgagaaccatctagtagctcgaaataaaataatgttgcatcttttctcccttgccatatactttgtgataaatccttatctcattttcagtacttcattaaacattgcagaaaaaaatattccttaaggtcttaattgatttaaagaagtagctattctgaattgaaatctcctttcattgaactggatgaaaaaatcatgtttaataactgttgcttttcaattttcaaagctgttgagatattacattaagtatttcaactctttaatcactgttgttataatttgtttatatttgaygtttataatttgtctaataaaatagatttttttaatagacac

SEQ ID NO: 5190 - DNA, 2457 bp, Homo sapiens
tgwggtaggagtggttgcgcgtgttgcggcccgggttctgttcgtaggtttacaattgtcgcgggtagtggggcgccccagctgccaactgcacgtggtttctttctggcgtttgcctagtgtcctgtccattccgccccgttgggaagtgggaagcggagaggttctgtggggacagagctgggagtcctgaaggagaaagcgcgcagccgaggggctctggagtgccttagagcagagctgcggccgcggaaggggagcagctgagaaaggagggccgctgcaggcggggttcgaaccgtggggtctgggctgctcccgcggagggcctgggcggacgcgggatgctgggggtccgctgcctgctgcggtccgtgcgcttctgttcctccgcccccttccccaagcacaaaccttcagccaaactgagcgtgcgggacgctctcggggctcagaacgcgagtggggagcgcattaagatccagggatggattcgttctgtccgatcccagaaggaagtcttgttcctgcatgtaaatgatgggtcatctttggaaagccttcaggttgttgcagattcaggccttgacagtagagaattaamttttgggagttctgtggaagtacaagggcagctgataaaaagtccatccaaaaggcaaaatgtggaactgaaggcagaaaaaattaaagatttccccatcaaatataaagagaggcatcctctggagtayctgcgacaatatcctcactttaggtgtaggactaacgttctgggttctatattgaggattcgcagtgaagcgacagctgctattcattctttctttaaggacagtggctttgtacatattcatactccaataatcacatccaatgactctgagggagctggagaactttttcaacttgaaccttcaggcaaacttaaggtacctgaggagaatttcttcaatgttcctgctttcttaactgtctcaggacaacttcatctagaagtgatgtcaggagcttttactcaagtgtttacctttggtccgaccttccgagctgaaaattctcagagccggaggcacctggcagagttttatatgatagaagcagagatttcttttgttgacagccttcaagatcttatgcaggttatagaggaactgttcaaggctacaacaatgatggttctctcaaaatgtcctgaagatgttgaactctgtcacaaattcatagcacctggccaaaaggacagattagaacatatgctaaaaaacaactttttaatcatttcttatactgaagcagtggagatcttaaagcaagcatcccagaasttcacctttaccccagagtggggtgctgacctacggactgaacatgaaaagtacctggtgaagcactgtggcaacatacctgtcttcgttattaattatccattaacactcaagcctttctacatgagggataatgaagatggccctcagcacacggttgctgctgttgatcttctggttcctggagttggggaactctttggaggaggcctcagagaagaacgataccatttcttagaggagcgcttagccagatcgggacttacagaagtctaccaatggtatctggaccttcgtcgatttggatctgtgccacatggaggttttgggatgggatttgaacgctacctgcagtgcatcttgggtgttgacaatatcaaagatgttatccctttcccaaggtttcctcattcatgccttttatagctgraagattggttaaggaaaagcaccccccrtggcagagacactgcacatgattgtgcatacagcagaatgcatgtttggattttagaaatgcagatttcaatatgtaattgttgtgccataagatatcatagaaaaaatataagtggttgtgattttcttagaaagttgagggtatttcacgtaaggatgagctcccgcaagaagaggtacttatagcaaggggactctcaaatccattacctcaattaagaaatgaagaaattgaattagtctcaaagtttcttttaaactctaaaacagaatgagataatgtattttacgttgtctataatcattaaatcactccctgtgtaatttgtgagaaccatctagtagctcgaaataaaataatgttgcatcttttctcccttgccatatactttgtgataaatccttatctcattttcagtacttcattaaacattgcagaaaaaaatattccttaaggtcttaattgatttaaagaagtagctattctgaattgaaatctcctttcattgaactggatgaaaaaatcatgtttaataactgttgcttttcaattttcaaagctgttgagatattacattaagtatttcaactctttaatcactgttgttataatttgtttatatttgaygtttataatttgtctaataaaatagatttttttaatagacac

SEQ ID NO: 5191 - DNA, 2429 bp, Homo sapiens
tgwggtaggagtggttgcgcgtgttgcggcccgggttctgttcgtaggtttacaattgtcgcgggtagtggggcgccccagctgccaactgcacgtggtttctttctggcgtttgcctagtgtcctgtccattccgccccgttgggaagtgggaagcggagaggttctgtggggacagagctgggagtcctgaaggagaaagcgcgcagccgaggggctctggagtgccttagagcagagctgcggccgcggaaggggagcagctgagaaaggagggccgctgcaggcggggttcgaaccgtggggtctgggctgctcccgcggagggcctgggcggacgcgggatgctgggggtccgctgcctgctgcggtccgtgcgcttctgttcctccgcccccttccccaagcacaaaccttcagccaaactgagcgtgcgggacgctctcggggctcagaacgcgagtggggagcgcattaagatccagggatggattcgttctgtccgatcccagaaggaagtcttgttcctgcatgtaaatgatgggtcatctttggaaagccttcaggttgttgcagattcaggccttgacagtagagaattaamttttgggagttctgtggaagtacaagggcagctgataaaaagtccatccaaaaggcaaaatgtggaactgaaggcagaaaaaagaggcatcctctggagtayctgcgacaatatcctcactttaggtgtaggactaacgttctgggttctatattgaggattcgcagtgaagcgacagctgctattcattctttctttaaggacagtggctttgtacatattcatactccaataatcacatccaatgactctgagggagctggagaactttttcaacttgaaccttcaggcaaacttaaggtacctgaggagaatttcttcaatgttcctgctttcttaactgtctcaggacaacttcatctagaagtgatgtcaggagcttttactcaagtgtttacctttggtccgaccttccgagctgaaaattctcagagccggaggcacctggcagagttttatatgatagaagcagagatttcttttgttgacagccttcaagatcttatgcaggttatagaggaactgttcaaggctacaacaatgatggttctctcaaaatgtcctgaagatgttgaactctgtcacaaattcatagcacctggccaaaaggacagattagaacatatgctaaaaaacaactttttaatcatttcttatactgaagcagtggagatcttaaagcaagcatcccagaasttcacctttaccccagagtggggtgctgacctacggactgaacatgaaaagtacctggtgaagcactgtggcaacatacctgtcttcgttattaattatccattaacactcaagcctttctacatgagggataatgaagatggccctcagcacacggttgctgctgttgatcttctggttcctggagttggggaactctttggaggaggcctcagagaagaacgataccatttcttagaggagcgcttagccagatcgggacttacagaagtctaccaatggtatctggaccttcgtcgatttggatctgtgccacatggaggttttgggatgggatttgaacgctacctgcagtgcatcttgggtgttgacaatatcaaagatgttatccctttcccaaggtttcctcattcatgccttttatagctgraagattggttaaggaaaagcaccccccrtggcagagacactgcacatgattgtgcatacagcagaatgcatgtttggattttagaaatgcagatttcaatatgtaattgttgtgccataagatatcatagaaaaaatataagtggttgtgattttcttagaaagttgagggtatttcacgtaaggatgagctcccgcaagaagaggtacttatagcaaggggactctcaaatccattacctcaattaagaaatgaagaaattgaattagtctcaaagtttcttttaaactctaaaacagaatgagataatgtattttacgttgtctataatcattaaatcactccctgtgtaatttgtgagaaccatctagtagctcgaaataaaataatgttgcatcttttctcccttgccatatactttgtgataaatccttatctcattttcagtacttcattaaacattgcagaaaaaaatattccttaaggtcttaattgatttaaagaagtagctattctgaattgaaatctcctttcattgaactggatgaaaaaatcatgtttaataactgttgcttttcaattttcaaagctgttgagatattacattaagtatttcaactctttaatcactgttgttataatttgtttatatttgaygtttataatttgtctaataaaatagatttttttaatagacac

SEQ ID NO: 5192 - DNA, 1999 bp, Homo sapiens
agataccacttcacctctgctagggtgagcgctggtagctcctccctgttaaatgcccatctcaatgcctctgccctaagtgagttgtgcaataaatgagctgtcactctgaacaggtgggaaagaagtgaactgcttgttcacttgctgctgttgccactgctggtacagaaatagaagcacaaaaaaacaaagacaaaaaacctccaagctcccttcagtagttgctacaccttcagattgagacatccttcctcatttacaaacctcagctgtgtctgggggcagggccacagtgaaactgccaggagcaaaaaggcttccaagaaaaagtaccacatcagattggaaactggggacagatcattcctgggatgtgacgggcaccagaatgctccctctccaaaggatctaaggaccaaagctgacagtttctttacttgcaggtagctgacagcatctactcctgaagaccggaaayatggcttgtaccatccaaaaggcagaagcacttgacggggctcatttgatgcagatcctctggtatgatgaggaagagtctctctacccagctgtatggttgagagacaactgtccgtgctctgattgctacctggattctgcaaaagcacggaaacttctagtggaagctcttgatgtgaacattggaattaaaggcttgatatttgacagaaaaaaggtgtacatcacatggcccgatgagcattacagtgaattccaggctgattggctgaagaaaagatgcttttccaagcaggccagagcaaagctccaaagagaattgttttttccagaatgccaatactggggctcagagctccagctacccactttggattttgaagatgttttaagatatgatgaacaygcatacaagtggctctccaccctcaagaaagtaggcatagtaagactcaccggagcatctgacaaaccaggagaagtttcaaaacttgggaaaaggatgggtttcctctatctcacattttatggacatacttggcaagtgcaagacaaaatcgatgcaaacaatgtggcttacacaactgggaagctaagctttcacactgattatccagccctccatcatccacctggggttcagcttcttcactgcataaagcaaacagtcacagggggtgattcagaaattgtagatgggtttaatgtgtgccaaaaactaaagaaaaataatcctcaggcattccagattttgtcctctacctttgtggactttacagacattggagtggattactgtgatttttctgtacaatcaaaacataaaattatagagttagatgataaaggccaagtggttcgcatcaacttcaataacgcaactagggacacaatatttgatgtrcctgttgaaagagttcagcctttttatgctgctctgaaggagtttgttgacctcatgaacagcaaagaatccaagtttaccttcaagatgaatccaggtgatgtgattacttttgataactggcgcttacttcatggccgacgtagctatgaagcaggaactgagatatcccgccatctagaaggagcttatgctgactgggatgtggtcatgtcaaggcttcgtatcttaaggcagagggtggagaatggaaactgaagtcacctgtagataattttaataagattccaatgaccatattttgtgagatatggcacattattcacagaccatgatctttgtgatttacatataatttccttaacaatgaacatgtaacttctctcacaagagtactctttactttgtaatcatatacaatgtcaactttttagatgtttcaccactcttttgcaaataaagcatcctttctgctctgttgcatgcctgctctaatttcttttgyccatatatgagtatctccagaatgtctacaaatagtttttgtagcaaatgaaaatttcttcaaataagccttttgtttcaaataaaacttgtctcaaaacatgcttc

SEQ ID NO: 5193 - DNA, 1996 bp, Homo sapiens
agataccacttcacctctgctagggtgagcgctggtagctcctccctgttaaatgcccatctcaatgcctctgccctaagtgagttgtgcaataaatgagctgtcactctgaacaggtgggaaagaagtgaactgcttgttcacttgctgctgttgccactgctggtacagaaatagaagcacaaaaaaacaaagacaaaaaacctccaagctcccttcagtagttgctacaccttcagattgagacatccttcctcatttacaaacctcagctgtgtctgggggcagggccacagtgaaactgccaggagcaaaaaggcttccaagaaaaagtaccacatcagattggaaactggggacagatcattcctgggatgtgacgggcaccagaatgctccctctccaaaggatctaaggaccaaagctgacagtttctttacttggtagctgacagcatctactcctgaagaccggaaayatggcttgtaccatccaaaaggcagaagcacttgacggggctcatttgatgcagatcctctggtatgatgaggaagagtctctctacccagctgtatggttgagagacaactgtccgtgctctgattgctacctggattctgcaaaagcacggaaacttctagtggaagctcttgatgtgaacattggaattaaaggcttgatatttgacagaaaaaaggtgtacatcacatggcccgatgagcattacagtgaattccaggctgattggctgaagaaaagatgcttttccaagcaggccagagcaaagctccaaagagaattgttttttccagaatgccaatactggggctcagagctccagctacccactttggattttgaagatgttttaagatatgatgaacaygcatacaagtggctctccaccctcaagaaagtaggcatagtaagactcaccggagcatctgacaaaccaggagaagtttcaaaacttgggaaaaggatgggtttcctctatctcacattttatggacatacttggcaagtgcaagacaaaatcgatgcaaacaatgtggcttacacaactgggaagctaagctttcacactgattatccagccctccatcatccacctggggttcagcttcttcactgcataaagcaaacagtcacagggggtgattcagaaattgtagatgggtttaatgtgtgccaaaaactaaagaaaaataatcctcaggcattccagattttgtcctctacctttgtggactttacagacattggagtggattactgtgatttttctgtacaatcaaaacataaaattatagagttagatgataaaggccaagtggttcgcatcaacttcaataacgcaactagggacacaatatttgatgtrcctgttgaaagagttcagcctttttatgctgctctgaaggagtttgttgacctcatgaacagcaaagaatccaagtttaccttcaagatgaatccaggtgatgtgattacttttgataactggcgcttacttcatggccgacgtagctatgaagcaggaactgagatatcccgccatctagaaggagcttatgctgactgggatgtggtcatgtcaaggcttcgtatcttaaggcagagggtggagaatggaaactgaagtcacctgtagataattttaataagattccaatgaccatattttgtgagatatggcacattattcacagaccatgatctttgtgatttacatataatttccttaacaatgaacatgtaacttctctcacaagagtactctttactttgtaatcatatacaatgtcaactttttagatgtttcaccactcttttgcaaataaagcatcctttctgctctgttgcatgcctgctctaatttcttttgyccatatatgagtatctccagaatgtctacaaatagtttttgtagcaaatgaaaatttcttcaaataagccttttgtttcaaataaaacttgtctcaaaacatgcttc

SEQ ID NO: 5194 - DNA, 1819 bp, Homo sapiens
cacaaaaaaacaaagacaaaaaacctccaagctcccttcagtagttgctacaccttcagattgagacatccttcctcatttacaaacctcagctgtgtctgggggcagggccacagtgaaactgccaggagcaaaaaggcttccaagaaaaagtaccacatcagattggaaactggggacagatcattcctgggatgtgacgggcaccagaatgctccctctccaaaggatctaaggaccaaagctgacagtttctttacttgcaggtagctgacagcatctactcctgaagaccggaaayatggcttgtaccatccaaaaggcagaagcacttgacggggctcatttgatgcagatcctctggtatgatgaggaagagtctctctacccagctgtatggttgagagacaactgtccgtgctctgattgctacctggattctgcaaaagcacggaaacttctagtggaagctcttgatgtgaacattggaattaaaggcttgatatttgacagaaaaaaggtgtacatcacatggcccgatgagcattacagtgaattccaggctgattggctgaagaaaagatgcttttccaagcaggccagagcaaagctccaaagagaattgttttttccagaatgccaatactggggctcagagctccagctacccactttggattttgaagatgttttaagatatgatgaacaygcatacaagtggctctccaccctcaagaaagtaggcatagtaagactcaccggagcatctgacaaaccaggagaagtttcaaaacttgggaaaaggatgggtttcctctatctcacattttatggacatacttggcaagtgcaagacaaaatcgatgcaaacaatgtggcttacacaactgggaagctaagctttcacactgattatccagccctccatcatccacctggggttcagcttcttcactgcataaagcaaacagtcacagggggtgattcagaaattgtagatgggtttaatgtgtgccaaaaactaaagaaaaataatcctcaggcattccagattttgtcctctacctttgtggactttacagacattggagtggattactgtgatttttctgtacaatcaaaacataaaattatagagttagatgataaaggccaagtggttcgcatcaacttcaataacgcaactagggacacaatatttgatgtrcctgttgaaagagttcagcctttttatgctgctctgaaggagtttgttgacctcatgaacagcaaagaatccaagtttaccttcaagatgaatccaggtgatgtgattacttttgataactggcgcttacttcatggccgacgtagctatgaagcaggaactgagatatcccgccatctagaaggagcttatgctgactgggatgtggtcatgtcaaggcttcgtatcttaaggcagagggtggagaatggaaactgaagtcacctgtagataattttaataagattccaatgaccatattttgtgagatatggcacattattcacagaccatgatctttgtgatttacatataatttccttaacaatgaacatgtaacttctctcacaagagtactctttactttgtaatcatatacaatgtcaactttttagatgtttcaccactcttttgcaaataaagcatcctttctgctctgttgcatgcctgctctaatttcttttgyccatatatgagtatctccagaatgtctacaaatagtttttgtagcaaatgaaaatttcttcaaataagccttttgtttcaaataaaacttgtctcaaaacatgcttc

SEQ ID NO: 5195 - DNA, 2265 bp, Homo sapiens
agggggtggtgctgattggctgagcctgaagtcgccacggwctcggggcaacaggcagatttgcctgctgagggtggagacccacgagccgaggcctcctgcagtgttcygcacagcaaaccgcacgctatggctgacagccgggatcccgccagcgaccagatgcagcactggaaggagcagcgggccgcgcagaaagctgatgtcctgaccactggagctggtaacccagtaggagacaaacttaatgttattacagtagggccccgtgggccccttcttgttcaggatgtggttttcactgatgaaatggctcattttgaccgagagagaattcctgagagagttgtgcatgctaaaggagcaggggcctttggctactttgaggtcacacatgacattaccaaatactccaaggcaaaggtatttgagcatattggaaagaagactcccatcgcagttcggttctccactgttgctggagaatcgggttcagctgacacagttcgggaccctcgtgggtttgcagtgaaattttacacagaagatggtaactgggatctcgttggaaataacacccccattttcttcatcagggatcccatattgtttccatcttttatccacagccaaaagagaaatcctcagacacatctgaaggatccggacatggtctgggacttctggagcctacgtcctgagtctctgcatcaggtttctttcttgttcagtgatcgggggattccagatggacatcgccacatgaatggatatggatcacatactttcaagctggttaatgcaaatggrgaggcagtttattgcaaattccattataagactgaccagggcatcaaaaacctttctgttgaagatgcggcgagactttcccaggaagatcctgactatggcatccgggatctttttaacgccattgccacaggaaagtacccctcctggactttttacatccaggtcatgacatttaatcaggcagaaacttttccatttaatccattcgatctcaccaaggtttggcctcacaaggactaccctctcatcccagttggtaaactggtcttaaaccggaatccagttaattactttgctgaggttgaacagatagccttcgacccaagcaacatgccacctggcattgaggccagtcctgacaaaatgcttcagggccgcctttttgcctatcctgacactcaccgccatcgcctgggacccaattatcttcatatacctgtgaactgtccctaccgtgctcgagtggccaactaccagcgtgayggcccgatgtgcatgcaggacaatcagggtggtgctccaaattactaccccaacagctttggtgctccggaacaacagccttctgccytggagcacagcatccaatattctggagaagtgcggagattcaacactgccaatgatgataacgttactcaggtgcgggcattctatgtgaacgtgctgaatgaggaacagaggaaacgtctgtgtgagaacattgccggccacctgaaggatgcacaaattttcatccagaagaaagcggtcaagaacttcactgaggtccaccctgactacgggagccayatccaggctcttctggacaagtacaatgctgagaagcctaagaatgcgattcacacctttgtgcagtccggatctcacttggcggcaagggagaaggcaaatctgtgaggccrgggccctgcacctgtgcagcgaagcttagcgttcatccgtgtaacccgctcatcactggatgaagattctcctgtgctagatgtgcaaatgcaagctagtggcttcaaaatagagaatcccactttctatagcagattgtgtaacaattttaatgctatttccmcaggggaaaatgaaggttaggatttaacagtcatttaaaaaaaaaatttgttttgacggatgattggattattcatttaaaatgattagaaggcaagtttctagctagaaatatgattttatttgayaaaatttgttgaaattatgtatgtttacatatcmcctcatggcctattatattaaaatatggctataaatatataaaaagaaaagataaagatgatctactcagaaatttttatttttctaaggttctcataggaaaagcttaatgtttattcctgataataattgatcaaattcatttttttcactggagttacatyaatgttaattcagcactgatttcacaacagatcaatttgtaattgcttacatttttac

SEQ ID NO: 5196 - DNA, 2344 bp, Homo sapiens
agggggtggtgctgattggctgagcctgaagtcgccacggwctcggggcaacaggcagatttgcctgctgagggtggagacccacgagccgaggcctcctgcagtgttcygcacagcaaaccgcacgctatggctgacagccgggatcccgccagcgaccagatgcagcactggaaggagcagcgggccgcgcagaaagctgatgtcctgaccactggagctggtaacccagtaggagacaaacttaatgttattacagtagggccccgtgggccccttcttgttcaggatgtggttttcactgatgaaatggctcattttgaccgagagagaattcctgagagagttgtgcatgctaaaggagcaggggcctttggctactttgaggtcacacatgacattaccaaatactccaaggcaaaggtatttgagcatattggaaagaagactcccatcgcagttcggttctccactgttgctggagaatcgggttcagctgacacagttcgggaccctcgtgggtttgcagtgaaattttacacagaagatggtaactgggatctcgttggaaataacacccccattttcttcatcagggatcccatattgtttccatcttttatccacagccaaaagagaaatcctcagacacatctgaaggatccggacatggtctgggacttctggagcctacgtcctgagtctctgcatcaggtttctttcttgttcagtgatcgggggattccagatggacatcgccacatgaatggatatggatcacatactttcaagctggttaatgcaaatggrgaggcagtttattgcaaattccattataagactgaccagggcatcaaaaacctttctgttgaagatgcggcgagactttcccaggaagatcctgactatggcatccgggatctttttaacgccattgccacaggaaagtacccctcctggactttttacatccaggtcatgacatttaatcaggcagaaacttttccatttaatccattcgatctcaccaaggtttggcctcacaaggactaccctctcatcccagttggtaaactggtcttaaaccggaatccagttaattactttgctgaggttgaacagatagccttcgacccaagcaacatgccacctggcattgaggccagtcctgacaaaatgcttcagggccgcctttttgcctatcctgacactcaccgccatcgcctgggacccaattatcttcatatacctgtgaactgtccctaccgtgctcgagtggccaactaccagcgtgayggcccgatgtgcatgcaggacaatcagggtggtgctccaaattactaccccaacagctttggtgctccggaacaacagccttctgccytggagcacagcatccaatattctggagaagtgcggagattcaacactgccaatgatgataacgttactcaggtgcgggcattctatgtgaacgtgctgaatgaggaacagaggaaacgtctgtgtgagaacattgccggccacctgaaggatgcacaaattttcatccagaagaaagcggtcaagaacttcactgaggtccaccctgactacgggagccayatccaggctcttctggacaagtacaatgctgagaagcctaagaatgcgattcacacctttgtgcagtccggatctcacttggcggcaagggagaaggcaaatctgtgaggccrgggccctgcacctgtgcagcgaagcttagcgttcatccgtgtaacccgctcatcactggatgaagattctcctgtgctagatgtgcaaatgcaagctagtggcttcaaaatagagaatcccactttctatagcagattgtgtaacaattttaatgctatttccmcaggggaaaatgaaggttaggatttaacagtcatttaaaaaaaaaatttgttttgacggatgattggattattcatttaaaatgattagaaggcaagtttctagctagaaatatgattttatttgayaaaatttgttgaaattatgtatgtttacatatcmcctcatggcctattatattaaaatatggctataaatatataaaaagaaaagataaagatgatctactcagaaatttttatttttctaaggttctcataggaaaagtacatttaatacagcagtgtcatcagaagrtaacttgagcmccgtcatggcttaatgtttattcctgataataattgatcaaattcatttttttcactggagttacatyaatgttaattcagcactgatttcacaacagatcaatttgtaattgcttacatttttacaataaataatctgtacgtaaraacagaga

SEQ ID NO: 5197 - DNA, 2625 bp, Homo sapiens
ggggaagagggctatggccggagcttgagatacgccgctctgaatcttgccgccctgcactgccgcttcggtcactatcaacaggcagagctcgccctgcaggaggcaattaggattgcccaggagtccaacgatcacgtgtgtctccagcactgtttgagctggctttatgtgctggggcagaagagatccgatagctatgttctgctggagcattctgtgaagaaggcagtacattttgggttaccgtacctcgcctccctgggaatacagtcccttgttcaacagagagcttttgctgggaagacggcaaacaagctgatggatgccctaaaggactccgacctcctgcactggaaacacagcctgtcagagctcatcgatatcagcatcgcacagaaaacggccatctggaggctgtatggccgcaggtaggtctcccaaggccctgggggtgtgaattctttagagagaagcaggagctagcaagctggttctgtgaaaggccatacatacaagatttacctgccttggatagatgttgttcctgcaggggactatgttttagactataaaacattttgtattttgcacagactgaaaacttttttcccatgcatgttccttcttactcctcccaaccactttgtgaggtaatgggtgggtgatctccatgctgggagagtaaaccagggttcacacatctgatctacccgcgatcgcaaacgcagttaacaagtgacagagaaaggactcaaacccacgtcatctgactccaagcaccgggctcctctgctctgtgacaggaaccttcctgtttataggaggcatgatccatggttgctctagttgagtgtcacctgaaccccaaaactattgtgtaaaagaaagttgcttttctgttaactgaggtgttttctgtggaatattttcatcttattgtgtactttcacatttagccacttttagcctggaagtaaactttgttgccgcattttaatcctggagttctgtcgctacctcacccctcacttagacagtctgtttctaggaattcagtaatgaaaggaagtgccttttttaccagtcttgtttttgtatttcagataattttttggcacggtgtgctctgaaacagctgcagacactggccactgcttacattgccagagcagtctgtgccaggatggcatcgggtctgaattcacccgtgaaaactaattaacatactatgactgcagggaacatggggtgggggcggggggatctgggagcgtgtactcccagctgtgccctaaccactacgtgtctcctcgcgctgcacatccaggatgcttttctgcctttcttatcctgagggcaaggttgctggcactgggaggcatctgctcccaagaaagccagagcctgtgaggtgtatgactttacgcctccactcaagatagctgaygggcatggccaaagcgcagccaggtctgctgctgaaaggaaatcctgttccctctccccacccagcaccatggcactgcaacaggcccagatgttgctgagcatgaacagcctggaggcggtgaatgcgggcgtgcagcagaacaacacagagtcctttgctgtcgcactctgccayctcgcagagctacacgcggagcagggctgttttgctgcagcttctgaagtgttaaagcacttgaaggaacgatttccgcctaatagtcagcacgcccagttatggatgctatgtgatcaaaaaatacagtttgacagagcaatgaatgatggcaaatatcatttggctgattcacttgttacaggaatcacagctctcaatagcatagagggtgtttataggaaagcggttgtattacaagctcagaaccaaatgtcagaggcacataagcttttacaaaaattgttggttcattgtcagaaactgaagaacacagaaatggtgatcagtgtcctactgtccgtggcagagctgtactggcgatcttcctcccctaccatcgcgctgcccatgctcctgcaggctctggccctctccaaggagtaccggttacagtacttggcctctgaaacagtgctgaacttggcttttgcgcagctcattcttggaatcccagaacaggccttaagtcttctccacatggccatcgagcccatcttggctgacggggctatcctggacaaaggtcgtgccatgttcttagtggccaagtgccaggtggcttcagcagcttcctacgatcagccgaagaaagcagaagctctggaggctgccatcgagaacctcaatgaagccaagaactattttgcaaaggttgactgcaaagagcgcatcagggacgtcgtttacttccaggccagactctaccataccctggggaagacccaggagaggaaccggtgtgcgatgctcttccggcagctgcatcaggagctgccctctcatggggtacccttgataaaccatctctagagaggacatccctgctgggctgctgtgcagagtataagatttwggacttgttcatgtcccctctctccctataaatgatgtatttgtgacaccctatcttgtcaataaacagcattctgattagtttgtcttattttgttgctagt

SEQ ID NO: 5198 - DNA, 2626 bp, Homo sapiens
acgcggatgtctgtttcctgggatattgtgagggcgggcggagatgtagacccggtagtgttgtgccttgtggtgacaactggcggcagygcgccgcgggcccgagacttagtctcgggccgccatggccagcgtccacgagagcctctacttcaatcccatgatgaccaatggggttgtgcacgccaatgtgttcggcatcaaggactgggtgacgccgtacaagatcgcggtgctggtgctgctgaacgagatgagccgcacaggcgagggcgccgtcagcctcatggagcggcggaggctcaaccagctgctcctgcccctgctgcagggcccakatattacactgtcaaaactttacaagttaattgaagagtcttgtccacagctggcaaattcagtgcagatcagaatcaaactgatggctgaaggcgagttgaaggatatggaacagttttttgatgacctttcagattctttctctggaactgaaccagaggttcacaaaacaagtgtagtaggtttgtttctgcgtcacatgatcttggcctacagtaagctttctttcagccaagtgtttaaactgtacactgcccttcagcagtacttccagaatggtgagaaaaagacagtggaggatgctgatatggaactgaccagtagagatgagggtgaaagaaaaatggaaaaagaagaacttgatgtatctgtaagagaagaggaggtatcttgcagtgggcctctgtcccaaaaacaagcagaattttttctttctcaacaggcttctttgctaaagaatgatgagactaaggccctcactccagcttccttgcagaaggaattaaacaatttgttgaaatttaatcctgattttgctgaagcgcattatctcagctacttaaacaacctccgtgtccaagaygttttcagttcaacacacagtctcctccattattttgatcgtctgattcttaccggagccgaaagcaaaagtaatggggaagagggctatggccggagcttgagatacgccgctctgaatcttgccgccctgcactgccgcttcggtcactatcaacaggcagagctcgccctgcaggaggcaattaggattgcccaggagtccaacgatcacgtgtgtctccagcactgtttgagctggctttatgtgctggggcagaagagatccgatagctatgttctgctggagcattctgtgaagaaggcagtacattttgggttaccgtacctcgcctccctgggaatacagtcccttgttcaacagagagcttttgctgggaagacggcaaacaagctgatggatgccctaaaggactccgacctcctgcactggaaacacagcctgtcagagctcatcgatatcagcatcgcacagaaaacggccatctggaggctgtatggccgcagcaccatggcactgcaacaggcccagatgttgctgagcatgaacagcctggaggcggtgaatgcgggcgtgcagcagaacaacacagagtcctttgctgtcgcactctgccayctcgcagagctacacgcggagcagggctgttttgctgcagcttctgaagtgttaaagcacttgaaggaacgatttccgcctaatagtcagcacgcccagttatggatgctatgtgatcaaaaaatacagtttgacagagcaatgaatgatggcaaatatcatttggctgattcacttgttacaggaatcacagctctcaatagcatagagggtgtttataggaaagcggttgtattacaagctcagaaccaaatgtcagaggcacataagcttttacaaaaattgttggttcattgtcagaaactgaagaacacagaaatggtgatcagtgtcctactgtccgtggcagagctgtactggcgatcttcctcccctaccatcgcgctgcccatgctcctgcaggctctggccctctccaaggagtaccggttacagtacttggcctctgaaacagtgctgaacttggcttttgcgcagctcattcttggaatcccagaacaggccttaagtcttctccacatggccatcgagcccatcttggctgacggggctatcctggacaaaggtcgtgccatgttcttagtggccaagtgccaggtggcttcagcagcttcctacgatcagccgaagaaagcagaagctctggaggctgccatcgagaacctcaatgaagccaagaactattttgcaaaggttgactgcaaagagcgcatcagggacgtcgtttacttccaggccagactctaccataccctggggaagacccaggagaggaaccggtgtgcgatgctcttccggcagctgcatcaggagctgccctctcatggggtacccttgataaaccatctctagagaggacatccctgctgggctgctgtgcagagtataagatttwggacttgttcatgtcccctctctccctataaatgatgtatttgtgacaccctatcttgtcaataaacagcattctgattagtttgtcttattttgttgctagtaactacgtatttgttttattccccttttcttcccttttggtagcaaaggacaccaactttttcttaataaatgggtattttgctaaca

SEQ ID NO: 5199 - DNA, 3288 bp, Homo sapiens
cgcggccgggggggtggggggtgttcatctccgcgaccaggaaacgggaaagatggcgacggctccgcgacgttgaggccgcgttgggcggttcagactcagggtgatggcaggagagctggctgacaaaaaggaccgtgatgcatcaccttccaaggaggaaaggaagcgatcacggactcctgacagagagcgggatagagaccgggaccggaagtcttccccatctaaagatagaaagcggcatcgttcaagggatagacgtcgaggaggcagccgttctcgctctcgttcccgttccaaatctgcagaaagagaacgacggcacaaagaacgagaacgagataaggagcgggatcggaataagaaggaccgagatcgagacaaggatgggcacagacgggacaaggaccgtaaacgatccagcttatctcctggtcgaggaaaagactttaaatctcggaaggacagagactctaagaaggatgaagaggatgaacatggtgataagaagcctaaggcccagccattatccctggaggagcttctggccaagaaaaaggctgaggaagaagctgaggctaagcccaagttcctctctaaagcagaacgagaggctgaagctctaaagcgacggcagcaggaggtggaagagcggcagaggatgcttgaagaagagaggaagaaaaggaaacagttccaagacttgggcaggaagatgttggaagatcctcaggaacgggaacgtcgggaacgcagggagaggatggaacgggagaccaatggaaatgaggatgaggaagggcggcagaagatccgggaagagaaggataagagcaaggaactgcatgccattaaggagcgttacctgggtggcatcaaaaagcggcgccgaacgagacatctcaatgaccggaaatttgtytttgagtgggatgcatctgaggacacatccattgactacaaccccctgtacaaagaacggcaccaggtgcagttgttagggcgaggcttcattgcaggcattgacctcaagcagcagaagcgagagcagtcacgtttctatggagacctaatggagaagaggcgaaccctggaagaaaaggagcaggaggaggcaagactccgcaaacttcgtaagaaggaagccaagcagcgctgggatgatcgtcattggtctcagaaaaagttagatgagatgacggacagggactggcggatcttccgtgaggactacagcatcaccaccamaggtggcaagatccccaatcccatccgatcctggaaagactcttctctgcccccacacatcttggaggtcattgataagtgtggctacaaggaaccaacacctatacagcgtcaggcaattcccattgggctacagaatcgtgacatcattggtgtggctgagactggcagtggcaagacagcagccttcctcatccctctgctggtctggatcaccacacttcccaaaattgacaggatcgaagagtcagaccaaggcccttatgccatcatcctggctcccacccgtgagttggctcaacagattgaggaagagaccatcaagtttgggaaaccgctaggtatccgcactgtggctgtcattggtggcatctccagagaagaccagggcttcaggctgcgcatgggttgtgagattgtgattgctacccctgggcgtttgattgatgtgctggagaaccgctacctggtgctgagccgctgtacctatgtggttctggatgaggcagataggatgattgacatgggctttgagccagatgtccagaagatcctggagcacatgcctgtcagcaaccagaagccagacacggatgaggctgaggaccctgagaagatgctggccaactttgagtcgggaaaacataagtaccgccaaacagtcatgttcacggccaccatgcccccagcggtggagcgtctggccaggagctatcttcggcgacctgctgtggtgtacattggctccgcaggcaagccccatgagcgtgtggaacagaaggtcttcctcatgtcagagtcagaaaagaggaaaaagctgctggcaatcttggagcaaggctttgacccacccatcattatttttgtcaaccagaagaagggctgcgacgtgttggccaaatccctggagaagatggggtacaatgcttgcacactgcacggtggaaaaggccaggagcagcgagagtttgcgttgtccaacctcaaggctggggccaaggatattttggtggctacagatgtggctggtcgtggtattgacatccaagatgtgtctatggttgtcaactatgatatggccaaaaatattgaagattacatccaccgcattggccgcacgggacgagcaggcaagagtggggtggccatcaccttcctcacaaaagaggactctgctgtgttctacgagctgaagcaagctatcctggaaagcccagtgtcttcctgtccccccgaactagccaaccacccagatgcccagcataagccaggcaccatcctcaccaagaagcgccgggaagagaccatctttgcctgacacagcactcttcctgtgggctgagggcatctccaaagctgcctgatgcctgtttttcagaaccctcacatccctctttccaggtcctcactcttgggatatgggggcttaggaaaacaatccaactccctagcccagaccctcaggtcaggaggcctgcgtgtggggctgcaaaaggagaggacgacgctgtcggaggcagggagagcaaattaccacagcttcttggcccagttctgcccttctttgctttgggattgcactgggccatcagctcatgccaggctatgggggcagccagttggcattgctccccagactgaacagaaacctggccgccggatgggacctcctttggcacagacttgactgtgtaaktgcataaactgcagtagcatcattgccctagatgccccaggagacctgrcaccatgaggattacagacagtggaatcttactgtcatctggacagctgttttcctgtttggatggtaaaggaagttgagagtctttagacctgtgcacagccccgcaccaaggggtgctgtatgctctaggcatcccctcccccaggggattttctaagtagatggggggacacggygaactggctgtgtccatctttgtcactgagtgaaatctctgttttctattctctgagaagataagtttgtatgttctgagaataaatacatgaatattaagactgttagatcta

SEQ ID NO: 5200 - DNA, 3119 bp, Homo sapiens
ggccgcgttgggcggttcagactcaggatggcaggagagctggctgacaaaaaggaccgtgatgcatcaccttccaaggaggaaaggaagcgatcacggactcctgacagagagcgggatagagaccgggaccggaagtcttccccatctaaagatagaaagcggcatcgttcaagggatagacgtcgaggaggcagccgttctcgctctcgttcccgttccaaatctgcagaaagagaacgacggcacaaagaacgagaacgagataaggagcgggatcggaataagaaggaccgagatcgagacaaggatgggcacagacgggacaaggaccgtaaacgatccagcttatctcctggtcgaggaaaagactttaaatctcggaaggacagagactctaagaaggatgaagaggatgaacatggtgataagaagcctaaggcccagccattatccctggaggagcttctggccaagaaaaaggctgaggaagaagctgaggctaagcccaagttcctctctaaagcagaacgagaggctgaagctctaaagcgacggcagcaggaggtggaagagcggcagaggatgcttgaagaagagaggaagaaaaggaaacagttccaagacttgggcaggaagatgttggaagatcctcaggaacgggaacgtcgggaacgcagggagaggatggaacgggagaccaatggaaatgaggatgaggaagggcggcagaagatccgggaagagaaggataagagcaaggaactgcatgccattaaggagcgttacctgggtggcatcaaaaagcggcgccgaacgagacatctcaatgaccggaaatttgtttttgagtgggatgcatctgaggacacatccattgactacaaccccctgtacaaagaacggcaccaggtgcagttgttagggcgaggcttcattgcaggcattgacctcaagcagcagaagcgagagcagtcacgtttctatggagacctaatggagaagaggcgaaccctggaagaaaaggagcaggaggaggcaagactccgcaaacttcgtaagaaggaagccaagcagcgctgggatgatcgtcattggtctcagaaaaagttagatgagatgacggacagggactggcggatcttccgtgaggactacagcatcaccaccaaaggtggcaagatccccaatcccatccgatcctggaaagactcttctctgcccccacacatcttggaggtcattgataagtgtggctacaaggaaccaacacctatacagcgtcaggcaattcccattgggctacagaatcgtgacatcattggtgtggctgagactggcagtggcaagacagcagccttcctcatccctctgctggtctggatcaccacacttcccaaaattgacaggatcgaagagtcagaccaaggcccttatgccatcatcctggctcccacccgtgagttggctcaacagattgaggaagagaccatcaagtttgggaaaccgctaggtatccgcactgtggctgtcattggtggcatctccagagaagaccagggcttcaggctgcgcatgggttgtgagattgtgattgctacccctgggcgtttgattgatgtgctggagaaccgctacctggtgctgagccgctgtacctatgtggttctggatgaggcagataggatgattgacatgggctttgagccagatgtccagaagatcctggagcacatgcctgtcagcaaccagaagccagacacggatgaggctgaggaccctgagaagatgctggccaactttgagtcgggaaaacataagtaccgccaaacagtcatgttcacggccaccatgcccccagcggtggagcgtctggccaggagctatcttcggcgacctgctgtggtgtacattggctccgcaggcaagccccatgagcgtgtggaacagaaggtcttcctcatgtcagagtcagaaaagaggaaaaagctgctggcaatcttggagcaaggctttgacccacccatcattatttttgtcaaccagaagaagggctgcgacgtgttggccaaatccctggagaagatggggtacaatgcttgcacactgcacggtggaaaaggccaggagcagcgagagtttgcgttgtccaacctcaaggctggggccaaggatattttggtggctacagatgtggctggtcgtggtattgacatccaagatgtgtctatggttgtcaactatgatatggccaaaaatattgaagattacatccaccgcattggccgcacgggacgagcaggcaagagtggggtggccatcaccttcctcacaaaagaggactctgctgtgttctacgagctgaagcaagctatcctggaaagcccagtgtcttcctgtccccccgaactagccaaccacccagatgcccagcataagccaggcaccatcctcaccaagaagcgccgggaagagaccatctttgcctgacacagcactcttcctgtgggctgagggcatctccaaagctgcccccagaccctcaggtcaggaggcctgcgtgtggggctgcaaaaggagaggacgacgctgtcggaggcagggagagcaaattaccacagcttcttggcccagttctgcccttctttgctttgggattgcactgggccatcagctcatgccaggctatgggggcagccagttggcattgctccccagactgaacagaaacctggccgccggatgggacctcctttggcacagacttgactgtgtaactgcataaactgcagtagcatcattgccctagatgccccaggagacctggcaccatgaggattacagacagtggaatctkactgtcatctggacagctgttttcctgtttggatggtaaaggaagttgrgagtctttagacctgtgcacagccccgcaccaaggggtgctgtatgctctaggcatcccctcccccaggggattttctaagtagatggggggacacggtgaactggctgtgtccatctttgtcactgagtgaaatctctgttttctattctctgagaagataagtttgtatgttctgygaataaatacatgaatattaagactgttagatcta

SEQ ID NO: 5201 - DNA, 3209 bp, Homo sapiens
ggccgcgttgggcggttcagactcaggatggcaggagagctggctgacaaaaaggaccgtgatgcatcaccttccaaggaggaaaggaagcgatcacggactcctgacagagagcgggatagagaccgggaccggaagtcttccccatctaaagatagaaagcggcatcgttcaagggatagacgtcgaggaggcagccgttctcgctctcgttcccgttccaaatctgcagaaagagaacgacggcacaaagaacgagaacgagataaggagcgggatcggaataagaaggaccgagatcgagacaaggatgggcacagacgggacaaggaccgtaaacgatccagcttatctcctggtcgaggaaaagactttaaatctcggaaggacagagactctaagaaggatgaagaggatgaacatggtgataagaagcctaaggcccagccattatccctggaggagcttctggccaagaaaaaggctgaggaagaagctgaggctaagcccaagttcctctctaaagcagaacgagaggctgaagctctaaagcgacggcagcaggaggtggaagagcggcagaggatgcttgaagaagagaggaagaaaaggaaacagttccaagacttgggcaggaagatgttggaagatcctcaggaacgggaacgtcgggaacgcagggagaggatggaacgggagaccaatggaaatgaggatgaggaagggcggcagaagatccgggaagagaaggataagagcaaggaactgcatgccattaaggagcgttacctgggtggcatcaaaaagcggcgccgaacgagacatctcaatgaccggaaatttgtttttgagtgggatgcatctgaggacacatccattgactacaaccccctgtacaaagaacggcaccaggtgcagttgttagggcgaggcttcattgcaggcattgacctcaagcagcagaagcgagagcagtcacgtttctatggagacctaatggagaagaggcgaaccctggaagaaaaggagcaggaggaggcaagactccgcaaacttcgtaagaaggaagccaagcagcgctgggatgatcgtcattggtctcagaaaaagttagatgagatgacggacagggactggcggatcttccgtgaggactacagcatcaccaccaaaggtggcaagatccccaatcccatccgatcctggaaagactcttctctgcccccacacatcttggaggtcattgataagtgtggctacaaggaaccaacacctatacagcgtcaggcaattcccattgggctacagaatcgtgacatcattggtgtggctgagactggcagtggcaagacagcagccttcctcatccctctgctggtctggatcaccacacttcccaaaattgacaggatcgaagagtcagaccaaggcccttatgccatcatcctggctcccacccgtgagttggctcaacagattgaggaagagaccatcaagtttgggaaaccgctaggtatccgcactgtggctgtcattggtggcatctccagagaagaccagggcttcaggctgcgcatgggttgtgagattgtgattgctacccctgggcgtttgattgatgtgctggagaaccgctacctggtgctgagccgctgtacctatgtggttctggatgaggcagataggatgattgacatgggctttgagccagatgtccagaagatcctggagcacatgcctgtcagcaaccagaagccagacacggatgaggctgaggaccctgagaagatgctggccaactttgagtcgggaaaacataagtaccgccaaacagtcatgttcacggccaccatgcccccagcggtggagcgtctggccaggagctatcttcggcgacctgctgtggtgtacattggctccgcaggcaagccccatgagcgtgtggaacagaaggtcttcctcatgtcagagtcagaaaagaggaaaaagctgctggcaatcttggagcaaggctttgacccacccatcattatttttgtcaaccagaagaagggctgcgacgtgttggccaaatccctggagaagatggggtacaatgcttgcacactgcacggtggaaaaggccaggagcagcgagagtttgcgttgtccaacctcaaggctggggccaaggatattttggtggctacagatgtggctggtcgtggtattgacatccaagatgtgtctatggttgtcaactatgatatggccaaaaatattgaagattacatccaccgcattggccgcacgggacgagcaggcaagagtggggtggccatcaccttcctcacaaaagaggactctgctgtgttctacgagctgaagcaagctatcctggaaagcccagtgtcttcctgtccccccgaactagccaaccacccagatgcccagcataagccaggcaccatcctcaccaagaagcgccgggaagagaccatctttgcctgacacagcactcttcctgtgggctgagggcatctccaaagctgcctgatgcctgtttttcagaaccctcacatccctctttccaggtcctcactcttgggatatgggggcttaggaaaacaatccaactccctagcccagaccctcaggtcaggaggcctgcgtgtggggctgcaaaaggagaggacgacgctgtcggaggcagggagagcaaattaccacagcttcttggcccagttctgcccttctttgctttgggattgcactgggccatcagctcatgccaggctatgggggcagccagttggcattgctccccagactgaacagaaacctggccgccggatgggacctcctttggcacagacttgactgtgtaactgcataaactgcagtagcatcattgccctagatgccccaggagacctggcaccatgaggattacagacagtggaatctkactgtcatctggacagctgttttcctgtttggatggtaaaggaagttgrgagtctttagacctgtgcacagccccgcaccaaggggtgctgtatgctctaggcatcccctcccccaggggattttctaagtagatggggggacacggtgaactggctgtgtccatctttgtcactgagtgaaatctctgttttctattctctgagaagataagtttgtatgttctgygaataaatacatgaatattaagactgttagatcta

SEQ ID NO: 5202 - DNA, 1084 bp, Homo sapiens
agaccggaagagacacgcggggcttcaggctgctgccccattggaagattactccccaggcttcccttgccccaagcagtgagctgactggaatggtaccccgggaggcccctgagtctgctcagtgcctgtgccyttccctcaccatcccaaatgccaaggatgtgcttcggaagaggcacaagagaaggagccgacagcaccagcggttcatggcccggaaggccttgctgcaggagcaggggctgctgagcatgcctccagarccagggtcctccccactgcccacccctttcggggcrgcracagcaactgaagctgccagcagtgggaagcagtgtctgagggctggatstggcagtgccccatgcagcagaaggcctgctcccgggaaagcctcagggcccttgcccagcaagtgtgtggctatcgactgtgagatggtgggcacgggaccccgagggcgggtaagcgagctggcccgctgttccattgtgagctaccatggcratgtcctctatgacaagtacatyaggcctgagatgcccatcgctgactaccgtacccgctggagtggcatcactcggcagcacatgcgcaaggctgtccccttccaggtggcccagaaagagatccttaagctcctgaagggcaaggtggtggtggggcacgcgctgcacaacgacttccaggcgctcaagtatgtccaccctcggagccagacccgggatacsacctatgtcccaaacttcctcagcgagcccggcctccacacccgggcccgggtctctctaaaggacctggccctgcagctgctgcacaagaagatccaggtgggccagcacgggcactcatcagtagaagatgccacgacagccatggagctctaccggctggtggaggtgcagtgggaacagcaggaggcccgcagcctctggacctgccccgaggacagagaacctgacagcagcacagacatggaacagtacatggaggaccaggatttccccagtccacccagtactgggctcttaagcaaaagtctgagaaacaagacagtggtttgaattctggggcctttgtg

SEQ ID NO: 5203 - DNA, 2956 bp, Homo sapiens
agaccggaagagacacgcggggcttcaggctgctgccccattggaagattactccccaggcttcccttgccccaagcagtgagctgactggaatggtaccccgggaggcccctgagtctgctcagtgcctgtgccyttccctcaccatcccaaatgccaaggatgtgcttcggaagaggcacaagagaaggagccgacagcaccagcggttcatggcccggaaggccttgctgcaggagcaggggctgctgagcatgcctccagarccagggtcctccccactgcccacccctttcggggcrgcracagcaactgaagctgccagcagtgggaagcagtgtctgagggctggatstggcagtgccccatgcagcagaaggcctgctcccgggaaagcctcagggcccttgcccagcaagtgtgtggctatcgactgtgagatggtgggcacgggaccccgagggcgggtaagcgagctggcccgctgttccattgtgagctaccatggcratgtcctctatgacaagtacatyaggcctgagatgcccatcgctgactaccgtacccgctggagtggcatcactcggcagcacatgcgcaaggctgtccccttccaggtggcccagaaagagatccttaagctcctgaagggcaaggtggtggtggggcacgcgctgcacaacgacttccaggcgctcaagtatgtccaccctcggagccagacccgggatacsacctatgtcccaaacttcctcagcgagcccggcctccacacccgggcccgggtctctctaaaggacctggccctgcagctgctgcacaagaagatccaggtgggccagcacgggcactcatcagtagaagatgccacgacagccatggagctctaccggctggtggaggtgcagtgggaacagcaggaggcccgcagcctctggacctgccccgaggacagagaacctgacagcagcacagacatggaacagtacatggaggaccagtactggcccgatgacctggcccacggcagcagaggaggagccagggaggcacaggacagaaggaattgagaagggggcggggctccctggctgggcttcyggtgtggccggtaggaagtgggggccaggagagcagcgggcactccttcctgggcagggtggggcaggatgcagtgagccagccccagggccagaggagtwggggtcatctgttaccttgacaccctctgcacacagcatagccctctctctctccagggctgttggttctttctyctgactcctgtggttttgctaatggcactttacagactccatggagatgtcaggtggaccatcttctagggcccagcaggagtagggaatgtgccaacagactgcccaggttgccgtggccttccccaccccccagatctcctgagtcatcatgctgtgctaatgaaagggatcatatcatcctctctggggatggtgggtgggggtgtcaatatcctggagctcccttaccccaactcaatgacttgggggtaaagttctcttccttttgttgcctacctcttcctccactcatttgggttcagaataaacatgycctgaagttaaagaggagttaagtcctaaaggaggcatttcttccccacctccctgacctggaactctggctacagccattgtaggaactccgtgcctggcctgtcagctccctgctaggctacagtggaatagcagagcccacaggcttctcgtggggagttggctccttaacatttcttggcaacagaaagccccaggcacagctcagggaggagggaaggcaggtaagctttggacgagaactggcatatttattttgacccaaatcagggatttccccagtccacccagtactgggctcttaagcaaaagtctgagaaacaagaccctggggctggggcagggcattggcagttatgcagtggccctgaacctggtctggtgcccccgaacctggtctgatgccccctcagctctttgacaatcactgtggctgttgggttttctcctatttctaaaaatgttctcttctttcctaagtgacagttttgaagtattggataaccaagagctcaggtcacacagaccttggagccccatctttgcttgcagcttagctttgagatactaagcaagcgagggacttcactcttgagsctgttttttcctcatctgtaaagtggggatagtggtacggcctacctcatagggttgtaatgagcactaaatgtgaagtgcttggcacagtgcctggcacatggtgagccacagctactgtgagtttctgtttatcccccttttttttttttaagcccattgtttattctttgagaatttgttgtaacttcttcaggataacacctgagtccacaggctgagcagctgtggcccagacagaactgctccggcttggctgttccagcaggtggggcgctggcctcggtgagggcacagcagcaaggttcacggatatccgtgtgtcttgtctgtggccaccaggcacaggtttggcttccggtcagtgtcccgacactgtgcgggaggtgacaacagagcaaagcagcgcaggggtcagggaggtrsagacactgctgaaatcacactaccccaccctcagctgaagccccacgttccacaaacttggggtcatagattgtccagtcactggctccctccctgtcagcacagcacagaggaaggggctaactgaatcttttaccacttctggcctggctccagaactttgttctagattccttaaaagtcggtagctgatgtcaaactcaattgagcagtagctttgatcccttggtctgggggtcgaaggaagatggygctgttatcagcggggaaatgtactatttaagatcagctttgttgtaaaaccatttgttctagaataaaactcaattggaaacgtg

SEQ ID NO: 5204 - DNA, 3029 bp, Homo sapiens
gctgctgccccattggaagattactccccaggcttcccttgccccaagcagtgagctgactggaatggtaccccgggaggcccctgagtctgctcagtgcctgtgccyttccctcaccatcccaaatgccaaggatgtgcttcggaagaggcacaagagaaggagccgacagcaccagcggttcatggcccggaaggccttgctgcaggagcaggggctgctgagcatgcctccagarccagggtcctccccactgcccacccctttcggggcrgcracagcaactgaagctgccagcagtgggaagcagtgtctgagggctggatstggcagtgccccatgcagcagaaggcctgctcccgggaaagcctcagggcccttgcccagcaagtgtgtggctatcgactgtgagatggtgggcacgggaccccgagggcgggtaagcgagctggcccgctgttccattgtgagctaccatggcratgtcctctatgacaagtacatyaggcctgagatgcccatcgctgactaccgtacccgctggagtggcatcactcggcagcacatgcgcaaggctgtccccttccaggtggcccagaaagagatccttaagctcctgaagggcaaggtggtggtggggcacgcgctgcacaacgacttccaggcgctcaagtatgtccaccctcggagccagacccgggatacsacctatgtcccaaacttcctcagcgagcccggcctccacacccgggcccgggtctctctaaaggacctggccctgcagctgctgcacaagaagatccaggtgggccagcacgggcactcatcagtagaagatgccacgacagccatggagctctaccggctggtggaggtgcagtgggaacagcaggaggcccgcagcctctggacctgccccgaggacagagaacctgacagcagcacagacatggaacagtacatggaggaccagtactggcccgatgacctggcccacggcagcagaggaggagccagggaggcacaggacagaaggaattgagaagggggcggggctccctggctgggcttcyggtgtggccggtaggaagtgggggccaggagagcagcgggcactccttcctgggcagggtggggcaggatgcagtgagccagccccagggccagaggagtwggggtcatctgttaccttgacaccctctgcacacagcatagccctctctctctccagggctgttggttctttctyctgactcctgtggttttgctaatggcactttacagactccatggagatgtcaggtggaccatcttctagggcccagcaggagtagggaatgtgccaacagactgcccaggttgccgtggccttccccaccccccagatctcctgagtcatcatgctgtgctaatgaaagggatcatatcatcctctctggggatggtgggtgggggtgtcaatatcctggagctcccttaccccaactcaatgacttgggggtaaagttctcttccttttgttgcctacctcttcctccactcatttgggttcagaataaacatgycctgaagttaaagaggagttaagtcctaaaggaggcatttcttccccacctccctgacctggaactctggctacagccattgtaggaactccgtgcctggcctgtcagctccctgctaggctacagtggaatagcagagcccacaggcttctcgtggggagttggctccttaacatttcttggcaacagaaagccccaggcacagctcagggaggagggaaggcaggtaagctttggacgagaactggcatatttattttgacccaaatcagggatttccccagtccacccagtactgggctcttaagcaaaagtctgagaaacaagacagtggtttgaattctggggcctttgtgtaggattgtgcctgacctttatttatttattaacagcagggccactcgtctagggcagtggagtctgcgtgtctcctggggctggggcagggcattggcagttatgcagtggccctgaacctggtctggtgcccccgaacctggtctgatgccccctcagctctttgacaatcactgtggctgttgggttttctcctatttctaaaaatgttctcttctttcctaagtgacagttttgaagtattggataaccaagagctcaggtcacacagaccttggagccccatctttgcttgcagcttagctttgagatactaagcaagcgagggacttcactcttgagsctgttttttcctcatctgtaaagtggggatagtggtacggcctacctcatagggttgtaatgagcactaaatgtgaagtgcttggcacagtgcctggcacatggtgagccacagctactgtgagtttctgtttatcccccttttttttttttaagcccattgtttattctttgagaatttgttgtaacttcttcaggataacacctgagtccacaggctgagcagctgtggcccagacagaactgctccggcttggctgttccagcaggtggggcgctggcctcggtgagggcacagcagcaaggttcacggatatccgtgtgtcttgtctgtggccaccaggcacaggtttggcttccggtcagtgtcccgacactgtgcgggaggtgacaacagagcaaagcagcgcaggggtcagggaggtrsagacactgctgaaatcacactaccccaccctcagctgaagccccacgttccacaaacttggggtcatagattgtccagtcactggctccctccctgtcagcacagcacagaggaaggggctaactgaatcttttaccacttctggcctggctccagaactttgttctagattccttaaaagtcggtagctgatgtcaaactcaattgagcagtagctttgatcccttggtctgggggtcgaaggaagatggygctgttatcagcggggaaatgtactatttaagatcagctttgttgtaaaaccatttgttctagaataaaactcaattggaaacgtg

SEQ ID NO: 5205 - DNA, 3057 bp, Homo sapiens
agaccggaagagacacgcggggcttcaggctgctgccccattggaagattactccccaggcttcccttgccccaagcagtgagctgactggaatggtaccccgggaggcccctgagtctgctcagtgcctgtgccyttccctcaccatcccaaatgccaaggatgtgcttcggaagaggcacaagagaaggagccgacagcaccagcggttcatggcccggaaggccttgctgcaggagcaggggctgctgagcatgcctccagarccagggtcctccccactgcccacccctttcggggcrgcracagcaactgaagctgccagcagtgggaagcagtgtctgagggctggatstggcagtgccccatgcagcagaaggcctgctcccgggaaagcctcagggcccttgcccagcaagtgtgtggctatcgactgtgagatggtgggcacgggaccccgagggcgggtaagcgagctggcccgctgttccattgtgagctaccatggcratgtcctctatgacaagtacatyaggcctgagatgcccatcgctgactaccgtacccgctggagtggcatcactcggcagcacatgcgcaaggctgtccccttccaggtggcccagaaagagatccttaagctcctgaagggcaaggtggtggtggggcacgcgctgcacaacgacttccaggcgctcaagtatgtccaccctcggagccagacccgggatacsacctatgtcccaaacttcctcagcgagcccggcctccacacccgggcccgggtctctctaaaggacctggccctgcagctgctgcacaagaagatccaggtgggccagcacgggcactcatcagtagaagatgccacgacagccatggagctctaccggctggtggaggtgcagtgggaacagcaggaggcccgcagcctctggacctgccccgaggacagagaacctgacagcagcacagacatggaacagtacatggaggaccagtactggcccgatgacctggcccacggcagcagaggaggagccagggaggcacaggacagaaggaattgagaagggggcggggctccctggctgggcttcyggtgtggccggtaggaagtgggggccaggagagcagcgggcactccttcctgggcagggtggggcaggatgcagtgagccagccccagggccagaggagtwggggtcatctgttaccttgacaccctctgcacacagcatagccctctctctctccagggctgttggttctttctyctgactcctgtggttttgctaatggcactttacagactccatggagatgtcaggtggaccatcttctagggcccagcaggagtagggaatgtgccaacagactgcccaggttgccgtggccttccccaccccccagatctcctgagtcatcatgctgtgctaatgaaagggatcatatcatcctctctggggatggtgggtgggggtgtcaatatcctggagctcccttaccccaactcaatgacttgggggtaaagttctcttccttttgttgcctacctcttcctccactcatttgggttcagaataaacatgycctgaagttaaagaggagttaagtcctaaaggaggcatttcttccccacctccctgacctggaactctggctacagccattgtaggaactccgtgcctggcctgtcagctccctgctaggctacagtggaatagcagagcccacaggcttctcgtggggagttggctccttaacatttcttggcaacagaaagccccaggcacagctcagggaggagggaaggcaggtaagctttggacgagaactggcatatttattttgacccaaatcagggatttccccagtccacccagtactgggctcttaagcaaaagtctgagaaacaagacagtggtttgaattctggggcctttgtgtaggattgtgcctgacctttatttatttattaacagcagggccactcgtctagggcagtggagtctgcgtgtctcctggggctggggcagggcattggcagttatgcagtggccctgaacctggtctggtgcccccgaacctggtctgatgccccctcagctctttgacaatcactgtggctgttgggttttctcctatttctaaaaatgttctcttctttcctaagtgacagttttgaagtattggataaccaagagctcaggtcacacagaccttggagccccatctttgcttgcagcttagctttgagatactaagcaagcgagggacttcactcttgagsctgttttttcctcatctgtaaagtggggatagtggtacggcctacctcatagggttgtaatgagcactaaatgtgaagtgcttggcacagtgcctggcacatggtgagccacagctactgtgagtttctgtttatcccccttttttttttttaagcccattgtttattctttgagaatttgttgtaacttcttcaggataacacctgagtccacaggctgagcagctgtggcccagacagaactgctccggcttggctgttccagcaggtggggcgctggcctcggtgagggcacagcagcaaggttcacggatatccgtgtgtcttgtctgtggccaccaggcacaggtttggcttccggtcagtgtcccgacactgtgcgggaggtgacaacagagcaaagcagcgcaggggtcagggaggtrsagacactgctgaaatcacactaccccaccctcagctgaagccccacgttccacaaacttggggtcatagattgtccagtcactggctccctccctgtcagcacagcacagaggaaggggctaactgaatcttttaccacttctggcctggctccagaactttgttctagattccttaaaagtcggtagctgatgtcaaactcaattgagcagtagctttgatcccttggtctgggggtcgaaggaagatggygctgttatcagcggggaaatgtactatttaagatcagctttgttgtaaaaccatttgttctagaataaaactcaattggaaacgtg

SEQ ID NO: 5206 - DNA, 4401 bp, Homo sapiens
tgtttctgcactctacattgttttaatgaaaataaaatgttattttaagaaaaaaggttttcttctgattttctgcacaaccagacgtttgtttgtttgctttaaaatgtttcaacaaaatcctggtttgtttcgaaataygttggattagcatttaacacctcatcggtcactaaagcccagtcagttcaccagccccaacacagcctcggctaaaagaacatcagagcaaacagagctgggcctttaaaagtggcaaacaaatgccacacaccgcctaaagaaggggggttgggggaggggagggttaaggcgaacttgggtccaaatgagtttgaagggaatacaaagaacgaaaagtcagcacaagttttcctaaagctagctcgcgaacgcaagcgtcgcgaacaagggcttttgtgcatgctaattgcgccattggtgcgcaaaagttccgacgcgaagkgtgaactctcaacagaaggaaacatgagacaactgaagtgccctggtttatgtgccctgctcctcctccgctgccgcctccccttctttctccttcctcccgccgagcccgctgttgcagcttgtttgcactggggcttatccggagcggaaattcctttccgtttttgtgaatgacaaactcattaacaattcatcaacacaacctgttccagccggcccgtccccacggcaacagccccttccgcagcacgctcattggctggcccggagaatgtatccattgagacgctcgctgtttgtatccattgaggagctgcctcgcgcagggggtgtgcgaggctgagtccaagagatagcaaatcgagtcttaaataatccggggagaaagacgcccgggtagatttgaggtgcagccttggagggagggattagaagccgctagacttyttttcctcccctctcagtagcacggagtccgaattaattggatttcattcactggggaggaacaaaaactatctgggcagcttcattgagagagattcattgacactaagagccagcggctgcagctgggtgcagagagaacctccggctttacttctgtctcgtctgccccaaccgctagcctcggcttgggtaaggcgaggcggaattaaaccccgctccgagagcrgcagcttcgcgcgcggtgcgctcggcctatgcctgccccgaggggcgtctggtaggcaccccgccctctcccgcagctcgacccccatgatagatacgctcagacccgtgcccttcgcgtcggaaatggcgatcagcaagacggtggcgtggctcaacgagcagctggagctgggcaacgagcggctgctgctgatggactgccggccgcaggagctatacgagtcgtcgcacatcgagtcggccatcaacgtggccatcccgggcatcatgctgcggcgcctgcagaagggtaacctgccggtgcgcgcgctcttcacgcgcggcgaggaccgggaccgcttcayccggcgctgtggcaccgacacagtggtgctctacgacgagagcagcagcgactggaacgagaatacgggcggcgagtcgktgctcgggctgctgctcaagaagctcaaggacgagggctgccgggcgttctacctggaaggtggcttcagtaagttccaagccgagttckccctgcattgcgagaccaatctagacggctcgtgtagcagcagctcgccgccgttgccagtgctggggctcgggggcctgcggatcagctctgactcttcctcggacatcgagtctgaccttgaccgagaccccaatagtgcaacagactcggatggtagtccgctgtccaacagccagccttccttcccagtggagatcttgcccttcctctacttgggctgtgccaaagactccaccaacttggacgtgttggaggaattcggcatcaagtacatcttgaacgtcacccccaatttgccgaatctctttgagaacgcaggagagtttaaatacaagcaaatccccatctcggatcactggagccaaaacctgtcccagtttttccctgaggccatttctttcatagatgaagcccggggcaagaactgtggtgtcttggtacattgcttggctggcattagccgckcagtcactgtgactgtggcttaccttatgcagaagctcaatctgtcgatgaacgaygcctatgacattgtcaaaatgaaaaaatccaacatatcccctaacttcaacttcatgggtcagctgctggacttcgagaggacgctgggactcagcagcccatgtgacaacagggttccagcacagcagctgtattttaccaccccttccaaccagaatgtataccaggtggactctctgcaatctacgtgaaagaccccacacccctccttgctggaatgtgtctggcccttcagcagtttctcttggcagcatcagctgggctgctttctttgtgtgtggccccaggtgtcaaaatgacaccagctgtctgtactagacaaggttaccaagtgcggaattggttaatactaacagagagatttgctccattctctttggaataacaggacatgctgtatagatacaggcagtaggtttgctctgtacccatgtgtacagcctacccatgcagggactgggattcgaggacttccaggcgcatagggtagraccaaatgatagggtaggagcatgtgttctttagggccttgtaaggctgtttccttttgcatctggaactgactatataattgtcttcaatgaagactaattcaattttgcatatagaggagccaaagagagatttcagctctgtatttgtggtatcagtttggaaaaraaaatctgatactccatttgattattgtaaatatttgatcttgaatcacttgacagtgtttgtttgaattgtgtttgttttttcctttgatgggcttaaaagaaattatccaaagggagaaagagcagtatgccacttcttaaaacagaacaaaacaaaaaaagaaaattgtgctctkttstaatccaaagggkakatttgcagcatgcttgactttaccaattctgatgacatctttacggacactattatcactaagaccttgttatggcgaastctttagtctttttcatgtattttcctcatgattttttctctttatgtagtttgastatgccttacctttgtaaatatttttgcttgtgttgtcgcaaaggggataatctgggaaagacaccaaatcatgggctcactttaaaaaaaraaagaataaaaaaaccttcagctgtgctaaacagtatattacctctgtataaaattcttcagggagtgtcacctcaaatgcaatactttgggttggtttctttcctttaaaaaaatttgtataaaactggaagtgtgtgtgtgtgagcatgggtacccatttgataagagaaatgcatttgattgtgaagaagggagagttaaattctccattatgttcgtggtgtaaagtttwgagctggaatttattataagaatgtaaaaccttaaattattaataaataactattttggctattgaatgtgtgtttttaaaaactcagttatacctatgtgtgaagtgacacattttagaactttttcattcagggattgattttgacttgtaggcatagtagggcaaggttcttttaagcttttcctagaaygtttttcagcagcagtttatgaaattcatcgtttgccacgaataaagatgacatcctagaatggaccgactgtaccgtgtatatgaacaatacctcttatgagtatagttccggcttaagattttaaagcccctgaagaaaaatgaacctatagagcatagcttgctgaggaatacaatttggatattaaccacagagaggtgtagcagaataccaagatgacagccacatgttaacctcctccctatccttcactgtcaggatcttctgctytataatgctgagataatgccaaagaggaagtagggataattctttttccagtctgttgtcatgggcaattctacctgcagatatcctagtgtgagaatgctgaatccagaatgatgtctccactttttcccctagcatgcgcatggcaaggcatatctaagcttcctcacygtgtcaggatayggctttagaattttacattggcacttaggaggcaactttgtcatccctgttgtaatgtgcttttttgtttaactggcttgggatgtgggtcagaaacccttattgaaacttgtggggattattttagtttcttttcaagctaaagactttatatcttgccatttttcttgggacctaccctctccttacctcaaatgtaaaaatacacaaaccaaaataaaaggcaggtgtatggaatcaaaagaacta

SEQ ID NO: 5207 - DNA, 3516 bp, Homo sapiens
tgtttctgcactctacattgttttaatgaaaataaaatgttattttaagaaaaaaggttttcttctgattttctgcacaaccagacgtttgtttgtttgctttaaaatgtttcaacaaaatcctggtttgtttcgaaataygttggattagcatttaacacctcatcggtcactaaagcccagtcagttcaccagccccaacacagcctcggctaaaagaacatcagagcaaacagagctgggcctttaaaagtggcaaacaaatgccacacaccgcctaaagaaggggggttgggggaggggagggttaaggcgaacttgggtccaaatgagtttgaagggaatacaaagaacgaaaagtcagcacaagttttcctaaagctagctcgcgaacgcaagcgtcgcgaacaagggcttttgtgcatgctaattgcgccattggtgcgcaaaagttccgacgcgaagkgtgaactctcaacagaaggaaacatgagacaactgaagtgccctggtttatgtgccctgctcctcctccgctgccgcctccccttctttctccttcctcccgccgagcccgctgttgcagcttgtttgcactggggcttatccggagcggaaattcctttccgtttttgtgaatgacaaactcattaacaattcatcaacacaacctgttccagccggcccgtccccacggcaacagccccttccgcagcacgctcattggctggcccggagaatgtatccattgagacgctcgctgtttgtatccattgaggagctgcctcgcgcagggggtgtgcgaggctgagtccaagagatagcaaatcgagtcttaaataatccggggagaaagacgcccgggtagatttgaggtgcagccttggagggagggattagaagccgctagacttyttttcctcccctctcagtagcacggagtccgaattaattggatttcattcactggggaggaacaaaaactatctgggcagcttcattgagagagattcattgacactaagagccagcggctgcagctgggtgcagagagaacctccggctttacttctgtctcgtctgccccaaccgctagcctcggcttgggtaaggcgaggcggaattaaaccccgctccgagagcrgcagcttcgcgcgcggtgcgctcggcctatgcctgccccgaggggcgtctggtaggcaccccgccctctcccgcagctcgacccccatgatagatacgctcagacccgtgcccttcgcgtcggaaatggcgatcagcaagacggtggcgtggctcaacgagcagctggagctgggcaacgagcggctgctgctgatggactgccggccgcaggagctatacgagtcgtcgcacatcgagtcggccatcaacgtggccatcccgggcatcatgctgcggcgcctgcagaagggtaacctgccggtgcgcgcgctcttcacgcgcggcgaggaccgggaccgcttcayccggcgctgtggcaccgacacagtggtgctctacgacgagagcagcagcgactggaacgagaatacgggcggcgagtcgktgctcgggctgctgctcaagaagctcaaggacgagggctgccgggcgttctacctggaaggtggcttcagtaagttccaagccgagttckccctgcattgcgagaccaatctagacggctcgtgtagcagcagctcgccgccgttgccagtgctggggctcgggggcctgcggatcagctctgactcttcctcggacatcgagtctgaccttgaccgagaccccaatagtgcaacagactcggatggtagtccgctgtccaacagccagccttccttcccagtggagatcttgcccttcctctacttgggctgtgccaaagactccaccaacttggacgtgttggaggaattcggcatcaagtacatcttgaacgtcacccccaatttgccgaatctctttgagaacgcaggagagtttaaatacaagcaaatccccatctcggatcactggagccaaaacctgtcccagtttttccctgaggccatttctttcatagatgaagcccggggcaagaactgtggtgtcttggtacattgcttggctggcattagccgckcagtcactgtgactgtggcttaccttatgcagaagctcaatctgtcgatgaacgaygcctatgacattgtcaaaatgaaaaaatccaacatatcccctaacttcaacttcatgggtcagctgctggacttcgagaggacgctgggactcagcagcccatgtgacaacagggttccagcacagcagctgtattttaccaccccttccaaccagaatgtataccaggtggactctctgcaatctacgtgaaagaccccacacccctccttgctggaatgtgtctggcccttcagcagtttctcttggcagcatcagctgggctgctttctttgtgtgtggccccaggttaatactaacagagagatttgctccattctctttggaataacaggacatgctgtatagatacaggcagtaggtttgctctgtacccatgtgtacagcctacccatgcagggactgggattcgaggacttccaggcgcatagggtagraccaaatgatagggtaggagcatgtgttctttagggccttgtaaggctgtttccttttgcatctggaactgactatataattgtcttcaatgaagactaattcaattttgcatatagaggagccaaagagagatttcagctctgtatttgtggtatcagtttggaaaaraaaatctgatactccatttgattattgtaaatatttgatcttgaatcacttgacagtgtttgtttgaattgtgtttgttttttcctttgatgggcttaaaagaaattatccaaagggagaaagagcagtatgccacttcttaaaacagaacaaaacaaaaaaagaaaattgtgctctkttstaatccaaagggkakatttgcagcatgcttgactttaccaattctgatgacatctttacggacactattatcactaagaccttgttatggcgaastctttagtctttttcatgtattttcctcatgattttttctctttatgtagtttgastatgccttacctttgtaaatatttttgcttgtgttgtcgcaaaggggataatctgggaaagacaccaaatcatgggctcactttaaaaaaaraaagaataaaaaaaccttcagctgtgctaaacagtatattacctctgtataaaattcttcagggagtgtcacctcaaatgcaatactttgggttggtttctttcctttaaaaaaatttgtataaaactggaagtgtgtgtgtgtgagcatgggtacccatttgataagagaaatgcatttgattgtgaagaagggagagttaaattctccattatgttcgtggtgtaaagtttwgagctggaatttattataagaatgtaaaaccttaaattattaataaataactattttggctattgaat

SEQ ID NO: 5208 - DNA, 3963 bp, Homo sapiens
tgtttctgcactctacattgttttaatgaaaataaaatgttattttaagaaaaaaggttttcttctgattttctgcacaaccagacgtttgtttgtttgctttaaaatgtttcaacaaaatcctggtttgtttcgaaataygttggattagcatttaacacctcatcggtcactaaagcccagtcagttcaccagccccaacacagcctcggctaaaagaacatcagagcaaacagagctgggcctttaaaagtggcaaacaaatgccacacaccgcctaaagaaggggggttgggggaggggagggttaaggcgaacttgggtccaaatgagtttgaagggaatacaaagaacgaaaagtcagcacaagttttcctaaagctagctcgcgaacgcaagcgtcgcgaacaagggcttttgtgcatgctaattgcgccattggtgcgcaaaagttccgacgcgaagkgtgaactctcaacagaaggaaacatgagacaactgaagtgccctggtttatgtgccctgctcctcctccgctgccgcctccccttctttctccttcctcccgccgagcccgctgttgcagcttgtttgcactggggcttatccggagcggaaattcctttccgtttttgtgaatgacaaactcattaacaattcatcaacacaacctgttccagccggcccgtccccacggcaacagccccttccgcagcacgctcattggctggcccggagaatgtatccattgagacgctcgctgtttgtatccattgaggagctgcctcgcgcagggggtgtgcgaggctgagtccaagagatagcaaatcgagtcttaaataatccggggagaaagacgcccgggtagatttgaggtgcagccttggagggagggattagaagccgctagacttyttttcctcccctctcagtagcacggagtccgaattaattggatttcattcactggggaggaacaaaaactatctgggcagcttcattgagagagattcattgacactaagagccagcggctgcagctgggtgcagagagaacctccggctttacttctgtctcgtctgccccaaccgctagcctcggcttgggtaaggcgaggcggaattaaaccccgctccgagagcrgcagcttcgcgcgcggtgcgctcggcctatgcctgccccgaggggcgtctggtaggcaccccgccctctcccgcagctcgacccccatgatagatacgctcagacccgtgcccttcgcgtcggaaatggcgatcagcaagacggtggcgtggctcaacgagcagctggagctgggcaacgagcggctgctgctgatggactgccggccgcaggagctatacgagtcgtcgcacatcgagtcggccatcaacgtggccatcccgggcatcatgctgcggcgcctgcagaagggtaacctgccggtgcgcgcgctcttcacgcgcggcgaggaccgggaccgcttcayccggcgctgtggcaccgacacagtggtgctctacgacgagagcagcagcgactggaacgagaatacgggcggcgagtcgktgctcgggctgctgctcaagaagctcaaggacgagggctgccgggcgttctacctggaagatgaagcccggggcaagaactgtggtgtcttggtacattgcttggctggcattagccgckcagtcactgtgactgtggcttaccttatgcagaagctcaatctgtcgatgaacgaygcctatgacattgtcaaaatgaaaaaatccaacatatcccctaacttcaacttcatgggtcagctgctggacttcgagaggacgctgggactcagcagcccatgtgacaacagggttccagcacagcagctgtattttaccaccccttccaaccagaatgtataccaggtggactctctgcaatctacgtgaaagaccccacacccctccttgctggaatgtgtctggcccttcagcagtttctcttggcagcatcagctgggctgctttctttgtgtgtggccccaggtgtcaaaatgacaccagctgtctgtactagacaaggttaccaagtgcggaattggttaatactaacagagagatttgctccattctctttggaataacaggacatgctgtatagatacaggcagtaggtttgctctgtacccatgtgtacagcctacccatgcagggactgggattcgaggacttccaggcgcatagggtagraccaaatgatagggtaggagcatgtgttctttagggccttgtaaggctgtttccttttgcatctggaactgactatataattgtcttcaatgaagactaattcaattttgcatatagaggagccaaagagagatttcagctctgtatttgtggtatcagtttggaaaaraaaatctgatactccatttgattattgtaaatatttgatcttgaatcacttgacagtgtttgtttgaattgtgtttgttttttcctttgatgggcttaaaagaaattatccaaagggagaaagagcagtatgccacttcttaaaacagaacaaaacaaaaaaagaaaattgtgctctkttstaatccaaagggkakatttgcagcatgcttgactttaccaattctgatgacatctttacggacactattatcactaagaccttgttatggcgaastctttagtctttttcatgtattttcctcatgattttttctctttatgtagtttgastatgccttacctttgtaaatatttttgcttgtgttgtcgcaaaggggataatctgggaaagacaccaaatcatgggctcactttaaaaaaaraaagaataaaaaaaccttcagctgtgctaaacagtatattacctctgtataaaattcttcagggagtgtcacctcaaatgcaatactttgggttggtttctttcctttaaaaaaatttgtataaaactggaagtgtgtgtgtgtgagcatgggtacccatttgataagagaaatgcatttgattgtgaagaagggagagttaaattctccattatgttcgtggtgtaaagtttwgagctggaatttattataagaatgtaaaaccttaaattattaataaataactattttggctattgaatgtgtgtttttaaaaactcagttatacctatgtgtgaagtgacacattttagaactttttcattcagggattgattttgacttgtaggcatagtagggcaaggttcttttaagcttttcctagaaygtttttcagcagcagtttatgaaattcatcgtttgccacgaataaagatgacatcctagaatggaccgactgtaccgtgtatatgaacaatacctcttatgagtatagttccggcttaagattttaaagcccctgaagaaaaatgaacctatagagcatagcttgctgaggaatacaatttggatattaaccacagagaggtgtagcagaataccaagatgacagccacatgttaacctcctccctatccttcactgtcaggatcttctgctytataatgctgagataatgccaaagaggaagtagggataattctttttccagtctgttgtcatgggcaattctacctgcagatatcctagtgtgagaatgctgaatccagaatgatgtctccactttttcccctagcatgcgcatggcaaggcatatctaagcttcctcacygtgtcaggatayggctttagaattttacattggcacttaggaggcaactttgtcatccctgttgtaatgtgcttttttgtttaactggcttgggatgtgggtcagaaacccttattgaaacttgtggggattattttagtttcttttcaagctaaagactttatatcttgccatttttcttgggacctaccctctccttacctcaaatgtaaaaatacacaaaccaaaataaaaggcaggtgtatggaatcaaaagaacta

SEQ ID NO: 5209 - DNA, 2670 bp, Homo sapiens
ctcggggacgcgcaggcgggtgggtttcagcgcctgggcccctctccccgccgcggggcgcacggaaaaaccggrgaacccgcgggttttgtcctggcgagccacatcccgtgacaagaggaaacaagaacctcagttcaggggaaacacagcaaggaaatgtgagccccaggctgcagaaggaagagtcagtgaatggctgcggtgtgacaacatgcaccaccagtggcttctgctggccgcatgcttttgggtgattttcatgttcatgktggctagcaagttcatcacgttgacctttaaagacccagatgtgtacagtgccaaacaggagtttctgttcctgacaaccatgccggaagtgaggaagttgccagaagagaagcacattcctgaggaaytgaagccaactgggaaggagcttccagacagccagctcgttcagcccctggtctacatggagcgcctggaactcatcagaaacgtctgcagggatgatgccctgaagaatctctcgcacactcctgtctccaagtttgtcctggaccgaatatttgtctgtgacaagcacaagattcttttctgccagactcccaaagtgggcaacacccagtggaagaaagtgctgattgttctaaatggagcatttycttccattgaggagatccccgaaaacgtggtgcacgaccacgagaagaacggccttcctcggctctcttccttcagtgatgcagaaattcagaagcgattgaaaacatacttcaagttttttattgtaagagatcccttcgaaagacttatttctgcatttaaggataaatttgttcacaatccccggtttgagccttggtacaggcatgagattgctcctggcatcatcagaaaatacaggaggaaccggacagagacscgggggatccagtttgaagatttcgtgcgctacctcggygatccgaaccacagatggctagaccttcagtttgggraccacatcattcactgggtgacrtatgtagagctctgtgctccctgtgagataatgtacagtgtgattggacaccacgagaccctggaggacgatgcyccatacatcttaaaagaggctggcattgaccacctggtgtcatacccgactatccctccrggcattaccgtgtataacagaaccaaggtggagcactatttcctgggcatcagcaaacgagacatccgacgcctgtatgcccgtttcgaaggggactttaagctctttgggtaccagaaaccagactttttgctaaactaatgcataagacctatgaattcaaatatctttattagacctggggctaaccaggtgaagatctgagcccagaaatgacccttcctccaccacacccctcctttgaggaygcccggggtctcccacaggcctgtgagttgcctcggcatatgacgcagaaccccaactgttacaacttagtttggatgtaagatgctctgaggaccctgcccacacccctgcgtgcattaggatgtcgctggcctttgctcacctcagaggggagaaaaggctaaagatttgcagtttgacagcccagcagggaggaagcatcacacagcgttargagccgttyccttcaggtgttaaggaaggggatgcccctgaggttctcctggctagtcrgggtggcttcacccatcactggtgggttgcaggaacagcacccaggactctgaggagggacagagaagcaagggggctgctgaaatcrcagagacttttgcagcatcagatctgaggagtaaaacggcacctctggccttcatcttggtgctgcgacaattgtggaggcaaagcattctttctgtgactattttgttcctgtagacagtcagcgatggccagagggtggtgtggtgtccagggrtccatctttccagaatccatgcctgtgtaatgctggtccatgcttctgaacctgtgtctgccaagcgcctatttcattcagcacaagacatacgattttagaaggtgaggggaggggaggctttttctacctgagaaggggagtgtctttgagggccttaaaaggaccatggcccaggaatgggggcgctggttgggcttggagctcakgctgctgtggatcccggcgcatcagttctgacttgccttacctgggtggacagcagtgaatctccacctgtcttctccagggagctcccatgttggggctgaagacgagcaggggcaacctgccagcatcacagaattcagtgtagtttatacatttcgattcctttcatctcagcaaaatgggcactgccagagccatttctgatcacaccaccatcctggaccatgtgactggaaggtgggtaaccaagttcaccagcaataaaacccagcgcccaggtagcctccagcagtgcggcttcctgkyaacaaggtaggccctggtgcagggcaagccgcagcgaccatttcagataccgtccacagccaggaccgctgagaactgggacagtttcctgggatgagtgccagcctgagcctgcatggtgccgccgagcccggggtggaggagggagccaggcttcgcttcaaggcggcctctaccttttctcagaatggtttcctgattgtgtcaatgtgaaagttaaataaaatttatgtgccaaacctga

SEQ ID NO: 5210 - DNA, 2944 bp, Homo sapiens
ggatccgggcctggggtcccgcggccggcccctccccactccccgcgacccgctggaacgcgcacggccggggacgcggcggggaccgcgcgggcaggcggcgcacggccggatagcgcgagggggccgcgtgaggcggtgcgacgttctgggccccaaagccggtctagcgcgcgggcgtcttccttacttccgctgccgccgccgccacatcccgggacccgacgggccgcggcgcggaggcctcggggcaaggtggggcgggcctcccgagctcccaggaccccgcgcgcttcgcccacaggcccggcgaagcccgacccgcgcggcgcccccagggccaggggaggagcctaaggacccggacgagcgccgctccagtaggtgacaagaggaaacaagaacctcagttcaggggaaacacagcaaggaaatgtgagccccaggctgcagaaggaagagtcagtgaatggctgcggtgtgacaacatgcaccaccagtggcttctgctggccgcatgcttttgggtgattttcatgttcatgktggctagcaagttcatcacgttgacctttaaagacccagatgtgtacagtgccaaacaggagtttctgttcctgacaaccatgccggaagtgaggaagttgccagaagagaagcacattcctgaggaaytgaagccaactgggaaggagcttccagacagccagctcgttcagcccctggtctacatggagcgcctggaactcatcagaaacgtctgcagggatgatgccctgaagaatctctcgcacactcctgtctccaagtttgtcctggaccgaatatttgtctgtgacaagcacaagattcttttctgccagactcccaaagtgggcaacacccagtggaagaaagtgctgattgttctaaatggagcatttycttccattgaggagatccccgaaaacgtggtgcacgaccacgagaagaacggccttcctcggctctcttccttcagtgatgcagaaattcagaagcgattgaaaacatacttcaagttttttattgtaagagatcccttcgaaagacttatttctgcatttaaggataaatttgttcacaatccccggtttgagccttggtacaggcatgagattgctcctggcatcatcagaaaatacaggaggaaccggacagagacscgggggatccagtttgaagatttcgtgcgctacctcggygatccgaaccacagatggctagaccttcagtttgggraccacatcattcactgggtgacrtatgtagagctctgtgctccctgtgagataatgtacagtgtgattggacaccacgagaccctggaggacgatgcyccatacatcttaaaagaggctggcattgaccacctggtgtcatacccgactatccctccrggcattaccgtgtataacagaaccaaggtggagcactatttcctgggcatcagcaaacgagacatccgacgcctgtatgcccgtttcgaaggggactttaagctctttgggtaccagaaaccagactttttgctaaactaatgcataagacctatgaattcaaatatctttattagacctggggctaaccaggtgaagatctgagcccagaaatgacccttcctccaccacacccctcctttgaggaygcccggggtctcccacaggcctgtgagttgcctcggcatatgacgcagaaccccaactgttacaacttagtttggatgtaagatgctctgaggaccctgcccacacccctgcgtgcattaggatgtcgctggcctttgctcacctcagaggggagaaaaggctaaagatttgcagtttgacagcccagcagggaggaagcatcacacagcgttargagccgttyccttcaggtgttaaggaaggggatgcccctgaggttctcctggctagtcrgggtggcttcacccatcactggtgggttgcaggaacagcacccaggactctgaggagggacagagaagcaagggggctgctgaaatcrcagagacttttgcagcatcagatctgaggagtaaaacggcacctctggccttcatcttggtgctgcgacaattgtggaggcaaagcattctttctgtgactattttgttcctgtagacagtcagcgatggccagagggtggtgtggtgtccagggrtccatctttccagaatccatgcctgtgtaatgctggtccatgcttctgaacctgtgtctgccaagcgcctatttcattcagcacaagacatacgattttagaaggtgaggggaggggaggctttttctacctgagaaggggagtgtctttgagggccttaaaaggaccatggcccaggaatgggggcgctggttgggcttggagctcakgctgctgtggatcccggcgcatcagttctgacttgccttacctgggtggacagcagtgaatctccacctgtcttctccagggagctcccatgttggggctgaagacgagcaggggcaacctgccagcatcacagaattcagtgtagtttatacatttcgattcctttcatctcagcaaaatgggcactgccagagccatttctgatcacaccaccatcctggaccatgtgactggaaggtgggtaaccaagttcaccagcaataaaacccagcgcccaggtagcctccagcagtgcggcttcctgkyaacaaggtaggccctggtgcagggcaagccgcagcgaccatttcagataccgtccacagccaggaccgctgagaactgggacagtttcctgggatgagtgccagcctgagcctgcatggtgccgccgagcccggggtggaggagggagccaggcttcgcttcaaggcggcctctaccttttctcagaatggtttcctgattgtgtcaatgtgaaagttaaataaaatttatgtgccaaacctga

SEQ ID NO: 5211 - DNA, 3029 bp, Homo sapiens
cgcggggcgcacggaaaaaccggrgaacccgcgggttttgtcctggcgagccacatcccggtgtgttttggcgacttgaagayctccctagttcgcgggagtagcgggaagagccttcctcgcgttaattatgcaataagaaggcgtccttgtgcgggatgctgtgacccgcggaattattgatattgtgcgagcctacaatttacttctttcatccttggctgagaatttgcgtttgtaattgtagatggagagaggaagaaagggttcagcttgggtccaaggagcatgcagaggaaggcagggaagaaggagcatgtgcagcttcggtgcgaggggagtcaggggtgggaatgcacgttccctgcctgaggggccccggggtgccctgagcctctgatcttcgctgtcaggaggcctgtccgaagttggaggttgaggcatgcagttctgcacttctggctgggaagtgacaagaggaaacaagaacctcagttcaggggaaacacagcaaggaaatgtgagccccaggctgcagaaggaagagtcagtgaatggctgcggtgtgacaacatgcaccaccagtggcttctgctggccgcatgcttttgggtgattttcatgttcatgktggctagcaagttcatcacgttgacctttaaagacccagatgtgtacagtgccaaacaggagtttctgttcctgacaaccatgccggaagtgaggaagttgccagaagagaagcacattcctgaggaaytgaagccaactgggaaggagcttccagacagccagctcgttcagcccctggtctacatggagcgcctggaactcatcagaaacgtctgcagggatgatgccctgaagaatctctcgcacactcctgtctccaagtttgtcctggaccgaatatttgtctgtgacaagcacaagattcttttctgccagactcccaaagtgggcaacacccagtggaagaaagtgctgattgttctaaatggagcatttycttccattgaggagatccccgaaaacgtggtgcacgaccacgagaagaacggccttcctcggctctcttccttcagtgatgcagaaattcagaagcgattgaaaacatacttcaagttttttattgtaagagatcccttcgaaagacttatttctgcatttaaggataaatttgttcacaatccccggtttgagccttggtacaggcatgagattgctcctggcatcatcagaaaatacaggaggaaccggacagagacscgggggatccagtttgaagatttcgtgcgctacctcggygatccgaaccacagatggctagaccttcagtttgggraccacatcattcactgggtgacrtatgtagagctctgtgctccctgtgagataatgtacagtgtgattggacaccacgagaccctggaggacgatgcyccatacatcttaaaagaggctggcattgaccacctggtgtcatacccgactatccctccrggcattaccgtgtataacagaaccaaggtggagcactatttcctgggcatcagcaaacgagacatccgacgcctgtatgcccgtttcgaaggggactttaagctctttgggtaccagaaaccagactttttgctaaactaatgcataagacctatgaattcaaatatctttattagacctggggctaaccaggtgaagatctgagcccagaaatgacccttcctccaccacacccctcctttgaggaygcccggggtctcccacaggcctgtgagttgcctcggcatatgacgcagaaccccaactgttacaacttagtttggatgtaagatgctctgaggaccctgcccacacccctgcgtgcattaggatgtcgctggcctttgctcacctcagaggggagaaaaggctaaagatttgcagtttgacagcccagcagggaggaagcatcacacagcgttargagccgttyccttcaggtgttaaggaaggggatgcccctgaggttctcctggctagtcrgggtggcttcacccatcactggtgggttgcaggaacagcacccaggactctgaggagggacagagaagcaagggggctgctgaaatcrcagagacttttgcagcatcagatctgaggagtaaaacggcacctctggccttcatcttggtgctgcgacaattgtggaggcaaagcattctttctgtgactattttgttcctgtagacagtcagcgatggccagagggtggtgtggtgtccagggrtccatctttccagaatccatgcctgtgtaatgctggtccatgcttctgaacctgtgtctgccaagcgcctatttcattcagcacaagacatacgattttagaaggtgaggggaggggaggctttttctacctgagaaggggagtgtctttgagggccttaaaaggaccatggcccaggaatgggggcgctggttgggcttggagctcakgctgctgtggatcccggcgcatcagttctgacttgccttacctgggtggacagcagtgaatctccacctgtcttctccagggagctcccatgttggggctgaagacgagcaggggcaacctgccagcatcacagaattcagtgtagtttatacatttcgattcctttcatctcagcaaaatgggcactgccagagccatttctgatcacaccaccatcctggaccatgtgactggaaggtgggtaaccaagttcaccagcaataaaacccagcgcccaggtagcctccagcagtgcggcttcctgkyaacaaggtaggccctggtgcagggcaagccgcagcgaccatttcagataccgtccacagccaggaccgctgagaactgggacagtttcctgggatgagtgccagcctgagcctgcatggtgccgccgagcccggggtggaggagggagccaggcttcgcttcaaggcggcctctaccttttctcagaatggtttcctgattgtgtcaatgtgaaagttaaataaaatttatgtgccaaacctga

SEQ ID NO: 5212 - DNA, 2948 bp, Homo sapiens
ttcagcgcctgggcccctctccccgccgcggggcgcacggaaaaaccggrgaacccgcgggttttgtcctggcgagccacatcccgtgactgggttaaaatgaaaagacacaaagagagaagtggtcttttcccttccctccccattataattaagagcttagtccatcttggctcagaattggaattcagaattcagaattgctcttgaccctgaagaatagaatctcaaagaaatacctgagcagaaaattctcttcttcgctgaaatgaaaattggagtgtttgcaaaactgaacaaagaaaggaaagaatttgtaaacatcacargcaacttgcagttatattcggatcatttttcagtgtttgaggagttcatacaataaaaagtgacaagaggaaacaagaacctcagttcaggggaaacacagcaaggaaatgtgagccccaggctgcagaaggaagagtcagtgaatggctgcggtgtgacaacatgcaccaccagtggcttctgctggccgcatgcttttgggtgattttcatgttcatgktggctagcaagttcatcacgttgacctttaaagacccagatgtgtacagtgccaaacaggagtttctgttcctgacaaccatgccggaagtgaggaagttgccagaagagaagcacattcctgaggaaytgaagccaactgggaaggagcttccagacagccagctcgttcagcccctggtctacatggagcgcctggaactcatcagaaacgtctgcagggatgatgccctgaagaatctctcgcacactcctgtctccaagtttgtcctggaccgaatatttgtctgtgacaagcacaagattcttttctgccagactcccaaagtgggcaacacccagtggaagaaagtgctgattgttctaaatggagcatttycttccattgaggagatccccgaaaacgtggtgcacgaccacgagaagaacggccttcctcggctctcttccttcagtgatgcagaaattcagaagcgattgaaaacatacttcaagttttttattgtaagagatcccttcgaaagacttatttctgcatttaaggataaatttgttcacaatccccggtttgagccttggtacaggcatgagattgctcctggcatcatcagaaaatacaggaggaaccggacagagacscgggggatccagtttgaagatttcgtgcgctacctcggygatccgaaccacagatggctagaccttcagtttgggraccacatcattcactgggtgacrtatgtagagctctgtgctccctgtgagataatgtacagtgtgattggacaccacgagaccctggaggacgatgcyccatacatcttaaaagaggctggcattgaccacctggtgtcatacccgactatccctccrggcattaccgtgtataacagaaccaaggtggagcactatttcctgggcatcagcaaacgagacatccgacgcctgtatgcccgtttcgaaggggactttaagctctttgggtaccagaaaccagactttttgctaaactaatgcataagacctatgaattcaaatatctttattagacctggggctaaccaggtgaagatctgagcccagaaatgacccttcctccaccacacccctcctttgaggaygcccggggtctcccacaggcctgtgagttgcctcggcatatgacgcagaaccccaactgttacaacttagtttggatgtaagatgctctgaggaccctgcccacacccctgcgtgcattaggatgtcgctggcctttgctcacctcagaggggagaaaaggctaaagatttgcagtttgacagcccagcagggaggaagcatcacacagcgttargagccgttyccttcaggtgttaaggaaggggatgcccctgaggttctcctggctagtcrgggtggcttcacccatcactggtgggttgcaggaacagcacccaggactctgaggagggacagagaagcaagggggctgctgaaatcrcagagacttttgcagcatcagatctgaggagtaaaacggcacctctggccttcatcttggtgctgcgacaattgtggaggcaaagcattctttctgtgactattttgttcctgtagacagtcagcgatggccagagggtggtgtggtgtccagggrtccatctttccagaatccatgcctgtgtaatgctggtccatgcttctgaacctgtgtctgccaagcgcctatttcattcagcacaagacatacgattttagaaggtgaggggaggggaggctttttctacctgagaaggggagtgtctttgagggccttaaaaggaccatggcccaggaatgggggcgctggttgggcttggagctcakgctgctgtggatcccggcgcatcagttctgacttgccttacctgggtggacagcagtgaatctccacctgtcttctccagggagctcccatgttggggctgaagacgagcaggggcaacctgccagcatcacagaattcagtgtagtttatacatttcgattcctttcatctcagcaaaatgggcactgccagagccatttctgatcacaccaccatcctggaccatgtgactggaaggtgggtaaccaagttcaccagcaataaaacccagcgcccaggtagcctccagcagtgcggcttcctgkyaacaaggtaggccctggtgcagggcaagccgcagcgaccatttcagataccgtccacagccaggaccgctgagaactgggacagtttcctgggatgagtgccagcctgagcctgcatggtgccgccgagcccggggtggaggagggagccaggcttcgcttcaaggcggcctctaccttttctcagaatggtttcctgattgtgtcaatgtgaaagttaaataaaatttatgtgccaaacctga

SEQ ID NO: 5213 - DNA, 5151 bp, Homo sapiens
gcagcagcttgcgggacacggagccgcgaggagacagctgaggcccgcggagaccagggggtgaagcctggagaccctcttgccctggcctagctgcaggcccccgggatgctttgggcatgtcctctggagccccacagaagagcagcccaatggccagtggagctgaggagaccccaggcttcctggacacgctcctgcaagacttcccagccctgctgaacccagaggaccctctgccatggaaggccccagggacggtgctcagccaggaggaggtggagggcgagctggctgagctggccatgggctttctgggcagcaggaaggccccgccaccacttgctgctgctctggcccacgaagcagtttcacagctgctacagacagacctttccgaattcaggaagttgcccagggaggaagaagaagargaggaggacgatgacgaggaggaaaaggcccctgtgaccttgctggatgcccaaagcctggcacagagtttctttaacygcctttgggaagtcgccggccagtggcagaagcaggtgccattggctgcccgggcctcacagcggcagtggctggtctccatccacgccatccggaacactcgccgcaagatggaggaccggcacgtgtccctcccttccttcaaccagctcttcggcttrtctgaccctgtgaaccgcgcctactttgctgtgtttgatggtcacggaggcgtggatgctgcgaggtacgccgctgtccacgtgcacaccaaygctgcccgccagccagagctgcccacagaccctgagggagccctcagagaagccttccggcgcaccgaccagatgtttctcaggaaagccaagcgagagcggctgcagagcggcaccacaggtgtgtgtgygctcattgcaggagcgaccctgcacgtcgcctggctcggggattcccaggtcattttggtacagcagggacaggtggtgaagctgatggagccacacagaccagaacggcaggatgagaaggcgcgcattgaagcattgggtggctttgtgtctcacatggactgctggagagtcaacgggaccctggccgtctccagagccatcggggatgtcttccagaagccctacgtgtctggggaggccgatgcagcttcccgggcgctgacgggctccgaggactacctgctgcttgcctgtgatggcttctttgacgtcgtaccccaccaggaagttgttggcctggtccagagccacctgaccaggcagcagggcagygggctccgtgtcgccgaggagctggtggctgcggcccgggagcggggctcccacgacaacatcacggtcatggtggtcttcctcagggacccccaagagctgcbggagggcgggaaccagggagaaggggacccccaggcagaagggaggaggcaggacttgccctccagccttccagaacctgagacccaggctccaccaagaagctaggtggtttccaggcccctgccctccccttcctcccatccttgtccttctctccctcagaagcctcaggacccaacaggtggcaggcagtggacagggtgcccgccccacagtgctttccccagcaccccagagccagtcgggacaccccccgcagcccrtcctggtggctgtggaactgcactgggtggcgggcagatggtggaaggcagcttaggagacctcaccaaagagaagatggaccggctcttgctcccagctcctattaggcccggggtgggaccagaggtcataggtgcccaacggcagccaaaccaaagacactggtgtgcatggggcagcatggttgtgcacgtgggaccctggggcggacccaggagccaaactcttgaagcaccccctgggtcaggcccagcagcggagtggccagccccagtttcccattgctcctctctgcggccagggccaggtgggttcatatttacagatatgcccagccagtcctggtcggccacaccagtgtcccaaagaggagagcgcagcagagccaggggtctgttctgtagcagccacccccctgcccccactccagggcagccatgatgtgcttgggcccaccagggccttccgggctgctctcttccctgagcccggaaccggcgacgcacatgtgtcttttgttggtgtgtttgtttttttccagggaggtctaattccgaagcagtattccaggttttctctttgttttatcagtgccaagatgacctgttgtgtcatataatttaagcagagcttagcatttattttattctttagaaaacttaagtatttacttttttaaagctatttttcaaggaacctttttttgcagtattattgaatttattttctaaatcaggattgaaacaggaacttttccaggtggtgttaataagccattcaagtgccttacacagctttgaagaaactaggactgcagtgggctcggataggcccattgaggtttttagaaaagcaggatttgttttgttagggaggcatgattttggtgagatctttctggaagagttttccgcctctttgtgatgctgaacacccccaaggttctcccctccccccgctgcccaggtgactggcaggagctgcgactgccacgtagtggtgcctgggcccgacagcggggctctgggcatcccgggtgaccttggcccatctgcctgcattcccacccccttgggcctggctggatcccaggcagagggaccttgctgctgtgtgattggaacattcccaaatatcttgtgaatttgtaatcaaattggtctcattgggaaagactcttaattaagaggctcaggcaagcacagaggcagcccgtgggtctctgtctcagtctggaggcagcagggatgctgctgggagtccatggcacaggccacagcccctcaccttgccgcggtggctggcagcacgcctgccttgctctgccccatgccctgaacaggcatgagagctccacgtcccctagtgcaccctgagagggggctcacaagtgaccgatcctgggtgcctcagggagctcactgagggcgtgcaaagttgaaagtggcaaggctgggggagggtgtcgggtagagggaagagggcagggggctaggggaggactcagaggccatctgcagggccaagccacaggaagggctgagctggaggtgggcagggctgctccaggcaggtcagagcagtgcagggggaggagaggagaaagggaggaagctgggctgtgtggtccccatgaaggcattcagagtccacctgcagacagcgagagccccaggaaggtttgcacagctgtgccccaagcaccttggcctcctctcagctcgccgaggaggcacgctagagccgccttcccggtgggagccctctgtcccacagggagcggggagccagctttgctggggccctacctgcatgcccagccttacccctcattctcacagcacagatgaggttgagaccatgcagtcaatgcattgcttaaggtctcttatttacaaaaaaaaaccttaaacatagtcgctgtcattcagacattcagagaatggttggccacaaacaatgaccaagtattgcttggcttaacttgaaggcctgctgtctccttctgggggtcagggacgcagctccaccctcaccactagcccaccctgcccgtgggcataaccttgacgaagagagagaatgattggcatctgcttttctcttttctttgctaataattctgttcctggctgccgagagtgaagtttcaccatgtggaggtttggctcctatcacctggtggtctgattcataccctagcctgaggytccactggaagatctcgcagcctcagtgtatgggaaaccctttccccaggcttgtcccagcactgccgctccccacccctgagccaggaycccagaggatggccatgccccgtgcctggcagaggtctggtgccagcactgggagctgctccgcccttgccttggggccgagggagccctcgtccacccctgcacagcagctgggcacagaggagcgctcttccatcttgaccaggactgcaccaagaagcaccaggtgtcttcagcctccaacctccggggcgaccttctcttccagccacagtcccatgagggcccctagccagggacactggtctgtaaattgtaatcctttctccagcccagctctccacttgttccttgtgtgagctgagcaggcagtgcacctctgagtgtcccttttgtaaggcccaggggttgcactgagtctgcagaggccgcgacctcctagaacgctgtgggtgcaggtgasccggcgtgtcctggggagatgctgccagcacacaggggccctcctgctgccagcaggttggggtggttaagtcttattagtgtctattcttaaaattaagtgggctggagaagaatggagctccacatgccagcaccgtatatggaatacaaaagctggggaagcagggcctgccttacaggtgtggctgactctgagcccaggcctgcaggggtggagggcagtccctcagaatcccagaggcagtcccagcctcagaacccaggataggaaatgggtgtgtttagtggggaaagggacggggtgcagacggcagggccagtatggggccccctccctctcctctcctctcctatggtgagcccagcgtgggcaccgggccgtctcagccrtgttcccagggctgggaggacagctctggcccttcttaggcctagcctcgtcccaagctaaatgtaagccagttgggctgtgttaaaggaagcagtgtttttggttcgattctgcctctgtagctcaaggggggcagcccccagagtcctgtgcattctgccaaggctccatagctttgccaaatgcacggagctctgccattccggtgcagtgcaggccttgcgaagggtttatctgcgttcgtctcggtgggcttctcctgcatgggagttgtgttcctgtgcaagggggagctttgctccaggacaggatgactgtcttccctattcttagggacaagtcccaagatgccagaaaggcagtctcccaaggacccmccatgcagaagtgtcaataaaccmcaagttytgaa

SEQ ID NO: 5214 - DNA, 1202 bp, Homo sapiens
gcagcagcttgcgggacacggagccgcgaggagacagctgaggcccgcggagaccagggggtgaagcctggagaccctcttgccctggcctagctgcaggcccccgggatgctttgggcatgtcctctggagccccacagaagagcagcccaatggccagtggagctgaggagaccccaggcttcctggacacgctcctgcaagacttcccagccctgctgaacccagaggaccctctgccatggaaggccccagggacggtgctcagccaggaggaggtggagggcgagctggctgagctggccatgggctttctgggcagcaggaaggccccgccaccacttgctgctgctctggcccacgaagcagtttcacagctgctacagacagacctttccgaattcaggaagttgcccagggaggaagaagaagargaggaggacgatgacgaggaggaaaaggcccctgtgaccttgctggatgcccaaagcctggcacagagtttctttaacygcctttgggaagtcgccggccagtggcagaagcaggtgccattggctgcccgggcctcacagcggcagtggctggtctccatccacgccatccggaacactcgccgcaagatggaggaccggcacgtgtccctcccttccttcaaccagctcttcggcttrtctgaccctgtgaaccgcgcctactttgctgtgtttgatggtcacggaggcgtggatgctgcgaggtacgccgctgtccacgtgcacaccaaygctgcccgccagccagagctgcccacagaccctgagggagccctcagagaagccttccggcgcaccgaccagatgtttctcaggaaagccaagcgagagcggctgcagagcggcaccacaggtgtgtgtgygctcattgcaggagcgaccctgcacgtcgcctggctcggggattcccaggtcattttggtacagcagggacaggtggtgaagctgatggagccacacagaccagaacggcaggatgagaaggcgcgcattgaagcattgggtggctttgtgtctcacatggactgctggagagtcaacgggaccctggccgtctccagagccatcggtgagagccaaagaggccgacccaagtgggagaaggtctctcggaagcccaggcctcgagtgtggcccgcggctcaccaggggttcagggaggcagtg

SEQ ID NO: 5215 - DNA, 5099 bp, Homo sapiens
gcagcagcttgcgggacacggagccgcgaggagacagctgaggcccgcggagaccagggggtgaagcctggagaccctcttgccctggcctagctgcaggcccccgggatgctttgggcatgtcctctggagccccacagaagagcagcccaatggccagtggagctgaggagaccccaggcttcctggacacgctcctgcaagacttcccagccctgctgaacccagaggaccctctgccatggaaggccccagggacggtgctcagccaggaggaggtggagggcgagctggctgagctggccatgggctttctgggcagcaggaaggccccgccaccacttgctgctgctctggcccacgaagcagtttcacagctgctacagacagacctttccgaattcaggaagttgcccagggaggaagaagaagargaggaggacgatgacgaggaggaaaaggcccctgtgaccttgctggatgcccaaagcctggcacagagtttctttaacygcctttgggaagtcgccggccagtggcagaagcaggtgccattggctgcccgggcctcacagcggcagtggctggtctccatccacgccatccggaacactcgccgcaagatggaggaccggcacgtgtccctcccttccttcaaccagctcttcggcttrtctgaccctgtgaaccgcgcctactttgctgtgtttgatggtcacggaggcgtggatgctgcgaggtacgccgctgtccacgtgcacaccaaygctgcccgccagccagagctgcccacagaccctgagggagccctcagagaagccttccggcgcaccgaccagatgtttctcaggaaagccaagcgagagcggctgcagagcggcaccacaggtgtgtgtgygctcattgcaggagcgaccctgcacgtcgcctggctcggggattcccaggtcattttggtacagcagggacaggtggtgaagctgatggagccacacagaccagaacggcaggatgagaaggcgcgcattgaagcattgggtggctttgtgtctcacatggactgctggagagtcaacgggaccctggccgtctccagagccatcggggatgtcttccagaagccctacgtgtctggggaggccgatgcagcttcccgggcgctgacgggctccgaggactacctgctgcttgcctgtgatggcttctttgacgtcgtaccccaccaggaagttgttggcctggtccagagccacctgaccaggcagcagggcagygggctccgtgtcgccgaggagctggtggctgcggcccgggagcggggctcccacgacaacatcacggtcatggtggtcttcctcagggacccccaagagctgcbggagggcgggaaccagggagaaggggacccccaggcagaagggaggaggcaggacttgccctccagccttccagaacctgagacccaggctccaccaagaagctaggtggtttccaggcccctgccctccccttcctcccatccttgtccttctctccctcagaagcctcaggacccaacaggtggcaggcagtggacagggtgcccgccccacagtgctttccccagcaccccagagccagtcgggacaccccccgcagcccrtcctggtggctgtggaactgcactgggtggcgggcagatggtggaaggcagcttaggagacctcaccaaagagaagatggaccggctcttgctcccagctcctattaggcccggggtgggaccagaggtcataggtgcccaacggcagccaaaccaaagacactggtgtgcatggggcagcatggttgtgcacgtgggaccctggggcggacccaggagccaaactcttgaagcaccccctgggtcaggcccagcagcggagtggccagccccagtttcccattgctcctctctgcggccagggccaggtgggttcatatttacagatatgcccagccagtcctggtcggccacaccagtgtcccaaagaggagagcgcagcagagccaggggtctgttctgtagcagccacccccctgcccccactccagggcagccatgatgtgcttgggcccaccagggccttccgggctgctctcttccctgagcccggaaccggcgacgcacatgtgtcttttgttggtgtgtttgtttttttccagggaggtctaattccgaagcagtattccaggttttctctttgttttatcagtgccaagatgacctgttgtgtcatataatttaagcagagcttagcatttattttattctttagaaaacttaagtatttacttttttaaagctatttttcaaggaacctttttttgcagtattattgaatttattttctaaatcaggattgaaacaggaacttttccaggtggtgttaataagccattcaagtgccttacacagctttgaagaaactaggactgcagtgggctcggataggcccattgaggtttttagaaaagcaggatttgttttgttagggaggcatgattttggtgagatctttctggaagagttttccgcctctttgtgatgctgaacacccccaaggttctcccctccccccgctgcccaggtgactggcaggagctgcgactgccacgtagtggtgcctgggcccgacagcggggctctgggcatcccgggtgaccttggcccatctgcctgcattcccacccccttgggcctggctggatcccaggcagagggaccttgctgctgtgtgattggaacattcccaaatatcttgtgaatttgtaatcaaattggtctcattgggaaagactcttaattaagaggctcaggcaagcacagaggcagcccgtgggtctctgtctcagtctggaggcagcagggatgctgctgggagtccatggcacaggccacagcccctcaccttgccgcggtggctggcagcacgcctgccttgctctgccccatgccctgaacaggcatgagagctccacgtcccctagtgcaccctgagagggggctcacaagtgaccgatcctgggtgcctcagggagctcactgagggcgtgcaaagttgaaagtggcaaggctgggggagggtgtcgggtagagggaagagggcagggggctaggggaggactcagaggccatctgcagggccaagccacaggaagggctgagctggaggtgggcagggctgctccaggcaggtcagagcagtgcagggggaggagaggagaaagggaggaagctgggctgtgtggtccccatgaaggcattcagagtccacctgcagacagcgagagccccaggaaggtttgcacagctgtgccccaagcaccttggcctcctctcagctcgccgaggaggcacgctagagccgccttcccggtgggagccctctgtcccacagggagcggggagccagctttgctggggccctacctgcatgcccagccttacccctcattctcacagcacagatgaggttgagaccatgcagtcaatgcattgcttaaggtctcttatttacaaaaaaaaaccttaaacatagtcgctgtcattcagacattcagagaatggttggccacaaacaatgaccaagtattgcttggcttaacttgaaggcctgctgtctccttctgggggtcagggacgcagctccaccctcaccactagcccaccctgcccgtgggcataaccttgacgaagagagagaatgattggcatctgcttttctcttttctttgctaataattctgttcctggctgccgagagtgaagtttcaccatgtggaggtttggctcctatcacctggtggtctgattcataccctagcctgaggytccactggaagatctcgcagcctcagtgtatgggaaaccctttccccaggcttgtcccagcactgccgctccccacccctgagccaggaycccagaggatggccatgccccgtgcctggcagaggtctggtgccagcatgcacagcagctgggcacagaggagcgctcttccatcttgaccaggactgcaccaagaagcaccaggtgtcttcagcctccaacctccggggcgaccttctcttccagccacagtcccatgagggcccctagccagggacactggtctgtaaattgtaatcctttctccagcccagctctccacttgttccttgtgtgagctgagcaggcagtgcacctctgagtgtcccttttgtaaggcccaggggttgcactgagtctgcagaggccgcgacctcctagaacgctgtgggtgcaggtgasccggcgtgtcctggggagatgctgccagcacacaggggccctcctgctgccagcaggttggggtggttaagtcttattagtgtctattcttaaaattaagtgggctggagaagaatggagctccacatgccagcaccgtatatggaatacaaaagctggggaagcagggcctgccttacaggtgtggctgactctgagcccaggcctgcaggggtggagggcagtccctcagaatcccagaggcagtcccagcctcagaacccaggataggaaatgggtgtgtttagtggggaaagggacggggtgcagacggcagggccagtatggggccccctccctctcctctcctctcctatggtgagcccagcgtgggcaccgggccgtctcagccrtgttcccagggctgggaggacagctctggcccttcttaggcctagcctcgtcccaagctaaatgtaagccagttgggctgtgttaaaggaagcagtgtttttggttcgattctgcctctgtagctcaaggggggcagcccccagagtcctgtgcattctgccaaggctccatagctttgccaaatgcacggagctctgccattccggtgcagtgcaggccttgcgaagggtttatctgcgttcgtctcggtgggcttctcctgcatgggagttgtgttcctgtgcaagggggagctttgctccaggacaggatgactgtcttccctattcttagggacaagtcccaagatgccagaaaggcagtctcccaaggacccmccatgcagaagtgtcaataaaccmcaagttytgaa

SEQ ID NO: 5216 - DNA, 4804 bp, Homo sapiens
ggcggaggccgggccaggcggggctgtagggctggggcaggcggcgcccgggtctggccctggcctacgggctaagcgcccggccccggggccgcggatccggcagccatgtgtggatcttgaagcgccatgtggtcttctgaagcgctttgacagttctaaagggctttatattgcaaactgatcaaagcgcttcgtagccccggaagcgcttaggcatctccgaagtagcgctgggcaaagtgaaggcttcctgatctcagaagcacgttgtgggcttggaaacckacggcagcctttagtcaattttggatcgctttgacttctccaacacggtttggcatctctgaaaccttgagaactgtgatgggcagtggaaagaagagggaaaggtgcccatggcgtccgagcggggcaaggtcaagcacaactggagcagcacgtcggaagggtgtccccgcaagcgcagctgcctccgggagccctgtgatgtggccccctccagccggccagctcagaggtctgcgtcgcgttctggagggcccagcagccccaagcgcctgaaagcccagaaggaggacgatgtggcttgctcgcggaggttatcctggggctcatcccgccgcagaaataactcctcctcctccttctccccacatttcttgggccctggtgtgggcggggccgcctccaaaggctgcctgattcggaacactcgggggttcctgtcttcagrgggatcccctctgcgtcctgccaacgcctctttggaagaaatggcttctctagaggaggaagcctgcagccttaaggttgattccaaagatagttctcataactccacaaactctgaatttgcagctgaagctgagggtcagaatgatacaattgaggaacccaacaaggtccagaaaaggaagagggatagacttcgagaccagggctccacaatgatytacctgaaggctatccagggcatcctggggaaatcgatgccaaaaaggaagggagaggctgccactcgggcaaaaccaagygcagcagagcrtcccagccatggagaaggaccagccaggagtgaaggaccagccaagactgcagaaggagcagccaggagtgtcacagtcactgctgctcagaaggagaaagacgcaaccccagagrtcagcatggaggaggataagacagtgccagagaggagcagcttctatgacaggagagtagttatagaccctcaagagaaacccagtgaggagccccttggggaccgaaggactgtcattgacaaatgctctccacccctagagttcttggatgactstgactctcatttagaaatccaaaagcataaagatagggaggtggtgatggagcacccctcttctggaagtgactggtctgatgttgaggagatctccacagtcagattctctcaggaggaacctgtctccctgaaaccttcagccgttcyggagccttcttccttcaccaccgactatgtcatgtaccctcctcatttgtacagtagtccttggtgtgactacgccagctattggaccagcagccccaagccttctagctacccctccacaggcagcagcagcaacgatgcagcccaggttgggaagagcagccggagccgcaygagtgattattcccccaactctacagggagtgtccaaaacacctccagagacatggaggcctcagaggaaggctggtcccagaattctcgttcatttcgcttctccagaagctcagaagaaagagaggtgaaggagaaaagaacattccaagaggagatgcctccgcgtccttgtggaggacacgcatccagctccctgccaaagagccacctggagccaagcctagaggagggcttcattgacactcattgtcacctggacatgctctattccaagctatctttccaagggacctttacaaagttcagaaaaatttacagcagctccttccctaaggaatttcagggctgcatctctgacttctgtgatccccgcaccctgacagattgcctrtgggaggagctgttgaaagaggatctrgtctggggggcctttggctgtcaccctcattttgcacgttactacagtgagagtcaagaaagaaatcttttgcaagccttaaggcaccctaaggctgtggcatttggagaaatgggcttggattactcttacaagtgcaccacgcctgtcccagaacagcacaaggtatttgagagacagctgcagctggctgtgtctctaaagaagcccttggtgatccactgccgagaagctgatgaagatctgctagaaatcatgaaaaagtttgtgccccctgactacaagatccataggcattgcttcaccggcagctacccggtcattgagcccctgctgaagtactttcccaacatgtctgtgggcttcacggcagtgctgacatactcctctgcctgggaggcccgggaagccttgaggcagatcccactggagagaatcatcgtggaaacggatgctccctatttcctccctcgccaggttcccaaaarcctttgccagtatgcccacccgggcctggccttgcatacggtccgagagattgccagagtcaaagatcagccactctccctcaccttggctgccttgcgtgagaacaccagtcgcctctacagtctttaagcagagaagggcgaccagcagcctgacagaacacaggctggcttgaagtctgtgtctcaggtcgaggatgtgwttagagagctgattggaacacagaaaaccaggacaggatgttttcctccaagcgggtcataaggcttcagcttctgggtggtgggtggggtggggtgggcatggaatgaggggtatggggactgcctgtaatagcactgggattttgcctcccagccaaaatgctccagggtaggcagcaaagaagaaagagtgcgatatgagggtacagtgagtttggcagtccaaattctgttctctgcagcctgtttttgagtagttkgtgaataaagtcacccgcctacttgtctaagcacatgtgggtgtgtaactcagttcctggttctcggttctaaaaacagacttccaactgggaaactttttgggggaaattaactggacacctatctcggaggtttattttcttgcaaccagtgaagtcgtcctcctcccttccctggataactcttcagtttgactgtcactgttctggtgtcaactccagcgtcggcacaggcagaaggacttcagctgctggtctcattggttccactgccattgatatgggggrgtgcagaggagcactcattgtccatgatggagatccaggacagactgggggactccgggaagaggctttcttggggaagaggaccccaaaggaggtacttcctcctcactgatgccctcagggctgctgtgtgggtgtgttaagctgataaggttcagtttgcggcggaaactacctgctagtcttgtgtcaggggctgccagcctccttttgtttyacttttgcccccttcttgggaacatttgaccaaaaataatcctcatttcatcttgtgtacagtcctttgtgtamcccgcccaggttgagaggtgaatcagcgtaattctccgaagctctgctgggcagctcagccatgttacattgtctatgcagaataagcaggcctggtgtctgcaaatgtaccagtccttctcccgcatctcctgggtgcccccttggctttgcctctcctgtgtcctgtctttctgcgttttagaagtgagagcctctccttcaccttttgagcaactgagtcatctcaagtcctgagctctgctctgccgcctgctggtgccttgtaaaggtatactcgttacaggccctagaggttctaatggtccagggttaagtgagaggagactgtactttgtttcaaaggatccttcaccctgatctgcagtgaggtggatagatcacctggagtccctcgtctgtggtcttggaggcttaaattgtaaaatacatcccttatggaatcctaaattcctctaggtgtttttggaaggcgcatttgagccttgtgagctaaaatggaatggatttaatatttcctatctggcatttccatcttgcccctggtacacaagtcactggcctggaactcagccttgattcactgtccgtcttcacggattagctgtgctgttatgttgtctgtgctgcagattggcccatgtgggaagtcgggggggacctgatttcctgcttggaagacttgggggactgccgagcatatcaaagtgttyatagtcaccaagtgaactgcagcacaaccatctcctctccagcaagccctgaagtcagtagtgcctgcaggtgaaaccaaccagccctgtgttagaggaggaaaagcggagatgacatggaagtctccaagcctgtgccatccacctgccaaggaaaagcacaaggtgctatctacttttctctctaggatttagattatcatttatgtgctgttgcacagtgaaacctcacctgtgtgggcgtgaaagctgattggcattgtttttgattcagctttttggatggctaattgttttcactgtgctgtgggaatgcctctgtattttttcccctctttggccatctttttctgaaaataaagtgatggatcctctagccaacccagtctctccgtgtttgtatagacttacctgagtgatgcagtggtttagtctggttgttggccagcattgtaacccaagaatccaggtagctggagactttttttctttct

SEQ ID NO: 5217 - DNA, 4370 bp, Homo sapiens
ggcggaggccgggccaggcggggctgtagggctggggcaggcggcgcccgggtctggccctggcctacgggctaagcgcccggccccggggccgcggatccggcagccatgtgtggatcttgaagcgccatgtggtcttctgaagcgctttgacagttctaaagggctttatattgcaaactgatcaaagcgcttcgtagccccggaagcgcttaggcatctccgaagtagcgctgggcaaagtgaaggcttcctgatctcagaagcacgttgtgggcttggaaacckacggcagcctttagtcaattttggatcgctttgacttctccaacacggtttggcatctctgaaaccttgagaactgtgatgggcagtggaaagaagagggaaaggtgcccatggcgtccgagcggggcaaggtcaagcacaactggagcagcacgtcggaagggtgtccccgcaagcgcagctgcctccgggagccctgtgatgtggccccctccagccggccagctcagaggtctgcgtcgcgttctggagggcccagcagccccaagcgcctgaaagcccagaaggaggacgatgtggcttgctcgcggaggttatcctggggctcatcccgccgcagaaataactcctcctcctccttctccccacatttcttgggccctggtgtgggcggggccgcctccaaaggctgcctgattcggaacactcgggggttcctgtcttcagrgggatcccctctgcgtcctgccaacgcctctttggaagaaatggcttctctagaggaggaagcctgcagccttaaggttgattccaaagatagttctcataactccacaaactctgaatttgcagctgaagctgagggtcagaatgatacaattgaggaacccaacaaggtccagaaaaggaagagggatagacttcgagaccagggctccacaatgatytacctgaaggctatccagggcatcctggggaaatcgatgccaaaaaggaagggagaggctgccactcgggcaaaaccaagygcagcagagcrtcccagccatggagaaggaccagccaggagtgaaggaccagccaagactgcagaaggagcagccaggagtgtcacagtcactgctgctcagaaggagaaagacgcaaccccagagrtcagcatggaggaggataagacagtgccagagaggagcagcttctatgacaggagagtagttatagaccctcaagagaaacccagtgaggagccccttggggaccgaaggactgtcattgacaaatgctctccacccctagagttcttggatgactstgactctcatttagaaatccaaaagcataaagatagggaggtggtgatggagcacccctcttctggaagtgactggtctgatgttgaggagatctccacagtcagattctctcaggaggaacctgtctccctgaaaccttcagccgttcyggagccttcttccttcaccaccgactatgtcatgtaccctcctcatttgtacagtagtccttggtgtgactacgccagctattggaccagcagccccaagccttctagctacccctccacaggcagcagcagcaacgatgcagcccaggttgggaagagcagccggagccgcaygagtgattattcccccaactctacagggagtgtccaaaacacctccagagacatggaggcctcagaggaaggctggtcccagaattctcgttcatttcgcttctccagaagctcagaagaaagagaggtgaaggagaaaagaacattccaagaggagatgcctccgcgtccttgtggaggacacgcatccagctccctgccaaagagccacctggagccaagcctagaggagggcttcattgacactcattgtcacctggacatgctctattccaagctatctttccaagggacctttacaaagttcagaaaaatttacagcagctccttccctaaggaatttcagggctgcatctctgacttctgtgatccccgcaccctgacagattgcctrtgggaggagctgttgaaagaggatctrgtctggggggcctttggctgtcaccctcattttgcacgttactacagtgagagtcaagaaagaaatcttttgcaagccttaaggcaccctaaggctgtggcatttggagaaatgggcttggattactcttacaagtgcaccacgcctgtcccagaacagcacaaggtatttgagagacagctgcagctggctgtgtctctaaagaagcccttggtgatccactgccgagaagctgatgaagatctgctagaaatcatgaaaaagtttgtgccccctgactacaagatccataggcattgcttcaccggcagctacccggtcattgagcccctgctgaagtactttcccaacatgtctgtgggcttcacggcagtgctgacatactcctctgcctgggaggcccgggaagccttgaggcagatcccactggagagaatcatcgtggaaacggatgctccctatttcctccctcgccaggttcccaaaarcctttgccagtatgcccacccgggcctggccttgcatacggtccgagagattgccagagtcaaagatcagccactctccctcaccttggctgccttgcgtgagaacaccagtcgcctctacagtctttaagcagagaaggtacagtcctcgggagtctcctagaaaagggcgaccagcagcctgacagaacacaggctggcttgaagtctgtgtctcaggtcgaggatgtgwttagagagctgattggaacacagaaaaccaggacaggatgttttcctccaagcgggtcataaggcttcagcttctgggtggtgggtggggtggggtgggcatggaatgaggggtatggggactgcctgtaatagcactgggattttgcctcccagccaaaatgctccagggtaggcagcaaagaagaaagagtgcgatatgagggtacagtgagtttggcagtccaaattctgttctctgcagcctgtttttgagtagttkgtgaataaagtcacccgcctacttgtctaagcacatgtgggtgtgtaactcagttcctggttctcggttctaaaaacagacttccaactgggaaactttttgggggaaattaactggacacctatctcggaggtttattttcttgcaaccagtgaagtcgtcctcctcccttccctggataactcttcagtttgactgtcactgttctggtgtcaactccagcgtcggcacaggcagaaggacttcagctgctggtctcattggttccactgccattgatatgggggrgtgcagaggagcactcattgtccatgatggagatccaggacagactgggggactccgggaagaggctttcttggggaagaggaccccaaaggaggtacttcctcctcactgatgccctcagggctgctgtgtgggtgtgttaagctgataaggttcagtttgcggcggaaactacctgctagtcttgtgtcaggggctgccagcctccttttgtttyacttttgcccccttcttgggaacatttgaccaaaaataatcctcatttcatcttgtgtacagtcctttgtgtamcccgcccaggttgagaggtgaatcagcgtaattctccgaagctctgctgggcagctcagccatgttacattgtctatgcagaataagcaggcctggtgtctgcaaatgtaccagtccttctcccgcatctcctgggtgcccccttggctttgcctctcctgtgtcctgtctttctgcgttttagaagtgagagcctctccttcaccttttgagcaactgagtcatctcaagtcctgagctctgctctgccgcctgctggtgccttgtaaaggtatactcgttacaggccctagaggttctaatggtccagggttaagtgagaggagactgtactttgtttcaaaggatccttcaccctgatctgcagtgaggtggatagatcacctggagtccctcgtctgtggtcttggaggcttaaattgtaaaatacatcccttatggaatcctaaattcctctaggtgtttttggaaggcgcatttgagccttgtgagctaaaatggaatggatttaatatttcctatctggcatttccatcttgcccctggtacacaagtcactggcctggaactcagccttgattcactgtccgtcttcacggattagctgtgctgttatgttgtctgtgctgcagattggcccatgtgggaagtcgggggggacctgatttcctgcttgcagcacaaccatctcctctccagcaagccctgaagtcagtagtgcctgcaggtgaaaccaaccagccc

SEQ ID NO: 5218 - DNA, 4807 bp, Homo sapiens
ttcgggcggaggccgggccaggcggggctgagcagggcgggctgcggcgcccgggtctggccctggcctacgggctaagcgcccggccccggggccgcggatccggcagccatgtgtggatcttgaagcgccatgtggtcttctgaagcgctttgacagttctaaagggctttatattgcaaactgatcaaagcgcttcgtagccccggaagcgcttaggcatctccgaagtagcgctgggcaaagtgaaggcttcctgatctcagaagcacgttgtgggcttggaaacckacggcagcctttagtcaattttggatcgctttgacttctccaacacggtttggcatctctgaaaccttgagaactgtgatgggcagtggaaagaagagggaaaggtgcccatggcgtccgagcggggcaaggtcaagcacaactggagcagcacgtcggaagggtgtccccgcaagcgcagctgcctccgggagccctgtgatgtggccccctccagccggccagctcagaggtctgcgtcgcgttctggagggcccagcagccccaagcgcctgaaagcccagaaggaggacgatgtggcttgctcgcggaggttatcctggggctcatcccgccgcagaaataactcctcctcctccttctccccacatttcttgggccctggtgtgggcggggccgcctccaaaggctgcctgattcggaacactcgggggttcctgtcttcagrgggatcccctctgcgtcctgccaacgcctctttggaagaaatggcttctctagaggaggaagcctgcagccttaaggttgattccaaagatagttctcataactccacaaactctgaatttgcagctgaagctgagggtcagaatgatacaattgaggaacccaacaaggtccagaaaaggaagagggatagacttcgagaccagggctccacaatgatytacctgaaggctatccagggcatcctggggaaatcgatgccaaaaaggaagggagaggctgccactcgggcaaaaccaagygcagcagagcrtcccagccatggagaaggaccagccaggagtgaaggaccagccaagactgcagaaggagcagccaggagtgtcacagtcactgctgctcagaaggagaaagacgcaaccccagagrtcagcatggaggaggataagacagtgccagagaggagcagcttctatgacaggagagtagttatagaccctcaagagaaacccagtgaggagccccttggggaccgaaggactgtcattgacaaatgctctccacccctagagttcttggatgactstgactctcatttagaaatccaaaagcataaagatagggaggtggtgatggagcacccctcttctggaagtgactggtctgatgttgaggagatctccacagtcagattctctcaggaggaacctgtctccctgaaaccttcagccgttcyggagccttcttccttcaccaccgactatgtcatgtaccctcctcatttgtacagtagtccttggtgtgactacgccagctattggaccagcagccccaagccttctagctacccctccacaggcagcagcagcaacgatgcagcccaggttgggaagagcagccggagccgcaygagtgattattcccccaactctacagggagtgtccaaaacacctccagagacatggaggcctcagaggaaggctggtcccagaattctcgttcatttcgcttctccagaagctcagaagaaagagaggtgaaggagaaaagaacattccaagaggagatgcctccgcgtccttgtggaggacacgcatccagctccctgccaaagagccacctggagccaagcctagaggagggcttcattgacactcattgtcacctggacatgctctattccaagctatctttccaagggacctttacaaagttcagaaaaatttacagcagctccttccctaaggaatttcagggctgcatctctgacttctgtgatccccgcaccctgacagattgcctrtgggaggagctgttgaaagaggatctrgtctggggggcctttggctgtcaccctcattttgcacgttactacagtgagagtcaagaaagaaatcttttgcaagccttaaggcaccctaaggctgtggcatttggagaaatgggcttggattactcttacaagtgcaccacgcctgtcccagaacagcacaaggtatttgagagacagctgcagctggctgtgtctctaaagaagcccttggtgatccactgccgagaagctgatgaagatctgctagaaatcatgaaaaagtttgtgccccctgactacaagatccataggcattgcttcaccggcagctacccggtcattgagcccctgctgaagtactttcccaacatgtctgtgggcttcacggcagtgctgacatactcctctgcctgggaggcccgggaagccttgaggcagatcccactggagagaatcatcgtggaaacggatgctccctatttcctccctcgccaggttcccaaaarcctttgccagtatgcccacccgggcctggccttgcatacggtccgagagattgccagagtcaaagatcagccactctccctcaccttggctgccttgcgtgagaacaccagtcgcctctacagtctttaagcagagaagggcgaccagcagcctgacagaacacaggctggcttgaagtctgtgtctcaggtcgaggatgtgwttagagagctgattggaacacagaaaaccaggacaggatgttttcctccaagcgggtcataaggcttcagcttctgggtggtgggtggggtggggtgggcatggaatgaggggtatggggactgcctgtaatagcactgggattttgcctcccagccaaaatgctccagggtaggcagcaaagaagaaagagtgcgatatgagggtacagtgagtttggcagtccaaattctgttctctgcagcctgtttttgagtagttkgtgaataaagtcacccgcctacttgtctaagcacatgtgggtgtgtaactcagttcctggttctcggttctaaaaacagacttccaactgggaaactttttgggggaaattaactggacacctatctcggaggtttattttcttgcaaccagtgaagtcgtcctcctcccttccctggataactcttcagtttgactgtcactgttctggtgtcaactccagcgtcggcacaggcagaaggacttcagctgctggtctcattggttccactgccattgatatgggggrgtgcagaggagcactcattgtccatgatggagatccaggacagactgggggactccgggaagaggctttcttggggaagaggaccccaaaggaggtacttcctcctcactgatgccctcagggctgctgtgtgggtgtgttaagctgataaggttcagtttgcggcggaaactacctgctagtcttgtgtcaggggctgccagcctccttttgtttyacttttgcccccttcttgggaacatttgaccaaaaataatcctcatttcatcttgtgtacagtcctttgtgtamcccgcccaggttgagaggtgaatcagcgtaattctccgaagctctgctgggcagctcagccatgttacattgtctatgcagaataagcaggcctggtgtctgcaaatgtaccagtccttctcccgcatctcctgggtgcccccttggctttgcctctcctgtgtcctgtctttctgcgttttagaagtgagagcctctccttcaccttttgagcaactgagtcatctcaagtcctgagctctgctctgccgcctgctggtgccttgtaaaggtatactcgttacaggccctagaggttctaatggtccagggttaagtgagaggagactgtactttgtttcaaaggatccttcaccctgatctgcagtgaggtggatagatcacctggagtccctcgtctgtggtcttggaggcttaaattgtaaaatacatcccttatggaatcctaaattcctctaggtgtttttggaaggcgcatttgagccttgtgagctaaaatggaatggatttaatatttcctatctggcatttccatcttgcccctggtacacaagtcactggcctggaactcagccttgattcactgtccgtcttcacggattagctgtgctgttatgttgtctgtgctgcagattggcccatgtgggaagtcgggggggacctgatttcctgcttggaagacttgggggactgccgagcatatcaaagtgttyatagtcaccaagtgaactgcagcacaaccatctcctctccagcaagccctgaagtcagtagtgcctgcaggtgaaaccaaccagccctgtgttagaggaggaaaagcggagatgacatggaagtctccaagcctgtgccatccacctgccaaggaaaagcacaaggtgctatctacttttctctctaggatttagattatcatttatgtgctgttgcacagtgaaacctcacctgtgtgggcgtgaaagctgattggcattgtttttgattcagctttttggatggctaattgttttcactgtgctgtgggaatgcctctgtattttttcccctctttggccatctttttctgaaaataaagtgatggatcctctagccaacccagtctctccgtgtttgtatagacttacctgagtgatgcagtggtttagtctggttgttggccagcattgtaacccaagaatccaggtagctggagactttttttctttct

SEQ ID NO: 5219 - DNA, 3150 bp, Homo sapiens
cttttgagtaggagacctgggggccggggctgcctgtggacgaccatctgccagcttctcttgctccgtcgattaggaggatcggtggcgacctcggccttcagtgtctccgacagagtgaaatggcggcggcggccgggatgatgctgctgggcttgctacaggcgggtgggtaggtgctgggccaggcgatggaggaggtggcaggcggcaacctcttgtccatgctgctgatcgcctgcgccttcaccctcagcctggtctacttgttccgtctcgctgccggccacctggtccagctgaccgcaggggcgaaaagtcctccgtacattttctccccagttcctttccttgggcatgccatagcatttgggaaaagtccaactgaatttctagaaaatgcatatgggaattatggacctgtatttagttttatcatggtaggcaaggcatttacttaccttctgggtagtgatgctgctgcactgctttttaatagtaaaaatgaagtcctgaatgcagaagatgtctacagtcgcctgacaacacctgtgtttgggtagggagttgcatacgatgtgcctaatccagttttcttggagcagaagaaaaygttaaaaagtggccttaatatagcccactttaaatagcatgtttctataattgaaaaagaaacaaaggaatactttgagagttggggagaaagtggagaaaaaaatgtgtttgcagctctttctgagctcataattttaacagctagccattatttgcatggaaaggaaatcagaagtcaacacaatgaaaaggtagcacagctgtatgcagatttggatggaggtttcagccatgcagcctggctcttaccaggttggctgcctttgcctagtttcagacscagggacagagctcatcaggaaatcaaggatattttctataaggcaatccagaaacgcagacagtctcaagaaaaaattgatgacattctccaaactttactagatgctacatacaaggatgggcgtcctttgactgatgatgaagtagcagggatgcttactggattactcttggcagagcagcatacatcctcaactagtgcttagatgggcttctttttgrccagagacaaaacacttcaagaaaaatgttatttagaacagaaaacagtctgtggagagaatctgcctcctttaacttatgaccagctcaaggatctaaatttacttgatcgctgtataaaagaaacattaagacttagacatcctgtaatgatcatgatgagaatggccagaattcctaaaactgtggcagggtataccattcctccgggacatcaggtgtgtgtttctcctactgtcaatcaaagacttaaagattcatgggtagaacacctggactttaatcctgatcgctacttataggataacccagcatcaagggaaaagtttgcctatgtgccatttggagctgggcatcatggttgtactggggaaaattttgcctatgttcaaattaagacaatttggtccactatgcttcgtttatatgaatttgatctcattgatggatacttycccaccgtgaattatacaactatgattcacacccctgaaaacccagttatccattacaaaygaagatcaaaatgaaaaatgttgcaaggaagtaatatatgtgatcatcactgtaagccacaaaggcattcaaagagaatgaagtgtacaaaacaactcttgtagtgtactgcttttttgagtgtgtaattctaaaagccagtttatgatttagtattttgttaactgaatggttctatcaaatataataacatttgaaacattttcttagagttatgatacttatacatgtgctttcaggaagttcattagtaaaacgattgttcaggagggatctaggtaattggcagattctaaataatataatttccaggtagtaattttaagagtactcatagctcttgccaaataagttcagggtattcaaatcttggactagtcctgcaaggtacaaaaaataaaaatcccagtgagatactttgaaaccacaggttattatttatctgggcaattattgtgtgtgtgaggacggaagggtagggaataatcaaacatctaaagccttgaataagagaatactaattgtttcggtatgatgatactcagaaatggagatgttatagaaaaaaaatcctttggaattttaactaaaatcactgcatataggaaattaagagatccaggaccatatttgataagatttcctaaaaataatgtaattattaatgctaaagactgctcatgtatcttgatctaattactaaataattacatatttacctgataaatatgtatctagttctacaaggtcacatttatgtggaagtccttaggggataattttgttttggctcagttgttccctgcttcctctcgttttttttttttttttttttttttgagatggagtctcgctctgtcgcccaggctggagtgcagtggcgtgatctcagctcactgcatcctccgcctcccaggttcaagcaattctctgcctcagcctcctgagtagttgggattacaggcacctgccaccacatctggctaattttttgtatttttagtagagacagggtgtcactatgttggctaggctggtcttgaactcctgacctcgtgatccgcccacctcggtctcccaaagtgctgggattacaggtgtgagccactgcgcctggccttccctgcttcctctctagaatccaattagggaagtttgttactacttatgttgattaaaacagttaacaaactttttactttttaaaatgtgagatcagtgaactctggttttaagataatctgaaacaaggtccttgggagtaatataattggtcacattctgtaaagcacattctgtttaggaatcaacttacctcaaattataactcggggcctaactatatgagatagctgaaaaaataccacatcgtctgttttcactagatgatgccaaaatattttgctttatgtatattacagttctttttaaaacactggaagactcatgttaaactctaattttgaagacagaatctctgctaatttttcacattaaaattctctttgaaaaaaa

SEQ ID NO: 5220 - DNA, 2930 bp, Homo sapiens
cgtgcgtcccggcatcaccccgggatccgctcctccccgctggcggggggagaaagggcaggaggccttccgtcccggctataaagggccccggaccgccgcggctcgcctcggcttgcctcgacacgcctaggcgcyctccggctccgccctagccgccgcgtcccagctagagctccagcrcccgctcaggccccactcgacctctcgggcctcggctacttggactgcggcggaatatggcggctccgatgactcccgcggctcggcccgaggactacgaggcggcgctcaatgccgccctggctgacgtgcccgaactggccagactcctggagatcgacccgtacttgaagmcctacgccgtggacttccagcgcaggtataagcagtttagccaaattttgaagaacattggagaaaatgaaggtggtattgataagttttccagaggctatgaatcatttggcgtccacagatgtgctgatggtggtttatactscaaagaatgggccccgggagcagaaggagtttttcttactggagattttaatggttggaatccattttcgtacccatayaaaaaactggattatggaaaatgggagctgtatatcccaccaaagcagaataaatctgtactcgtgcctcatggatccaaattaaaggtagttattactagtaaaagcggagagatcttgtatcgtatttcaccgtgggcaaagtatgtggttcgtgaaggtgataatgtgaattatgattggatacactgggatccagaacactcatatgagtttaagcattccrgaccaaagaarccacggagtctaagaatttatgaatctcatgtgggaatttcttcccatgaaggaaaagtagcttcttataaacattttacatgcaatgtacyaccaagaatcaaaggccttggatacaactgcattcagttgatggcaatcatggagcatgcttactatgccagctttggttaccaaatcacaagcttcttwgcagcttccagccgttatggaacacctgaagagctacaagaactggtagacacagctcattccatgggtatcatagtcctcttagatgtggtacacagccatgcttcaaaaaattcagcagatggattgaatatgtttgatgggacagattcctgttattttcattctggacctagagggactcatgatctttgggatagcagattgtttgcctactccagctgggaarttttaagattccttctgtcaaacataagatggtggttggaagaatatcgctttgatggatttcgttttgatggtgttacgtccatgctttatcatcaccatggagtgggtcaaggtttctcaggtgattacagkgaatatttcggactacaagtagatgaagatgccttgacttacctcatgttggcaaatcatttggttcacacgctgtgtcccgattctataacaatagctgaggatgtatcaggaatgccagctctgtgctctccaatttcccagggagggggtggttttgactatcgactagccatggcaattccagataagtggattcagctacttaaagagtttaaagatgaagactggaacatgggcgatatagtatacacgctcacaaacaggcgctaccttgaaaagtgcattgcttatgcagagagccatgatcaggcattggttggggataagtcgctggcattttggttgatggatgccgaaatgtatacaaacatgagtgtcctgrctccttttactccagttattgatyrtggaatacagcttcataaaatgattyractcattacgcatgggcttggtggagaaggctatctcaatttcatgggtaatgaatttgggcatcctgaatggttagacttcccaagaaaaggaaataatgagagttaccattatgccaggcggcagtttcatttaactgacgaygaccttcttcgctacaagttcctaaataattttgacagggatatgaatagattggaagaaagatatggttggcttgcagctccacagctgtacattcaaaattgtgctagattcagatgcagcggaatatggagggcatcagagactggaccacagcactgactttttttctgaggcttttgaacataatgggcgtccctattctcttttggtgtacattccaagcagagtggccctcatccttcagaatgtggatctgccgaattgaagaggcctgatttcagctccaccagatgcagatttgtgttttgttttcttgttatcactgtcacacagcttataacatgtatgcttttcagaatacagttgtctagccaagccatcaagtgtctgaaattcaatattggtttatgcaaatacagcaaacttdtatttaagtagatrggagaatatgtttaaaatattaggaatcctagaccatattttcaagtcatcttagcagctaggattctcaaatggaagtgttatatataatatgttaaaaacattttgctttcctggctaattatttgatccttttaaattcaaatttgaatcatttgtcatgtatgattatttctgttaaatgtacacagtatttaagatggatatttggtggctctatttgttctgatatcttttggtctaaattatgaggtaccaagattgtttctttgtttctttttttcaaattgtgtttagaaatactgtaataaatatgcagtagtgatataaagaattatatccaaggtaatataaaagccattacgtatgaactcatccgtgtctcattttgtgttttwttttgtgatctcttgtccactaagtatcttgttaaatgccagtatctcagtctttctgaagccctgaaatggtaattgtagcatttcagaaaatgtctttcatttcaatcaataaaaagcttttgtaaaattg

SEQ ID NO: 5221 - DNA, 3055 bp, Homo sapiens
cgtgcgtcccggcatcaccccgggatccgctcctccccgctggcggggggagaaagggcaggaggccttccgtcccggctataaagggccccggaccgccgcggctcgcctcggcttgcctcgacacgcctaggcgcyctccggctccgccctagccgccgcgtcccagctagagctccagcrcccgctcaggccccactcgacctctcgggcctcggctacttggactgcggcggaatatggcggctccgatgactcccgcggctcggcccgaggactacgaggcggcgctcaatgccgccctggctgacgtgcccgaactggccagactcctggagatcgacccgtacttgaagmcctacgccgtggacttccagcgcaggtataagcagtttagccaaattttgaagaacattggagaaaatgaaggtggtattgataagttttccagaggctatgaatcatttggcgtccacagatgtgctgatggtggtttatactscaaagaatgggccccgggagcagaaggagtttttcttactggagattttaatggttggaatccattttcgtacccatayaaaaaactggattatggaaaatgggagctgtatatcccaccaaagcagaataaatctgtactcgtgcctcatggatccaaattaaaggtagttattactagtaaaagcggagagatcttgtatcgtatttcaccgtgggcaaagtatgtggttcgtgaaggtgataatgtgaattatgattggatacactgggatccagaacactcatatgagtttaagcattccrgaccaaagaarccacggagtctaagaatttatgaatctcatgtgggaatttcttcccatgaaggaaaagtagcttcttataaacattttacatgcaatgtacyaccaagaatcaaaggccttggatacaactgcattcagttgatggcaatcatggagcatgcttactatgccagctttggttaccaaatcacaagcttcttwgcagcttccagccgttatggaacacctgaagagctacaagaactggtagacacagctcattccatgggtatcatagtcctcttagatgtggtacacagccatgcttcaaaaaattcagcagatggattgaatatgtttgatgggacagattcctgttattttcattctggacctagagggactcatgatctttgggatagcagattgtttgcctactccagctgggaarttttaagattccttctgtcaaacataagatggtggttggaagaatatcgctttgatggatttcgttttgatggtgttacgtccatgctttatcatcaccatggagtgggtcaaggtttctcaggtgattacagkgaatatttcggactacaagtagatgaagatgccttgacttacctcatgttggcaaatcatttggttcacacgctgtgtcccgattctataacaatagctgaggatgtatcaggaatgccagctctgtgctctccaatttcccagggagggggtggttttgactatcgactagccatggcaattccagataagtggattcagctacttaaagagtttaaagatgaagactggaacatgggcgatatagtatacacgctcacaaacaggcgctaccttgaaaagtgcattgcttatgcagagagccatgatcaggcattggttggggataagtcgctggcattttggttgatggatgccgaaatgtatacaaacatgagtgtcctgrctccttttactccagttattgatyrtggaatacagcttcataaaatgattyractcattacgcatgggcttggtggagaaggctatctcaatttcatgggtaatgaatttgggcatcctgaatggttagacttcccaagaaaaggaaataatgagagttaccattatgccaggcggcagtttcatttaactgacgaygaccttcttcgctacaagttcctaaataattttgacagggatatgaatagattggaagaaagatatggttggcttgcagctccacaggcctacgtgagtgaaaaacatgaaggcaataagatcattgcttttgaaagagcaggtcttcttttcattttcaacttccatccaagcaagagctacactgactaccgagttggaacagcattgccagggaaattcaaaattgtgctagattcagatgcagcggaatatggagggcatcagagactggaccacagcactgactttttttctgaggcttttgaacataatgggcgtccctattctcttttggtgtacattccaagcagagtggccctcatccttcagaatgtggatctgccgaattgaagaggcctgatttcagctccaccagatgcagatttgtgttttgttttcttgttatcactgtcacacagcttataacatgtatgcttttcagaatacagttgtctagccaagccatcaagtgtctgaaattcaatattggtttatgcaaatacagcaaacttdtatttaagtagatrggagaatatgtttaaaatattaggaatcctagaccatattttcaagtcatcttagcagctaggattctcaaatggaagtgttatatataatatgttaaaaacattttgctttcctggctaattatttgatccttttaaattcaaatttgaatcatttgtcatgtatgattatttctgttaaatgtacacagtatttaagatggatatttggtggctctatttgttctgatatcttttggtctaaattatgaggtaccaagattgtttctttgtttctttttttcaaattgtgtttagaaatactgtaataaatatgcagtagtgatataaagaattatatccaaggtaatataaaagccattacgtatgaactcatccgtgtctcattttgtgttttwttttgtgatctcttgtccactaagtatcttgttaaatgccagtatctcagtctttctgaagccctgaaatggtaattgtagcatttcagaaaatgtctttcatttcaatcaataaaaagcttttgtaaaattg

SEQ ID NO: 5222 - DNA, 2673 bp, Homo sapiens
gtataagcagtttagccaaattttgaagaacattggagaaaatgaaggtggtattgataagttttccagaggctatgaatcatttggcgtccacagatgtgctgatggtggtttatactscaaagaatgggccccgggagcagaaggagtttttcttactggagattttaatggttggaatccattttcgtacccatayaaaaaactggattatggaaaatgggagctgtatatcccaccaaagcagaataaatctgtactcgtgcctcatggatccaaattaaaggtagttattactagtaaaagcggagagatcttgtatcgtatttcaccgtgggcaaagtatgtggttcgtgaaggtgataatgtgaattatgattggatacactgggatccagaacactcatatgagtttaagcattccrgaccaaagaarccacggagtctaagaatttatgaatctcatgtgggaatttcttcccatgaaggaaaagtagcttcttataaacattttacatgcaatgtacyaccaagaatcaaaggccttggatacaactgcattcagttgatggcaatcatggagcatgcttactatgccagctttggttaccaaatcacaagcttcttwgcagcttccagccgttatggaacacctgaagagctacaagaactggtagacacagctcattccatgggtatcatagtcctcttagatgtggtacacagccatgcttcaaaaaattcagcagatggattgaatatgtttgatgggacagattcctgttattttcattctggacctagagggactcatgatctttgggatagcagattgtttgcctactccagctgggaarttttaagattccttctgtcaaacataagatggtggttggaagaatatcgctttgatggatttcgttttgatggtgttacgtccatgctttatcatcaccatggagtgggtcaaggtttctcaggtgattacagkgaatatttcggactacaagtagatgaagatgccttgacttacctcatgttggcaaatcatttggttcacacgctgtgtcccgattctataacaatagctgaggatgtatcaggaatgccagctctgtgctctccaatttcccagggagggggtggttttgactatcgactagccatggcaattccagataagtggattcagctacttaaagagtttaaagatgaagactggaacatgggcgatatagtatacacgctcacaaacaggcgctaccttgaaaagtgcattgcttatgcagagagccatgatcaggcattggttggggataagtcgctggcattttggttgatggatgccgaaatgtatacaaacatgagtgtcctgrctccttttactccagttattgatyrtggaatacagcttcataaaatgattyractcattacgcatgggcttggtggagaaggctatctcaatttcatgggtaatgaatttgggcatcctgaatggttagacttcccaagaaaaggaaataatgagagttaccattatgccaggcggcagtttcatttaactgacgaygaccttcttcgctacaagttcctaaataattttgacagggatatgaatagattggaagaaagatatggttggcttgcagctccacaggcctacgtgagtgaaaaacatgaaggcaataagatcattgcttttgaaagagcaggtcttcttttcattttcaacttccatccaagcaagagctacactgactaccgagttggaacagcattgccagggaaattcaaaattgtgctagattcagatgcagcggaatatggagggcatcagagactggaccacagcactgactttttttctgaggcttttgaacataatgggcgtccctattctcttttggtgtacattccaagcagagtggccctcatccttcagaatgtggatctgccgaattgaagaggcctgatttcagctccaccagatgcagatttgtgttttgttttcttgttatcactgtcacacagcttataacatgtatgcttttcagaatacagttgtctagccaagccatcaagtgtctgaaattcaatattggtttatgcaaatacagcaaacttdtatttaagtagatrggagaatatgtttaaaatattaggaatcctagaccatattttcaagtcatcttagcagctaggattctcaaatggaagtgttatatataatatgttaaaaacattttgctttcctggctaattatttgatccttttaaattcaaatttgaatcatttgtcatgtatgattatttctgttaaatgtacacagtatttaagatggatatttggtggctctatttgttctgatatcttttggtctaaattatgaggtaccaagattgtttctttgtttctttttttcaaattgtgtttagaaatactgtaataaatatgcagtagtgatataaagaattatatccaaggtaatataaaagccattacgtatgaactcatccgtgtctcattttgtgttttwttttgtgatctcttgtccactaagtatcttgttaaatgccagtatctcagtctttctgaagccctgaaatggtaattgtagcatttcagaaaatgtctttcatttcaatcaataaaaagcttttgtaaaattg

SEQ ID NO: 5223 - DNA, 986 bp, Homo sapiens
agggtgtggtgggtccaagtggagctgttggccatgtgcctacttgctgcgtacctgcagatcccactccctcaggtctccctggcccttcactcttggaagtcttcaggcaaatttttcacttacgagggactgcatatattctaccaagactctgtgggtgtggttggaagtctggagatagctgtgcttttacacagccttccaacatccagctatgattggtacaagatttgggaaggtctgaccttgaggtttcatcaagttcttgtgcttgatttcttaggctttggcttcagtgacaatccacaaccacatcactattccatatttgagcaggccagcattatggaagtgcttttgtggcatctggggctccagaaccacaggaccaaccttttgtctcatgactatggagatattgttgctcaggagctcctctaccagtacaagcagaatcaatctggtaggcttaccataaagagtatccatctgtcaaatggaggtatctttcctgagactcaccgtccactccttctccaaaagatactcaaagatggaggtgtgctgtcacccatcctcacgtggctgatgaacttctttgtattctcgatgtctcaccccagtctttgggccatgtacttggccctctgagagtgagctgtgggatggtacatgtgggcagtcccatcccacagctgcaacaatgatgggaacttagtcattgtcaatctcttacagtacatcatcaatcagagaagtttagaagacaccgagtgggagctcttgcctctgaaactaaccccattgattttatctatgagccactggatcctgtaaayccctatccagagtttttcgagctgtacaggaaaatgctgtcacggtccatgatgtcaattctggatgaccacattagccacgatccacagctagaggatcccatgggcttcctgaatgcatacctgggcttcatcaagtccttt

SEQ ID NO: 5224 - DNA, 3873 bp, Homo sapiens
agatctgaaatctcattttctgtgtggctgtgtgtttgggacaggggtaaccaattcctgactactctatatgctgcatagaacctggagaggatttttcaaagtaaatgaatctcgaaagctggattgcagagcaaacgagtgcagtcaattcagccaggggcttgcaagagggagaaagagaaaaagactgtggaatggaaagtttcccaacccaagcctttcccaaggggtagccattctctgttctacagtttagggcttgcatgtgctttttctggagtggaaaaatacataagttataaggaatttaacagacagaaaggcgcacagaggaatttaaagtgtgggctggggggcgaggcggtgggcgggaggcgagcgggcgcaggcggaacaccgttttccaagctaagccgccgcaaataaaaaggcgtaaagggagagaagttggtgctcaacgtgagccaggagcagcgtcccggctcctcccctgctcattttaaaagcacttcttgtattgtttttaaggtgagaaataggaaagaaaacgccggcttgtgcgctcgctgcctgcctctctggctgtctgcttttgcagggctgctgggagtttttaagctctgtgagaatcctgggagttggtgatgtcagactagttgggtcatttgaaggttagcagcccgggtagggttcaccgaaagttcactcgcatatattaggcaattcaatctttcattctgtgtgacagaagtagtaggaagtgagctgttcagaggcaggagggtctattctttgccaaaggggggaccagaattcccccatgcgagctgtttgaggactgggatgccgagaacgcgagcgatccgagcagggtttgtctgggcaccgtcggggtaggatccggaacgcattcggaaggctttttgcaagcatttacttggaaggagaacttgggatctttctgggaaccccccgccccggctggattggccgagcaagcctggaaaatggtaaatgatcatttggatcaattacaggcttttagctggcttgtctgtcataattcatgattcggggctgggaaaaagaccaacagcctacgtgccaaaaaaggggcagagtttgatggagttgggtggacttttctatgccatttgcctccacacctagaggataagcacttttgcagacattcagtgcaagggagatcatgtttgactgtatggatgttctgtcagtgagtcctgggcaaatcctggatttctacactgcgagtccgtcttcctgcatgctccaggagaaagctctcaaagcatgcttcagtggattgacccaaaccgaatggcagcatcggcacactgctcaatcaattgaaacacagagcaccagctctgaggaactcgtcccaagccccccatctccacttcctccccctcgagtgtacaaaccctgcttcgtctgccaggacaaatcatcagggtaccactatggggtcagcgcctgtgagggatgtaagggctttttccgcagaagtattcagaagaatatgatttacacttgtcaccgagataagaactgtgttattaataaagtcaccaggaatcgatgccaatactgtcgactccagaagtgctttgaagtgggaatgtccaaagaatctgtcaggaatgacaggaacaagaaaaagaaggagacttcgaagcaagaatgcacagagagctatgaaatgacagctgagttggacgatctcacagagaagatccgaaaagctcaccaggaaactttcccttcactctgccagctgggtaaatacaccacgaattccagtgctgaccatcgagtccgactggacctgggcctctgggacaaattcagtgaactggccaccaagtgcattattaagatcgtggagtttgctaaacgtctgcctggtttcactggcttgaccatcgcagaccaaattaccctgctgaaggccgcctgcctggacatcctgattcttagaatttgcaccaggtataccccagaacaagacaccatgactttctcagacggccttaccctaaatcgaactcagatgcacaatgctggatttggtcctctgactgaccttgtgttcacctttgccaaccagctcctgcctttggaaatggatgacacagaaacaggccttctcagtgccatctgcttaatctgtggagaccgccaggaccttgaggaaccgacaaaagtagataagctacaagaaccattgctggaagcactaaaaatttatatcagaaaaagacgacccagcaagcctcacatgtttccaaagatcttaatgaaaatcacagatctccgtagcatcagtgctaaaggtgcrgagcgtgtaattaccttgaaaatggaaattcctggatcaatgccacctctcattcaagaaatgctggagaattctgaaggacatgaacccttgaccccaagttcaagtgggaacacagcagagcacagtcctagcatctcacccagctcagtggaaaacagtggggtcagtcagtcaccactcgtgcaataagacattttctagctacttcaaacattccccagtaccttcagttccaggatttaaaatgcaagaaaaaacatttttactgctgcttagtttttggactgaaaagatattaaaactcaagaaggaccaagaagttttcatatgtatcaatatatatactcctcactgtgtaacttacctagaaatacaaacttttccaattttaaaaaatcagccatttcatgcaaccagaaactagttaaaagcttctattttcctctttgaacactcaagattgcatggcaaagacccagtcaaaatgatttacccctggttaagtttctgaagactttgtacatacagaagtatggctctgttctttctatactgtatgtttggtgctttccttttgtcttgcatactcaaaataaccatgacaccaaggttatgaaatagactactgtacacgtctacctaggttcaaaaagataactgtcttgctttcatggaatagtcaagacatcaaggtaaggaaacaggactattgacaggactattgtacagtatgacaagataaggctgaagatattctactttagttagtatggaagcttgtctttgctctttctgatgctctcaaactgcatcttttatttcatgttgcccagtaaaagtatacaaattccctgcactagcagaagagaattctgtatcagtgtaactgccagttcagttaatcaaatgtcatttgttcaattgttaatgtcactttaaattaaaagtggtttattacttgtttaatgacataactacacagttagttaaaaaaaatttttttacagtaatgatagcctccaaggcagaaacacttttcagtgttaagtttttgtttacttgttcacaagccattagggaaatttcatgggataattagcaggctggtctaccacctggaccatgtaactctagtgtccttcctgattcatgcctgatattgggatttttttttccagccttcttgatgccaaggggctaattaatattaacaactcccaaagaaacaggcatagaatctgcctcctttgaccttgttcaatcactatgaagcagagtgaaagctgtggtagagtggttaacagatacaagtgtcagtttcttagttctcatttaagcactagtggaattttttttttttgatatattagcaagtctgtgatgtactttcactggctctgtttgtacattgagattgtttgtttaacaatgctttctatgttcatatactgtttacctttttccatggagtctcckggcaaagaataaaatatatttatttt

SEQ ID NO: 5225 - DNA, 4506 bp, Homo sapiens
gtgccccctgacaggcttttaaaaggcccggatgccaatgcacattccaacactatccacaaaaaggagactggagcagtgctcttccctgcattgggcaaggagactctccctccctgcctaaccacttgcctgccctgttttgtgggagaattacaagtaaatgctacagaggcagtggagaaaaaagggtgttttaattcctctccagagtttcctttatttgatgtatgttgcatcctttaaacaagttgtgcaaaatggctgcagggtagattggctctcccttttaaagctctccatccggctgggtttatttgtaaatactgcatctatccttcttagtgttttaggactggctggaaagactcttcttcctgtaggttgggtcagtgtgagagatctaaaaaatcattttcccttaaaattactgtattttaataaaaggattgggcaggggctggaatgagagaaaactggtccttcaaaatgtaaaactgtcatacttaaaccagtttacaaaatatgcgtttaattatgtggtgggatgtgtgtaggtgtatgatgagagaggcaaccaacatggctatttggggtgcaaggatgtgggaacaggcaagtaattttcacattggactttcatcctagggagctgggttctagtcacagctctgagctgtgtgaccttgggtaggtctcatctccccggggttttgtttcaccagttgaacagtatgaggatgagtcacagctaacatttgttccatgatatttacccagcaccatacaagtgttatttctgtcctcccagttaacactgacgtgggtagtattatatgcccattttacagatgaggaaactgaagcctgaagaagttaaatacttatcccagaacacacagctggtaagtggcagacctggaattggaatctagttcagtttgattccccaacccatgctcttgaccactatactgttttttcaagtccagatctgaaatctcattttctgtgtggctgtgtgtttgggacaggggtaaccaattcctgactactctatatgctgcatagaacctggagaggatttttcaaagtaaatgaatctcgaaagctggattgcagagcaaacgagtgcagtcaattcagccaggggcttgcaagagggagaaagagaaaaagactgtggaatggaaagtttcccaacccaagcctttcccaaggggtagccattctctgttctacagtttagggcttgcatgtgctttttctggagtggaaaaatacataagttataaggaatttaacagacagaaaggcgcacagaggaatttaaagtgtgggctggggggcgaggcggtgggcgggaggcgagcgggcgcaggcggaacaccgttttccaagctaagccgccgcaaataaaaaggcgtaaagggagagaagttggtgctcaacgtgagccaggagcagcgtcccggctcctcccctgctcattttaaaagcacttcttgtattgtttttaaggtgagaaataggaaagaaaacgccggcttgtgcgctcgctgcctgcctctctggctgtctgcttttgcagggctgctgggagtttttaagctctgtgagaatcctgggagttggtgatgtcagactagttgggtcatttgaaggttagcagcccgggtagggttcaccgaaagttcactcgcatatattaggcaattcaatctttcattctgtgtgacagaagtagtaggaagtgagctgttcagaggcaggagggtctattctttgccaaaggggggaccagaattcccccatgcgagctgtttgaggactgggatgccgagaacgcgagcgatccgagcagggtttgtctgggcaccgtcggggtaggatccggaacgcattcggaaggctttttgcaagcatttacttggaaggagaacttgggatctttctgggaaccccccgccccggctggattggccgagcaagcctggaaaatgcaattgaaacacagagcaccagctctgaggaactcgtcccaagccccccatctccacttcctccccctcgagtgtacaaaccctgcttcgtctgccaggacaaatcatcagggtaccactatggggtcagcgcctgtgagggatgtaagggctttttccgcagaagtattcagaagaatatgatttacacttgtcaccgagataagaactgtgttattaataaagtcaccaggaatcgatgccaatactgtcgactccagaagtgctttgaagtgggaatgtccaaagaatctgtcaggaatgacaggaacaagaaaaagaaggagacttcgaagcaagaatgcacagagagctatgaaatgacagctgagttggacgatctcacagagaagatccgaaaagctcaccaggaaactttcccttcactctgccagctgggtaaatacaccacgaattccagtgctgaccatcgagtccgactggacctgggcctctgggacaaattcagtgaactggccaccaagtgcattattaagatcgtggagtttgctaaacgtctgcctggtttcactggcttgaccatcgcagaccaaattaccctgctgaaggccgcctgcctggacatcctgattcttagaatttgcaccaggtataccccagaacaagacaccatgactttctcagacggccttaccctaaatcgaactcagatgcacaatgctggatttggtcctctgactgaccttgtgttcacctttgccaaccagctcctgcctttggaaatggatgacacagaaacaggccttctcagtgccatctgcttaatctgtggagaccgccaggaccttgaggaaccgacaaaagtagataagctacaagaaccattgctggaagcactaaaaatttatatcagaaaaagacgacccagcaagcctcacatgtttccaaagatcttaatgaaaatcacagatctccgtagcatcagtgctaaaggtgcrgagcgtgtaattaccttgaaaatggaaattcctggatcaatgccacctctcattcaagaaatgctggagaattctgaaggacatgaacccttgaccccaagttcaagtgggaacacagcagagcacagtcctagcatctcacccagctcagtggaaaacagtggggtcagtcagtcaccactcgtgcaataagacattttctagctacttcaaacattccccagtaccttcagttccaggatttaaaatgcaagaaaaaacatttttactgctgcttagtttttggactgaaaagatattaaaactcaagaaggaccaagaagttttcatatgtatcaatatatatactcctcactgtgtaacttacctagaaatacaaacttttccaattttaaaaaatcagccatttcatgcaaccagaaactagttaaaagcttctattttcctctttgaacactcaagattgcatggcaaagacccagtcaaaatgatttacccctggttaagtttctgaagactttgtacatacagaagtatggctctgttctttctatactgtatgtttggtgctttccttttgtcttgcatactcaaaataaccatgacaccaaggttatgaaatagactactgtacacgtctacctaggttcaaaaagataactgtcttgctttcatggaatagtcaagacatcaaggtaaggaaacaggactattgacaggactattgtacagtatgacaagataaggctgaagatattctactttagttagtatggaagcttgtctttgctctttctgatgctctcaaactgcatcttttatttcatgttgcccagtaaaagtatacaaattccctgcactagcagaagagaattctgtatcagtgtaactgccagttcagttaatcaaatgtcatttgttcaattgttaatgtcactttaaattaaaagtggtttattacttgtttaatgacataactacacagttagttaaaaaaaatttttttacagtaatgatagcctccaaggcagaaacacttttcagtgttaagtttttgtttacttgttcacaagccattagggaaatttcatgggataattagcaggctggtctaccacctggaccatgtaactctagtgtccttcctgattcatgcctgatattgggatttttttttccagccttcttgatgccaaggggctaattaatattaacaactcccaaagaaacaggcatagaatctgcctcctttgaccttgttcaatcactatgaagcagagtgaaagctgtggtagagtggttaacagatacaagtgtcagtttcttagttctcatttaagcactagtggaattttttttttttgatatattagcaagtctgtgatgtactttcactggctctgtttgtacattgagattgtttgtttaacaatgctttctatgttcatatactgtttacctttttccatggagtctcckggcaaagaataaaatatatttatttt

SEQ ID NO: 5226 - DNA, 2703 bp, Homo sapiens
agggcttcgcagcgtcacgccctccggggccgtggcggcgacggcggtgcgtagcttactcacaggggcggcccgtatccctccgccgccggcgcggctcggccctccctcccctggcccgccaatccccgcgcctcccgacctgcccctcggtcgggcccaccccgtgctccgacggccccaccccggcggcgcagcccgcccgcccgcgcgtccctcggtccacctgcagcagggaggaagacaggcaatccctccggctgtccgaccaagagaggccggccgagcccgaggcttgggcttttgctttctggcggagggatctgcggcggtttaggaggcggcgctgatcctgggaggaagaggcagctacggcggcggcggcggtggcggctagggcggcggcgaataaaggggccgccgccgggtgatgcggtgaccgctgcggcaggcccaggagctgagtgggccccggccctcagcccgtcccgccggacccgctttcctcaactctccatcttctcctgccgaccgagatcgccgaggcggcctcaggctccctagccccttccccgtcccttccccgcccccgtccccgccccgggggccgccgccacccgcctcccaccatggctctgaagagaatccacaaggaattgaatgatctggcacgggaccctccagcacagtgttcagcaggtcctgttggagatgatatgttccattggcaagctacaataatggggccaaatgacagtccctatcagggtggagtatttttcttgacaattcatttcccaacagattaccccttcaaaccacctaaggttgcatttacaacaagaatttatcatccaaatattaacagtaatggcagcatttgtcttgatattctacgatcacagtggtctccagcactaactatttcaaaagtactcttgtccatctgttctctgttgtgtgatcccaatccagatgatcctttagtgcctgagattgctcggatctacaaaacagatagagaaaagtacaacagaatagctcgggaatggactcagaagtatgcgatgtaattaaagaaattattggataacctctacaaataaagataggggaactctgaaagagaaagtccttttgatttccatttgactgctttctatgagcccacgcctcatcttcccctgtgcacatgtttacctgatacagcagtgctgcgtgttgtacatacttggaacaacaaactagaaatactgtacttctgtaccaacattgcctcctagcagagaagtgtgtgtgtgacaagccagttctacaggcattacctaggtgtgagactaaaagcttttcttattgacttaaatttggataacagcaaggtgtgaggggggtggtgggtatggtgtgtgcttggatgggaaagaaaaggctccactcacctataggagattatttttaagtggaatccatttaaactcaaaacagttatgaaaagcaaggtgaagaacatgaagctgtgtctgtattcattttattccgaaggagctacgtcttaggtgaaagttatgaccaaccagattaaactctacccacatcctgcattttaaggtctaagtttaactggtcaacatttaaatggattggagctattagtacatcaagtgtgatgggctttgttcccaactcttttacatcwccctaccccttcaacctttggcctttcagcccttctttctctcttccatattctttggtttgtatgtggtttctcagttaatacatagctaatagctcttatttttcttatgtttttaaccgcttaggtctatttggatgtaagggtgaaaattcatttgatggaaatacttgtgtatatttaaagacccaattkctcctctggagcttgtactttcaagaatgattaatctgtgtaataaactggttactacagtcattacatataattttgtgtgaataggctttttcatttttaagaagtttgtctagctgagattagtggtggattttctcccacttctgaaatgttcatttatactggttgcattttaagatcatgaaacaattccagttacattgtaaaaaggatatcttacgagtaattttattgaacaagttagaggcataagcttaagagcatttccatgaaacaacacatgcagcattccaggaacttgattgttaaattcaataagaaatttgctttattaatgaaactaagctgcatttcatcaaaaccttgtgacattcccttggtacataggacataaaacacagaggcattgctatttggtaagttaagcttctgtgattgtaattataaaagagcaacattgaccaaacctgggaaacaagagcacagtcttgtttggagagtctacataattactttgcactaacatttgcaggatgttcacacaattttaaattgtactgtatgtggctttttgaagtcttcccttgaccctagtaaaatatagcttgaaacttgtaaacaactgtgtttgccagaaacatcattcatgtgaactaggcaagttaccttttttccccccttcttttcctaattgtaaactaggccaacctgaaagccatggctgatgctctagccatcaggttctttcaaatgcatctttacactcttgcacaaaagttaaggaataaatgtccactgcttttggtttt

SEQ ID NO: 5227 - DNA, 2424 bp, Homo sapiens
ggagctgggattttaaggcagtagcttgccgatgaccccagctgaataaagcccttccttctacaacttggtgtctgagaggttttatctatggctcgtcctgctacatttcttggttccctgaccgggaagcaaggtgactgacagacggccgaggcagccccttaggcggcttaagcctgccctgtggagcatccctgtgggggactccggccagcctgagtgacgcgatccaaagagcgctcccgggtaggaaattgccctggtggaatgcctcgccagagcagcgtgtagcaggcccccgcggaggattaacacagtggctgaacaccgggaaggaactggcacttgggagtccggacatctgaaacttggaattgaatgatctggcacgggaccctccagcacagtgttcagcaggtcctgttggagatgatatgttccattggcaagctacaataatggggccaaatgacagtccctatcagggtggagtatttttcttgacaattcatttcccaacagattaccccttcaaaccacctaaggttgcatttacaacaagaatttatcatccaaatattaacagtaatggcagcatttgtcttgatattctacgatcacagtggtctccagcactaactatttcaaaagtactcttgtccatctgttctctgttgtgtgatcccaatccagatgatcctttagtgcctgagattgctcggatctacaaaacagatagagaaaagtacaacagaatagctcgggaatggactcagaagtatgcgatgtaattaaagaaattattggataacctctacaaataaagataggggaactctgaaagagaaagtccttttgatttccatttgactgctttctatgagcccacgcctcatcttcccctgtgcacatgtttacctgatacagcagtgctgcgtgttgtacatacttggaacaacaaactagaaatactgtacttctgtaccaacattgcctcctagcagagaagtgtgtgtgtgacaagccagttctacaggcattacctaggtgtgagactaaaagcttttcttattgacttaaatttggataacagcaaggtgtgaggggggtggtgggtatggtgtgtgcttggatgggaaagaaaaggctccactcacctataggagattatttttaagtggaatccatttaaactcaaaacagttatgaaaagcaaggtgaagaacatgaagctgtgtctgtattcattttattccgaaggagctacgtcttaggtgaaagttatgaccaaccagattaaactctacccacatcctgcattttaaggtctaagtttaactggtcaacatttaaatggattggagctattagtacatcaagtgtgatgggctttgttcccaactcttttacatcwccctaccccttcaacctttggcctttcagcccttctttctctcttccatattctttggtttgtatgtggtttctcagttaatacatagctaatagctcttatttttcttatgtttttaaccgcttaggtctatttggatgtaagggtgaaaattcatttgatggaaatacttgtgtatatttaaagacccaattkctcctctggagcttgtactttcaagaatgattaatctgtgtaataaactggttactacagtcattacatataattttgtgtgaataggctttttcatttttaagaagtttgtctagctgagattagtggtggattttctcccacttctgaaatgttcatttatactggttgcattttaagatcatgaaacaattccagttacattgtaaaaaggatatcttacgagtaattttattgaacaagttagaggcataagcttaagagcatttccatgaaacaacacatgcagcattccaggaacttgattgttaaattcaataagaaatttgctttattaatgaaactaagctgcatttcatcaaaaccttgtgacattcccttggtacataggacataaaacacagaggcattgctatttggtaagttaagcttctgtgattgtaattataaaagagcaacattgaccaaacctgggaaacaagagcacagtcttgtttggagagtctacataattactttgcactaacatttgcaggatgttcacacaattttaaattgtactgtatgtggctttttgaagtcttcccttgaccctagtaaaatatagcttgaaacttgtaaacaactgtgtttgccagaaacatcattcatgtgaactaggcaagttaccttttttccccccttcttttcctaattgtaaactaggccaacctgaaagccatggctgatgctctagccatcaggttctttcaaatgcatctttacactcttgcacaaaagttaaggaataaatgtccactgcttttggtttt

SEQ ID NO: 5228 - DNA, 2050 bp, Homo sapiens
gaattgaatgatctggcacgggaccctccagcacagtgttcagcaggtcctgttggagatgatatgttccattggcaagctacaataatggggccaaatgacagtccctatcagggtggagtatttttcttgacaattcatttcccaacagattaccccttcaaaccacctaaggttgcatttacaacaagaatttatcatccaaatattaacagtaatggcagcatttgtcttgatattctacgatcacagtggtctccagcactaactatttcaaaagtactcttgtccatctgttctctgttgtgtgatcccaatccagatgatcctttagtgcctgagattgctcggatctacaaaacagatagagaaaagtacaacagaatagctcgggaatggactcagaagtatgcgatgtaattaaagaaattattggataacctctacaaataaagataggggaactctgaaagagaaagtccttttgatttccatttgactgctttctatgagcccacgcctcatcttcccctgtgcacatgtttacctgatacagcagtgctgcgtgttgtacatacttggaacaacaaactagaaatactgtacttctgtaccaacattgcctcctagcagagaagtgtgtgtgtgacaagccagttctacaggcattacctaggtgtgagactaaaagcttttcttattgacttaaatttggataacagcaaggtgtgaggggggtggtgggtatggtgtgtgcttggatgggaaagaaaaggctccactcacctataggagattatttttaagtggaatccatttaaactcaaaacagttatgaaaagcaaggtgaagaacatgaagctgtgtctgtattcattttattccgaaggagctacgtcttaggtgaaagttatgaccaaccagattaaactctacccacatcctgcattttaaggtctaagtttaactggtcaacatttaaatggattggagctattagtacatcaagtgtgatgggctttgttcccaactcttttacatcwccctaccccttcaacctttggcctttcagcccttctttctctcttccatattctttggtttgtatgtggtttctcagttaatacatagctaatagctcttatttttcttatgtttttaaccgcttaggtctatttggatgtaagggtgaaaattcatttgatggaaatacttgtgtatatttaaagacccaattkctcctctggagcttgtactttcaagaatgattaatctgtgtaataaactggttactacagtcattacatataattttgtgtgaataggctttttcatttttaagaagtttgtctagctgagattagtggtggattttctcccacttctgaaatgttcatttatactggttgcattttaagatcatgaaacaattccagttacattgtaaaaaggatatcttacgagtaattttattgaacaagttagaggcataagcttaagagcatttccatgaaacaacacatgcagcattccaggaacttgattgttaaattcaataagaaatttgctttattaatgaaactaagctgcatttcatcaaaaccttgtgacattcccttggtacataggacataaaacacagaggcattgctatttggtaagttaagcttctgtgattgtaattataaaagagcaacattgaccaaacctgggaaacaagagcacagtcttgtttggagagtctacataattactttgcactaacatttgcaggatgttcacacaattttaaattgtactgtatgtggctttttgaagtcttcccttgaccctagtaaaatatagcttgaaacttgtaaacaactgtgtttgccagaaacatcattcatgtgaactaggcaagttaccttttttccccccttcttttcctaattgtaaactaggccaacctgaaagccatggctgatgctctagccatcaggttctttcaaatgcatctttacactcttgcacaaaagttaaggaataaatgtccactgcttttggtttt

SEQ ID NO: 5229 - DNA, 2527 bp, Homo sapiens
agggcttcgcagcgtcacgccctccggggccgtggcggcgacggcggtgcgtagcttactcacaggggcggcccgtatccctccgccgccggcgcggctcggccctccctcccctggcccgccaatccccgcgcctcccgacctgcccctcggtcgggcccaccccgtgctccgacggccccaccccggcggcgcagcccgcccgcccgcgcgtccctcggtccacctgcagcagggaggaagacaggcaatccctccggctgtccgaccaagagaggccggccgagcccgaggcttgggcttttgctttctggcggagggatctgcggcggtttaggaggcggcgctgatcctgggaggaagaggcagctacggcggcggcggcggtggcggctagggcggcggcgaataaaggggccgccgccgggtgatgcggtgaccgctgcggcaggcccaggagctgagtgggccccggccctcagcccgtcccgccggacccgctttcctcaactctccatcttctcctgccgaccgagatcgccgaggcggcctcaggctccctagccccttccccgtcccttccccgcccccgtccccgccccgggggccgccgccacccgcctcccaccatggctctgaagagaatccacaaggaattgaatgatctggcacgggaccctccagcacagtgttcagcaggtcctgttggagatgatatgttccattggcaagctacaataatggggccaaatgacagtccctatcagggtggagtatttttcttgacaattcatttcccaacagattaccccttcaaaccacctaaggttgcatttacaacaagaatttatcatccaaatattaacagtaatggcagcatttgtcttgatattctacgatcacagtggtctccagcactaactatttcaaaagtactcttgtccatctgttctctgttgtgtgatcccaatccagatgatcctttagtgcctgagattgctcggatctacaaaacagatagagaaaagtacaacagaatagctcgggaatggactcagaagtatgcgatgtaattaaagaaattattggataacctctacaaataaagataggggaactctgaaagagaaagtccttttgatttccatttgactgctttctatgagcccacgcctcatcttcccctgtgcacatgtttacctgatacagcagtgctgcgtgttgtacatacttggaacaacaaactagaaatactgtacttctgtaccaacattgcctcctagcagagaagtgtgtgtgtgacaagccattatgaaaagcaaggtgaagaacatgaagctgtgtctgtattcattttattccgaaggagctacgtcttaggtgaaagttatgaccaaccagattaaactctacccacatcctgcattttaaggtctaagtttaactggtcaacatttaaatggattggagctattagtacatcaagtgtgatgggctttgttcccaactcttttacatcwccctaccccttcaacctttggcctttcagcccttctttctctcttccatattctttggtttgtatgtggtttctcagttaatacatagctaatagctcttatttttcttatgtttttaaccgcttaggtctatttggatgtaagggtgaaaattcatttgatggaaatacttgtgtatatttaaagacccaattkctcctctggagcttgtactttcaagaatgattaatctgtgtaataaactggttactacagtcattacatataattttgtgtgaataggctttttcatttttaagaagtttgtctagctgagattagtggtggattttctcccacttctgaaatgttcatttatactggttgcattttaagatcatgaaacaattccagttacattgtaaaaaggatatcttacgagtaattttattgaacaagttagaggcataagcttaagagcatttccatgaaacaacacatgcagcattccaggaacttgattgttaaattcaataagaaatttgctttattaatgaaactaagctgcatttcatcaaaaccttgtgacattcccttggtacataggacataaaacacagaggcattgctatttggtaagttaagcttctgtgattgtaattataaaagagcaacattgaccaaacctgggaaacaagagcacagtcttgtttggagagtctacataattactttgcactaacatttgcaggatgttcacacaattttaaattgtactgtatgtggctttttgaagtcttcccttgaccctagtaaaatatagcttgaaacttgtaaacaactgtgtttgccagaaacatcattcatgtgaactaggcaagttaccttttttccccccttcttttcctaattgtaaactaggccaacctgaaagccatggctgatgctctagccatcaggttctttcaaatgcatctttacactcttgcacaaaagttaaggaataaatgtccactgcttttggtttt

SEQ ID NO: 5230 - DNA, 1647 bp, Homo sapiens
actaagtgagcaactctgttttcaaagcttttgggtggagctgaagcacactgcttattaaagtacactattcaggyatatcatgtaggtttactttctgtgtttctagagaccaagaagcgggacgttcaccatgggaagaaaatcgctgtaccttctgattgtggggatmctcatagcatattatatttatacgcctctcccagataacgttgaggagccatggagaatgatgtggataaacgcacatctgaaaactatacaaaatttggctacatttgtggagctcctgggacttcaccattttatggattcctttaaggttgtcgggagctttgatgaagtcccaccaacctcagatgaaaatgtcactgtgactgagacaaaattcaacaacattcttgttcgggtatatgtgccaaagagaaagtctgaagcactaagaagggggttgttttacatccatggtggaggctggtgcgtgggaagtgctgctctaagtggttatgacttgctgtcaagatggacagcagacagacttgatgctgtcgtcgtatcaaccaactacagattagcacctaagtatcatttcccaattcaatttgaagatgtatataatgccttaaggtggttcttacgtaaaaaarttcttgcaaaatatggtgtgaaccctgagagaatcggtatttctggagatagtgcaggagggaatttagctgcagcagtgactcaacagctccttgatgacccagatgtcaagatcaaactcaagatccagtctttaatttatcctgcccttcagcctcttgatgtagatttaccgtcatatcaagaaaattcaaattttctatttctatccaaatcactcatggtcagattctggagtgaatattttaccactgatagatcacttgaaaaagccatgctttccagacaacatgtacctgtggaatcaagtcatctcttcaaatttrttaattggagttccctgctccctgagaggtttataaaaggacatgtttataacaatccaaattatggcagttctgagctggctaaaaaatatccagggttcctagatgtgagggcagcccctttgttggctgatgacaacaaattacgtggcttacccctgacctatgtcatcacctgtcaatatgatctcttaagagatgatggactcatgtatgtcacccgacttcgcaacactggggttcaggtgactcataaccatgttgaggatggattccayggagcattttcatttctgggacttaaaattagtcacagacttataaatcagtatattgagtggctaaaggaaaatctayagtaaaacatgtagctataacatattttaaaaataaaatctgaaaacctcagaaaatttgcattagaaattggtctttcttaraatggtctagttaagttccacatgtagcataattcttaaataggcacttttctgttttttttttcttactgkgggatttcatttcaattttctacattgtctatctgctttttctgagattttccttcttacactgttaatcttattttaaaaaatattacattcttgtatactttatttttgtgagttggctactatttacgatgcaagagaataaatgtgagcaaatattg

SEQ ID NO: 5231 - DNA, 1922 bp, Homo sapiens
catatgtttgagctactctgtgacatttaatcattaatagaagatttggggtatacactacagatgggccctgtttgctgaaatgttggggccaaacaacttgatagagcctatgatgttcctttcaagctttctaaagtttccaccaacctcagatgaaaatgtaactgtgagaagtaaatttaacaacattgttgtctgcatatgtgtgccaaaatggaagacagaatcatgaaaaagaagcttattttataaccatggtggtggctcatgtttgagtagtaatgctccttggtctggccactgaagaatgacagagcccagggcccccggtcccatctgccatcactgctttggagcccagggtaactctgccagtaacagagaccaagaagcgggacgttcaccatgggaagaaaatcgctgtaccttctgattgtggggatmctcatagcatattatatttatacgcctctcccagataacgttgaggagccatggagaatgatgtggataaacgcacatctgaaaactatacaaaatttggctacatttgtggagctcctgggacttcaccattttatggattcctttaaggttgtcgggagctttgatgaagtcccaccaacctcagatgaaaatgtcactgtgactgagacaaaattcaacaacattcttgttcgggtatatgtgccaaagagaaagtctgaagcactaagaagggggttgttttacatccatggtggaggctggtgcgtgggaagtgctgctctaagtggttatgacttgctgtcaagatggacagcagacagacttgatgctgtcgtcgtatcaaccaactacagattagcacctaagtatcatttcccaattcaatttgaagatgtatataatgccttaaggtggttcttacgtaaaaaarttcttgcaaaatatggtgtgaaccctgagagaatcggtatttctggagatagtgcaggagggaatttagctgcagcagtgactcaacagctccttgatgacccagatgtcaagatcaaactcaagatccagtctttaatttatcctgcccttcagcctcttgatgtagatttaccgtcatatcaagaaaattcaaattttctatttctatccaaatcactcatggtcagattctggagtgaatattttaccactgatagatcacttgaaaaagccatgctttccagacaacatgtacctgtggaatcaagtcatctcttcaaatttrttaattggagttccctgctccctgagaggtttataaaaggacatgtttataacaatccaaattatggcagttctgagctggctaaaaaatatccagggttcctagatgtgagggcagcccctttgttggctgatgacaacaaattacgtggcttacccctgacctatgtcatcacctgtcaatatgatctcttaagagatgatggactcatgtatgtcacccgacttcgcaacactggggttcaggtgactcataaccatgttgaggatggattccayggagcattttcatttctgggacttaaaattagtcacagacttataaatcagtatattgagtggctaaaggaaaatctayagtaaaacatgtagctataacatattttaaaaataaaatctgaaaacctcagaaaatttgcattagaaattggtctttcttaraatggtctagttaagttccacatgtagcataattcttaaataggcacttttctgttttttttttcttactgkgggatttcatttcaattttctacattgtctatctgctttttctgagattttccttcttacactgttaatcttattttaaaaaatattacattcttgtatactttatttttgtgagttggctactatttacgatgcaagagaataaatgtgagcaaatattg

SEQ ID NO: 5232 - DNA, 6440 bp, Homo sapiens
ccggtctataggtgcataccaccacaccaggctaatttttttttttttgagacggagtctcactctgtcacccaggctggagtgcaatggygcgatctttgctcactgcaacctctgccacccgggttcaagcaattctcctgcctcagctcctgagtagctgggattacaggcgcccgccaccacgcccggctaatttttgtatttttagtagagacgaggtttcaccatcttggccaggctggtcttgaactcctgaccttgtgatctacctgccagggccttccaaagtgctgggattacggacgtgagccaccacgcctggcccaggctaattttttgaaattttaatagaggcagggtcttgctgtattgcccaggttgctctcacattcctagccttaagccatcctcctatctcggcctcacaaagtgctgggattacaggtgtaagccactgtgcctggttttgggcaagtttcttgtcctgactgtgtcttgggttctcacctgttgattggggatacccttgttgcctacctccaagtaattttatgaggatgaaactcatagcttgtcagtgggaagtgcttaggtaatgagctactagtggtggcagtggctgtgatggtggtattaataccactcctactggatggtctctaatactatctccttccttccctaccagcaacatgtcatggtttagtggcctcctggtccctaaagtggatgaacggaaaacagcctggggtgaacgcaatgggcagaagcgttcgcggcgccgtggcactcgggcmggtggcttctgcacgccccgctatatgagctgcctccgggatgcagagccacccagccccacccctgcgggcccccctcggtgcccctggcaggatgacgccttcatccggaggggcggcccaggcaagggcaaggagctggggctgcgggcagtggccctgggcttcgaggataccgaggtgacaacgacagcgggcgggacggctgaggtggcgcccgacgcggtgcccaggagtgggmgatcctgctggcgccgtctggtgcaggtgttccagtcgaagcagttccgttcggccaagctggagcgcctgtaccagcggtacttcttccagatgaaccagagcagcctgacgctgctgatggcggtgctggtgctgctcacagcggtgctgctggctttccacgccgcacccgcccgccctcagcctgcctatgtggcactgttggcctgtgccgccgccctgttcgtggggctcatggtggtgtgtaaccggcatagcttccgccaggactccatgtgggtggtgagytacgtggtgctgggcatcctggcggcagtgcaggtcgggggcgctctcgcagcagacccgcgcagcccctctgcgggcctctggtgccctgtgttctttgtctacatcgcctacacgctcctccccatccgcatgcgggctgccgtcctcagcggcctgggcctctccaccttgcatttgatcttggcctggcaacttaaccgtggtgatgccttcctctggaagcagctcggtgccaatgtgctgctgttcctctgcaccaacgtcattggcatctgcacacactatccagcagaggtgtctcagcgccaggcctttcaggagacccgcggttacatccaggcccggctccacctgcagcatgagaatcggcagcaggagcggctgctgctgtcggtattgccccagcacgttgccatggagatgaaagaagacatcaacacaaaaaaagaagacatgatgttccacaagatctacatacagaagcatgacaatgtcagcatcctgtttgcagacattgagggcttcaccagcctggcatcccagtgcactgcgcaggagctggtcatgaccctgaatgagctctttgcccggtttgacaagctggctgcggagaatcactgcctgaggatcaagatcttgggggactgttactactgtgtgtcagggctgccggaggcccgggccgaccatgcccactgctgtgtggagatgggggtagacatgattgaggccatctcgctggtacgtgaggtgacaggtgtgaatgtgaayatgcgcgtgggcatccacagcgggcgcgtgcactgcggcgtccttggcttgcggaaatggcagttcgatgtgtggtccaatgatgtgaccctggccaaccacatggaggcaggaggccgggctggccgcatccacatcactcgggcaacactgcagtacctgaacggggactacgaggtggagccaggccgtggtggcgagcgcaacgcgtacctcaaggagcagcacattgagactttcctcatcctgggcgcmagccagaaacggaaagaggagaaggccatgctggccaagctgcagcggactcgggccaactccatggaagggctgatgccgcgctgggttcctgatcgtgccttctcccggaccaaggactccaaggccttccgccagatgggcattgatgattccagcaaagacaarcggggcacccaagatgccctgaaccctgaggatgaggtggatgagttcctgagccgtgccatcgatgcccgcagcattgatcagctgcggaaggaccatgtgcgccggtttctgctcaccttccagagagaggatcttgagaagaagtactcccggaaggtggatccccgcttcggrgcctacgttkcctgtgccmtgttggtcttctgcttcatctgcttcatccagcttctcatcttcccacactccaccctgatgcttgggatctatgccagcatcttcctgctgctgctaatcaccgtgctgatctgtgctgtgtactcctgtggttctctgttccctaaggccctgcaacgtctgtcccgcagcattgtccgctcacgggcacatagcaccgcagttggcatcttttccgtcctgcttgtgtttacttctgccattgccaacatgtacttcatcgggaacatgctgctgagtctcttggccagctctgtcttcctgcacatcagcagcatcgggaagttggccatgatctttgtcttggggctcatctatttggtgctgcttctgctgggtcccccagccaccatctttgacaactatgacctactgcttggcgtccatggcttggcttcttccaatgagacctttgatgggctggactgtccagctgcagggagggtggccctcaaatatatgacccctgtgattctgctggtgtttgcgctggcgctgtatctgcatgctcagcaggtggagtcgactgcccgcctagacttcctctggaaactacaggcaacaggggagaaggaggagatggaggagctacaggcatacaaccggaggctgctgcataacattctgcccaaggacgtggcggcccacttcctggcccgggagcgccgcaatgatgaactctactatcagtcgtgtgagtgtgtggctgttatgtttgcctccattgccaacttctctgagttctatgtggagctggaggcaaacaatgagggtgtcgagtgcctgcggctgctcaacgagatcatcgctgactttgatgagattatcagcgaggagcggttccggcagctggaaaagatcaagacgattggtagcacytacatggctgcctcagggctgaacgccagcacctacgatcaggtgggccgctcccacatcactgccctggctgactacgccatgcggctcatggagcagatgaagcacatcaatgagcactccttcaacaatttccagatgaagattgggctgaacatgggcccagtcgtggcaggtgtcatcggggctcggaagccacagtatgacatctgggggaacacagtgaatgtctctagtcgtatggacagcacgggggtccccgaccgaatccaggtgaccacggacctgtaccaggttctagctgccaagggctaccagctggagtgtcgaggggtggtcaaggtgaagggcaagggggagatgaccacctacttcctcaatgggggccccagcagttaacagggcccagccacaaattcagctgaagggaccaaggtgggcattgagtggactctgtgctcactgggtggrgctgtggcagggggcactgagcctccagaccctgctaaccacaaaaggsaacatcccagcaggctgtgcttggatcatgctcgtctgccctcaagctggaaaacaaggggctacctaccgagaggattatgcaagtgactttctttcttacttggggtagggctgttccctctccaatcttccagcctttgggagcaggggaggggtcagtagcagaagcagagggaggcctcttgcctgagggattaaaatggcagcttgccatgcctacccttccctgtctgtctgggcagcaggttcagggctgagcccttcttttccctcttttttcctgggaatattttgtacaatattttgtacaaagacaggcatgaggagtgcctattccatgcttgcctttgcaatacctgcatccccagcactggtcctgggcacttccccaccccagccaggtgtccctcctatgcacagagcagaggagggagaagctctggggagccagctttggccatatttcaggagaatgtttccatgtgccaaatcttagtcccatgatctgtccccaaaggggaacaaagggacctctgacagcttagatttagccccagttcctgcacgctccagggaacggggtgtctggcctcactggtactgtgaaaaatgctcagagagcaagcctgtgtgtggggatgtcaggtcaggagctggaagttcacctgcaggtgccaaagagcaggccggccagggctggggcagtgccagactctgatctgaggaccccgtcggggtccagatcaggtcactctgccccagtgctctcttgctgtctgctgacaagggggcatggagcatctcttcctcttctgttgccaaatagaaaagggtcagggcatggagaaaggtgaccctgatcccaaacctgccctcccaagtctctggtgttggggagggcccgtgtgtttgtgtaactgtgtgtgcatgttggtctttgtgtgcatatctgttttccaggtctatgtgagtccttgtgctcctgctcctcagctctccaccccaggttgcctctctcctgtgggcctctgtcttctgggaataaagcagggtttcctacttcaggggatgtagagagatgcccaggttgcacaggagtgggatggggtgtggtagcaaaaggagggagaggagtcctttttgtgccaaatccctaagtgccgttcgggggccatgtgtgcagcatgactctccctgtctgtggcagggacccaagcgcttgcttaagccccagtgctccatgccagcacttgaactgtctggggtttgatggacagaggctgaggaatttcctggcttccccagatagtgtcctgggacatggtatgctttggggctggggtagcatggaatccctytgaggacctggatactggtactacggggtggggaagaggaaccttaaacttggctttccccagccttcagcctgagtctagcatgtttctagctccccagtcccttgtgaagccttgagggctggcagaagggttaggaggttgaactctagattcccttcctgtctttgccttccttttacccctttccctgcaacctccttgactctggcctgaatttgttggtgcctcagtttctctgtctgtacctatttaagccaaaggcactagcctgaattttgcttgaagatcactttgtcttggaaatgactagagaggcagaggagaagggtttccagagttgctaggtttgggagtggaaggggcaggcagtgcacttgcccctcctcatgccccttctgacaccagctccctgtggaggcctggtttctgggtaatgcctcccttgggcatcttcatgcatcaaccaaatgggccatcaggtacttcattagtcatggcagaaggaggggaaaagacttgttttccagacagaaaatctactcccctgtccccagccatatccctggataggaagggataggaagagactacttggtgccatggggtaggggtgagggtataagtagatcagagtgggaagacctcagccttgggtggcttgtctctgcttcttgccaggtgggagggcctgtccacaccctggatccccgtaccacagtgccagccatgcccttcccctgggctaccattgtccctttcctcacccagttggtagaggagtcaggaggtgggaggccgtgggctttggttttataatgtaaccactgtgggggtgggggaggatggtgaaccatgtatttcagtgaaatatttaatatatttaaatatcaataaaatcaaactctttgtaaaa

SEQ ID NO: 5233 - DNA, 6599 bp, Homo sapiens
ccggtctataggtgcataccaccacaccaggctaatttttttttttttgagacggagtctcactctgtcacccaggctggagtgcaatggygcgatctttgctcactgcaacctctgccacccgggttcaagcaattctcctgcctcagctcctgagtagctgggattacaggcgcccgccaccacgcccggctaatttttgtatttttagtagagacgaggtttcaccatcttggccaggctggtcttgaactcctgaccttgtgatctacctgccagggccttccaaagtgctgggattacggacgtgagccaccacgcctggcccaggctaattttttgaaattttaatagaggcagggtcttgctgtattgcccaggttgctctcacattcctagccttaagccatcctcctatctcggcctcacaaagtgctgggattacaggtgtaagccactgtgcctggttttgggcaagtttcttgtcctgactgtgtcttgggttctcacctgttgattggggatacccttgttgcctacctccaagtaattttatgaggatgaaactcatagcttgtcagtgggaagtgcttaggtaatgagctactagtggtggcagtggctgtgatggtggtattaataccactcctactggatggtctctaatactatctccttccttccctaccagcaacatgtcatggtttagtggcctcctggtccctaaagtggatgaacggaaaacagcctggggtgaacgcaatgggcagaagcgttcgcggcgccgtggcactcgggcmggtggcttctgcacgccccgctatatgagctgcctccgggatgcagagccacccagccccacccctgcgggcccccctcggtgcccctggcaggatgacgccttcatccggaggggcggcccaggcaagggcaaggagctggggctgcgggcagtggccctgggcttcgaggataccgaggtgacaacgacagcgggcgggacggctgaggtggcgcccgacgcggtgcccaggagtgggmgatcctgctggcgccgtctggtgcaggtgttccagtcgaagcagttccgttcggccaagctggagcgcctgtaccagcggtacttcttccagatgaaccagagcagcctgacgctgctgatggcggtgctggtgctgctcacagcggtgctgctggctttccacgccgcacccgcccgccctcagcctgcctatgtggcactgttggcctgtgccgccgccctgttcgtggggctcatggtggtgtgtaaccggcatagcttccgccaggactccatgtgggtggtgagytacgtggtgctgggcatcctggcggcagtgcaggtcgggggcgctctcgcagcagacccgcgcagcccctctgcgggcctctggtgccctgtgttctttgtctacatcgcctacacgctcctccccatccgcatgcgggctgccgtcctcagcggcctgggcctctccaccttgcatttgatcttggcctggcaacttaaccgtggtgatgccttcctctggaagcagctcggtgccaatgtgctgctgttcctctgcaccaacgtcattggcatctgcacacactatccagcagaggtgtctcagcgccaggcctttcaggagacccgcggttacatccaggcccggctccacctgcagcatgagaatcggcagcaggagcggctgctgctgtcggtattgccccagcacgttgccatggagatgaaagaagacatcaacacaaaaaaagaagacatgatgttccacaagatctacatacagaagcatgacaatgtcagcatcctgtttgcagacattgagggcttcaccagcctggcatcccagtgcactgcgcaggagctggtcatgaccctgaatgagctctttgcccggtttgacaagctggctgcggagaatcactgcctgaggatcaagatcttgggggactgttactactgtgtgtcagggctgccggaggcccgggccgaccatgcccactgctgtgtggagatgggggtagacatgattgaggccatctcgctggtacgtgaggtgacaggtgtgaatgtgaayatgcgcgtgggcatccacagcgggcgcgtgcactgcggcgtccttggcttgcggaaatggcagttcgatgtgtggtccaatgatgtgaccctggccaaccacatggaggcaggaggccgggctggccgcatccacatcactcgggcaacactgcagtacctgaacggggactacgaggtggagccaggccgtggtggcgagcgcaacgcgtacctcaaggagcagcacattgagactttcctcatcctgggcgcmagccagaaacggaaagaggagaaggccatgctggccaagctgcagcggactcgggccaactccatggaagggctgatgccgcgctgggttcctgatcgtgccttctcccggaccaaggactccaaggccttccgccagatgggcattgatgattccagcaaagacaarcggggcacccaagatgccctgaaccctgaggatgaggtggatgagttcctgagccgtgccatcgatgcccgcagcattgatcagctgcggaaggaccatgtgcgccggtttctgctcaccttccagagagaggatcttgagaagaagtactcccggaaggtggatccccgcttcggrgcctacgttkcctgtgccmtgttggtcttctgcttcatctgcttcatccagcttctcatcttcccacactccaccctgatgcttgggatctatgccagcatcttcctgctgctgctaatcaccgtgctgatctgtgctgtgtactcctgtggttctctgttccctaaggccctgcaacgtctgtcccgcagcattgtccgctcacgggcacatagcaccgcagttggcatcttttccgtcctgcttgtgtttacttctgccattgccaacatgttcacctgtaaccacacccccatacggagctgtgcagcccggatgctgaatttaacacctgctgacatcactgcctgccacctgcagcagctcaattactctctgggcctggatgctcccctgtgtgagggcaccatgcccacctgcagctttcctgagtacttcatcgggaacatgctgctgagtctcttggccagctctgtcttcctgcacatcagcagcatcgggaagttggccatgatctttgtcttggggctcatctatttggtgctgcttctgctgggtcccccagccaccatctttgacaactatgacctactgcttggcgtccatggcttggcttcttccaatgagacctttgatgggctggactgtccagctgcagggagggtggccctcaaatatatgacccctgtgattctgctggtgtttgcgctggcgctgtatctgcatgctcagcaggtggagtcgactgcccgcctagacttcctctggaaactacaggcaacaggggagaaggaggagatggaggagctacaggcatacaaccggaggctgctgcataacattctgcccaaggacgtggcggcccacttcctggcccgggagcgccgcaatgatgaactctactatcagtcgtgtgagtgtgtggctgttatgtttgcctccattgccaacttctctgagttctatgtggagctggaggcaaacaatgagggtgtcgagtgcctgcggctgctcaacgagatcatcgctgactttgatgagattatcagcgaggagcggttccggcagctggaaaagatcaagacgattggtagcacytacatggctgcctcagggctgaacgccagcacctacgatcaggtgggccgctcccacatcactgccctggctgactacgccatgcggctcatggagcagatgaagcacatcaatgagcactccttcaacaatttccagatgaagattgggctgaacatgggcccagtcgtggcaggtgtcatcggggctcggaagccacagtatgacatctgggggaacacagtgaatgtctctagtcgtatggacagcacgggggtccccgaccgaatccaggtgaccacggacctgtaccaggttctagctgccaagggctaccagctggagtgtcgaggggtggtcaaggtgaagggcaagggggagatgaccacctacttcctcaatgggggccccagcagttaacagggcccagccacaaattcagctgaagggaccaaggtgggcattgagtggactctgtgctcactgggtggrgctgtggcagggggcactgagcctccagaccctgctaaccacaaaaggsaacatcccagcaggctgtgcttggatcatgctcgtctgccctcaagctggaaaacaaggggctacctaccgagaggattatgcaagtgactttctttcttacttggggtagggctgttccctctccaatcttccagcctttgggagcaggggaggggtcagtagcagaagcagagggaggcctcttgcctgagggattaaaatggcagcttgccatgcctacccttccctgtctgtctgggcagcaggttcagggctgagcccttcttttccctcttttttcctgggaatattttgtacaatattttgtacaaagacaggcatgaggagtgcctattccatgcttgcctttgcaatacctgcatccccagcactggtcctgggcacttccccaccccagccaggtgtccctcctatgcacagagcagaggagggagaagctctggggagccagctttggccatatttcaggagaatgtttccatgtgccaaatcttagtcccatgatctgtccccaaaggggaacaaagggacctctgacagcttagatttagccccagttcctgcacgctccagggaacggggtgtctggcctcactggtactgtgaaaaatgctcagagagcaagcctgtgtgtggggatgtcaggtcaggagctggaagttcacctgcaggtgccaaagagcaggccggccagggctggggcagtgccagactctgatctgaggaccccgtcggggtccagatcaggtcactctgccccagtgctctcttgctgtctgctgacaagggggcatggagcatctcttcctcttctgttgccaaatagaaaagggtcagggcatggagaaaggtgaccctgatcccaaacctgccctcccaagtctctggtgttggggagggcccgtgtgtttgtgtaactgtgtgtgcatgttggtctttgtgtgcatatctgttttccaggtctatgtgagtccttgtgctcctgctcctcagctctccaccccaggttgcctctctcctgtgggcctctgtcttctgggaataaagcagggtttcctacttcaggggatgtagagagatgcccaggttgcacaggagtgggatggggtgtggtagcaaaaggagggagaggagtcctttttgtgccaaatccctaagtgccgttcgggggccatgtgtgcagcatgactctccctgtctgtggcagggacccaagcgcttgcttaagccccagtgctccatgccagcacttgaactgtctggggtttgatggacagaggctgaggaatttcctggcttccccagatagtgtcctgggacatggtatgctttggggctggggtagcatggaatccctytgaggacctggatactggtactacggggtggggaagaggaaccttaaacttggctttccccagccttcagcctgagtctagcatgtttctagctccccagtcccttgtgaagccttgagggctggcagaagggttaggaggttgaactctagattcccttcctgtctttgccttccttttacccctttccctgcaacctccttgactctggcctgaatttgttggtgcctcagtttctctgtctgtacctatttaagccaaaggcactagcctgaattttgcttgaagatcactttgtcttggaaatgactagagaggcagaggagaagggtttccagagttgctaggtttgggagtggaaggggcaggcagtgcacttgcccctcctcatgccccttctgacaccagctccctgtggaggcctggtttctgggtaatgcctcccttgggcatcttcatgcatcaaccaaatgggccatcaggtacttcattagtcatggcagaaggaggggaaaagacttgttttccagacagaaaatctactcccctgtccccagccatatccctggataggaagggataggaagagactacttggtgccatggggtaggggtgagggtataagtagatcagagtgggaagacctcagccttgggtggcttgtctctgcttcttgccaggtgggagggcctgtccacaccctggatccccgtaccacagtgccagccatgcccttcccctgggctaccattgtccctttcctcacccagttggtagaggagtcaggaggtgggaggccgtgggctttggttttataatgtaaccactgtgggggtgggggaggatggtgaaccatgtatttcagtgaaatatttaatatatttaaatatcaataaaatcaaactctttgtaaaa

SEQ ID NO: 5234 - DNA, 2978 bp, Homo sapiens
cacctgaccaagaccctggagttacaatggcggcgcccatgctgcgctggggctgccgtggaagacgttgggctttcgcccgggttgacggtggttcttgccaccgaagaggggmtccgactgggtccacatccaaccagattaggggagagagctcagtggytcagcagcccctccacacggcccagaagacgaggaaaggtgaacacaaatgggctgctgtggtaggtttggaaattcatgcccagatttcctccaactctaaactcttctctggatctcaagttcgcttttcagcacctccaaattctttggtttctttttttgatgcatctctacctggaactttgccggttctcaacaggaggtgtgtaraagcggcggtgatgacaggcctggctctgaactgccacataaacaagaagtccttgtttgacaggaagcactacttctatgcagacctccctgcaggctaccaaattacccagcagaggctcccaattgctgtgaatgggagcttgatatatggcgtctgtgcagggaagaagcagagtcaggtgatccccaagacggtgaggatcaagcagatccagttggagcaagacagtggcaaaagcctccacgacaacctgaggtctcagacgctcattgatttgaacagggcaggagtgggccttctggaggtggtcctggagcccgacatgtcctgtggagaagaggcrgcaacagctgtcagggagctgcagctgatccttcaagccctggggaccagccaggcgaacatggcagagggccagttgagagtggatgccaatatatccgtgcatcaccctggggagcctttgggcgttcgaacggaagtgaagaatctcaacagcatcaggttcctggccaaagccatagactatgaaattcagaggcaaatcaatgaacttgagaatggaggtgaaattctgaacgaaacacgctcatttcatcacaagctggggtgcaccatgtcaatgagagacaaagaaggaaaacaggactacaggttcatgccagaacccaacctgcctcccctggtgctctacgaygccacatctctgcccgcaggtgcagacccacagcaagtgatcaatattgaccagattcgggagacactcccggagctccccagtgtgacccgagagaagcttgtccaacagtatgggatgctgctggaacacagcttcactttgctgaacgaagtcggcctactggagttcttccaaaatgtgataaaagaaactagggcagagccaaaaaaggtgactagttgggtcctcaacacttttctgggctatttaaagcaacagaacctcgctgtcagtgagagtcctgtcacaccctctgcactcgctgagcttcttgacctgctggacagcagaacaatttcttcatcagcagctaaacakgtaatggatgtgaagaacagaaaccccagagctataaataaactgattgggttggtccggaaagcgactcaaagccgagcagatccagtcatgataaaggagatcctggagaagaagctgtcattgtgagatgtttgggatccccttgcccaagggacaacaacaaacagtgcagcctgactgggaacaggatcctgtgaaagctgatgcccatgtgccctgagagctgcctctcaatccctgtcccaagccacagctatggcrttaatgtcaccagtgttctcaccctctaggccctgtgcctggaggtgcctccacagccgaccagcagccaccccgcctgcttcatccacatcaggagggtccggtgaggctgcagcagtggttaaggagtaacaccttcttgtattaaggaattttaaactaaataaaatgtatgttggagatactgttacccattctaagaaaacttttcattctgcagttccttcaacaaatatttttgagcaactcctaagggccagccattgtaggtgatgggcattagcagtggtcaagagagactgtaatttggatgtattgttttcagacctaaacacaggttaacaaagatgaaaatacaaccaaataaactggcacagtataaacacatttgtttgtttaaggaggtctcaagagggtggggaaggaggatattattagaattaatcaacctatcgactgagtagaagtgatattgcctgttaaactccctccccatcccagaaggcacagtctgagaataaatgaattaaaaaaataagttttccaataaatttaatcaataaaatatatactgaaatatcacataaaaattaacttacacttcaaagattgtgcagctgacaactcccccaaatcccccaaccctcaggccaaacaagataaaaagaaacaagaaaaaagttgtaacatgaaattgacttgttttgcttggaaataagattataaattagtaaatcaaaatcttgacctctcatgataatcgtggtgtgctgcaggcatcacgatgaaggcggggctgtctgyactcctgtgcttgcgacactaatactgttctctccactgcaccggagcacctttgttcggtatatatatgcctttgttacctctgactcacgtcgcttaaagaccagttttgcaaatgttgttttttaaaagcatacttgtcaaaactgtgatgtaagagaataaaatccttggaggccttgatttgaagctgtgaacctgtagcctaccaaggacagtaaaaacattcccgttgtgaacactgctccagaagcagctgaggaactagaaaaaagtggacacccctccatcaccaattcagcgactcatgcttcctggcttgcacagttcctcaggacttccctgagagtgatgagaaaggtgcccctcttccccagcccaaaaggtaggcagagaaaggtaaccagttgcgtggttcattttggacaggcatgaggaggtggctttttaaaaaaagtcgtttaaaaaaattag

SEQ ID NO: 5235 - DNA, 1618 bp, Homo sapiens
cacctgaccaagaccctggagttacaatggcggcgcccatgctgcgctggggctgccgtggaagacgttgggctttcgcccgggttgacggtggttcttgccaccgaagaggggmtccgactgggtccacatccaaccagattaggggagagagctcagtggytcagcagcccctccacacggcccagaagacgaggaaaggtgaacacaaatgggctgctgtggtaggtttggaaattcatgcccagatttcctccaactctaaactcttctctggatctcaagttcgcttttcagcacctccaaattctttggtttctttttttgatgcatctctacctggaactttgccggttctcaacaggaggtgtgtaraagcggcggtgatgacaggcctggctctgaactgccacataaacaagaagtccttgtttgacaggaagcactacttctatgcagacctccctgcaggctaccaaattacccagcagaggctcccaattgctgtgaatgggagcttgatatatggcgtctgtgcagggaagaagcagagtcaggtgatccccaagacggtgaggatcaagcagatccagttggagcaagacagtggcaaaagcctccacgacaacctgaggtctcagacgctcattgatttgaacagggcaggagtgggccttctggaggtggtcctggagcccgacatgtcctgtggagaagaggcrgcaacagctgtcagggagctgcagctgatccttcaagccctggggaccagccaggcgaacatggcagagggccagttgagagtggatgccaatatatccgtgcatcaccctggggagcctttgggcgttcgaacggaagtgaagaatctcaacagcatcaggttcctggccaaagccatagactatgaaattcagaggcaaatcaatgaacttgagaatggaggtgaaattctgaacgaaacacgctcatttcatcacaagctggggtgcaccatgtcaatgagagacaaagaaggaaaacaggactacaggttcatgccagaacccaacctgcctcccctggtgctctacgaygccacatctctgcccgcaggtgcagacccacagcaagtgatcaatattgaccagattcgggagacactcccggagctccccagtgtgacccgagagaagcttgtccaacagtatgggatgctgctggaacacagcttcactttgctgaacgaagtcggcctactggagttcttccaaaatgtgataaaagaaactagggcagagccaaaaaaggtgactagttgggtcctcaacacttttctgggctatttaaagcaacagaacctcgctgtcagtgagagtcctgtcacaccctctgcactcgctgagcttcttgacctgctggacagcagaacaatttcttcatcagcagctaaacakacctgcacatcatctggcactggataatcacagaggagcatcccatcagaatgattcctgctttacctcacctgaaacgcaagtcagacacaaaaatgaggggacagcaagcyctcaaaaaaaacttagtgtgcggtgagagaaaatttagcaagaagataaaataaacagactaaactcct

SEQ ID NO: 5236 - DNA, 3113 bp, Homo sapiens
cacctgaccaagaccctggagttacaatggcggcgcccatgctgcgctggggctgccgtggaagacgttgggctttcgcccgggttgacggtggttcttgccaccgaagaggggmtccgactgggtccacatccaaccagattaggggagagagctcagtggytcagcagcccctccacacggcccagaagacgaggaaaggtgaacacaaatgggctgctgtggtaggtttggaaattcatgcccagatttcctccaactctaaactcttctctggatctcaagttcgcttttcagcacctccaaattctttggtttctttttttgatgcatctctacctggaactttgccggttctcaacaggaggtgtgtaraagcggcggtgatgacaggcctggctctgaactgccacataaacaagaagtccttgtttgacaggaagcactacttctatgcagacctccctgcaggctaccaaattacccagcagaggctcccaattgctgtgaatgggagcttgatatatggcgtctgtgcagggaagaagcagagtcaggtgatccccaagacggtgaggatcaagcagatccagttggagcaagacagtggcaaaagcctccacgacaacctgaggtctcagacgctcattgatttgaacagggcaggagtgggccttctggaggtggtcctggagcccgacatgtcctgtggagaagaggcrgcaacagctgtcagggagctgcagctgatccttcaagccctggggaccagccaggcgaacatggcagagggccagttgagagtggatgccaatatatccgtgcatcaccctggggagcctttgggcgttcgaacggaagtgaagaatctcaacagcatcaggttcctggccaaagccatagactatgaaattcagaggcaaatcaatgaacttgagaatggaggtgaaattctgaacgaaacacgctcatttcatcacaagctggggtgcaccatgtcaatgagagacaaagaaggaaaacaggactacaggttcatgccagaacccaacctgcctcccctggtgctctacgaygccacatctctgcccgcaggtgcagacccacagcaagtgatcaatattgaccagattcgggagacactcccggagctccccagtgtgacccgagagaagcttgtccaacagtatgggatgctgctggaacacagcttcactttgctgaacgaagtcggcctactggagttcttccaaaatgtgataaaagaaactagggcagagccaaaaaaggtgactagttgggtcctcaacacttttctgggctatttaaagcaacagaacctcgctgtcagtgagagtcctgtcacaccctctgcactcgctgagcttcttgacctgctggacagcagaacaatttcttcatcagcagctaaacakgtgtttgaggaactgtggaagagggaaggcaagactccagggcagattgtttcagaaaagcagcttgaactgatgcaggaccagggggcactggagcagctctgccactctgtgatggaggcccatcctcaagtggtaatggatgtgaagaacagaaaccccagagctataaataaactgattgggttggtccggaaagcgactcaaagccgagcagatccagtcatgataaaggagatcctggagaagaagctgtcattgtgagatgtttgggatccccttgcccaagggacaacaacaaacagtgcagcctgactgggaacaggatcctgtgaaagctgatgcccatgtgccctgagagctgcctctcaatccctgtcccaagccacagctatggcrttaatgtcaccagtgttctcaccctctaggccctgtgcctggaggtgcctccacagccgaccagcagccaccccgcctgcttcatccacatcaggagggtccggtgaggctgcagcagtggttaaggagtaacaccttcttgtattaaggaattttaaactaaataaaatgtatgttggagatactgttacccattctaagaaaacttttcattctgcagttccttcaacaaatatttttgagcaactcctaagggccagccattgtaggtgatgggcattagcagtggtcaagagagactgtaatttggatgtattgttttcagacctaaacacaggttaacaaagatgaaaatacaaccaaataaactggcacagtataaacacatttgtttgtttaaggaggtctcaagagggtggggaaggaggatattattagaattaatcaacctatcgactgagtagaagtgatattgcctgttaaactccctccccatcccagaaggcacagtctgagaataaatgaattaaaaaaataagttttccaataaatttaatcaataaaatatatactgaaatatcacataaaaattaacttacacttcaaagattgtgcagctgacaactcccccaaatcccccaaccctcaggccaaacaagataaaaagaaacaagaaaaaagttgtaacatgaaattgacttgttttgcttggaaataagattataaattagtaaatcaaaatcttgacctctcatgataatcgtggtgtgctgcaggcatcacgatgaaggcggggctgtctgyactcctgtgcttgcgacactaatactgttctctccactgcaccggagcacctttgttcggtatatatatgcctttgttacctctgactcacgtcgcttaaagaccagttttgcaaatgttgttttttaaaagcatacttgtcaaaactgtgatgtaagagaataaaatccttggaggccttgatttgaagctgtgaacctgtagcctaccaaggacagtaaaaacattcccgttgtgaacactgctccagaagcagctgaggaactagaaaaaagtggacacccctccatcaccaattcagcgactcatgcttcctggcttgcacagttcctcaggacttccctgagagtgatgagaaaggtgcccctcttccccagcccaaaaggtaggcagagaaaggtaaccagttgcgtggttcattttggacaggcatgaggaggtggctttttaaaaaaagtcgtttaaaaaaattag

SEQ ID NO: 5237 - DNA, 1813 bp, Homo sapiens
ccaaaagtggaagtaatttctcactgcccctgtgataaaytgtggtcactggctgtggcagcaactattataagatgctctgaaaactcttcagacactgaggggcaccagaggagcagactacaagaatggcacacrctatggaaaactcctggacaatcagtaaagagtaccatattgatgaagaagtgggctttgctctgccaaatccacaggaaaatctacctgatttttataatgactggatgttcattgctaaacatctgcctgatctcatagagtctggccagcttcgagaaagagttgagaagttaaacatgctcagcattgatcatctcacagaccacaagtcacagcrccttgcacgtctagttctgggatgcatcaccatggcatatgtgtggggcaaaggtcatggagatgtccgtaaggtcttgccaagaaatattgctgttccttactgccaactctccaaraaactggaactgcctcctattttggtttatgcagactgtgtcttggcaaactggaagaaaaaggatcctaataagtatgtaaacagaacatggacgttttgttctcatttcgtgatggagactgcagtaaaggattcttcctggtctctctattggtggaaatagcagctgcttctgcaatcaaagtaattcctactgtattcaaggcaatgcaaatgcaagaacgggacactttgctaaaggcgctgttggaaatagcttcttgcttggagaaagcccttcaagtgtttcaccaaatccacgatcatgtgaacccaaaagcatttttcagtgttcttcgcatatatttgtctggctggaaaggcaacccccagctatcagacggtctggtgtatgaagggttctgggaagacccaaaggagtttgcagggggcagtgcaggccaaagcagcgtctttcagtgctttgacgtcctgctgggcatccagcagactgctggtggaggacatgctgctcagttcctccaggacatgagaagatatatgccaccagctcacaggaacttcctgtgctcattagagtcaaatccctcagtccgtgagtttgtcctttcaaaaggtgatgctggcctgcgggaagcttatgacgcctgtgtgaaagctctggtctccctgaggagctaccatctgcaaatcgtgactaagtacatcctgattcctgcaagccagcagccaaaggagaataagacctctgaagacccttcaaaactggaagccaaaggaactggaggcactgatttaatgaatttcctgaagactgtaagaagtacaactgagaaatcccttttgaaggaaggttaatgtaacccaacaagagcacattttatcatagcagagacatctgtatgcattcctgtcattacccattgtaacagagccacaaactaatactatgcaatgttttaccaataatgcaatacaaaagacctcaaaatacctgtgcatttcttgtaggaaaacaacaaaaggtaattatgtgtaattatactagaagttttgtaatctgtatcttatcattggaataaaatgacattcaataaataaaaatgcataagatatattctgtcggctgggcgcggtggctcacgcctgtaatcccagcactttgggaggccgaggcgggcggatcacaaggtcaggagatcgagaccatcttggctaacacggtgaaaccccgtctctactaaaaatacaaaaaattagccgggcgcggtggcgggcacctgtagtcccagctactcgggaggctgaggcaggagaatggcgtgaacctgggag

SEQ ID NO: 5238 - DNA, 1819 bp, Homo sapiens
ccaaaagtggaagtaatttctcactgcccctgtgataaaytgtggtcactggctgtggcagcaactattataagatgctctgaaaactcttcagacactgaggggcaccagaggagcagactacaagaatggcacacrctatggaaaactcctggacaatcagtaaagagtaccatattgatgaagaagtgggctttgctctgccaaatccacaggaaaatctacctgatttttataatgactggatgttcattgctaaacatctgcctgatctcatagagtctggccagcttcgagaaagagttgagaagttaaacatgctcagcattgatcatctcacagaccacaagtcacagcrccttgcacgtctagttctgggatgcatcaccatggcatatgtgtggggcaaaggtcatggagatgtccgtaaggtcttgccaagaaatattgctgttccttactgccaactctccaaraaactggaactgcctcctattttggtttatgcagactgtgtcttggcaaactggaagaaaaaggatcctaataagtatgtaaacagaacatggacgttttgttctcatttcgtgatggagactgcagtaaaggattcttcctggtctctctattggtggaaatagcagctgcttctgcaatcaaagtaattcctactgtattcaaggcaatgcaaatgcaagaacgggacactttgctaaaggcgctgttggaaatagcttcttgcttggagaaagcccttcaagtgtttcaccaaatccacggcaagtatcatgtgaacccaaaagcatttttcagtgttcttcgcatatatttgtctggctggaaaggcaacccccagctatcagacggtctggtgtatgaagggttctgggaagacccaaaggagtttgcagggggcagtgcaggccaaagcagcgtctttcagtgctttgacgtcctgctgggcatccagcagactgctggtggaggacatgctgctcagttcctccaggacatgagaagatatatgccaccagctcacaggaacttcctgtgctcattagagtcaaatccctcagtccgtgagtttgtcctttcaaaaggtgatgctggcctgcgggaagcttatgacgcctgtgtgaaagctctggtctccctgaggagctaccatctgcaaatcgtgactaagtacatcctgattcctgcaagccagcagccaaaggagaataagacctctgaagacccttcaaaactggaagccaaaggaactggaggcactgatttaatgaatttcctgaagactgtaagaagtacaactgagaaatcccttttgaaggaaggttaatgtaacccaacaagagcacattttatcatagcagagacatctgtatgcattcctgtcattacccattgtaacagagccacaaactaatactatgcaatgttttaccaataatgcaatacaaaagacctcaaaatacctgtgcatttcttgtaggaaaacaacaaaaggtaattatgtgtaattatactagaagttttgtaatctgtatcttatcattggaataaaatgacattcaataaataaaaatgcataagatatattctgtcggctgggcgcggtggctcacgcctgtaatcccagcactttgggaggccgaggcgggcggatcacaaggtcaggagatcgagaccatcttggctaacacggtgaaaccccgtctctactaaaaatacaaaaaattagccgggcgcggtggcgggcacctgtagtcccagctactcgggaggctgaggcaggagaatggcgtgaacctgggag

SEQ ID NO: 5239 - DNA, 1321 bp, Homo sapiens
  misc_feature (1)...(1321): n = A,T,C or G
tgagatcacttcccttgcagactttggaagggagagcactttattacagaccttggaagcaagaggattgcattcagcctagttcctggttgctggccaaagggatcatggacattgaagcatattttgaaagaattggctataagaactctaggaacaaattggacttggaaacattaactgacattcttgagcaccagatccgggctgttccctttgagaaccttaacatgcattgtgggcaagccatggagttgggcttagaggctatttttgatcacattgtaagaagaaacyrgggtgggtggtgtctccaggtcaatcaacttctgtactgggctctgaccacaatcggttttcagaccacaatgttaggagggtatttttayatccctccagttaacaaatacagcactggcatggttcaccttctcctgcaggtgaccaytgacggcaggaattacattgtcratgctgggtctggaagctcctcccagatgtggcagcctstagaattwatttctgggaaggatcagcctcmggtgccttgcattttctgcttgacagaagagagaggaatctggtacytggaccaaatcaggagagagcagtatattacaaacaaagaatttcttaattctcatctcctgccaaagaagaaacaccaaaaaatatacttatttacgcttgaacctcraacaattgaagattttgagtctatgaatacatacctgcagacgtctccaacatcttcatttataaccacatcattttgttccttgcagaccccagaaggggtttactgtttggtgggcttcatcctcacctatagaaaattcaattataaagacaatacagatctggtcgagtttaaaactctcactgaggaagaggttgaagaagtgctganaaatatatttaagatttccttggggagaaatctcgtgcccamacctggtgatgratcccttactatttagaataaggaacaaaataaacccttgtgtatgtatcacccaactcactaattatcaacttatgtgctatcagatatcctctctaccctcacgttattttgaagaaaatcctaaacatcaaatactttcatccataaaaatgtcagcattyattaaaaaacaataactttttaaagaaacataaggacacattttcaaattaataaaaataaaggcattttaaggatggcctgtgattatcttgggaagcagagtgattcatgctagaaaacatttaatattgatttattgttgaattcatagtaaatttttactggtaaatgaataaagaatattgtggaaaa

SEQ ID NO: 5240 - DNA, 982 bp, Homo sapiens
  misc_feature (1)...(982): n = A,T,C or G
tgagatcacttcccttgcagactttggaagggagagcactttattacagaccttggaagcaagaggattgcattcagcctagttcctggttgctggccaaagtgaccaytgacggcaggaattacattgtcratgctgggtctggaagctcctcccagatgtggcagcctstagaattwatttctgggaaggatcagcctcmggtgccttgcattttctgcttgacagaagagagaggaatctggtacytggaccaaatcaggagagagcagtatattacaaacaaagaatttcttaattctcatctcctgccaaagaagaaacaccaaaaaatatacttatttacgcttgaacctcraacaattgaagattttgagtctatgaatacatacctgcagacgtctccaacatcttcatttataaccacatcattttgttccttgcagaccccagaaggggtttactgtttggtgggcttcatcctcacctatagaaaattcaattataaagacaatacagatctggtcgagtttaaaactctcactgaggaagaggttgaagaagtgctganaaatatatttaagatttccttggggagaaatctcgtgcccamacctggtgatgratcccttactatttagaataaggaacaaaataaacccttgtgtatgtatcacccaactcactaattatcaacttatgtgctatcagatatcctctctaccctcacgttattttgaagaaaatcctaaacatcaaatactttcatccataaaaatgtcagcattyattaaaaaacaataactttttaaagaaacataaggacacattttcaaattaataaaaataaaggcattttaaggatggcctgtgattatcttgggaagcagagtgattcatgctagaaaacatttaatattgatttattgttgaattcatagtaaatttttactggtaaatgaataaagaatattgtggaaaa

SEQ ID NO: 5241 - DNA, 563 bp, Homo sapiens
atttccgagagacttccgcgccgcagtttccctgcttccccagctccagaacttccggccagcgcagccattttggcttcctgaccttgggctacggctgaccgttttttgtggtgtactccgtgccatcatgtccgtcctgacgccgctgctgctgcggggcttgacaggctcggcccggcggctcccagtgccgcgcgccaagatccattcgttgccgccggaggggaagcttgggatcatggaattggccgttgggcttacctcctgcttcgtgaccttcctcctgccagcgggctggatmctgtcacacctggagacctacaggaggccagagtgaaggggtccgttctgtccctcacactgtgacctgaccasccccaccggcccatcytggtcatgttactgcatttgtggccggcctcccctggatcatgtcattcaattccagtcacctcttctgcaatcatgacctcttgatgtctccatggtgacctccttgggggtcactgaccctgcttggtggggtcccccttgtaacaataaaatctatttaaacttta

SEQ ID NO: 5242 - DNA, 3936 bp, Homo sapiens
cggcggggaacaccggyccgctgtaacaccggcccggcgcagaagcgggacgtcggcttctaggggcccaggccggcggcggygatggcctcggcagctgtggagagcttcgtgaccaagcaactggacctgctggagctygagagagacgcggaggtggaggagcgcaggtcctggcaggagaacatctctctgaaagagctccagagccgaggcgtgtgtttgctgaagctgcaggtatccagccagcgcactgggctgtayggacggctgctggtcacctttgagcccaggcgatacgggtccrcggcagctcttcccagtaacagctttacttctggtgatatcgtgggcctgtacgatgctgctaatgagggcagtcagctgkccactgggatcttgacccgggtcacccagaagtcggtcacggtggcctttgatgagtyccacgatttccagttgagcttggaccgagagaattcctacagactgttaaaacttgccaatgatgtcacttacaggcgactgaaaaaagccctgattgctctaaagaagtatcattctggcccagcctcctcactcatagaagtgctctttggcagatctgctcccagtcctgccagtgaaatacacccgctgacattcttcaacacctgcctggacacctcccagaaagaagcggtttyatttgcgctgtctcagaaagaacttgccatcatccrtggacctcctggcactgggaaaaccacgactgtggttgagatcattcttcaagctgtgaaacaaggctkaaaggttctgtgctgcgccccctccaacatcgccgtggacaatctggtggagcgcctggctctgtgtaagcagcggattctgcgcctgggacaccctgcccgcctcctggagtccrttcagcagcactccctggatgcggttttagcgcggagcgacagtgcccagattgttgcagatatcaggaaggacatcgaccaggtctttgtgaaaaacaaaaagacccaggataagagagagaaaagtaattttcgaaatgaaattaagctgttaagaaaagaactgaaggagagggaagaagcagctatgctcgagagcctcacttcggcaaacgtggtccttgcaacaaacacaggtgcgtctgccgatggccccctgaagttgctgcccgagagctacttcgacgtggtggtcattgacgagtgtgcccargccctcgaggcgagctgctggatccccctgctgaaggccagaaagtgcatcctggygggcgatcacaagcagctgccccccaccacagtctctcacaaggctgcgctggcaggactgtcactcagcctgatggaacgcctggctgaggagtacggcgcgagggtggtgcggacactgacggtgcagtaccgcatgcaccaggctatcatgcgctgggcctcagacaccatgtaccttgggcagytcacagcccactcttccgtggcaaggcacctcctgagggamctcccaggtgtggctgccacagaagagacgggtgtgcccctgctcttggtggacaccgccggctgcgggctgtttgagctggaggaggaggacgaacagtcgaaagggaaccctggcraagtccgcctcgtyagtttgcacatccaggctctggtggacgctggtgttccagcccgtgacattgctgtggtctcgccatacaacctccaggtggacctgctcagacagagccttgtgcacaggcaccctgagcttgaaatcaagtctgtcgatggcttccaaggccgagagaaggaggccgtgatactgtccttcrtcagatccaacaggaaaggtgaagttggttttcttgctgaggaccggaggatcaacgtggctgtcacccgtgcccgacgccaygtggcggtcatctgtgactcccgtactgtcaacaaccatgcatttttgaagaccctggtggagtatttcacacagcatggggaagtacgcacggcctttgagtatcttgacgatattgtcccagaaaactattcccatgagaactcccagggttccagccacgctgccaccaagccccagggacctgctrcgtccaccaggaccggaagccagcggcaggagggaggccaggaggctgcagcacctgccagacagggcyggaagaagccggctgggaagtctctggcctctgaagctccatctcagcccagcctcaacggaggcagcccagagggagtggagagccaagatggcgtggaccacttccgggccatgatagtggagttcatggccagcaagaagatgcagttggagtttcctccttccctcaattcccacgacaggctgcgggtccaccaaatagccgaggagcacgggctgaggcacgacagttcyggggaagggaagaggaggttcatcactgtgagcaagagggccccgcgaccccgagcagccctgggacccccagcagggaccggtggcccagcccctctccagccagtgccccctacccctgcrcagacagagcagcctcccagggagcagcgtggcccagaccagcctgatctgaggacgctgcacctggagagactgcagagggtcaggagcgcrcaggggcagcccgccagcaaggagcagcaggcctcagggcagcagaaacttccagaaaagaaaaagaaaaaagccaaaggacatccggccacagatctgcccamggaggaggactttgaggccctggtttctgccgccgttaaggctgataacacctgcggctttgccaagtgcacagccggcgtcacaaccctgggccagttctgccagctctgcagccgccgctactgcctcagccaccacctgcccragatccatggctgcggtgagagggctcgcgcccatgcccggcagagaatcagccgggaaggggtcctctatgccggcagcgggaccaagaacggatccctrgacccagccaagagggcccagctgcagaggaggctggataagaagctgagtgagctcagcaaccagaggaccagccggaggaaggagagggggacgtgaccggccgcatccttgcacgccycgcggagctctctccatggtagcccagggcgctggcagaccatgctccrcctccaccagggccacagaggagcggaggggcctatgggggaggagcggagggccctgttggggaaggttgggtttttggaccccagggataagcttttcygatgtcacaatgtggaggaaagcacctgggggacaacagtgctcgtgcaggtggggcttgggaaatgcacgtcccttcccctyactccccgccaaaacccacatcccagcctctggatcctggggaaggttccagtccctggagaatacccagggcctcaaacttgaagtcactcctccaatgtctgggacttgccagctcagcccgttaggatgagggtgctgagaggaaacaggaaacaagactgcgaatggygctcaggcagggagcagggagtggcgtttggcttgcacgttcccatgtggccagatgctggggccactttccttctgtctgctggtgactgcagtgttccccctcctcctcaccacggggctcctgtgagtctggggggcacctctttctggcctgtgcacctctctctggcttataaaggtgcctggcctgtgccagcccctccttgttgcgcctcaccgtggggaccaggtgagcyggctctcccacgtggytgtcccgggaaagctgccccacagcctcagcatyttcagcacttaccgatccagagcctcccggccttytccggtgtcctgtaccaactcttctatttaagagaacctcagatgatgtacctgagcctcagggttttgtttcagagggatataaattatttaaaaattaaatgaaaacgttgcacactg

SEQ ID NO: 5243 - DNA, 3195 bp, Homo sapiens
ccagcttccggcttagcggctgagcttcaggcttgacgtcaggaaaccatcaagatctcattttacagctgggattctctggttcacagaggtaacggagcttgcccgaggccagttaaacgagaagattcatcamygctttgatggctgyctcacaaacttcacaaaytgttgcatctcacgttccttttgcagatttgtgttcaactttagaacgaatacagaaaagtaaaggacgtgcagaaaaaatcagacacttcagggaatttttagattcttgragaaaatttcatgatgctcttcataagaaccacaaagatgtyacagactctttttatccagcaatgagactaattcttcctcagctagaaagagagagaatggcctatggaattaaagaaactatgcttgctaagctttatattgagttgcttaatttacctagagatggaaaagatgccctcaaacttttaaactacagaacacccactggaactcatggagatgctggagactttgcaatgattgcatattttgtgttgaagccaagatgtttacagaaaggaagtttaaccatacagcaagtaaacgaccttttagactcaattgccagcaataattctgctaaaagaaaagacctaataaaaaagagccttcttcaacttataactcagagttcagcacttgagcaaaagtggcttatacggatgatcataaaggatttaaagcttggtgttagtcagcaaactatcttttctgtttttcataatgatgctgctgagttgcataatgtcactacagatctggaaaaagtctgtaggcaactgcatgatccttctgtaggactcagtgatatttctatcactttattttctgcatttaaaccaatgctagctgctattgcagatattgagcacattgagaaggatatgaaacatcagagtttctayatagaaaccaagctagatggtgaacrtatgcaaatgcacaaagatggagatgtatataaatacttctctcgaaatggatataactacactgatcagtttggtgcttcycctactgaaggttctcttaccccattcattcataatgcattcaaagcagatatacaaatctgtattcttgatggtgagatgatggcctataatcctaatacacaaactttcatgcaaaagggaactaagtttgatattaaaagaatggtagaggattctgatctgcaaacttgttattgtgtttttgatgtattgatggttaataataaaaagctagggcatgagactctgagaaagaggtatgagattcttartagtatttttacaccaattccaggtagaatagaaatagtgcagaaaacacaagctcatactaagaatgaagtaattgatgcattgaatgaagcaatagataaaagagaagagggaattatggtaaaacaacctctatccatctacaagccagacaaaagaggtgaagggtggttaaaaattaaaccagagtatgtcagtggactaatggatgrattggacattttaattgttggagratattggggtaaaggatcacggggtggaatgatgtctcattttctgtgtgcagtagcagagaagccccctcctggtgagaagccatctgtgtttcatactctctctcgtgttgggtctggctgcaccatgaaagaactgtatgatctgggtttgaaattggccaagtattggaagccttttcatagaaaagctccaccaagcagcattttwtgtggaacagagaagccagaagtatacattgaaccttgtaattctgtcattgttcagattaaagcagcagagatcgtacccagtgayatgtataaaactggctgcaccttgcgttttccaygaattgaaaagataagagatgacaaggagtggcatgagtgcatgaccctggacgacctaraacaacttakggggaaggcatctggtaagctcgcatctaaacacctttatataggtggtgatgatgaaccacaagaaaaaaagcggaaagctgccccaaagatgaagaaagttattggaattattgagcacttaaaagcacctaaccttactaacgttaacaaaatttctaatrtatttgaagatgtagagttttgtgttatgagtggaacagatagccagccaaagcctgacctggagaacagaattgcagaatttggtggttatatagtacaaaatccaggcccagacacgtactgtgtaattgcagggtctgagaacatcagagtgaaaaacataattttgtcaaataaacatgatgttgtcaagcctgcatggcttttagaatgttttaagaccaaaagctttgtaccatggcagcctcgctttatgattcatatgtgcccatcaaccaaagaacattttgcccgtgaatatgattgctatggtgatagttatttcattgatacagacttgaaccaactgaaggaagtattctcaggaattaaaaattctaacgagcagactcctgaagaaatggcttctctgattgctgatttagaatatcggtattcctgggattgctctcctctcagtatgtttygacgccacaccgtttatttggactcgtatgctgttattaatgacctgagtaccaaaaatgaggggacaaggttagctattaaagccttggagcttcggtttcatggagcaaaagtagtttcttgtttarctgagggagtgtctcatgtaataattggggaagatcatagtcgtgttgcagattttaaagcttttagaagaacttttaagagaaagtttaaaatcctaaaagaaagttgggtaactgattcaatagacaagtgtgaattacaagaagaaaaccagtatttgatttaaagctaggtttcctagtgaggaaagcctctgatctggcagactcattgcagcagrtggtaatgataaaatactaaactacattttatttttgtatcttaaaaatstatgcctaaaaagtatcattacatrtaggaaaacaataattttaacttttaaggttgaaaagacaatagcccaaagccaagaaagaaaaattatcttgaatgtagtattcaatgattttttatgatcaaggtgaaataaacagtctaaagaagaggtgtttttataatatccatatagaaatctagaatttttacttagatactaataaaat

SEQ ID NO: 5244 - DNA, 3158 bp, Homo sapiens
gcggcgagcagctggcggaaccggcatcttctggcgccagcttccggcttagcggctgagcttcaggcttgacgtcagttaaacgagaagattcatcamygctttgatggctgyctcacaaacttcacaaaytgttgcatctcacgttccttttgcagatttgtgttcaactttagaacgaatacagaaaagtaaaggacgtgcagaaaaaatcagacacttcagggaatttttagattcttgragaaaatttcatgatgctcttcataagaaccacaaagatgtyacagactctttttatccagcaatgagactaattcttcctcagctagaaagagagagaatggcctatggaattaaagaaactatgcttgctaagctttatattgagttgcttaatttacctagagatggaaaagatgccctcaaacttttaaactacagaacacccactggaactcatggagatgctggagactttgcaatgattgcatattttgtgttgaagccaagatgtttacagaaaggaagtttaaccatacagcaagtaaacgaccttttagactcaattgccagcaataattctgctaaaagaaaagacctaataaaaaagagccttcttcaacttataactcagagttcagcacttgagcaaaagtggcttatacggatgatcataaaggatttaaagcttggtgttagtcagcaaactatcttttctgtttttcataatgatgctgctgagttgcataatgtcactacagatctggaaaaagtctgtaggcaactgcatgatccttctgtaggactcagtgatatttctatcactttattttctgcatttaaaccaatgctagctgctattgcagatattgagcacattgagaaggatatgaaacatcagagtttctayatagaaaccaagctagatggtgaacrtatgcaaatgcacaaagatggagatgtatataaatacttctctcgaaatggatataactacactgatcagtttggtgcttcycctactgaaggttctcttaccccattcattcataatgcattcaaagcagatatacaaatctgtattcttgatggtgagatgatggcctataatcctaatacacaaactttcatgcaaaagggaactaagtttgatattaaaagaatggtagaggattctgatctgcaaacttgttattgtgtttttgatgtattgatggttaataataaaaagctagggcatgagactctgagaaagaggtatgagattcttartagtatttttacaccaattccaggtagaatagaaatagtgcagaaaacacaagctcatactaagaatgaagtaattgatgcattgaatgaagcaatagataaaagagaagagggaattatggtaaaacaacctctatccatctacaagccagacaaaagaggtgaagggtggttaaaaattaaaccagagtatgtcagtggactaatggatgrattggacattttaattgttggagratattggggtaaaggatcacggggtggaatgatgtctcattttctgtgtgcagtagcagagaagccccctcctggtgagaagccatctgtgtttcatactctctctcgtgttgggtctggctgcaccatgaaagaactgtatgatctgggtttgaaattggccaagtattggaagccttttcatagaaaagctccaccaagcagcattttwtgtggaacagagaagccagaagtatacattgaaccttgtaattctgtcattgttcagattaaagcagcagagatcgtacccagtgayatgtataaaactggctgcaccttgcgttttccaygaattgaaaagataagagatgacaaggagtggcatgagtgcatgaccctggacgacctaraacaacttakggggaaggcatctggtaagctcgcatctaaacacctttatataggtggtgatgatgaaccacaagaaaaaaagcggaaagctgccccaaagatgaagaaagttattggaattattgagcacttaaaagcacctaaccttactaacgttaacaaaatttctaatrtatttgaagatgtagagttttgtgttatgagtggaacagatagccagccaaagcctgacctggagaacagaattgcagaatttggtggttatatagtacaaaatccaggcccagacacgtactgtgtaattgcagggtctgagaacatcagagtgaaaaacataattttgtcaaataaacatgatgttgtcaagcctgcatggcttttagaatgttttaagaccaaaagctttgtaccatggcagcctcgctttatgattcatatgtgcccatcaaccaaagaacattttgcccgtgaatatgattgctatggtgatagttatttcattgatacagacttgaaccaactgaaggaagtattctcaggaattaaaaattctaacgagcagactcctgaagaaatggcttctctgattgctgatttagaatatcggtattcctgggattgctctcctctcagtatgtttygacgccacaccgtttatttggactcgtatgctgttattaatgacctgagtaccaaaaatgaggggacaaggttagctattaaagccttggagcttcggtttcatggagcaaaagtagtttcttgtttarctgagggagtgtctcatgtaataattggggaagatcatagtcgtgttgcagattttaaagcttttagaagaacttttaagagaaagtttaaaatcctaaaagaaagttgggtaactgattcaatagacaagtgtgaattacaagaagaaaaccagtatttgatttaaagctaggtttcctagtgaggaaagcctctgatctggcagactcattgcagcagrtggtaatgataaaatactaaactacattttatttttgtatcttaaaaatstatgcctaaaaagtatcattacatrtaggaaaacaataattttaacttttaaggttgaaaagacaatagcccaaagccaagaaagaaaaattatcttgaatgtagtattcaatgattttttatgatcaaggtgaaataaacagtctaaagaagaggtgtttttataatatccatatagaaatctagaatttttacttagatactaataaaat

SEQ ID NO: 5245 - DNA, 3325 bp, Homo sapiens
ycacagcgctgtagactgcgccgcattagaagcctggcctcctgatgctgtgctcttcatctagacccaagccccagrtcgtgggacgatttctcccgtttttgactccctggaactgtattgcctgctttacctgcgtacatgttgattctttctcatggcaaccccgcaggaaaccatcaagatctcattttacagctgggattctctggttcacagaggtaacggagcttgcccgaggccagttaaacgagaagattcatcamygctttgatggctgyctcacaaacttcacaaaytgttgcatctcacgttccttttgcagatttgtgttcaactttagaacgaatacagaaaagtaaaggacgtgcagaaaaaatcagacacttcagggaatttttagattcttgragaaaatttcatgatgctcttcataagaaccacaaagatgtyacagactctttttatccagcaatgagactaattcttcctcagctagaaagagagagaatggcctatggaattaaagaaactatgcttgctaagctttatattgagttgcttaatttacctagagatggaaaagatgccctcaaacttttaaactacagaacacccactggaactcatggagatgctggagactttgcaatgattgcatattttgtgttgaagccaagatgtttacagaaaggaagtttaaccatacagcaagtaaacgaccttttagactcaattgccagcaataattctgctaaaagaaaagacctaataaaaaagagccttcttcaacttataactcagagttcagcacttgagcaaaagtggcttatacggatgatcataaaggatttaaagcttggtgttagtcagcaaactatcttttctgtttttcataatgatgctgctgagttgcataatgtcactacagatctggaaaaagtctgtaggcaactgcatgatccttctgtaggactcagtgatatttctatcactttattttctgcatttaaaccaatgctagctgctattgcagatattgagcacattgagaaggatatgaaacatcagagtttctayatagaaaccaagctagatggtgaacrtatgcaaatgcacaaagatggagatgtatataaatacttctctcgaaatggatataactacactgatcagtttggtgcttcycctactgaaggttctcttaccccattcattcataatgcattcaaagcagatatacaaatctgtattcttgatggtgagatgatggcctataatcctaatacacaaactttcatgcaaaagggaactaagtttgatattaaaagaatggtagaggattctgatctgcaaacttgttattgtgtttttgatgtattgatggttaataataaaaagctagggcatgagactctgagaaagaggtatgagattcttartagtatttttacaccaattccaggtagaatagaaatagtgcagaaaacacaagctcatactaagaatgaagtaattgatgcattgaatgaagcaatagataaaagagaagagggaattatggtaaaacaacctctatccatctacaagccagacaaaagaggtgaagggtggttaaaaattaaaccagagtatgtcagtggactaatggatgrattggacattttaattgttggagratattggggtaaaggatcacggggtggaatgatgtctcattttctgtgtgcagtagcagagaagccccctcctggtgagaagccatctgtgtttcatactctctctcgtgttgggtctggctgcaccatgaaagaactgtatgatctgggtttgaaattggccaagtattggaagccttttcatagaaaagctccaccaagcagcattttwtgtggaacagagaagccagaagtatacattgaaccttgtaattctgtcattgttcagattaaagcagcagagatcgtacccagtgayatgtataaaactggctgcaccttgcgttttccaygaattgaaaagataagagatgacaaggagtggcatgagtgcatgaccctggacgacctaraacaacttakggggaaggcatctggtaagctcgcatctaaacacctttatataggtggtgatgatgaaccacaagaaaaaaagcggaaagctgccccaaagatgaagaaagttattggaattattgagcacttaaaagcacctaaccttactaacgttaacaaaatttctaatrtatttgaagatgtagagttttgtgttatgagtggaacagatagccagccaaagcctgacctggagaacagaattgcagaatttggtggttatatagtacaaaatccaggcccagacacgtactgtgtaattgcagggtctgagaacatcagagtgaaaaacataattttgtcaaataaacatgatgttgtcaagcctgcatggcttttagaatgttttaagaccaaaagctttgtaccatggcagcctcgctttatgattcatatgtgcccatcaaccaaagaacattttgcccgtgaatatgattgctatggtgatagttatttcattgatacagacttgaaccaactgaaggaagtattctcaggaattaaaaattctaacgagcagactcctgaagaaatggcttctctgattgctgatttagaatatcggtattcctgggattgctctcctctcagtatgtttygacgccacaccgtttatttggactcgtatgctgttattaatgacctgagtaccaaaaatgaggggacaaggttagctattaaagccttggagcttcggtttcatggagcaaaagtagtttcttgtttarctgagggagtgtctcatgtaataattggggaagatcatagtcgtgttgcagattttaaagcttttagaagaacttttaagagaaagtttaaaatcctaaaagaaagttgggtaactgattcaatagacaagtgtgaattacaagaagaaaaccagtatttgatttaaagctaggtttcctagtgaggaaagcctctgatctggcagactcattgcagcagrtggtaatgataaaatactaaactacattttatttttgtatcttaaaaatstatgcctaaaaagtatcattacatrtaggaaaacaataattttaacttttaaggttgaaaagacaatagcccaaagccaagaaagaaaaattatcttgaatgtagtattcaatgattttttatgatcaaggtgaaataaacagtctaaagaagaggtgtttttataatatccatatagaaatctagaatttttacttagatactaataaaat

SEQ ID NO: 5246 - DNA, 1389 bp, Homo sapiens
cgccgcacctagcccttccctgccgcgcgctcctcccccacgccgcgccccgccccgcccagccccgccgccctcgcaataaggggcctgagcgcgcgggggagaagcgggagcgggagcgggagcgagctggcggcgccgtcgggcgccgggccgggccatggagctgtggccgtgtctggccgcggcgctgctgttgctgctgctgctggtgcagctgagccgcgcggccgagttctacgccaaggtcgccctgtactgcgcgctgtgcttcacggtgtccgccgtggcctcgctcgtctgcctgctgcgccacggcggccggacggtggagaacatgagcatcatcggctggttcgtgcgaagcttcaagtacttttacgggctccgcttcgaggtgcgggacccgcgcaggctgcaggaggcccgtccctgtgtcatcgtctccaaccaccagagcatcctggacatgatgggcctcatggaggtccttccggagcgctgcgtgcagatcgccaagcgggagctgctcttcctggggcccgtgggcctcatcatgtacctcrggggcgtcttcttcatcaaccggcagcgctctagcactgccatgacagtgatggccgacctgggcgagcgcatggtcagggagaacgtgcccatcgtccccgtggtgtactcttccttctcctccttctacaacaccaagaagaagttcttcacttcaggaacagtcacagtgcaggtgcyggaagccatccccaccagcggcctcactgcggyggacgtccctgcgctcgtggacacctgccaccgggccatgaggaccaccttcctccacatctccaagaccccccaggagaacggggccactgcggggtctggcgtgcagccggcccagtagcccagaccacggcagggcatgacctggggagggcaggtggaagccgatggctggaggatgggcagaggggactcctcccggcttccaaataccactctgtccggctcccccagctctcactcagcccgggaagcaggaagccccttctgtcactggyctcagacacaggcccctggtgtcccctgcagggggctcagctggaccctccccgggctcgagggcagggactcgcgcccacggcacctctgggagctgggatgataaagatgaggcttgcggctgtggcccgctggtgggctgagccacaaggcccccgatggcccaggagcagatgggaggaccccgaggccaggagtcccagactcacgcaccctgggccacagggagccgggaatyggggcctgctgctcctgctggcctggaagactctgtggggtcagcmctgtactccgttgctgtttttttataaacacactcttggaagtggc

SEQ ID NO: 5247 - DNA, 1485 bp, Homo sapiens
cgccgcacctagcccttccctgccgcgcgctcctcccccacgccgcgccccgccccgcccagccccgccgccctcgcaataaggggcctgagcgcgcgggggagaagcgggagcgggagcgggagcgagctggcggcgccgtcgggcgccgggccgggccatggagctgtggccgtgtctggccgcggcgctgctgttgctgctgctgctggtgcagctgagccgcgcggccgagttctacgccaaggtcgccctgtactgcgcgctgtgcttcacggtgtccgccgtggcctcgctcgtctgcctgctgcgccacggcggccggacggtggagaacatgagcatcatcggctggttcgtgcgaagcttcaagtacttttacgggctccgcttcgaggtgcgggacccgcgcaggctgcaggaggcccgtccctgtgtcatcgtctccaaccaccagagcatcctggacatgatgggcctcatggaggtccttccggagcgctgcgtgcagatcgccaagcgggagctgctcttcctggggcccgtgggcctcatcatgtacctcrggggcgtcttcttcatcaaccggcagcgctctagcactgccatgacagtgatggccgacctgggcgagcgcatggtcagggagaacctcaaagtgtggatctatcccgagggtactcgcaacgacaatggggacctgctgccttttaagaagggcgccttctacctggcagtccaggcacaggtgcccatcgtccccgtggtgtactcttccttctcctccttctacaacaccaagaagaagttcttcacttcaggaacagtcacagtgcaggtgcyggaagccatccccaccagcggcctcactgcggyggacgtccctgcgctcgtggacacctgccaccgggccatgaggaccaccttcctccacatctccaagaccccccaggagaacggggccactgcggggtctggcgtgcagccggcccagtagcccagaccacggcagggcatgacctggggagggcaggtggaagccgatggctggaggatgggcagaggggactcctcccggcttccaaataccactctgtccggctcccccagctctcactcagcccgggaagcaggaagccccttctgtcactggyctcagacacaggcccctggtgtcccctgcagggggctcagctggaccctccccgggctcgagggcagggactcgcgcccacggcacctctgggagctgggatgataaagatgaggcttgcggctgtggcccgctggtgggctgagccacaaggcccccgatggcccaggagcagatgggaggaccccgaggccaggagtcccagactcacgcaccctgggccacagggagccgggaatyggggcctgctgctcctgctggcctggaagactctgtggggtcagcmctgtactccgttgctgtttttttataaacacactcttggaagtggc

SEQ ID NO: 5248 - DNA, 1610 bp, Homo sapiens
cgccgcacctagcccttccctgccgcgcgctcctcccccacgccgcgccccgccccgcccagccccgccgccctcgcaataaggggcctgagcgcgcgggggagaagcgggagcgggagcgggagcgagctggcggcgccgtcgggcgccgggccgggccatggagctgtggccgtgtctggccgcggcgctgctgttgctgctgctgctggtgcagctgagccgcgcggccgagttctacgccaaggtcgccctgtactgcgcgctgtgcttcacggtgtccgccgtggcctcgctcgtctgcctgctgcgccacggcggccggacggtggagaacatgagcatcatcggctggttcgtgcgaagcttcaagtacttttacgggctccgcttcgaggtgcgggacccgcgcaggctgcaggaggcccgtccctgtgtcatcgtctccaaccaccagagcatcctggacatgatgggcctcatggaggtccttccggagcgctgcgtgcagatcgccaagcgggagctgctcttcctggggcccgtgggcctcatcatgtacctcrggggcgtcttcttcatcaaccggcagcgctctagcactgccatgacagtgatggccgacctgggcgagcgcatggtcagggagaacctcaaagtgtggatctatcccgagggtactcgcaacgacaatggggacctgctgccttttaagaagggcgccttctacctggcagtccaggcacaggtgcccatcgtccccgtggtgtactcttccttctcctccttctacaacaccaagaagaagttcttcacttcaggaacagtcacagtgcaggtgcyggaagccatccccaccagcggcctcactgcggyggacgtccctgcgctcgtggacacctgccaccgggccatgaggaccaccttcctccacatctccaagaccccccaggagaacggggccactgcggggtctggcgtgcagccggcccagtagcccagaccacggcagggcatgacctggggagggcaggtggaagccgatggctggaggatgggcagaggggactcctcccggcttccaaataccactctgtccggctcccccagctctcactcagcccgggaagcaggaagccccttctgtcactggyctcagacacaggcccctggtgtcccctgcagggggctcagctggaccctccccgggctcgagggcagggactcgcgcccacggcacctctgggagctgggatgataaagatgaggcttgcggctgtggcccgctggtgggctgagccacaaggcccccgatggcccaggagcagatgggaggaccccgaggccagacgcacactgtccgagccctctgctcagccgcctgggacccaccagggtgcagctgggctccagggtccagcccacaagctgcatcaggstctctgggagaggaggggcctggagggccaggagtcccagactcacgcaccctgggccacagggagccgggaatyggggcctgctgctcctgctggcctggaagactctgtggggtcagcmctgtactccgttgctgtttttttataaacacactcttggaagtggctggg

SEQ ID NO: 5249 - DNA, 3545 bp, Homo sapiens
aggattagtaaagggtggaaaaaaagaccagccccccgcctagtttgggtgagcagatttgggattaattatcaggcagcaatccacatgcacttaacagttctgacgtgagakgacaagaaacacaagcaaatataaaacattcaattctaagagaagttcatcagagacatccttcaggattgtgagctggattttcctctacgtgcttcagtcttctctacacaaagagctgcaaaccaggtctttgttttgcactcttatttcaagcagaatgagtgctcctaaactcctctctctgggctgtatcttcttccccttgctactttttcagcaggcccgggctcaattcccaagacagtgtgccactgttgaggctttgagaagtggtatgtgttgcccagacctgtcccctgtgtctgggcctgggacagaccgctgtggctcatcatcagggaggggcagatgtgaggcagtgactgcagactcccggccccacagccctcagtatccccatgatggcagagatgatmgggaggtctggcccttgcgcttcttcaataggacatgtcactgcaacggcaatttctcaggacacaactgtgggacgtgccgtcctggctggagaggagctgcctgtgaccagagggttctcatagtcaggagaaatcttctggacttaagtaaagaagaaaagaaccactttgtccgggccctggatatggcaaagcgcacaactcaccctttatttgtcattgccaccaggagatsagaagaaatactggggccagatggcaacacgccacaatttgagaacatttccatttataactactttgtttggacacactattactcagtcaaaaagactttccttggggtaggacaggaaagctttggwgaagtggatttctctcatgagggaccagcttttctcacatggcacaggtaccacctcctgcgtctggagaaagacatgcaggaaatgttgcaagagccttcyttctcccttccttactggaattttgcaacggggaaaaatgtctgtgatatctgcacggatgacttgatgggatccagaagcaactttgattccactctaataagcccaaactctgtcttttctcaatggcgagtggtctgtgactccttggaagattatgataccctgggaacactttgtaacagcaccgaggatgggccaattaggagaaatccagctggaaatgtggccagaccaatggtgcaacrtcttcctgaaccacaggatgtcgctcagtgcttggaagttggtttatttgacacgcctcctttttattccaactctacaaacagtttccgaaacacagtggaaggcaatgaccccacgggaaagtatgaccctgctgttcgaagtcttcacaatttggctcatctattcctgaatggaacagggggacaaacccatttgtctccaaatgatcctatttttgtcctcctgcacaccttcacagatgcagtctttgatgaatggctgaggagatacaatgctgatatatccacatttccattggaaaatgcccctattggacataatagacaatacaacatggtgccattctggcccccagtcaccaacacagaaatgtttgttactgctccagacaacctgggatacacttatgaaattcaatggccaagtcgggagtttagtgtacctgagataattgccatagcagtagttggcgctttgttactggttgcactcatttttgggactgcttcttatctrattcgtgccagacgcagtatggatgaagctaaccagcctctcctcactgatcagtatcaatgctatgctgaagaatatgaaaaactccagaatcctaatcagtctgtggtctaacaaatgccctactctcttatgcattagtatcacaaaaccacctggttgaatataatagattgagttattaactgtattttctttcactttattaccttctttctaatacaagcatatgttagmattaaagttctaggcatacttttcaaagctgggaagaccctttcagaatcttttcaatgggttttaattttcagttctatttaaaatggtgaatgacactaaactccatgatatttaaggatagtgtgaagatctttggcatgatttaaaggttgagtatgtgaagatataagtgaactaccatgctttgtttacgtgtaaaggaaaataatgtttgatagtaaatgtccacttaaaatacatgaatgggcatttctaaaatgttaaaacataaacwcatttccattcatggatatttgtcaacagatttaaagaaaaccacagttattaattaaagaaaattatgtgtagttataaaccaatgaaattttgattaaccttttcaaattaatgttccagtttgaagaccaatcaaatatattatttagtcaacatatactatttagtctcaggttcaaggctacaacaaaaatcaccatctttgtcaaactttggagagggaaaatcttcactttcttaagcaacaatggatattgcctgtgtttgccactgtgtttccctgcctctcaattcgctgaaaaaggaactacctatccttacatttcacctactaatgtctcttctaacatcttagaggtccatggagaaggcatatggagaacatgttttatactgctctataaatagtattccaatcactgtgcttaatttaaatagcattmtcttatcatttatcagccttttatgtattttccaagtaaaatattaacatattayttcattggtcttcttttttatctggttctatatgaatgctattttttcccttctcttctaacatgaaatatattttctctttttgatcttgtgctatgaaacaatcttccaaagaactgtataaggtggtcataagtgaatattttaattaaaattggtaaaaataaataataataacagtaataatcatgcactatagaaaatggctaaactgagattctaaattctacaaacagaaacaagtttaagttatgtatccctgattggttactgggttttcctatattcaaaaatattaaggctatatatacacaagataaacaaayaaaatatatcaaagagcatgcatataacaataggatgttttacactagcattattcaatttattctcttggaatacattgcgatttgttaaaatacagtatactcacagcttttcaaagaaattactgtgtaatgtaagatgcctttttatatagaacatcaatgaaactaaatacttcactttatatttttgtagacttactaattactcatttcagaaacatttattaagcacatactagatatcaagtatttcaaggcactatagatttagagagaagaaaataagaattgtaaaattgagaaggtcatgtttgacttgtacttcaaggactgccaatggatttaccaaatatagaagcagagaagggaattttattcaaaagtgacagcatggacaagggcacagaagtttaaaagagcatggaactttt

SEQ ID NO: 5250 - DNA, 3548 bp, Homo sapiens
aggattagtaaagggtggaaaaaaagaccagccccccgcctagtttgggtgagcagatttgggattaattatcaggcagcaatccacatgcacttaacagttctgacgtgagakgacaagaaacacaagcaaatataaaacattcaattctaagagaagttcatcagagacatccttcaggattgtgagctggattttcctctacgtgcttcagtcttctctacacaaagagctgcaaaccaggtctttgttttgcactcttatttcaagcagaatgagtgctcctaaactcctctctctgggctgtatcttcttccccttgctactttttcagcaggcccgggctcaattcccaagacagtgtgccactgttgaggctttgagaagtggtatgtgttgcccagacctgtcccctgtgtctgggcctgggacagaccgctgtggctcatcatcagggaggggcagatgtgaggcagtgactgcagactcccggccccacagccctcagtatccccatgatggcagagatgatmgggaggtctggcccttgcgcttcttcaataggacatgtcactgcaacggcaatttctcaggacacaactgtgggacgtgccgtcctggctggagaggagctgcctgtgaccagagggttctcatagtcaggagaaatcttctggacttaagtaaagaagaaaagaaccactttgtccgggccctggatatggcaaagcgcacaactcaccctttatttgtcattgccaccaggagatsagaagaaatactggggccagatggcaacacgccacaatttgagaacatttccatttataactactttgtttggacacactattactcagtcaaaaagactttccttggggtaggacaggaaagctttggwgaagtggatttctctcatgagggaccagcttttctcacatggcacaggtaccacctcctgcgtctggagaaagacatgcaggaaatgttgcaagagccttcyttctcccttccttactggaattttgcaacggggaaaaatgtctgtgatatctgcacggatgacttgatgggatccagaagcaactttgattccactctaataagcccaaactctgtcttttctcaatggcgagtggtctgtgactccttggaagattatgataccctgggaacactttgtaacagcaccgaggatgggccaattaggagaaatccagctggaaatgtggccagaccaatggtgcaacrtcttcctgaaccacaggatgtcgctcagtgcttggaagttggtttatttgacacgcctcctttttattccaactctacaaacagtttccgaaacacagtggaaggttacagtgaccccacgggaaagtatgaccctgctgttcgaagtcttcacaatttggctcatctattcctgaatggaacagggggacaaacccatttgtctccaaatgatcctatttttgtcctcctgcacaccttcacagatgcagtctttgatgaatggctgaggagatacaatgctgatatatccacatttccattggaaaatgcccctattggacataatagacaatacaacatggtgccattctggcccccagtcaccaacacagaaatgtttgttactgctccagacaacctgggatacacttatgaaattcaatggccaagtcgggagtttagtgtacctgagataattgccatagcagtagttggcgctttgttactggttgcactcatttttgggactgcttcttatctrattcgtgccagacgcagtatggatgaagctaaccagcctctcctcactgatcagtatcaatgctatgctgaagaatatgaaaaactccagaatcctaatcagtctgtggtctaacaaatgccctactctcttatgcattagtatcacaaaaccacctggttgaatataatagattgagttattaactgtattttctttcactttattaccttctttctaatacaagcatatgttagmattaaagttctaggcatacttttcaaagctgggaagaccctttcagaatcttttcaatgggttttaattttcagttctatttaaaatggtgaatgacactaaactccatgatatttaaggatagtgtgaagatctttggcatgatttaaaggttgagtatgtgaagatataagtgaactaccatgctttgtttacgtgtaaaggaaaataatgtttgatagtaaatgtccacttaaaatacatgaatgggcatttctaaaatgttaaaacataaacwcatttccattcatggatatttgtcaacagatttaaagaaaaccacagttattaattaaagaaaattatgtgtagttataaaccaatgaaattttgattaaccttttcaaattaatgttccagtttgaagaccaatcaaatatattatttagtcaacatatactatttagtctcaggttcaaggctacaacaaaaatcaccatctttgtcaaactttggagagggaaaatcttcactttcttaagcaacaatggatattgcctgtgtttgccactgtgtttccctgcctctcaattcgctgaaaaaggaactacctatccttacatttcacctactaatgtctcttctaacatcttagaggtccatggagaaggcatatggagaacatgttttatactgctctataaatagtattccaatcactgtgcttaatttaaatagcattmtcttatcatttatcagccttttatgtattttccaagtaaaatattaacatattayttcattggtcttcttttttatctggttctatatgaatgctattttttcccttctcttctaacatgaaatatattttctctttttgatcttgtgctatgaaacaatcttccaaagaactgtataaggtggtcataagtgaatattttaattaaaattggtaaaaataaataataataacagtaataatcatgcactatagaaaatggctaaactgagattctaaattctacaaacagaaacaagtttaagttatgtatccctgattggttactgggttttcctatattcaaaaatattaaggctatatatacacaagataaacaaayaaaatatatcaaagagcatgcatataacaataggatgttttacactagcattattcaatttattctcttggaatacattgcgatttgttaaaatacagtatactcacagcttttcaaagaaattactgtgtaatgtaagatgcctttttatatagaacatcaatgaaactaaatacttcactttatatttttgtagacttactaattactcatttcagaaacatttattaagcacatactagatatcaagtatttcaaggcactatagatttagagagaagaaaataagaattgtaaaattgagaaggtcatgtttgacttgtacttcaaggactgccaatggatttaccaaatatagaagcagagaagggaattttattcaaaagtgacagcatggacaagggcacagaagtttaaaagagcatggaactttt

SEQ ID NO: 5251 - DNA, 2831 bp, Homo sapiens
aggattagtaaagggtggaaaaaaagaccagccccccgcctagtttgggtgagcagatttgggattaattatcaggcagcaatccacatgcacttaacagttctgacgtgagakgacaagaaacacaagcaaatataaaacattcaattctaagagaagttcatcagagacatccttcaggattgtgagctggattttcctctacgtgcttcagtcttctctacacaaagagctgcaaaccaggtctttgttttgcactcttatttcaagcagaatgagtgctcctaaactcctctctctgggctgtatcttcttccccttgctactttttcagcaggcccgggctcaattcccaagacagtgtgccactgttgaggctttgagaagtggtatgtgttgcccagacctgtcccctgtgtctgggcctgggacagaccgctgtggctcatcatcagggaggggcagatgtgaggcagtgactgcagactcccggccccacagccctcagtatccccatgatggcagagatgatmgggaggtctggcccttgcgcttcttcaataggacatgtcactgcaacggcaatttctcaggacacaactgtgggacgtgccgtcctggctggagaggagctgcctgtgaccagagggttctcatagtcaggagaaatcttctggacttaagtaaagaagaaaagaaccactttgtccgggccctggatatggcaaagcgcacaactcaccctttatttgtcattgccaccaggagatsagaagaaatactggggccagatggcaacacgccacaatttgagaacatttccatttataactactttgtttggacacactatggacataatagacaatacaacatggtgccattctggcccccagtcaccaacacagaaatgtttgttactgctccagacaacctgggatacacttatgaaattcaatggccaagtcgggagtttagtgtacctgagataattgccatagcagtagttggcgctttgttactggttgcactcatttttgggactgcttcttatctrattcgtgccagacgcagtatggatgaagctaaccagcctctcctcactgatcagtatcaatgctatgctgaagaatatgaaaaactccagaatcctaatcagtctgtggtctaacaaatgccctactctcttatgcattagtatcacaaaaccacctggttgaatataatagattgagttattaactgtattttctttcactttattaccttctttctaatacaagcatatgttagmattaaagttctaggcatacttttcaaagctgggaagaccctttcagaatcttttcaatgggttttaattttcagttctatttaaaatggtgaatgacactaaactccatgatatttaaggatagtgtgaagatctttggcatgatttaaaggttgagtatgtgaagatataagtgaactaccatgctttgtttacgtgtaaaggaaaataatgtttgatagtaaatgtccacttaaaatacatgaatgggcatttctaaaatgttaaaacataaacwcatttccattcatggatatttgtcaacagatttaaagaaaaccacagttattaattaaagaaaattatgtgtagttataaaccaatgaaattttgattaaccttttcaaattaatgttccagtttgaagaccaatcaaatatattatttagtcaacatatactatttagtctcaggttcaaggctacaacaaaaatcaccatctttgtcaaactttggagagggaaaatcttcactttcttaagcaacaatggatattgcctgtgtttgccactgtgtttccctgcctctcaattcgctgaaaaaggaactacctatccttacatttcacctactaatgtctcttctaacatcttagaggtccatggagaaggcatatggagaacatgttttatactgctctataaatagtattccaatcactgtgcttaatttaaatagcattmtcttatcatttatcagccttttatgtattttccaagtaaaatattaacatattayttcattggtcttcttttttatctggttctatatgaatgctattttttcccttctcttctaacatgaaatatattttctctttttgatcttgtgctatgaaacaatcttccaaagaactgtataaggtggtcataagtgaatattttaattaaaattggtaaaaataaataataataacagtaataatcatgcactatagaaaatggctaaactgagattctaaattctacaaacagaaacaagtttaagttatgtatccctgattggttactgggttttcctatattcaaaaatattaaggctatatatacacaagataaacaaayaaaatatatcaaagagcatgcatataacaataggatgttttacactagcattattcaatttattctcttggaatacattgcgatttgttaaaatacagtatactcacagcttttcaaagaaattactgtgtaatgtaagatgcctttttatatagaacatcaatgaaactaaatacttcactttatatttttgtagacttactaattactcatttcagaaacatttattaagcacatactagatatcaagtatttcaaggcactatagatttagagagaagaaaataagaattgtaaaattgagaaggtcatgtttgacttgtacttcaaggactgccaatggatttaccaaatatagaagcagagaagggaattttattcaaaagtgacagcatggacaagggcacagaagtttaaaagagcatggaactttt

SEQ ID NO: 5252 - DNA, 3401 bp, Homo sapiens
aggattagtaaagggtggaaaaaaagaccagccccccgcctagtttgggtgagcagatttgggattaattatcaggcagcaatccacatgcacttaacagttctgacgtgagakgacaagaaacacaagcaaatataaaacattcaattctaagagaagttcatcagagacatccttcaggattgtgagctggattttcctctacgtgcttcagtcttctctacacaaagagctgcaaaccaggtctttgttttgcactcttatttcaagcagaatgagtgctcctaaactcctctctctgggctgtatcttcttccccttgctactttttcagcaggcccgggctcaattcccaagacagtgtgccactgttgaggctttgagaagtggtatgtgttgcccagacctgtcccctgtgtctgggcctgggacagaccgctgtggctcatcatcagggaggggcagatgtgaggcagtgactgcagactcccggccccacagccctcagtatccccatgatggcagagatgatmgggaggtctggcccttgcgcttcttcaataggacatgtcactgcaacggcaatttctcaggacacaactgtgggacgtgccgtcctggctggagaggagctgcctgtgaccagagggttctcatagtcaggagaaatcttctggacttaagtaaagaagaaaagaaccactttgtccgggccctggatatggcaaagcgcacaactcaccctttatttgtcattgccaccaggagatsagaagaaatactggggccagatggcaacacgccacaatttgagaacatttccatttataactactttgtttggacacactattactcagtcaaaaagactttccttggggtaggacaggaaagctttggwgaagtggatttctctcatgagggaccagcttttctcacatggcacaggtaccacctcctgcgtctggagaaagacatgcaggaaatgttgcaagagccttcyttctcccttccttactggaattttgcaacggggaaaaatgtctgtgatatctgcacggatgacttgatgggatccagaagcaactttgattccactctaataagcccaaactctgtcttttctcaatggcgagtggtctgtgactccttggaagattatgataccctgggaacactttgtaacagcaccgaggatgggccaattaggagaaatccagctggaaatgtggccagaccaatggtgcaacrtcttcctgaaccacaggatgtcgctcagtgcttggaagttggtttatttgacacgcctcctttttattccaactctacaaacagtttccgaaacacagtggaaggttacagtgaccccacgggaaagtatgaccctgctgttcgaagtcttcacaatttggctcatctattcctgaatggaacagggggacaaacccatttgtctccaaatgatcctatttttgtcctcctgcacaccttcacagatgcagtctttgatgaatggctgaggagatacaatgctggtcgggagtttagtgtacctgagataattgccatagcagtagttggcgctttgttactggttgcactcatttttgggactgcttcttatctrattcgtgccagacgcagtatggatgaagctaaccagcctctcctcactgatcagtatcaatgctatgctgaagaatatgaaaaactccagaatcctaatcagtctgtggtctaacaaatgccctactctcttatgcattagtatcacaaaaccacctggttgaatataatagattgagttattaactgtattttctttcactttattaccttctttctaatacaagcatatgttagmattaaagttctaggcatacttttcaaagctgggaagaccctttcagaatcttttcaatgggttttaattttcagttctatttaaaatggtgaatgacactaaactccatgatatttaaggatagtgtgaagatctttggcatgatttaaaggttgagtatgtgaagatataagtgaactaccatgctttgtttacgtgtaaaggaaaataatgtttgatagtaaatgtccacttaaaatacatgaatgggcatttctaaaatgttaaaacataaacwcatttccattcatggatatttgtcaacagatttaaagaaaaccacagttattaattaaagaaaattatgtgtagttataaaccaatgaaattttgattaaccttttcaaattaatgttccagtttgaagaccaatcaaatatattatttagtcaacatatactatttagtctcaggttcaaggctacaacaaaaatcaccatctttgtcaaactttggagagggaaaatcttcactttcttaagcaacaatggatattgcctgtgtttgccactgtgtttccctgcctctcaattcgctgaaaaaggaactacctatccttacatttcacctactaatgtctcttctaacatcttagaggtccatggagaaggcatatggagaacatgttttatactgctctataaatagtattccaatcactgtgcttaatttaaatagcattmtcttatcatttatcagccttttatgtattttccaagtaaaatattaacatattayttcattggtcttcttttttatctggttctatatgaatgctattttttcccttctcttctaacatgaaatatattttctctttttgatcttgtgctatgaaacaatcttccaaagaactgtataaggtggtcataagtgaatattttaattaaaattggtaaaaataaataataataacagtaataatcatgcactatagaaaatggctaaactgagattctaaattctacaaacagaaacaagtttaagttatgtatccctgattggttactgggttttcctatattcaaaaatattaaggctatatatacacaagataaacaaayaaaatatatcaaagagcatgcatataacaataggatgttttacactagcattattcaatttattctcttggaatacattgcgatttgttaaaatacagtatactcacagcttttcaaagaaattactgtgtaatgtaagatgcctttttatatagaacatcaatgaaactaaatacttcactttatatttttgtagacttactaattactcatttcagaaacatttattaagcacatactagatatcaagtatttcaaggcactatagatttagagagaagaaaataagaattgtaaaattgagaaggtcatgtttgacttgtacttcaaggactgccaatggatttaccaaatatagaagcagagaagggaattttattcaaaagtgacagcatggacaagggcacagaagtttaaaagagcatggaactttt

SEQ ID NO: 5253 - DNA, 3096 bp, Homo sapiens
agtcgcgggcaccccgctcggcgtcggtgcctgagggaggccgcgatggcggccgaggccctggcggcggaggccgtggcgtcgcgcctggagcggcaggaggaggacatccgctggctgtggtcggaggtcsagcgcctgagggacgagcagctgaackcgccctacagctgccaggcggaggggccgtgcctcacgcgggaggtggcgcagctccgggccgagaactgcgacctgcgccaccgcctrtgcagcctgcggctgtgcctcgccgaggagcggagccgccaggccacgctggagagcgcggagctagaggcggcgcaggaggccggcgcacagcctcctcctagtcaaagccaagacaaggacatgaaaaagaagaaaatgaaggaaagcgaggctgacagcgaggtgaagcatcaaccaattttcataaaagaaagattgaagctttttgaaatactgaagaaagaccatcagctcttacttgccatttatggaaaaaagggggatacaagcaacatcatcacagtaagagtggctgatgggcaaacagtgcaaggggaagtctggaaaacaacgccttaccaagtggctgctgaaattagtcaggaactggctgaaagcacggtaatagccaaagtcaatggtgaactgtgggacctggaccgcccattggaaggggactcttctctagagctgcttacatttgataatgaggaagctcaagctgtgtactggcactccagtgctcacattcttggggaggccatggagctttactatggaggccacctgtgctayggtccgcccattgaaaatggattttattatgacatgttcattgaagacagagcagtgtccrgcacagaattgtcagccctggagaatatatgtaaagccatcataaaagaaaagcaaccttttgaaagactagaagtcagcaaggaaatcctcctggaaatgtttaagtacaataaatttaaatgccgcattctgaatgagaaagttaacactgcaactaccaccgtgtacaggtgcggtccattaattgacctttgcaaaggtccacatgtaagacacactggaaaaattaaaaccatcaaaatttttaagaattcctcaacatattgggagggcaatccggaaatggaaacattgcagaggatctatggaatatcctttcctgataacaagatgatgagagactgggaaaagttccaagaggaagcaaagaaccgagatcacaggaagatcgggaaggaacaagaacttttctttttccacgatttgagtcctggaagctgttttttccttcccagaggagccttcatttataatacgcttacagatttcatacgagaggaatatcacaaacgggacttcacggaggtgctctctcccaatatgtacaacagtaaactctgggaagcctcaggccactggcagcattacagcgagaacatgtttacctttgagattgaaaaggacacttttgccctcaaacccatgaattgtccagggcactgtctaatgtttgcccatcgtccacgatcttggagggaaatgcctattagatttgctgattttggagttctgcatagaaatgaactgtcggggactctcagyggcttgaccagagtgaggygcttccagcaggacgatgctcacattttttgcacagtggagcagattgaagaagaaataaaggggtgtttgcagtttttgcaatctgtttactcaacatttggcttctcctttcaattaaacctgtcaacaaggccggaaaacttcctaggagagattgagatgtggaatgaggctgagaagcaactgcagaacagcttgatggactttggagaaccgtggaaaatgaacccaggagatggagcattttatggccctaaaattgacataaaaatcaaggatgctattggcagataccatcartgtgctacaattcagctggacttccaactgcctattagatttaatctcacatatgttagtaaggatggggatgataagaagagacctgtgatcattcatcgagccattttgggatcagtggaaagaatgatagccattctttcagaaaactatggcggaaaatggcctttctggctatctcctcgtcaggtgatggtcatccctgtggggccaacttgtgaaaaatatgcacttcaggtatccagtgaattttttgaagaaggatttatggctgacgttgacttggatcacagttgtacactaaataagaaaatacgaaatgcacagctggctcagtataattttattttggtggttggagaaaaggaaaagatagataatgctgtaaacgtgcgaacaagagacaacaaaattcatggagagattttagtaacttctgccattgataaactgaagaatctcaggaagacacggacactcaatgctgaggaggccttttgaagtccttccctgatatttgcttctgtgtaactttgttttgacccttaaaaatgtatttttcttaacatgttagtacttctacgactttggagccactgatgggtccactcatggcctcagctgagaaaggagacgatgaacgtgtagctgacatgcacgaagtttaatttactcatgtccacgggggacgtttagagggcacgtgggaaattttccagcaatcaatgccttgagaaacttaaatggggaaatattattcatcgagaaagtgaaacaaaacactaggaaatgattatgaaatgttagtgattttcaaaagatgggcttcaaataaaagtctgcagagttttttttaaataggagggaaaatcttattttctartatgtctcaggtatttttatgacttctactaaaattcacactgaaactttatcttctaaactggaatcattacttaattttaactaaccaacaaccacaaaagcagcagctactrctaaatattggattactgacaaaggaattcagttttgtggaatctggtgtttgcactataggttaagagttgccatttaaatgtttcttattcataattaggttttgttccgctttagaaaaaaataaattcccaaatgaattgc

SEQ ID NO: 5254 - DNA, 1137 bp, Homo sapiens
agtgctgcttacccatcatggaagcaatgtggctcctgtgtgtggcgttggcggtcttggcatggggcttcctctgggtttgggactcctcagaacgaatgaagagtcgggagcagggaggacggctgggagccgaaagccggaccctgctggtcatagcgcaccctgacgatgaagccatgttttttgctcccacagtgctaggcttggcccgcctaaggcactgggtgtacctgctttgcttctctgcaggaaattactacaatcaaggagagactcgtaagaaagaacttttgcagagctgtgatgttttggggattccactctccagtgtaatgattattgacaacagggatttcccagatgacccaggcatgcagtgggacacagagcacgtggccagagtcctccttcagcacatagaagtgaatggcatcaatctggtggtgactttcgatgcagggggagtaagtggccacagcaatcacattgctctgtatgcagctgtgagggccctgcactcagaagggaagttacctaaagggtgctctgtgctcacgcttcagtctgtgaatgtgctgcgcaagtacatctcccttctggatctgcccttgtctctgcttcatacgcaggatgtcctcttcgtgctcaacagcaaagaagtggcacaggccaagaaagccatgtcctgccaccgcagccagctcctctggttccgccgcctctacattatcttctcccggtacatgagaatcaactcactgagcttcctctgaagccttgaagggttttcagrkccaaggaacaaaggggaaaatagacaaaggagtgcagaggacctggcctggcactggcttatttrcctgagctcaaggagatccccgctggagcagcctctgcaaaagggagcccatgtaggccaggggctgtccaaactccagcttcttcccctgggaaaaaacccaaagaaccaaaaacaaaccaccccaaggataataatagctacactgctagcttctcaagttcttgtgaaaaacaatttacataatgacacagtagatgtggaacacctagcccagtgcctgggcaggtccctattatcataaatgaacataaaagtgctctaaaaacactcca

SEQ ID NO: 5255 - DNA, 6729 bp, Homo sapiens
  misc_feature (1)...(6729): n = A,T,C or G
agggagacgtctggtgaacacccgtgggatctaaagaacaagctctgaaagtgttccagctgaaatttcagatcggacagactcgctgcggctccggaggcagtgattccaagctgctygcgcacgctgctgccaagctgcaggatggtgcacgtagccaggctgctgctgctgctcctcactttcttcctccgcacggatgctgagacacctccaaggtttacacgaacacccgttgatcagacaggggtctctggcggagttgcctctttcatctgccaagctacgggagacccaagacctaaaattgtctggaacaaaaaaggaaagaaagtcagcaatcagagatttgaggtaatagagtttgacgatgggtctggatcagttctcagaatacaacccttacggactccgagggatgaggccatttatgaatgtgtggcctcaaataatgtgggagaaataagtgtatccaccagactcacagttttgcgggaagatcaaattcccaggggcttccctaccattgacatgggcccacagttgaaggtggttgagcgtactcgcacggccaccatgctttgtgcagccagtggtaatccggatccagaaatcacttggtttaaagatttcttacctgtggacacaagcaacaacaatggtcgtattaagcagttacgatcaggagcccttcagattgagcagagtgaagagtctgaccaaggaaaatatgagtgtgttgccaccaacagcgcgggcactcgctattccgctcctgccaatttatatgtcagagttcgccgtgtcccaccaagattctctatcccacccactaatcatgaaatcatgccaggcggaagcgttaatatcacctgtgtggccgtggggtcaccaatgccttatgtaaagtggatgttgggggcagaagatctgacacctgaagatgatatgccaataggaagaaatgtgctagaactgaatgatgtaagacagtcagcaaattacacctgtgttgctatgtcaacactgggtgtcattgaagcaatagcacagatcactgtcaaagccttacccaaacctccaggaactcctgtagtgacygagagcacagctacaagcatcacactgacgtgggactctgggaaccctgagcctgtttcttattacataattcagcataaacctaaaaactctgaggaactttacaaagaaattgatggggtggcgaccacacgctacagtgtcgctggactaagtccctactcggattatgaattcagggttgttgctgtcaataacattgggcgggggcctcccagcgaacctgtgctaacacaaacctcagagcaagcrccatccagtgccccgagggatgtccaggcacgaatgttgagttcgaccaccattttggtacagtggaaggaacctgaagagccaaatggasagatccaaggatatagagtttattatacaatggatcccactcaacatgtcaacaactggatgaaacacaatgtagctgacagccaaatcactactattggcaacttagtgccccagaaaacatattctgtcaaagtcctggcttttacctcaattggagatggtcccctttcaagtgacatacaagtcatcactcagacaggagtaccagggcagccactaaacttcaaagcagaacctgagtctgaaacaagtattttgctctcttggacacctccacgttcagataccattgccaactatgaactggtctacaaagatggggagcatggagaggagcaacgaattaccattgagccagggacatcatataggctgcaaggactgaaaccaaacagcttatactatttccgtctggctgcacgctcccctcaaggcctgggtgcttctactgcagaaatatcagctagaaccatgcagtcaaagccgtcagctcctcctcaagacattagttgcaccagcccaagttccactagtattttggtaagttggcaacctccaccagtggaaaaacagaatggcattatcactgaatactccatcaagtacactgcagtggatggggaagatgacaagcctcaygagattttgggaattccttcggacactaccaaataccttttggaacagctggaaaaatggactgaataccggatcactgtgacagcccatacagatgtcggccctggccctgagagcttgtccgtgttgattcgaaccaatgaagatgttcctagtggtcctcctcgcaaagtcgaggtagaggctgtcaactcaacatctgttaaagtctcatggcgctcacccgtgcccaataaacagcatggccagataagaggatatcaggtgcattatgtgaggatggaaaatggtgagcccaagggccagcccatgctgaaagatgtcatgctggctgatgcacaggacatgatcatttctgggctccagcctgaaacttcctactccctcaccgtcacagcctacacaaccaaaggagatggwgctcgcagcaagcccraactggtgtccaccactggggcagttccagggaaacctcggcttgtgattaaccacactcagatgaatactgctcttattcagtggcacyctccggtggacacatttggacctcttcagggctaccgtctaaaatttggccgcaaggatatggagccacttactactcttgagttctctgaaaaagaagatcactttacmgctacagacrtccacaagggagcatcatacgtcttcaggctctcagccagaaacaaagtgggctttggggaggagatggtgaaggagatttccattccagaagaagtaccaactggattccctcaaaaccttcactcagaaggcaccacttcaacctccgtccagttatcttggcaascacctgtcctggcagagagaaatggcattatcaccaagtatacccttctttatagggatatcaacatyccccttctcccgatggagcagcttattgttccagctgacaccactatgacactcactggcttaaaaccagataccacatacgatgtaaaagtangtgctcatacgagcaaagggcccgggccatatagtcccagtgtccagttcaggacactgcctgtggatcaagtgtttgcaaaaaattttcatgtcaaagcagtaatgaagacttccgtgttgctgtcttgggagattccagagaattataactccgccatgcctttcaaaattctttatgatgatgggaaaatggtagaagaagtggatggccgagccacacagaagttaattgtcaacctgaagcctgagaaatcatattcatttgtgctgacaaatcgtggaaacagtgctggtgggctgcagcacmgggtcacggcaaagactgcaccagatgtattacgtaccaagcctgccttyattgggaagaccaacttggatggcatgattactgtgcaactgcctgaagtacctgcaaatgagaatataaaaggttactacataataattgtgcctttgaagaaatctcgcgggaaatttatcaagccatgggagagtccagatgaaatggaattagatgagctgcttaaggagatatctaggaagcgcagaagcatccgttatgggagagaagttgaattaaagccatatattgccgcycactttgatgtccttcccactgagttcaccctgggggatgacaagcattatggtggatttacaaacaagcaactccaaagtggtcaagaatatgtcttctttgtgttagcagtaatggaacatgcagagtctaagatgtatgcaaccagcccttactccgaccccgtggtgtcaatggatctggatccgcagccaatcacggatgaagaagaaggcttgatctgggttgtaggtcctgtccttgcagtggtctttatcatctgcattgtcattgctattcttctttataaaaggaagagggcagagtccgactctagaaaaagcagcatacygaacaataaggagatcccttcacaccacccaacagaccctgtagaactgaggcgccttaactttcaaacaccgggtatggctagccatcctccaatacccatcttggaacttgcagaccacattgaaagattgaaagcaaatgacaacttgaagttttcccaggaatatgagtcaattgaccctggccagcagttcacttgggaacattcaaacttggaagtaaacaaaccaaagaatagatacgcgaatgtaatcgcatatgatcattcccgggttctcctatcagctatagaagggatcccaggaagtgactatgtgaatgccaactacatagatggstataggaagcaaaatgcctatattgcaacacagggatctctccccgaaacatttggggacttttggagaatgatatgggaacaacggagtgccacagttgtcatgatgacaaaactagaagaaagatcaagggtgaagtgtgaccagtattggcctagcagaggcacagaaacccacggactcgttcaagtaacgctgcttgwtactgtggagctggccacatattgtgttcgaacatttgcactttacaagaatggttcaagtgagaagagagaagtgagacaattccagttcaccgcctggcctgatcatggtgttccagaacaccctacaccttttctagctttcttacgtagagtcaaaacctgtaaccctcccgatgctggtccgatggttgtgcactgcagtgcgggagttggccggactggttgcttcatcgtcatagatgccatgttagaaagaataaagcatgaaaaaactgtagatatttatggccatgtaactttaatgagagcccagaggaactatatggttcaaacagaagaccaatacatctttatccatgatgcactgttagaagcagtgacttgtggaaataccgaagtgccagctagaaacttgtatgcctacattcagaagctgacacaaatagaaacgggagagaatgtcacaggaatggagctcgaatttaagcgtctagccagctcaaaagctcacacctcaaggtttatcagtgccaatcttccatgtaataaattcaaaaatcgccttgttaatattatgccatatgaatccacaagggtatgcctgcagcctatccgtggagtagaaggatctgattacatcaatgccagttttattgatggatacagacaacagaaagcctacatcgctacccaggggcccttggcagagaccactgaagacttctggcggatgctctgggaacacaattccaccatagttgtgatgctcaccaagctgcgtgaaatgggcagagagaaatgtcaccaatactggccagcagaacggtctgcaagataccagtactttgttgtagatcccatggctgagtacaacatgccacagtatatcctaagggaattcaaggtcacagatgccagggacggccagtcccgaacagtaaggcagttccagttcactgactggccagagcaaggagtgccaaagtccggagaaggatttattgacttcatcggccaagtccataaaacaaaagaacagtttggccaagatggacccatttcagtccattgcagcgcgggcgttggaagaactggagtcttcataacgctaagcattgttttggaaagaatgagatatgaaggagttgtagatatcttccagactgtcaaaatgttaagaacacaacgaccagctatggtacagacagaggatcaatatcagttttcctatcgtgccgcactagagtacctgggcagctttgaccactatgcaacgtagaaacccctgacccattctsgatttttactacaggcccttcaatatccatggagtctcttctgagccatacagggcacttgagaagtccttcttaacttctagctaacaactacttagtgggactattacacacaaaacaaattaaaaacaaattattccaggtggaccaagaattcacactttgacatcgccccttcccaccatactgctcataataacattttaggggsmaaggggagggaatgtttaaaaagaaagtccttgatttagttttttagtattgtaaagatactgctgacctgtgcttcatttctaactgtgtaaacttttttttaacaaaatgtatcattcgataaagtgaattttaaaaaagttacataactcttcatttttttatttccaaatcrtaggtttttttaagctgtagaactgttatctgtaatatcttgctgtagaaatatcaaatcatttgaaaatttgcacatttttgtgcaaaactcaatctacagtatcagtctcgtcagatatattaattttacacttcagttttgattggtgagaaagtacccattctcttcaaataatcaaagataattattattttgttttgtttttggaatcaacagggaggcgcaaagtataaagttgctgctaacatatatacatatayatccatattttataagggtgtctatgtatatatagacagtgtgtccacacaaaaaatagatacagttatcagtcagtcagttcttccatgatttagtttttttaaacgtagaaaagctattgtaaacatctctttccatttattcttaattttttgacatattggtatttctttaaagggaaatgaggaatgcacatcagtgattgattgtcaaacctcaccccctgatttcctacctaatc

SEQ ID NO: 5256 - DNA, 5554 bp, Homo sapiens
agggagacgtctggtgaacacccgtgggatctaaagaacaagctctgaaagtgttccagctgaaatttcagatcggacagactcgctgcggctccggaggcagtgattccaagctgctygcgcacgctgctgccaagctgcaggatggtgcacgtagccaggctgctgctgctgctcctcactttcttcctccgcacggatgctgagacacctccaaggtttacacgaacacccgttgatcagacaggggtctctggcggagttgcctctttcatctgccaagctacgggagacccaagacctaaaattgtctggaacaaaaaaggaaagaaagtcagcaatcagagatttgaggtaatagagtttgacgatgggtctggatcagttctcagaatacaacccttacggactccgagggatgaggccatttatgaatgtgtggcctcaaataatgtgggagaaataagtgtatccaccagactcacagttttgcgggaagatcaaattcccaggggcttccctaccattgacatgggcccacagttgaaggtggttgagcgtactcgcacggccaccatgctttgtgcagccagtggtaatccggatccagaaatcacttggtttaaagatttcttacctgtggacacaagcaacaacaatggtcgtattaagcagttacgatcagcaatatattttatatccatacaggagcccttcagattgagcagagtgaagagtctgaccaaggaaaatatgagtgtgttgccaccaacagcgcgggcactcgctattccgctcctgccaatttatatgtcagaggtaggaatttcgccgtgtcccaccaagattctctatcccacccactaatcatgaaatcatgccaggcggaagcgttaatatcacctgtgtggccgtggggtcaccaatgccttatgtaaagtggatgttgggggcagaagatctgacacctgaagatgatatgccaataggaagaaatgtgctagaactgaatgatgtaagacagtcagcaaattacacctgtgttgctatgtcaacactgggtgtcattgaagcaatagcacagatcactgtcaaagccttacccaaacctccaggaactcctgtagtgacygagagcacagctacaagcatcacactgacgtgggactctgggaaccctgagcctgtttcttattacataattcagcataaacctaaaaactctgaggaactttacaaagaaattgatggggtggcgaccacacgctacagtgtcgctggactaagtccctactcggattatgaattcagggttgttgctgtcaataacattgggcgggggcctcccagcgaacctgtgctaacacaaacctcagagcaagcrccatccagtgccccgagggatgtccaggcacgaatgttgagttcgaccaccattttggtacagtggaaggaacctgaagagccaaatggasagatccaaggatatagagtttattatacaatggatcccactcaacatgtcaacaactggatgaaacacaatgtagctgacagccaaatcactactattggcaacttagtgccccagaaaacatattctgtcaaagtcctggcttttacctcaattggagatggtcccctttcaagtgacatacaagtcatcactcagacaggagtaccagggcagccactaaacttcaaagcagaacctgagtctgaaacaagtattttgctctcttggacacctccacgttcagataccattgccaactatgaactggtctacaaagatggggagcatggagaggagcaacgaattaccattgagccagggacatcatataggctgcaaggactgaaaccaaacagcttatactatttccgtctggctgcacgctcccctcaaggcctgggtgcttctactgcagaaatatcagctagaaccatgcagtcaatgtttgcaaaaaattttcatgtcaaagcagtaatgaagacttccgtgttgctgtcttgggagattccagagaattataactccgccatgcctttcaaaattctttatgatgatgggaaaatggtagaagaagtggatggccgagccacacagaagttaattgtcaacctgaagcctgagaaatcatattcatttgtgctgacaaatcgtggaaacagtgctggtgggctgcagcacmgggtcacggcaaagactgcaccagatgtattacgtaccaagcctgccttyattgggaagaccaacttggatggcatgattactgtgcaactgcctgaagtacctgcaaatgagaatataaaaggttactacataataattgtgcctttgaagaaatctcgcgggaaatttatcaagccatgggagagtccagatgaaatggaattagatgagctgcttaaggagatatctaggaagcgcagaagcatccgttatgggagagaagttgaattaaagccatatattgccgcycactttgatgtccttcccactgagttcaccctgggggatgacaagcattatggtggatttacaaacaagcaactccaaagtggtcaagaatatgtcttctttgtgttagcagtaatggaacatgcagagtctaagatgtatgcaaccagcccttactccgaccccgtggtgtcaatggatctggatccgcagccaatcacggatgaagaagaaggcttgatctgggttgtaggtcctgtccttgcagtggtctttatcatctgcattgtcattgctattcttctttataaaaggaagagggcagagtccgactctagaaaaagcagcatacygaacaataaggagatcccttcacaccacccaacagaccctgtagaactgaggcgccttaactttcaaacaccgggtatggctagccatcctccaatacccatcttggaacttgcagaccacattgaaagattgaaagcaaatgacaacttgaagttttcccaggaatatgagtcaattgaccctggccagcagttcacttgggaacattcaaacttggaagtaaacaaaccaaagaatagatacgcgaatgtaatcgcatatgatcattcccgggttctcctatcagctatagaagggatcccaggaagtgactatgtgaatgccaactacatagatggstataggaagcaaaatgcctatattgcaacacagggatctctccccgaaacatttggggacttttggagaatgatatgggaacaacggagtgccacagttgtcatgatgacaaaactagaagaaagatcaagggtgaagtgtgaccagtattggcctagcagaggcacagaaacccacggactcgttcaagtaacgctgcttgwtactgtggagctggccacatattgtgttcgaacatttgcactttacaagaatggttcaagtgagaagagagaagtgagacaattccagttcaccgcctggcctgatcatggtgttccagaacaccctacaccttttctagctttcttacgtagagtcaaaacctgtaaccctcccgatgctggtccgatggttgtgcactgcagtgcgggagttggccggactggttgcttcatcgtcatagatgccatgttagaaagaataaagcatgaaaaaactgtagatatttatggccatgtaactttaatgagagcccagaggaactatatggttcaaacagaagaccaatacatctttatccatgatgcactgttagaagcagtgacttgtggaaataccgaagtgccagctagaaacttgtatgcctacattcagaagctgacacaaatagaaacgggagagaatgtcacaggaatggagctcgaatttaagcgtctagccagctcaaaagctcacacctcaaggtttatcagtgccaatcttccatgtaataaattcaaaaatcgccttgttaatattatgccatatgaatccacaagggtatgcctgcagcctatccgtggagtagaaggatctgattacatcaatgccagttttattgatggatacagacaacagaaagcctacatcgctacccaggggcccttggcagagaccactgaagacttctggcggatgctctgggaacacaattccaccatagttgtgatgctcaccaagctgcgtgaaatgggcagagagaaatgtcaccaatactggccagcagaacggtctgcaagataccagtactttgttgtagatcccatggctgagtacaacatgccacagtatatcctaagggaattcaaggtcacagatgccagggacggccagtcccgaacagtaaggcagttccagttcactgactggccagagcaaggagtgccaaagtccggagaaggatttattgacttcatcggccaagtccataaaacaaaagaacagtttggccaagatggacccatttcagtccattgcagcgcgggcgttggaagaactggagtcttcataacgctaagcattgttttggaaagaatgagatatgaaggagttgtagatatcttccagactgtcaaaatgttaagaacacaacgaccagctatggtacagacagaggatcaatatcagttttcctatcgtgccgcactagagtacctgggcagctttgaccactatgcaacgtagaaacccctgacccattctsgatttttactacaggcccttcaatatccatggagtctcttctgagccatacagggcacttgagaagtccttcttaacttctagctaacaactacttagtgggactattacacacaaaacaaattaaaaacaaattattccaggtggaccaagaattcacactttgacatcgccccttcccaccatactgctcataataacattttaggggsmaaggggagggaatgtttaaaaagaaagtccttgatttagttttttagtattgtaaagatactgctgacctgtgcttcatttctaactgtgtaaacttttttttaacaaaatgtatcattcgataaagtgaattttaaaaaagttacataactcttcatttttttatttccaaatcrtaggtttttttaagctgtagaactgttatctgtaatatcttgctgtagaaatatcaaatcatttgaaaatttgcacatttttgtgcaaaactcaatctacagtatcagtctcgtcagatatattaattttacacttcagttttgattggtgagaaagtacccattctcttcaaataatcaaagataattattattttgttttgtttttggaatcaacagggaggcgcaaagtataaagttgctgctaacatatatacatatayatccatattttataagggtgtctatgtatatatagacagtgtgtccacacaaaaaatagatacagttatcagtcagtcagttcttccatgatttagtttttttaaacgtagaaaagctattgtaaacatctctttccatttattcttaattttttgacatattggtatttctttaaagggaaatgaggaatgcacatcagtgattgattgtcaaacctcaccccctgatttcctacctaatc

SEQ ID NO: 5257 - DNA, 6260 bp, Homo sapiens
  misc_feature (1)...(6260): n = A,T,C or G
aagatcaaattcccaggggcttccctaccattgacatgggcccacagttgaaggtggttgagcgtactcgcacggccaccatgctttgtgcagccagtggtaatccggatccagaaatcacttggtttaaagatttcttacctgtggacacaagcaacaacaatggtcgtattaagcagttacgatcaggagcccttcagattgagcagagtgaagagtctgaccaaggaaaatatgagtgtgttgccaccaacagcgcgggcactcgctattccgctcctgccaatttatatgtcagagttcgccgtgtcccaccaagattctctatcccacccactaatcatgaaatcatgccaggcggaagcgttaatatcacctgtgtggccgtggggtcaccaatgccttatgtaaagtggatgttgggggcagaagatctgacacctgaagatgatatgccaataggaagaaatgtgctagaactgaatgatgtaagacagtcagcaaattacacctgtgttgctatgtcaacactgggtgtcattgaagcaatagcacagatcactgtcaaagccttacccaaacctccaggaactcctgtagtgacygagagcacagctacaagcatcacactgacgtgggactctgggaaccctgagcctgtttcttattacataattcagcataaacctaaaaactctgaggaactttacaaagaaattgatggggtggcgaccacacgctacagtgtcgctggactaagtccctactcggattatgaattcagggttgttgctgtcaataacattgggcgggggcctcccagcgaacctgtgctaacacaaacctcagagcaagcrccatccagtgccccgagggatgtccaggcacgaatgttgagttcgaccaccattttggtacagtggaaggaacctgaagagccaaatggasagatccaaggatatagagtttattatacaatggatcccactcaacatgtcaacaactggatgaaacacaatgtagctgacagccaaatcactactattggcaacttagtgccccagaaaacatattctgtcaaagtcctggcttttacctcaattggagatggtcccctttcaagtgacatacaagtcatcactcagacaggagtaccagggcagccactaaacttcaaagcagaacctgagtctgaaacaagtattttgctctcttggacacctccacgttcagataccattgccaactatgaactggtctacaaagatggggagcatggagaggagcaacgaattaccattgagccagggacatcatataggctgcaaggactgaaaccaaacagcttatactatttccgtctggctgcacgctcccctcaaggcctgggtgcttctactgcagaaatatcagctagaaccatgcagtcaaagccgtcagctcctcctcaagacattagttgcaccagcccaagttccactagtattttggtaagttggcaacctccaccagtggaaaaacagaatggcattatcactgaatactccatcaagtacactgcagtggatggggaagatgacaagcctcaygagattttgggaattccttcggacactaccaaataccttttggaacagctggaaaaatggactgaataccggatcactgtgacagcccatacagatgtcggccctggccctgagagcttgtccgtgttgattcgaaccaatgaagatgttcctagtggtcctcctcgcaaagtcgaggtagaggctgtcaactcaacatctgttaaagtctcatggcgctcacccgtgcccaataaacagcatggccagataagaggatatcaggtgcattatgtgaggatggaaaatggtgagcccaagggccagcccatgctgaaagatgtcatgctggctgatgcacagtgggaatttgatgatactactgaacatgacatgatcatttctgggctccagcctgaaacttcctactccctcaccgtcacagcctacacaaccaaaggagatggwgctcgcagcaagcccraactggtgtccaccactggggcagttccagggaaacctcggcttgtgattaaccacactcagatgaatactgctcttattcagtggcacyctccggtggacacatttggacctcttcagggctaccgtctaaaatttggccgcaaggatatggagccacttactactcttgagttctctgaaaaagaagatcactttacmgctacagacrtccacaagggagcatcatacgtcttcaggctctcagccagaaacaaagtgggctttggggaggagatggtgaaggagatttccattccagaagaagtaccaactggattccctcaaaaccttcactcagaaggcaccacttcaacctccgtccagttatcttggcaascacctgtcctggcagagagaaatggcattatcaccaagtatacccttctttatagggatatcaacatyccccttctcccgatggagcagcttattgttccagctgacaccactatgacactcactggcttaaaaccagataccacatacgatgtaaaagtangtgctcatacgagcaaagggcccgggccatatagtcccagtgtccagttcaggacactgcctgtggatcaagtgtttgcaaaaaattttcatgtcaaagcagtaatgaagacttccgtgttgctgtcttgggagattccagagaattataactccgccatgcctttcaaaattctttatgatgatgggaaaatggtagaagaagtggatggccgagccacacagaagttaattgtcaacctgaagcctgagaaatcatattcatttgtgctgacaaatcgtggaaacagtgctggtgggctgcagcacmgggtcacggcaaagactgcaccagatgtattacgtaccaagcctgccttyattgggaagaccaacttggatggcatgattactgtgcaactgcctgaagtacctgcaaatgagaatataaaaggttactacataataattgtgcctttgaagaaatctcgcgggaaatttatcaagccatgggagagtccagatgaaatggaattagatgagctgcttaaggagatatctaggaagcgcagaagcatccgttatgggagagaagttgaattaaagccatatattgccgcycactttgatgtccttcccactgagttcaccctgggggatgacaagcattatggtggatttacaaacaagcaactccaaagtggtcaagaatatgtcttctttgtgttagcagtaatggaacatgcagagtctaagatgtatgcaaccagcccttactccgaccccgtggtgtcaatggatctggatccgcagccaatcacggatgaagaagaaggcttgatctgggttgtaggtcctgtccttgcagtggtctttatcatctgcattgtcattgctattcttctttataaaaggaagagggcagagtccgactctagaaaaagcagcatacygaacaataaggagatcccttcacaccacccaacagaccctgtagaactgaggcgccttaactttcaaacaccgggtatggctagccatcctccaatacccatcttggaacttgcagaccacattgaaagattgaaagcaaatgacaacttgaagttttcccaggaatatgagtcaattgaccctggccagcagttcacttgggaacattcaaacttggaagtaaacaaaccaaagaatagatacgcgaatgtaatcgcatatgatcattcccgggttctcctatcagctatagaagggatcccaggaagtgactatgtgaatgccaactacatagatggstataggaagcaaaatgcctatattgcaacacagggatctctccccgaaacatttggggacttttggagaatgatatgggaacaacggagtgccacagttgtcatgatgacaaaactagaagaaagatcaagggtgaagtgtgaccagtattggcctagcagaggcacagaaacccacggactcgttcaagtaacgctgcttgwtactgtggagctggccacatattgtgttcgaacatttgcactttacaagaatggttcaagtgagaagagagaagtgagacaattccagttcaccgcctggcctgatcatggtgttccagaacaccctacaccttttctagctttcttacgtagagtcaaaacctgtaaccctcccgatgctggtccgatggttgtgcactgcagtgcgggagttggccggactggttgcttcatcgtcatagatgccatgttagaaagaataaagcatgaaaaaactgtagatatttatggccatgtaactttaatgagagcccagaggaactatatggttcaaacagaagaccaatacatctttatccatgatgcactgttagaagcagtgacttgtggaaataccgaagtgccagctagaaacttgtatgcctacattcagaagctgacacaaatagaaacgggagagaatgtcacaggaatggagctcgaatttaagcgtctagccagctcaaaagctcacacctcaaggtttatcagtgccaatcttccatgtaataaattcaaaaatcgccttgttaatattatgccatatgaatccacaagggtatgcctgcagcctatccgtggagtagaaggatctgattacatcaatgccagttttattgatggatacagacaacagaaagcctacatcgctacccaggggcccttggcagagaccactgaagacttctggcggatgctctgggaacacaattccaccatagttgtgatgctcaccaagctgcgtgaaatgggcagagagaaatgtcaccaatactggccagcagaacggtctgcaagataccagtactttgttgtagatcccatggctgagtacaacatgccacagtatatcctaagggaattcaaggtcacagatgccagggacggccagtcccgaacagtaaggcagttccagttcactgactggccagagcaaggagtgccaaagtccggagaaggatttattgacttcatcggccaagtccataaaacaaaagaacagtttggccaagatggacccatttcagtccattgcagcgcgggcgttggaagaactggagtcttcataacgctaagcattgttttggaaagaatgagatatgaaggagttgtagatatcttccagactgtcaaaatgttaagaacacaacgaccagctatggtacagacagaggatcaatatcagttttcctatcgtgccgcactagagtacctgggcagctttgaccactatgcaacgtagaaacccctgacccattctsgatttttactacaggcccttcaatatccatggagtctcttctgagccatacagggcacttgagaagtccttcttaacttctagctaacaactacttagtgggactattacacacaaaacaaattaaaaacaaattattccaggtggaccaagaattcacactttgacatcgccccttcccaccatactgctcataataacattttaggggsmaaggggagggaatgtttaaaaagaaagtccttgatttagttttttagtattgtaaagatactgctgacctgtgcttcatttctaactgtgtaaacttttttttaacaaaatgtatcattcgataaagtgaattttaaaaaagttacataactcttcatttttttatttccaaatcrtaggtttttttaagctgtagaactgttatctgtaatatcttgctgtagaaatatcaaatcatttgaaaatttgcacatttttgtgcaaaactcaatctacagtatcagtctcgtcagatatattaattttacacttcagttttgattggtgagaaagtacccattctcttcaaataatcaaagataattattattttgttttgtttttggaatcaacagggaggcgcaaagtataaagttgctgctaacatatatacatatayatccatattttataagggtgtctatgtatatatagacagtgtgtccacacaaaaaatagatacagttatcagtcagtcagttcttccatgatttagtttttttaaacgtagaaaagctattgtaaacatctctttccatttattcttaattttttgacatattggtatttctttaaagggaaatgaggaatgcacatcagtgattgattgtcaaacctcaccccctgatttcctacctaatc

SEQ ID NO: 5258 - DNA, 6760 bp, Homo sapiens
  misc_feature (1)...(6760): n = A,T,C or G
agggagacgtctggtgaacacccgtgggatctaaagaacaagctctgaaagtgttccagctgaaatttcagatcggacagactcgctgcggctccggaggcagtgattccaagctgctygcgcacgctgctgccaagctgcaggatggtgcacgtagccaggctgctgctgctgctcctcactttcttcctccgcacggatgctgagacacctccaaggtttacacgaacacccgttgatcagacaggggtctctggcggagttgcctctttcatctgccaagctacgggagacccaagacctaaaattgtctggaacaaaaaaggaaagaaagtcagcaatcagagatttgaggtaatagagtttgacgatgggtctggatcagttctcagaatacaacccttacggactccgagggatgaggccatttatgaatgtgtggcctcaaataatgtgggagaaataagtgtatccaccagactcacagttttgcgggaagatcaaattcccaggggcttccctaccattgacatgggcccacagttgaaggtggttgagcgtactcgcacggccaccatgctttgtgcagccagtggtaatccggatccagaaatcacttggtttaaagatttcttacctgtggacacaagcaacaacaatggtcgtattaagcagttacgatcagcaatatattttatatccatacaggagcccttcagattgagcagagtgaagagtctgaccaaggaaaatatgagtgtgttgccaccaacagcgcgggcactcgctattccgctcctgccaatttatatgtcagaggtaggaatttcgccgtgtcccaccaagattctctatcccacccactaatcatgaaatcatgccaggcggaagcgttaatatcacctgtgtggccgtggggtcaccaatgccttatgtaaagtggatgttgggggcagaagatctgacacctgaagatgatatgccaataggaagaaatgtgctagaactgaatgatgtaagacagtcagcaaattacacctgtgttgctatgtcaacactgggtgtcattgaagcaatagcacagatcactgtcaaagccttacccaaacctccaggaactcctgtagtgacygagagcacagctacaagcatcacactgacgtgggactctgggaaccctgagcctgtttcttattacataattcagcataaacctaaaaactctgaggaactttacaaagaaattgatggggtggcgaccacacgctacagtgtcgctggactaagtccctactcggattatgaattcagggttgttgctgtcaataacattgggcgggggcctcccagcgaacctgtgctaacacaaacctcagagcaagcrccatccagtgccccgagggatgtccaggcacgaatgttgagttcgaccaccattttggtacagtggaaggaacctgaagagccaaatggasagatccaaggatatagagtttattatacaatggatcccactcaacatgtcaacaactggatgaaacacaatgtagctgacagccaaatcactactattggcaacttagtgccccagaaaacatattctgtcaaagtcctggcttttacctcaattggagatggtcccctttcaagtgacatacaagtcatcactcagacaggagtaccagggcagccactaaacttcaaagcagaacctgagtctgaaacaagtattttgctctcttggacacctccacgttcagataccattgccaactatgaactggtctacaaagatggggagcatggagaggagcaacgaattaccattgagccagggacatcatataggctgcaaggactgaaaccaaacagcttatactatttccgtctggctgcacgctcccctcaaggcctgggtgcttctactgcagaaatatcagctagaaccatgcagtcaaagccgtcagctcctcctcaagacattagttgcaccagcccaagttccactagtattttggtaagttggcaacctccaccagtggaaaaacagaatggcattatcactgaatactccatcaagtacactgcagtggatggggaagatgacaagcctcaygagattttgggaattccttcggacactaccaaataccttttggaacagctggaaaaatggactgaataccggatcactgtgacagcccatacagatgtcggccctggccctgagagcttgtccgtgttgattcgaaccaatgaagatgttcctagtggtcctcctcgcaaagtcgaggtagaggctgtcaactcaacatctgttaaagtctcatggcgctcacccgtgcccaataaacagcatggccagataagaggatatcaggtgcattatgtgaggatggaaaatggtgagcccaagggccagcccatgctgaaagatgtcatgctggctgatgcacaggacatgatcatttctgggctccagcctgaaacttcctactccctcaccgtcacagcctacacaaccaaaggagatggwgctcgcagcaagcccraactggtgtccaccactggggcagttccagggaaacctcggcttgtgattaaccacactcagatgaatactgctcttattcagtggcacyctccggtggacacatttggacctcttcagggctaccgtctaaaatttggccgcaaggatatggagccacttactactcttgagttctctgaaaaagaagatcactttacmgctacagacrtccacaagggagcatcatacgtcttcaggctctcagccagaaacaaagtgggctttggggaggagatggtgaaggagatttccattccagaagaagtaccaactggattccctcaaaaccttcactcagaaggcaccacttcaacctccgtccagttatcttggcaascacctgtcctggcagagagaaatggcattatcaccaagtatacccttctttatagggatatcaacatyccccttctcccgatggagcagcttattgttccagctgacaccactatgacactcactggcttaaaaccagataccacatacgatgtaaaagtangtgctcatacgagcaaagggcccgggccatatagtcccagtgtccagttcaggacactgcctgtggatcaagtgtttgcaaaaaattttcatgtcaaagcagtaatgaagacttccgtgttgctgtcttgggagattccagagaattataactccgccatgcctttcaaaattctttatgatgatgggaaaatggtagaagaagtggatggccgagccacacagaagttaattgtcaacctgaagcctgagaaatcatattcatttgtgctgacaaatcgtggaaacagtgctggtgggctgcagcacmgggtcacggcaaagactgcaccagatgtattacgtaccaagcctgccttyattgggaagaccaacttggatggcatgattactgtgcaactgcctgaagtacctgcaaatgagaatataaaaggttactacataataattgtgcctttgaagaaatctcgcgggaaatttatcaagccatgggagagtccagatgaaatggaattagatgagctgcttaaggagatatctaggaagcgcagaagcatccgttatgggagagaagttgaattaaagccatatattgccgcycactttgatgtccttcccactgagttcaccctgggggatgacaagcattatggtggatttacaaacaagcaactccaaagtggtcaagaatatgtcttctttgtgttagcagtaatggaacatgcagagtctaagatgtatgcaaccagcccttactccgaccccgtggtgtcaatggatctggatccgcagccaatcacggatgaagaagaaggcttgatctgggttgtaggtcctgtccttgcagtggtctttatcatctgcattgtcattgctattcttctttataaaaggaagagggcagagtccgactctagaaaaagcagcatacygaacaataaggagatcccttcacaccacccaacagaccctgtagaactgaggcgccttaactttcaaacaccgggtatggctagccatcctccaatacccatcttggaacttgcagaccacattgaaagattgaaagcaaatgacaacttgaagttttcccaggaatatgagtcaattgaccctggccagcagttcacttgggaacattcaaacttggaagtaaacaaaccaaagaatagatacgcgaatgtaatcgcatatgatcattcccgggttctcctatcagctatagaagggatcccaggaagtgactatgtgaatgccaactacatagatggstataggaagcaaaatgcctatattgcaacacagggatctctccccgaaacatttggggacttttggagaatgatatgggaacaacggagtgccacagttgtcatgatgacaaaactagaagaaagatcaagggtgaagtgtgaccagtattggcctagcagaggcacagaaacccacggactcgttcaagtaacgctgcttgwtactgtggagctggccacatattgtgttcgaacatttgcactttacaagaatggttcaagtgagaagagagaagtgagacaattccagttcaccgcctggcctgatcatggtgttccagaacaccctacaccttttctagctttcttacgtagagtcaaaacctgtaaccctcccgatgctggtccgatggttgtgcactgcagtgcgggagttggccggactggttgcttcatcgtcatagatgccatgttagaaagaataaagcatgaaaaaactgtagatatttatggccatgtaactttaatgagagcccagaggaactatatggttcaaacagaagaccaatacatctttatccatgatgcactgttagaagcagtgacttgtggaaataccgaagtgccagctagaaacttgtatgcctacattcagaagctgacacaaatagaaacgggagagaatgtcacaggaatggagctcgaatttaagcgtctagccagctcaaaagctcacacctcaaggtttatcagtgccaatcttccatgtaataaattcaaaaatcgccttgttaatattatgccatatgaatccacaagggtatgcctgcagcctatccgtggagtagaaggatctgattacatcaatgccagttttattgatggatacagacaacagaaagcctacatcgctacccaggggcccttggcagagaccactgaagacttctggcggatgctctgggaacacaattccaccatagttgtgatgctcaccaagctgcgtgaaatgggcagagagaaatgtcaccaatactggccagcagaacggtctgcaagataccagtactttgttgtagatcccatggctgagtacaacatgccacagtatatcctaagggaattcaaggtcacagatgccagggacggccagtcccgaacagtaaggcagttccagttcactgactggccagagcaaggagtgccaaagtccggagaaggatttattgacttcatcggccaagtccataaaacaaaagaacagtttggccaagatggacccatttcagtccattgcagcgcgggcgttggaagaactggagtcttcataacgctaagcattgttttggaaagaatgagatatgaaggagttgtagatatcttccagactgtcaaaatgttaagaacacaacgaccagctatggtacagacagaggatcaatatcagttttcctatcgtgccgcactagagtacctgggcagctttgaccactatgcaacgtagaaacccctgacccattctsgatttttactacaggcccttcaatatccatggagtctcttctgagccatacagggcacttgagaagtccttcttaacttctagctaacaactacttagtgggactattacacacaaaacaaattaaaaacaaattattccaggtggaccaagaattcacactttgacatcgccccttcccaccatactgctcataataacattttaggggsmaaggggagggaatgtttaaaaagaaagtccttgatttagttttttagtattgtaaagatactgctgacctgtgcttcatttctaactgtgtaaacttttttttaacaaaatgtatcattcgataaagtgaattttaaaaaagttacataactcttcatttttttatttccaaatcrtaggtttttttaagctgtagaactgttatctgtaatatcttgctgtagaaatatcaaatcatttgaaaatttgcacatttttgtgcaaaactcaatctacagtatcagtctcgtcagatatattaattttacacttcagttttgattggtgagaaagtacccattctcttcaaataatcaaagataattattattttgttttgtttttggaatcaacagggaggcgcaaagtataaagttgctgctaacatatatacatatayatccatattttataagggtgtctatgtatatatagacagtgtgtccacacaaaaaatagatacagttatcagtcagtcagttcttccatgatttagtttttttaaacgtagaaaagctattgtaaacatctctttccatttattcttaattttttgacatattggtatttctttaaagggaaatgaggaatgcacatcagtgattgattgtcaaacctcaccccctgatttcctacctaatc

SEQ ID NO: 5259 - DNA, 1322 bp, Homo sapiens
agaaacaccttaaatttccacaagggatcagaagatcagaaatgccttagtgtcttcttttcaacccagatatacttcgacggccagtcccgaacagtaaggcagttccagttcactgactggccagagcaaggagtgccaaagtccggagaaggatttattgacttcatcggccaagtccataaaacaaaagaacagtttggccaagatggacccatttcagtccattgcagcgcgggcgttggaagaactggagtcttcataacgctaagcattgttttggaaagaatgagatatgaaggagttgtagatatcttccagactgtcaaaatgttaagaacacaacgaccagctatggtacagacagaggtattttttgatgtgggcagccagtcctgtgaagccattttcagggatggaaagcttggaagtccagtgccctgtgtaaatggatttgtgtgcctggtgtgccgcaccagctaccttctggctgtatatgaacatcatatatacctcaaggattcaaaatcaagggaagaagaaatcacagcaaagaaccaccatcttattcaggattgcttgaaaggtgcaaggagaaattgccagaatgctgcagttcagcacaagatatgtgctggtgtggcttctcacaatgaaacggactctgctttgacatcgccccttcccaccatactgctcataataacattttaggggsmaaggggagggaatgtttaaaaagaaagtccttgatttagttttttagtattgtaaagatactgctgacctgtgcttcatttctaactgtgtaaacttttttttaacaaaatgtatcattcgataaagtgaattttaaaaaagttacataactcttcatttttttatttccaaatcrtaggtttttttaagctgtagaactgttatctgtaatatcttgctgtagaaatatcaaatcatttgaaaatttgcacatttttgtgcaaaactcaatctacagtatcagtctcgtcagatatattaattttacacttcagttttgattggtgagaaagtacccattctcttcaaataatcaaagataattattattttgttttgtttttggaatcaacagggaggcgcaaagtataaagttgctgctaacatatatacatatayatccatattttataagggtgtctatgtatatatagacagtgtgtccacacaaaaaatagatacagttatcagtcagtcagttcttccatgatttagtttttttaaacgtagaaaagctattgtaaacatctctttccatttattcttaattttttgacatattg

SEQ ID NO: 5260 - DNA, 5523 bp, Homo sapiens
agggagacgtctggtgaacacccgtgggatctaaagaacaagctctgaaagtgttccagctgaaatttcagatcggacagactcgctgcggctccggaggcagtgattccaagctgctygcgcacgctgctgccaagctgcaggatggtgcacgtagccaggctgctgctgctgctcctcactttcttcctccgcacggatgctgagacacctccaaggtttacacgaacacccgttgatcagacaggggtctctggcggagttgcctctttcatctgccaagctacgggagacccaagacctaaaattgtctggaacaaaaaaggaaagaaagtcagcaatcagagatttgaggtaatagagtttgacgatgggtctggatcagttctcagaatacaacccttacggactccgagggatgaggccatttatgaatgtgtggcctcaaataatgtgggagaaataagtgtatccaccagactcacagttttgcgggaagatcaaattcccaggggcttccctaccattgacatgggcccacagttgaaggtggttgagcgtactcgcacggccaccatgctttgtgcagccagtggtaatccggatccagaaatcacttggtttaaagatttcttacctgtggacacaagcaacaacaatggtcgtattaagcagttacgatcaggagcccttcagattgagcagagtgaagagtctgaccaaggaaaatatgagtgtgttgccaccaacagcgcgggcactcgctattccgctcctgccaatttatatgtcagagttcgccgtgtcccaccaagattctctatcccacccactaatcatgaaatcatgccaggcggaagcgttaatatcacctgtgtggccgtggggtcaccaatgccttatgtaaagtggatgttgggggcagaagatctgacacctgaagatgatatgccaataggaagaaatgtgctagaactgaatgatgtaagacagtcagcaaattacacctgtgttgctatgtcaacactgggtgtcattgaagcaatagcacagatcactgtcaaagccttacccaaacctccaggaactcctgtagtgacygagagcacagctacaagcatcacactgacgtgggactctgggaaccctgagcctgtttcttattacataattcagcataaacctaaaaactctgaggaactttacaaagaaattgatggggtggcgaccacacgctacagtgtcgctggactaagtccctactcggattatgaattcagggttgttgctgtcaataacattgggcgggggcctcccagcgaacctgtgctaacacaaacctcagagcaagcrccatccagtgccccgagggatgtccaggcacgaatgttgagttcgaccaccattttggtacagtggaaggaacctgaagagccaaatggasagatccaaggatatagagtttattatacaatggatcccactcaacatgtcaacaactggatgaaacacaatgtagctgacagccaaatcactactattggcaacttagtgccccagaaaacatattctgtcaaagtcctggcttttacctcaattggagatggtcccctttcaagtgacatacaagtcatcactcagacaggagtaccagggcagccactaaacttcaaagcagaacctgagtctgaaacaagtattttgctctcttggacacctccacgttcagataccattgccaactatgaactggtctacaaagatggggagcatggagaggagcaacgaattaccattgagccagggacatcatataggctgcaaggactgaaaccaaacagcttatactatttccgtctggctgcacgctcccctcaaggcctgggtgcttctactgcagaaatatcagctagaaccatgcagtcaatgtttgcaaaaaattttcatgtcaaagcagtaatgaagacttccgtgttgctgtcttgggagattccagagaattataactccgccatgcctttcaaaattctttatgatgatgggaaaatggtagaagaagtggatggccgagccacacagaagttaattgtcaacctgaagcctgagaaatcatattcatttgtgctgacaaatcgtggaaacagtgctggtgggctgcagcacmgggtcacggcaaagactgcaccagatgtattacgtaccaagcctgccttyattgggaagaccaacttggatggcatgattactgtgcaactgcctgaagtacctgcaaatgagaatataaaaggttactacataataattgtgcctttgaagaaatctcgcgggaaatttatcaagccatgggagagtccagatgaaatggaattagatgagctgcttaaggagatatctaggaagcgcagaagcatccgttatgggagagaagttgaattaaagccatatattgccgcycactttgatgtccttcccactgagttcaccctgggggatgacaagcattatggtggatttacaaacaagcaactccaaagtggtcaagaatatgtcttctttgtgttagcagtaatggaacatgcagagtctaagatgtatgcaaccagcccttactccgaccccgtggtgtcaatggatctggatccgcagccaatcacggatgaagaagaaggcttgatctgggttgtaggtcctgtccttgcagtggtctttatcatctgcattgtcattgctattcttctttataaaaggaagagggcagagtccgactctagaaaaagcagcatacygaacaataaggagatcccttcacaccacccaacagaccctgtagaactgaggcgccttaactttcaaacaccgggtatggctagccatcctccaatacccatcttggaacttgcagaccacattgaaagattgaaagcaaatgacaacttgaagttttcccaggaatatgagtcaattgaccctggccagcagttcacttgggaacattcaaacttggaagtaaacaaaccaaagaatagatacgcgaatgtaatcgcatatgatcattcccgggttctcctatcagctatagaagggatcccaggaagtgactatgtgaatgccaactacatagatggstataggaagcaaaatgcctatattgcaacacagggatctctccccgaaacatttggggacttttggagaatgatatgggaacaacggagtgccacagttgtcatgatgacaaaactagaagaaagatcaagggtgaagtgtgaccagtattggcctagcagaggcacagaaacccacggactcgttcaagtaacgctgcttgwtactgtggagctggccacatattgtgttcgaacatttgcactttacaagaatggttcaagtgagaagagagaagtgagacaattccagttcaccgcctggcctgatcatggtgttccagaacaccctacaccttttctagctttcttacgtagagtcaaaacctgtaaccctcccgatgctggtccgatggttgtgcactgcagtgcgggagttggccggactggttgcttcatcgtcatagatgccatgttagaaagaataaagcatgaaaaaactgtagatatttatggccatgtaactttaatgagagcccagaggaactatatggttcaaacagaagaccaatacatctttatccatgatgcactgttagaagcagtgacttgtggaaataccgaagtgccagctagaaacttgtatgcctacattcagaagctgacacaaatagaaacgggagagaatgtcacaggaatggagctcgaatttaagcgtctagccagctcaaaagctcacacctcaaggtttatcagtgccaatcttccatgtaataaattcaaaaatcgccttgttaatattatgccatatgaatccacaagggtatgcctgcagcctatccgtggagtagaaggatctgattacatcaatgccagttttattgatggatacagacaacagaaagcctacatcgctacccaggggcccttggcagagaccactgaagacttctggcggatgctctgggaacacaattccaccatagttgtgatgctcaccaagctgcgtgaaatgggcagagagaaatgtcaccaatactggccagcagaacggtctgcaagataccagtactttgttgtagatcccatggctgagtacaacatgccacagtatatcctaagggaattcaaggtcacagatgccagggacggccagtcccgaacagtaaggcagttccagttcactgactggccagagcaaggagtgccaaagtccggagaaggatttattgacttcatcggccaagtccataaaacaaaagaacagtttggccaagatggacccatttcagtccattgcagcgcgggcgttggaagaactggagtcttcataacgctaagcattgttttggaaagaatgagatatgaaggagttgtagatatcttccagactgtcaaaatgttaagaacacaacgaccagctatggtacagacagaggatcaatatcagttttcctatcgtgccgcactagagtacctgggcagctttgaccactatgcaacgtagaaacccctgacccattctsgatttttactacaggcccttcaatatccatggagtctcttctgagccatacagggcacttgagaagtccttcttaacttctagctaacaactacttagtgggactattacacacaaaacaaattaaaaacaaattattccaggtggaccaagaattcacactttgacatcgccccttcccaccatactgctcataataacattttaggggsmaaggggagggaatgtttaaaaagaaagtccttgatttagttttttagtattgtaaagatactgctgacctgtgcttcatttctaactgtgtaaacttttttttaacaaaatgtatcattcgataaagtgaattttaaaaaagttacataactcttcatttttttatttccaaatcrtaggtttttttaagctgtagaactgttatctgtaatatcttgctgtagaaatatcaaatcatttgaaaatttgcacatttttgtgcaaaactcaatctacagtatcagtctcgtcagatatattaattttacacttcagttttgattggtgagaaagtacccattctcttcaaataatcaaagataattattattttgttttgtttttggaatcaacagggaggcgcaaagtataaagttgctgctaacatatatacatatayatccatattttataagggtgtctatgtatatatagacagtgtgtccacacaaaaaatagatacagttatcagtcagtcagttcttccatgatttagtttttttaaacgtagaaaagctattgtaaacatctctttccatttattcttaattttttgacatattggtatttctttaaagggaaatgaggaatgcacatcagtgattgattgtcaaacctcaccccctgatttcctacctaatc

SEQ ID NO: 5261 - DNA, 6787 bp, Homo sapiens
  misc_feature (1)...(6787): n = A,T,C or G
agggagacgtctggtgaacacccgtgggatctaaagaacaagctctgaaagtgttccagctgaaatttcagatcggacagactcgctgcggctccggaggcagtgattccaagctgctygcgcacgctgctgccaagctgcaggatggtgcacgtagccaggctgctgctgctgctcctcactttcttcctccgcacggatgctgagacacctccaaggtttacacgaacacccgttgatcagacaggggtctctggcggagttgcctctttcatctgccaagctacgggagacccaagacctaaaattgtctggaacaaaaaaggaaagaaagtcagcaatcagagatttgaggtaatagagtttgacgatgggtctggatcagttctcagaatacaacccttacggactccgagggatgaggccatttatgaatgtgtggcctcaaataatgtgggagaaataagtgtatccaccagactcacagttttgcgggaagatcaaattcccaggggcttccctaccattgacatgggcccacagttgaaggtggttgagcgtactcgcacggccaccatgctttgtgcagccagtggtaatccggatccagaaatcacttggtttaaagatttcttacctgtggacacaagcaacaacaatggtcgtattaagcagttacgatcagcaatatattttatatccatacaggagcccttcagattgagcagagtgaagagtctgaccaaggaaaatatgagtgtgttgccaccaacagcgcgggcactcgctattccgctcctgccaatttatatgtcagaggtaggaatttcgccgtgtcccaccaagattctctatcccacccactaatcatgaaatcatgccaggcggaagcgttaatatcacctgtgtggccgtggggtcaccaatgccttatgtaaagtggatgttgggggcagaagatctgacacctgaagatgatatgccaataggaagaaatgtgctagaactgaatgatgtaagacagtcagcaaattacacctgtgttgctatgtcaacactgggtgtcattgaagcaatagcacagatcactgtcaaagccttacccaaacctccaggaactcctgtagtgacygagagcacagctacaagcatcacactgacgtgggactctgggaaccctgagcctgtttcttattacataattcagcataaacctaaaaactctgaggaactttacaaagaaattgatggggtggcgaccacacgctacagtgtcgctggactaagtccctactcggattatgaattcagggttgttgctgtcaataacattgggcgggggcctcccagcgaacctgtgctaacacaaacctcagagcaagcrccatccagtgccccgagggatgtccaggcacgaatgttgagttcgaccaccattttggtacagtggaaggaacctgaagagccaaatggasagatccaaggatatagagtttattatacaatggatcccactcaacatgtcaacaactggatgaaacacaatgtagctgacagccaaatcactactattggcaacttagtgccccagaaaacatattctgtcaaagtcctggcttttacctcaattggagatggtcccctttcaagtgacatacaagtcatcactcagacaggagtaccagggcagccactaaacttcaaagcagaacctgagtctgaaacaagtattttgctctcttggacacctccacgttcagataccattgccaactatgaactggtctacaaagatggggagcatggagaggagcaacgaattaccattgagccagggacatcatataggctgcaaggactgaaaccaaacagcttatactatttccgtctggctgcacgctcccctcaaggcctgggtgcttctactgcagaaatatcagctagaaccatgcagtcaaagccgtcagctcctcctcaagacattagttgcaccagcccaagttccactagtattttggtaagttggcaacctccaccagtggaaaaacagaatggcattatcactgaatactccatcaagtacactgcagtggatggggaagatgacaagcctcaygagattttgggaattccttcggacactaccaaataccttttggaacagctggaaaaatggactgaataccggatcactgtgacagcccatacagatgtcggccctggccctgagagcttgtccgtgttgattcgaaccaatgaagatgttcctagtggtcctcctcgcaaagtcgaggtagaggctgtcaactcaacatctgttaaagtctcatggcgctcacccgtgcccaataaacagcatggccagataagaggatatcaggtgcattatgtgaggatggaaaatggtgagcccaagggccagcccatgctgaaagatgtcatgctggctgatgcacagtgggaatttgatgatactactgaacatgacatgatcatttctgggctccagcctgaaacttcctactccctcaccgtcacagcctacacaaccaaaggagatggwgctcgcagcaagcccraactggtgtccaccactggggcagttccagggaaacctcggcttgtgattaaccacactcagatgaatactgctcttattcagtggcacyctccggtggacacatttggacctcttcagggctaccgtctaaaatttggccgcaaggatatggagccacttactactcttgagttctctgaaaaagaagatcactttacmgctacagacrtccacaagggagcatcatacgtcttcaggctctcagccagaaacaaagtgggctttggggaggagatggtgaaggagatttccattccagaagaagtaccaactggattccctcaaaaccttcactcagaaggcaccacttcaacctccgtccagttatcttggcaascacctgtcctggcagagagaaatggcattatcaccaagtatacccttctttatagggatatcaacatyccccttctcccgatggagcagcttattgttccagctgacaccactatgacactcactggcttaaaaccagataccacatacgatgtaaaagtangtgctcatacgagcaaagggcccgggccatatagtcccagtgtccagttcaggacactgcctgtggatcaagtgtttgcaaaaaattttcatgtcaaagcagtaatgaagacttccgtgttgctgtcttgggagattccagagaattataactccgccatgcctttcaaaattctttatgatgatgggaaaatggtagaagaagtggatggccgagccacacagaagttaattgtcaacctgaagcctgagaaatcatattcatttgtgctgacaaatcgtggaaacagtgctggtgggctgcagcacmgggtcacggcaaagactgcaccagatgtattacgtaccaagcctgccttyattgggaagaccaacttggatggcatgattactgtgcaactgcctgaagtacctgcaaatgagaatataaaaggttactacataataattgtgcctttgaagaaatctcgcgggaaatttatcaagccatgggagagtccagatgaaatggaattagatgagctgcttaaggagatatctaggaagcgcagaagcatccgttatgggagagaagttgaattaaagccatatattgccgcycactttgatgtccttcccactgagttcaccctgggggatgacaagcattatggtggatttacaaacaagcaactccaaagtggtcaagaatatgtcttctttgtgttagcagtaatggaacatgcagagtctaagatgtatgcaaccagcccttactccgaccccgtggtgtcaatggatctggatccgcagccaatcacggatgaagaagaaggcttgatctgggttgtaggtcctgtccttgcagtggtctttatcatctgcattgtcattgctattcttctttataaaaggaagagggcagagtccgactctagaaaaagcagcatacygaacaataaggagatcccttcacaccacccaacagaccctgtagaactgaggcgccttaactttcaaacaccgggtatggctagccatcctccaatacccatcttggaacttgcagaccacattgaaagattgaaagcaaatgacaacttgaagttttcccaggaatatgagtcaattgaccctggccagcagttcacttgggaacattcaaacttggaagtaaacaaaccaaagaatagatacgcgaatgtaatcgcatatgatcattcccgggttctcctatcagctatagaagggatcccaggaagtgactatgtgaatgccaactacatagatggstataggaagcaaaatgcctatattgcaacacagggatctctccccgaaacatttggggacttttggagaatgatatgggaacaacggagtgccacagttgtcatgatgacaaaactagaagaaagatcaagggtgaagtgtgaccagtattggcctagcagaggcacagaaacccacggactcgttcaagtaacgctgcttgwtactgtggagctggccacatattgtgttcgaacatttgcactttacaagaatggttcaagtgagaagagagaagtgagacaattccagttcaccgcctggcctgatcatggtgttccagaacaccctacaccttttctagctttcttacgtagagtcaaaacctgtaaccctcccgatgctggtccgatggttgtgcactgcagtgcgggagttggccggactggttgcttcatcgtcatagatgccatgttagaaagaataaagcatgaaaaaactgtagatatttatggccatgtaactttaatgagagcccagaggaactatatggttcaaacagaagaccaatacatctttatccatgatgcactgttagaagcagtgacttgtggaaataccgaagtgccagctagaaacttgtatgcctacattcagaagctgacacaaatagaaacgggagagaatgtcacaggaatggagctcgaatttaagcgtctagccagctcaaaagctcacacctcaaggtttatcagtgccaatcttccatgtaataaattcaaaaatcgccttgttaatattatgccatatgaatccacaagggtatgcctgcagcctatccgtggagtagaaggatctgattacatcaatgccagttttattgatggatacagacaacagaaagcctacatcgctacccaggggcccttggcagagaccactgaagacttctggcggatgctctgggaacacaattccaccatagttgtgatgctcaccaagctgcgtgaaatgggcagagagaaatgtcaccaatactggccagcagaacggtctgcaagataccagtactttgttgtagatcccatggctgagtacaacatgccacagtatatcctaagggaattcaaggtcacagatgccagggacggccagtcccgaacagtaaggcagttccagttcactgactggccagagcaaggagtgccaaagtccggagaaggatttattgacttcatcggccaagtccataaaacaaaagaacagtttggccaagatggacccatttcagtccattgcagcgcgggcgttggaagaactggagtcttcataacgctaagcattgttttggaaagaatgagatatgaaggagttgtagatatcttccagactgtcaaaatgttaagaacacaacgaccagctatggtacagacagaggatcaatatcagttttcctatcgtgccgcactagagtacctgggcagctttgaccactatgcaacgtagaaacccctgacccattctsgatttttactacaggcccttcaatatccatggagtctcttctgagccatacagggcacttgagaagtccttcttaacttctagctaacaactacttagtgggactattacacacaaaacaaattaaaaacaaattattccaggtggaccaagaattcacactttgacatcgccccttcccaccatactgctcataataacattttaggggsmaaggggagggaatgtttaaaaagaaagtccttgatttagttttttagtattgtaaagatactgctgacctgtgcttcatttctaactgtgtaaacttttttttaacaaaatgtatcattcgataaagtgaattttaaaaaagttacataactcttcatttttttatttccaaatcrtaggtttttttaagctgtagaactgttatctgtaatatcttgctgtagaaatatcaaatcatttgaaaatttgcacatttttgtgcaaaactcaatctacagtatcagtctcgtcagatatattaattttacacttcagttttgattggtgagaaagtacccattctcttcaaataatcaaagataattattattttgttttgtttttggaatcaacagggaggcgcaaagtataaagttgctgctaacatatatacatatayatccatattttataagggtgtctatgtatatatagacagtgtgtccacacaaaaaatagatacagttatcagtcagtcagttcttccatgatttagtttttttaaacgtagaaaagctattgtaaacatctctttccatttattcttaattttttgacatattggtatttctttaaagggaaatgaggaatgcacatcagtgattgattgtcaaacctcaccccctgatttcctacctaatc

SEQ ID NO: 5262 - DNA, 6291 bp, Homo sapiens
  misc_feature (1)...(6291): n = A,T,C or G
aagatcaaattcccaggggcttccctaccattgacatgggcccacagttgaaggtggttgagcgtactcgcacggccaccatgctttgtgcagccagtggtaatccggatccagaaatcacttggtttaaagatttcttacctgtggacacaagcaacaacaatggtcgtattaagcagttacgatcagcaatatattttatatccatacaggagcccttcagattgagcagagtgaagagtctgaccaaggaaaatatgagtgtgttgccaccaacagcgcgggcactcgctattccgctcctgccaatttatatgtcagaggtaggaatttcgccgtgtcccaccaagattctctatcccacccactaatcatgaaatcatgccaggcggaagcgttaatatcacctgtgtggccgtggggtcaccaatgccttatgtaaagtggatgttgggggcagaagatctgacacctgaagatgatatgccaataggaagaaatgtgctagaactgaatgatgtaagacagtcagcaaattacacctgtgttgctatgtcaacactgggtgtcattgaagcaatagcacagatcactgtcaaagccttacccaaacctccaggaactcctgtagtgacygagagcacagctacaagcatcacactgacgtgggactctgggaaccctgagcctgtttcttattacataattcagcataaacctaaaaactctgaggaactttacaaagaaattgatggggtggcgaccacacgctacagtgtcgctggactaagtccctactcggattatgaattcagggttgttgctgtcaataacattgggcgggggcctcccagcgaacctgtgctaacacaaacctcagagcaagcrccatccagtgccccgagggatgtccaggcacgaatgttgagttcgaccaccattttggtacagtggaaggaacctgaagagccaaatggasagatccaaggatatagagtttattatacaatggatcccactcaacatgtcaacaactggatgaaacacaatgtagctgacagccaaatcactactattggcaacttagtgccccagaaaacatattctgtcaaagtcctggcttttacctcaattggagatggtcccctttcaagtgacatacaagtcatcactcagacaggagtaccagggcagccactaaacttcaaagcagaacctgagtctgaaacaagtattttgctctcttggacacctccacgttcagataccattgccaactatgaactggtctacaaagatggggagcatggagaggagcaacgaattaccattgagccagggacatcatataggctgcaaggactgaaaccaaacagcttatactatttccgtctggctgcacgctcccctcaaggcctgggtgcttctactgcagaaatatcagctagaaccatgcagtcaaagccgtcagctcctcctcaagacattagttgcaccagcccaagttccactagtattttggtaagttggcaacctccaccagtggaaaaacagaatggcattatcactgaatactccatcaagtacactgcagtggatggggaagatgacaagcctcaygagattttgggaattccttcggacactaccaaataccttttggaacagctggaaaaatggactgaataccggatcactgtgacagcccatacagatgtcggccctggccctgagagcttgtccgtgttgattcgaaccaatgaagatgttcctagtggtcctcctcgcaaagtcgaggtagaggctgtcaactcaacatctgttaaagtctcatggcgctcacccgtgcccaataaacagcatggccagataagaggatatcaggtgcattatgtgaggatggaaaatggtgagcccaagggccagcccatgctgaaagatgtcatgctggctgatgcacagtgggaatttgatgatactactgaacatgacatgatcatttctgggctccagcctgaaacttcctactccctcaccgtcacagcctacacaaccaaaggagatggwgctcgcagcaagcccraactggtgtccaccactggggcagttccagggaaacctcggcttgtgattaaccacactcagatgaatactgctcttattcagtggcacyctccggtggacacatttggacctcttcagggctaccgtctaaaatttggccgcaaggatatggagccacttactactcttgagttctctgaaaaagaagatcactttacmgctacagacrtccacaagggagcatcatacgtcttcaggctctcagccagaaacaaagtgggctttggggaggagatggtgaaggagatttccattccagaagaagtaccaactggattccctcaaaaccttcactcagaaggcaccacttcaacctccgtccagttatcttggcaascacctgtcctggcagagagaaatggcattatcaccaagtatacccttctttatagggatatcaacatyccccttctcccgatggagcagcttattgttccagctgacaccactatgacactcactggcttaaaaccagataccacatacgatgtaaaagtangtgctcatacgagcaaagggcccgggccatatagtcccagtgtccagttcaggacactgcctgtggatcaagtgtttgcaaaaaattttcatgtcaaagcagtaatgaagacttccgtgttgctgtcttgggagattccagagaattataactccgccatgcctttcaaaattctttatgatgatgggaaaatggtagaagaagtggatggccgagccacacagaagttaattgtcaacctgaagcctgagaaatcatattcatttgtgctgacaaatcgtggaaacagtgctggtgggctgcagcacmgggtcacggcaaagactgcaccagatgtattacgtaccaagcctgccttyattgggaagaccaacttggatggcatgattactgtgcaactgcctgaagtacctgcaaatgagaatataaaaggttactacataataattgtgcctttgaagaaatctcgcgggaaatttatcaagccatgggagagtccagatgaaatggaattagatgagctgcttaaggagatatctaggaagcgcagaagcatccgttatgggagagaagttgaattaaagccatatattgccgcycactttgatgtccttcccactgagttcaccctgggggatgacaagcattatggtggatttacaaacaagcaactccaaagtggtcaagaatatgtcttctttgtgttagcagtaatggaacatgcagagtctaagatgtatgcaaccagcccttactccgaccccgtggtgtcaatggatctggatccgcagccaatcacggatgaagaagaaggcttgatctgggttgtaggtcctgtccttgcagtggtctttatcatctgcattgtcattgctattcttctttataaaaggaagagggcagagtccgactctagaaaaagcagcatacygaacaataaggagatcccttcacaccacccaacagaccctgtagaactgaggcgccttaactttcaaacaccgggtatggctagccatcctccaatacccatcttggaacttgcagaccacattgaaagattgaaagcaaatgacaacttgaagttttcccaggaatatgagtcaattgaccctggccagcagttcacttgggaacattcaaacttggaagtaaacaaaccaaagaatagatacgcgaatgtaatcgcatatgatcattcccgggttctcctatcagctatagaagggatcccaggaagtgactatgtgaatgccaactacatagatggstataggaagcaaaatgcctatattgcaacacagggatctctccccgaaacatttggggacttttggagaatgatatgggaacaacggagtgccacagttgtcatgatgacaaaactagaagaaagatcaagggtgaagtgtgaccagtattggcctagcagaggcacagaaacccacggactcgttcaagtaacgctgcttgwtactgtggagctggccacatattgtgttcgaacatttgcactttacaagaatggttcaagtgagaagagagaagtgagacaattccagttcaccgcctggcctgatcatggtgttccagaacaccctacaccttttctagctttcttacgtagagtcaaaacctgtaaccctcccgatgctggtccgatggttgtgcactgcagtgcgggagttggccggactggttgcttcatcgtcatagatgccatgttagaaagaataaagcatgaaaaaactgtagatatttatggccatgtaactttaatgagagcccagaggaactatatggttcaaacagaagaccaatacatctttatccatgatgcactgttagaagcagtgacttgtggaaataccgaagtgccagctagaaacttgtatgcctacattcagaagctgacacaaatagaaacgggagagaatgtcacaggaatggagctcgaatttaagcgtctagccagctcaaaagctcacacctcaaggtttatcagtgccaatcttccatgtaataaattcaaaaatcgccttgttaatattatgccatatgaatccacaagggtatgcctgcagcctatccgtggagtagaaggatctgattacatcaatgccagttttattgatggatacagacaacagaaagcctacatcgctacccaggggcccttggcagagaccactgaagacttctggcggatgctctgggaacacaattccaccatagttgtgatgctcaccaagctgcgtgaaatgggcagagagaaatgtcaccaatactggccagcagaacggtctgcaagataccagtactttgttgtagatcccatggctgagtacaacatgccacagtatatcctaagggaattcaaggtcacagatgccagggacggccagtcccgaacagtaaggcagttccagttcactgactggccagagcaaggagtgccaaagtccggagaaggatttattgacttcatcggccaagtccataaaacaaaagaacagtttggccaagatggacccatttcagtccattgcagcgcgggcgttggaagaactggagtcttcataacgctaagcattgttttggaaagaatgagatatgaaggagttgtagatatcttccagactgtcaaaatgttaagaacacaacgaccagctatggtacagacagaggatcaatatcagttttcctatcgtgccgcactagagtacctgggcagctttgaccactatgcaacgtagaaacccctgacccattctsgatttttactacaggcccttcaatatccatggagtctcttctgagccatacagggcacttgagaagtccttcttaacttctagctaacaactacttagtgggactattacacacaaaacaaattaaaaacaaattattccaggtggaccaagaattcacactttgacatcgccccttcccaccatactgctcataataacattttaggggsmaaggggagggaatgtttaaaaagaaagtccttgatttagttttttagtattgtaaagatactgctgacctgtgcttcatttctaactgtgtaaacttttttttaacaaaatgtatcattcgataaagtgaattttaaaaaagttacataactcttcatttttttatttccaaatcrtaggtttttttaagctgtagaactgttatctgtaatatcttgctgtagaaatatcaaatcatttgaaaatttgcacatttttgtgcaaaactcaatctacagtatcagtctcgtcagatatattaattttacacttcagttttgattggtgagaaagtacccattctcttcaaataatcaaagataattattattttgttttgtttttggaatcaacagggaggcgcaaagtataaagttgctgctaacatatatacatatayatccatattttataagggtgtctatgtatatatagacagtgtgtccacacaaaaaatagatacagttatcagtcagtcagttcttccatgatttagtttttttaaacgtagaaaagctattgtaaacatctctttccatttattcttaattttttgacatattggtatttctttaaagggaaatgaggaatgcacatcagtgattgattgtcaaacctcaccccctgatttcctacctaatc

SEQ ID NO: 5263 - DNA, 6756 bp, Homo sapiens
  misc_feature (1)...(6756): n = A,T,C or G
agggagacgtctggtgaacacccgtgggatctaaagaacaagctctgaaagtgttccagctgaaatttcagatcggacagactcgctgcggctccggaggcagtgattccaagctgctygcgcacgctgctgccaagctgcaggatggtgcacgtagccaggctgctgctgctgctcctcactttcttcctccgcacggatgctgagacacctccaaggtttacacgaacacccgttgatcagacaggggtctctggcggagttgcctctttcatctgccaagctacgggagacccaagacctaaaattgtctggaacaaaaaaggaaagaaagtcagcaatcagagatttgaggtaatagagtttgacgatgggtctggatcagttctcagaatacaacccttacggactccgagggatgaggccatttatgaatgtgtggcctcaaataatgtgggagaaataagtgtatccaccagactcacagttttgcgggaagatcaaattcccaggggcttccctaccattgacatgggcccacagttgaaggtggttgagcgtactcgcacggccaccatgctttgtgcagccagtggtaatccggatccagaaatcacttggtttaaagatttcttacctgtggacacaagcaacaacaatggtcgtattaagcagttacgatcaggagcccttcagattgagcagagtgaagagtctgaccaaggaaaatatgagtgtgttgccaccaacagcgcgggcactcgctattccgctcctgccaatttatatgtcagagttcgccgtgtcccaccaagattctctatcccacccactaatcatgaaatcatgccaggcggaagcgttaatatcacctgtgtggccgtggggtcaccaatgccttatgtaaagtggatgttgggggcagaagatctgacacctgaagatgatatgccaataggaagaaatgtgctagaactgaatgatgtaagacagtcagcaaattacacctgtgttgctatgtcaacactgggtgtcattgaagcaatagcacagatcactgtcaaagccttacccaaacctccaggaactcctgtagtgacygagagcacagctacaagcatcacactgacgtgggactctgggaaccctgagcctgtttcttattacataattcagcataaacctaaaaactctgaggaactttacaaagaaattgatggggtggcgaccacacgctacagtgtcgctggactaagtccctactcggattatgaattcagggttgttgctgtcaataacattgggcgggggcctcccagcgaacctgtgctaacacaaacctcagagcaagcrccatccagtgccccgagggatgtccaggcacgaatgttgagttcgaccaccattttggtacagtggaaggaacctgaagagccaaatggasagatccaaggatatagagtttattatacaatggatcccactcaacatgtcaacaactggatgaaacacaatgtagctgacagccaaatcactactattggcaacttagtgccccagaaaacatattctgtcaaagtcctggcttttacctcaattggagatggtcccctttcaagtgacatacaagtcatcactcagacaggagtaccagggcagccactaaacttcaaagcagaacctgagtctgaaacaagtattttgctctcttggacacctccacgttcagataccattgccaactatgaactggtctacaaagatggggagcatggagaggagcaacgaattaccattgagccagggacatcatataggctgcaaggactgaaaccaaacagcttatactatttccgtctggctgcacgctcccctcaaggcctgggtgcttctactgcagaaatatcagctagaaccatgcagtcaaagccgtcagctcctcctcaagacattagttgcaccagcccaagttccactagtattttggtaagttggcaacctccaccagtggaaaaacagaatggcattatcactgaatactccatcaagtacactgcagtggatggggaagatgacaagcctcaygagattttgggaattccttcggacactaccaaataccttttggaacagctggaaaaatggactgaataccggatcactgtgacagcccatacagatgtcggccctggccctgagagcttgtccgtgttgattcgaaccaatgaagatgttcctagtggtcctcctcgcaaagtcgaggtagaggctgtcaactcaacatctgttaaagtctcatggcgctcacccgtgcccaataaacagcatggccagataagaggatatcaggtgcattatgtgaggatggaaaatggtgagcccaagggccagcccatgctgaaagatgtcatgctggctgatgcacagtgggaatttgatgatactactgaacatgacatgatcatttctgggctccagcctgaaacttcctactccctcaccgtcacagcctacacaaccaaaggagatggwgctcgcagcaagcccraactggtgtccaccactggggcagttccagggaaacctcggcttgtgattaaccacactcagatgaatactgctcttattcagtggcacyctccggtggacacatttggacctcttcagggctaccgtctaaaatttggccgcaaggatatggagccacttactactcttgagttctctgaaaaagaagatcactttacmgctacagacrtccacaagggagcatcatacgtcttcaggctctcagccagaaacaaagtgggctttggggaggagatggtgaaggagatttccattccagaagaagtaccaactggattccctcaaaaccttcactcagaaggcaccacttcaacctccgtccagttatcttggcaascacctgtcctggcagagagaaatggcattatcaccaagtatacccttctttatagggatatcaacatyccccttctcccgatggagcagcttattgttccagctgacaccactatgacactcactggcttaaaaccagataccacatacgatgtaaaagtangtgctcatacgagcaaagggcccgggccatatagtcccagtgtccagttcaggacactgcctgtggatcaagtgtttgcaaaaaattttcatgtcaaagcagtaatgaagacttccgtgttgctgtcttgggagattccagagaattataactccgccatgcctttcaaaattctttatgatgatgggaaaatggtagaagaagtggatggccgagccacacagaagttaattgtcaacctgaagcctgagaaatcatattcatttgtgctgacaaatcgtggaaacagtgctggtgggctgcagcacmgggtcacggcaaagactgcaccagatgtattacgtaccaagcctgccttyattgggaagaccaacttggatggcatgattactgtgcaactgcctgaagtacctgcaaatgagaatataaaaggttactacataataattgtgcctttgaagaaatctcgcgggaaatttatcaagccatgggagagtccagatgaaatggaattagatgagctgcttaaggagatatctaggaagcgcagaagcatccgttatgggagagaagttgaattaaagccatatattgccgcycactttgatgtccttcccactgagttcaccctgggggatgacaagcattatggtggatttacaaacaagcaactccaaagtggtcaagaatatgtcttctttgtgttagcagtaatggaacatgcagagtctaagatgtatgcaaccagcccttactccgaccccgtggtgtcaatggatctggatccgcagccaatcacggatgaagaagaaggcttgatctgggttgtaggtcctgtccttgcagtggtctttatcatctgcattgtcattgctattcttctttataaaaggaagagggcagagtccgactctagaaaaagcagcatacygaacaataaggagatcccttcacaccacccaacagaccctgtagaactgaggcgccttaactttcaaacaccgggtatggctagccatcctccaatacccatcttggaacttgcagaccacattgaaagattgaaagcaaatgacaacttgaagttttcccaggaatatgagtcaattgaccctggccagcagttcacttgggaacattcaaacttggaagtaaacaaaccaaagaatagatacgcgaatgtaatcgcatatgatcattcccgggttctcctatcagctatagaagggatcccaggaagtgactatgtgaatgccaactacatagatggstataggaagcaaaatgcctatattgcaacacagggatctctccccgaaacatttggggacttttggagaatgatatgggaacaacggagtgccacagttgtcatgatgacaaaactagaagaaagatcaagggtgaagtgtgaccagtattggcctagcagaggcacagaaacccacggactcgttcaagtaacgctgcttgwtactgtggagctggccacatattgtgttcgaacatttgcactttacaagaatggttcaagtgagaagagagaagtgagacaattccagttcaccgcctggcctgatcatggtgttccagaacaccctacaccttttctagctttcttacgtagagtcaaaacctgtaaccctcccgatgctggtccgatggttgtgcactgcagtgcgggagttggccggactggttgcttcatcgtcatagatgccatgttagaaagaataaagcatgaaaaaactgtagatatttatggccatgtaactttaatgagagcccagaggaactatatggttcaaacagaagaccaatacatctttatccatgatgcactgttagaagcagtgacttgtggaaataccgaagtgccagctagaaacttgtatgcctacattcagaagctgacacaaatagaaacgggagagaatgtcacaggaatggagctcgaatttaagcgtctagccagctcaaaagctcacacctcaaggtttatcagtgccaatcttccatgtaataaattcaaaaatcgccttgttaatattatgccatatgaatccacaagggtatgcctgcagcctatccgtggagtagaaggatctgattacatcaatgccagttttattgatggatacagacaacagaaagcctacatcgctacccaggggcccttggcagagaccactgaagacttctggcggatgctctgggaacacaattccaccatagttgtgatgctcaccaagctgcgtgaaatgggcagagagaaatgtcaccaatactggccagcagaacggtctgcaagataccagtactttgttgtagatcccatggctgagtacaacatgccacagtatatcctaagggaattcaaggtcacagatgccagggacggccagtcccgaacagtaaggcagttccagttcactgactggccagagcaaggagtgccaaagtccggagaaggatttattgacttcatcggccaagtccataaaacaaaagaacagtttggccaagatggacccatttcagtccattgcagcgcgggcgttggaagaactggagtcttcataacgctaagcattgttttggaaagaatgagatatgaaggagttgtagatatcttccagactgtcaaaatgttaagaacacaacgaccagctatggtacagacagaggatcaatatcagttttcctatcgtgccgcactagagtacctgggcagctttgaccactatgcaacgtagaaacccctgacccattctsgatttttactacaggcccttcaatatccatggagtctcttctgagccatacagggcacttgagaagtccttcttaacttctagctaacaactacttagtgggactattacacacaaaacaaattaaaaacaaattattccaggtggaccaagaattcacactttgacatcgccccttcccaccatactgctcataataacattttaggggsmaaggggagggaatgtttaaaaagaaagtccttgatttagttttttagtattgtaaagatactgctgacctgtgcttcatttctaactgtgtaaacttttttttaacaaaatgtatcattcgataaagtgaattttaaaaaagttacataactcttcatttttttatttccaaatcrtaggtttttttaagctgtagaactgttatctgtaatatcttgctgtagaaatatcaaatcatttgaaaatttgcacatttttgtgcaaaactcaatctacagtatcagtctcgtcagatatattaattttacacttcagttttgattggtgagaaagtacccattctcttcaaataatcaaagataattattattttgttttgtttttggaatcaacagggaggcgcaaagtataaagttgctgctaacatatatacatatayatccatattttataagggtgtctatgtatatatagacagtgtgtccacacaaaaaatagatacagttatcagtcagtcagttcttccatgatttagtttttttaaacgtagaaaagctattgtaaacatctctttccatttattcttaattttttgacatattggtatttctttaaagggaaatgaggaatgcacatcagtgattgattgtcaaacctcaccccctgatttcctacctaatc

SEQ ID NO: 5264 - DNA, 1963 bp, Homo sapiens
gtcacagcctggtgaggagggggctgcagttcctcaggaaactgccagtggacaaattcataaacaagagctccagttccctggaacctgagtcgggagacctgcagctcactttctccctgtttgctggccagcagggtttgtggccgcctctgctgtgacgycacagcctggtgaggagggggctgcagttcctcaggaaactgccagtggacaaaktcataaacaagagttccagttccctggaacctgagtcgggaggcctgcarctcactttctccctgtttgctggcccagacaggcctgtgctagagggctggatagtgtggtagtgtggtggatagagtgctgcctctatccacaacrcagccatatgctgactgaagataactttgtgtctggaagagccctctgatttcttacactaatggccttacacgasatggaggattttacatttgatggaacaaagcgcttaagtgtcaactacgtgaagggaattcttcaaccgacagacacctgtgacatctgggataagatctggaacttccaagccaagcctgatgacctgcttatttctacctatcctaaagcaggaacaacatggactcaggagatagtggaattaatacaaaatgaaggtgatgtggagaaaagtaaacgggcaccgactcatcaacgatttcctttcctcgaaatgaaaatcccatccttaggatctggtttggaacaagctcatgcaatgccctcaccacggatcctgaaaacacatcttccctttcacttgctgccaccatccttgctagagaaaaactgtaagataatctatgtagcaagaaatcccaaggacaacatggtgtcctattaccatttccaaagaatgaataaagctcttcctgctccaggaacatgggaagagtattttgagacttttctggctgggaaagtgtgctggggctcctggcatgaacatgtgaaaggatggtgggaagccaaagacaaacaccgtattctctatctcttctatgaggacatgaagaagaacccaaagcatgaaattcagaagctggcagaatttattgggaagaaattagatgacaaagttctagataaaattgtccattacacttcrtttgatgtcatgaaacagaatccaatggcaaactattcatcgattcctgctgaaatcatggaccactccatttctccattcatgagaaaaggggcagtgggagactggaagaaacacttcaccgtggctcagaatgagagatttgatgaagattacaagaagaaaatgactgatmccagactaactttccacttccagttctagtaaggaagaaaaactgaaaatgttttagtttattacccagtatatttgggtaataatgaaagtttaattctcataacaaatgatatcagattccagttatcagaatagtttaytgtgtttgctcttattcactctactaaaaaattattttaaaaggctggaggcaaggtggtgacaggcagcagggtggcgacatggagagagggaagctcaataaatcactaggtacaatcctggtatcattgccaattatcatcatatttacattttctacaatcatgtgcttattaacatattggaaatgcttcagtcctcacatgataatacactaacattttcagattaagttttggttcaagttaatttttttttttttttttttgagacggagtctcgctctgtcgcccaggctggagtgcagtggcacgatctcggctcactgcaagctctgcttcctgggttcacgcyattcccctgcctcagcctcccgagtagctgggactatgggcgcccaccaccactcccggctaatttttttttttgtattcttagtagagacgaggtttcaccgtgttagccaggatgttctcgatctcctgaccccatgatccacccgcytcggcctcc

SEQ ID NO: 5265 - DNA, 1737 bp, Homo sapiens
gtcacagcctggtgaggagggggctgcagttcctcaggaaactgccagtggacaaattcataaacaagagctccagttccctggaacctgagtcgggagacctgcagctcactttctccctgtttgctggccagcagggtttgtggccgcctctgctgtgacgycacagcctggtgaggagggggctgcagttcctcaggaaactgccagtggacaaaktcataaacaagagttccagttccctggaacctgagtcgggaggcctgcarctcactttctccctgtttgctggcccagacaggcctgtgctagagggctggatagtgtggtagtgtggtggatagagtgctgcctctatccacaacrcagccatatgctgactgaagataactttgtgtctggaagagccctctgatttcttacactaatggccttacacgasatggaggattttacatttgatggaacaaagcgcttaagtgtcaactacgtgaagggaattcttcaaccgacagacacctgtgacatctgggataagatctggaacttccaagccaagcctgatgacctgcttatttctacctatcctaaagcaggaacaacatggactcaggagatagtggaattaatacaaaatgaaggtgatgtggagaaaagtaaacgggcaccgactcatcaacgatttcctttcctcgaaatgaaaatcccatccttaggatctggtgagtataaatagccacacttcactacagtcctaaaatgcacttaggatttttactgtctttgcacctttcgaaattataggctttcaaacaattattggtaagtttcatggttttgtctttttttaactgtgtctggccattgttatactccagacattttctaatggaattactgtttgtacaaaagtgagttaaattttgtttctctagttagaaattaattttacttcaaaagaataagctcaagtaagataatcctggtgaaagggtttgaattttttaggttcttatttatttggatgactgttatggttaggaattgttctagtcaaaacatctattcataggctagacgtattctctcacaccagatctacagttacaatgttcttatagatgctttgaattgtagtagtaataatggaagcagcaagacttggaagcaaatagataaaaaaaaaatcgtagaaattgatcgaaaaccagttttgcaggtttggaacaagctcatgcaatgccctcaccacggatcctgaaaacacatcttccctttcacttgctgccaccatccttgctagagaaaaactgtaaggtaaaaaagcaaaaggaattcagagttgtactccttaaaacaaccttagtcttccatttcctcttaaaacacttcacttgttaaatatatatatatatacctcttcacaataatcaatatgcaaattaatatgaatcctagccaggcacgttggctcatgcctgtaatcacagcattttgggagactgagatgggtggatcagttgaggtcaggggttcaagaccagcctgaccaacacggcgaaaccccatctctaccaaaaacacaaaattcacaggacgtggtgacacatgcctgtaatccaagctactcaggaggctgaggcaggagactcgcttgaacacaggaggcagaggttgcagtgagccaagatagtgccattgcactccagcctgggtgacagagcaagactccatctc

SEQ ID NO: 5266 - DNA, 2703 bp, Homo sapiens
gggccggatgggaggttctagtgaagcctgcggtttgctgacgactttccccctcagtgcagtccaattatttgggagccgttaaacaccgcatgctgagaagacaccgtcattgttcacacaggagctagatagactttgttccctctacactgcattttttaaaagttttctatcaaaaacacatttcataatcgaaaagttttctaaatgataaaaccgcatgtcacagattaatctcaacattatgttgagtgaaggaagccagacaccgaaggccacacattgtatttgaaatgtccaggaaaggcagaactgtagagacagcagatgggttgttgcccgaggggtgagggcacgccccgcagcgggcggcagtgacaggcacgcctgcacacatctgctcccgcatcaccccacgccacacacggggaagtgtgcgcactccttccagggacagcgagaggagcccctgctctgtcaacgctctgaatgtgctgcggctgccggcagaagctagcaggctcctctgctgaggagctggtgcctgtccagacgcagaagaaaactgacacctcccacgtgggggacagaaaggtcctctcattggtgccacctgcagagatagacaaggagcgcctggccatcagaggacgctcctgacagtgacacagtgaccactataaaagtcaggcgggctgaggaggagacaaagkccaggacgctccgcagctgttggggaagaggagctgcctcctgggatggagaaatttaaggctgcgatgttgctggggagcgtcggcgatgctcttggctacagaaatgtctgcaaggagaacagcactgtaggcatgaagatccaggaggagctgcaacgttccsggggcctggaccacctcgtactctcrccaggagaatggcccgtgagtgacaacaccatcatgcacatcgcaaccgccgaggccctcaccacagactactggtgcctggatgatctgtaccgggagatggtgagatgctatgtggaaatcgttgagaagcttccagaacgccggccagacccagctaccattgaaggctgtgctcagctaaagcccaataactaccttctcgcctggcacacaccgttcaatgaaaaaggctcagggtttggagcggccaccaaggccatgtgcatcggcctgcggtactggaagcctgagcggctggagaccctcatcgaggtcagcgtggagtgcggccggatgacccacaaccatcccacaggcttcctgggctccctgtgcacggccctgtttgtgtcgttcgccgcacaaggaaagcccctggtccagtgggggagagacatgctgcgggcrgtgcctctggcagaagagtactgcaggaagaccatccggcacacggcagaataccaggagcactggttttactttgaagctaaatggcaattttatttggaggagaggaaaatcagtaaagactcagaaaataaagccatcttccccgacaattatgatgcagaagagagggaaaagacctacaggaagtggagctcggaaggtcgagggggaagacgaggccacgatgcccccatgatagcctatgacgccctccttgcagcaggaaacagctggactgagckgtgtcaccgggccatgtttcatggaggggagagcgcggccacgggcaccattgcaggctgcctgttcgggttgctgtacggcctggacctcgttcccaaaggcttgtaccaggacctggaggacaaggagaagctggaggacctgggcgcggctctctaccgcctgtccacagaggagaagtaaagccatttctgccactttccccctagagagccgattccaccccggggcccgtagggccctctcgcagcccctgggtgagggtgtctctgtgaggctccactgcggtctgtgcctgactggccacatctaactctctgtttccaatttcagaatcctaactgttgcataaaatacattgtttgtcctgcgagaatattttccgtcctccaccatcaacattgacactgcgtagatttgccgcacttggacctccatgcgtggcactcacccgcagtctcctggacaggcgctgtattttattctgtcgcagagctaatgctgtttactcactcacttcaacaacactaactgcggtggtggcctccagcaggcccccccgctgcagaccctctgtcctgcctctgcctccaggcatgcgtttccccgtgagggccaatgcacctmcccccaccccccaccctcccatgtccacagtgggtcgtgtgttcctggacagagaaacagtccacactggggcctgcgggacacatatagcagcatattttgctcttaaccccacccacctttttaatcacactagattttaagatcaatccctttttgaaacaactcacggagaaaaccagaacataaatggcctcctgccagctccggcgtctctctgtggtctgccttagtgggccaagtccaaatgcagagaaggcctttcccttccgcgcctgccccatcgggctcgctgacgaggaagcgctgtccctgtgatgaggttctctctcagagagtcttggaaaagagaccacttgctcttgtttaaaataaatttggacgtgatttttccatgcagcatctggtgtgaataaaacagcagttgactgat

SEQ ID NO: 5267 - DNA, 2007 bp, Homo sapiens
ggtccctccttcccggtgagcctctctgactggggctgcctccttccgggtgagcctctctgastggggctgcctccttccgggtgagcctctctgactggggctgcctccttccgggtgagcctctctgaacagggcacgagagcagactctgaaccaggaagtagccgtgtctagcgctctacaagacacataggagaggtggcatccatggccctgaaacgacaagcccatgttgccagcgcattatcaccaagtcacttggcaagcgtttagcagactactggtgcctggatgatctgtaccgggagatggtgagatgctatgtggaaatcgttgagaagcttccagaacgccggccagacccagctaccattgaaggctgtgctcagctaaagcccaataactaccttctcgcctggcacacaccgttcaatgaaaaaggctcagggtttggagcggccaccaaggccatgtgcatcggcctgcggtactggaagcctgagcggctggagaccctcatcgaggtcagcgtggagtgcggccggatgacccacaaccatcccacaggcttcctgggctccctgtgcacggccctgtttgtgtcgttcgccgcacaaggaaagcccctggtccagtgggggagagacatgctgcgggcrgtgcctctggcagaagagtactgcaggaagaccatccggcacacggcagaataccaggagcactggttttactttgaagctaaatggcaattttatttggaggagaggaaaatcagtaaagactcagaaaataaagccatcttccccgacaattatgatgcagaagagagggaaaagacctacaggaagtggagctcggaaggtcgagggggaagacgaggccacgatgcccccatgatagcctatgacgccctccttgcagcaggaaacagctggactgagckgtgtcaccgggccatgtttcatggaggggagagcgcggccacgggcaccattgcaggctgcctgttcgggttgctgtacggcctggacctcgttcccaaaggcttgtaccaggacctggaggacaaggagaagctggaggacctgggcgcggctctctaccgcctgtccacagaggagaagtaaagccatttctgccactttccccctagagagccgattccaccccggggcccgtagggccctctcgcagcccctgggtgagggtgtctctgtgaggctccactgcggtctgtgcctgactggccacatctaactctctgtttccaatttcagaatcctaactgttgcataaaatacattgtttgtcctgcgagaatattttccgtcctccaccatcaacattgacactgcgtagatttgccgcacttggacctccatgcgtggcactcacccgcagtctcctggacaggcgctgtattttattctgtcgcagagctaatgctgtttactcactcacttcaacaacactaactgcggtggtggcctccagcaggcccccccgctgcagaccctctgtcctgcctctgcctccaggcatgcgtttccccgtgagggccaatgcacctmcccccaccccccaccctcccatgtccacagtgggtcgtgtgttcctggacagagaaacagtccacactggggcctgcgggacacatatagcagcatattttgctcttaaccccacccacctttttaatcacactagattttaagatcaatccctttttgaaacaactcacggagaaaaccagaacataaatggcctcctgccagctccggcgtctctctgtggtctgccttagtgggccaagtccaaatgcagagaaggcctttcccttccgcgcctgccccatcgggctcgctgacgaggaagcgctgtccctgtgatgaggttctctctcagagagtcttggaaaagagaccacttgctcttgtttaaaataaatttggacgtgatttttccatgcagcatctggtgtgaataaaacagcagttgactgat

SEQ ID NO: 5268 - DNA, 2119 bp, Homo sapiens
ccctccttccgggtgagcctctgaacagggctgtctccttctgggtgagcctctctgaaccgggctgcctccttccgggtgtgtctctctgaacggggctcactccttccagggtccctccttcccggtgagcctctctgactggggctgcctccttccgggtgagcctctctgastggggctgcctccttccgggtgagcctctctgactggggctgcctccttccgggtgagcctctctgaacagggcacgagagcagactctgaaccaggaagtagccgtgtctagcgctctacaagacacataggagaggtggcatccatggccctgaaacgacaagcccatgttgccagcgcattatcaccaagtcacttggcaagcgtttagcagactactggtgcctggatgatctgtaccgggagatggtgagatgctatgtggaaatcgttgagaagcttccagaacgccggccagacccagctaccattgaaggctgtgctcagctaaagcccaataactaccttctcgcctggcacacaccgttcaatgaaaaaggctcagggtttggagcggccaccaaggccatgtgcatcggcctgcggtactggaagcctgagcggctggagaccctcatcgaggtcagcgtggagtgcggccggatgacccacaaccatcccacaggcttcctgggctccctgtgcacggccctgtttgtgtcgttcgccgcacaaggaaagcccctggtccagtgggggagagacatgctgcgggcrgtgcctctggcagaagagtactgcaggaagaccatccggcacacggcagaataccaggagcactggttttactttgaagctaaatggcaattttatttggaggagaggaaaatcagtaaagactcagaaaataaagccatcttccccgacaattatgatgcagaagagagggaaaagacctacaggaagtggagctcggaaggtcgagggggaagacgaggccacgatgcccccatgatagcctatgacgccctccttgcagcaggaaacagctggactgagckgtgtcaccgggccatgtttcatggaggggagagcgcggccacgggcaccattgcaggctgcctgttcgggttgctgtacggcctggacctcgttcccaaaggcttgtaccaggacctggaggacaaggagaagctggaggacctgggcgcggctctctaccgcctgtccacagaggagaagtaaagccatttctgccactttccccctagagagccgattccaccccggggcccgtagggccctctcgcagcccctgggtgagggtgtctctgtgaggctccactgcggtctgtgcctgactggccacatctaactctctgtttccaatttcagaatcctaactgttgcataaaatacattgtttgtcctgcgagaatattttccgtcctccaccatcaacattgacactgcgtagatttgccgcacttggacctccatgcgtggcactcacccgcagtctcctggacaggcgctgtattttattctgtcgcagagctaatgctgtttactcactcacttcaacaacactaactgcggtggtggcctccagcaggcccccccgctgcagaccctctgtcctgcctctgcctccaggcatgcgtttccccgtgagggccaatgcacctmcccccaccccccaccctcccatgtccacagtgggtcgtgtgttcctggacagagaaacagtccacactggggcctgcgggacacatatagcagcatattttgctcttaaccccacccacctttttaatcacactagattttaagatcaatccctttttgaaacaactcacggagaaaaccagaacataaatggcctcctgccagctccggcgtctctctgtggtctgccttagtgggccaagtccaaatgcagagaaggcctttcccttccgcgcctgccccatcgggctcgctgacgaggaagcgctgtccctgtgatgaggttctctctcagagagtcttggaaaagagaccacttgctcttgtttaaaataaatttggacgtgatttttccatgcagcatctggtgtgaataaaacagcagttgactgat

SEQ ID NO: 5269 - DNA, 5544 bp, Homo sapiens
cggcggcggcggagccaggacccagacatctgggactgttgttctctcgcggcgcgaccgcctcagtcacttcgcccagagacccggacctggtccgctggggagcaggcggccataaaccccctctctcccggttccctgacgccgcggcaggagctgttacraacaccctgcggttggtctccgatgcccttcagtgaggtggggacgcctggaccctggtgagcgaaccccaagccaccccccaccccaactcagtgtcttcgccggcccccggcccgtacgcctgtctggtcgccatggctgaaaacacagagggggatctgaactccaacctgcyccacgccccctaccacaccggggaccctcagctggacacggccatcgggcagtggctccgctgggataagaatcccaaaacaaaagagcagattgaaaacctgttacggaatgggatgaacaaggagctgcgagatcgtctttgttgccgaatgacttttgggactgcaggacttcgttctgccatgggggcagggttttgctatattaatgaccttacagtaatacagtcaacacaggggatgtacaaataccttgagagatgtttctcagacttcaagcagagaggctttgtggttgggtatgacactcggggtcaagtaactagcagctgcagcagccagaggcttgctaaactcactgctgcagtcttgctggccaaagatgttcctgtgtaccttttttcaagatatgttcctacaccttttgtaccatatgcagttcagaagctcaaagcagttgcaggtgtgatgattactgcctctcacaaccgcaaggaagacaatggatacaaggtttactgggaaactggtgctcagatcacatctcctcatgataaagaaattctaaaatgtatagaagaatgtgtggaaccctggaatggttcctggaatgataatttagtggataccagcccgctgaagagagaccctctgcaggacatttgcaggagatacatggaagatctgaaaaagatctgtttttacagggagttaaactcgaagaccaccttgaaatttgtgcacacatcttttcatggggtcggacatgactatgtgcagttggcttttaaagtgtttggttttaagcctccaattccagtaccagaacaaaaagatcctgatccagacttttctaccgttaaatgtccaaatcctgaagaaggagaatctgtgctggaactttccttgagactggcagagaaagaaaatgcccgggtagtgctagccacagatcctgatgcagacagactggcagcagcagaacttcaggagaatggttgttggaaagttttcacagggaatgagttggcagctttgtttggatggtggatgtttgattgctggaagaaaaataaatcaagaaatgctgatgtgaagaacgtttatatgttagccaccacagtctcttctaaaattctgaaggcaattgcacttaaagaaggatttcattttgaagaaacattaccaggttttaaatggattggaagtaggataatagacctcctggaaaatgggaaagaagtcctttttgcatttgaagagtctattggttttctctgtggaacttcagttttggataaagatggggtgagtgcagctgttgtggttgctgagatggcatcttacctggaaaccatgaatataacattgaaacagcaactggttaaggtttatgaaaaatatggttatcatatttcaaaaacttcctatttcttgtgttatgaaccacctaccatcaaaagtatatttgaaaggcttcgtaattttgattctccaaaagaatatccmaaattttgtggaacatttgctatattgcatgtacgggacrttaccactggatatgacagtagccagcctaataagaaatcagtgctgcctgtgagtaaaaacagccaaatgattacatttacttttcaaaatggctgtgttgctacccttcggacaagyggaacagaaccaaagataaagtattatgcagagatgtgtgcgtcacctgaccagagtgacactgctttactggaggaagaactgaagaaactcattgatgctctgatagagawttttcttcagcctagtaagaatggactgatctggcgttctgtttaggggtacaccaataygtcatgacactgtgtgggcatatggaacagagcmaccgagaactgcatacattgaaccttgtgttagcattctctctctatctcatctggccgagtatctttttccttttattttctttctttttggtcaactggctagactaaacmaagtataagtttgaaatgaaatggtctagagggaaatgattcaaattttttcataattcaaacaaaagttattacactaaaagtattatagtaacgtattgtccttccgttaacagaaacatcacmattcaaaagtgagttttcttattatagtgtgattaagcctagttctgtatctcgtaattgtgtatagcatggtaaaagaaaaaaaaaaagacaggtaaatgttatataattgtagggttagttaaggaaattagtccataaaattggcaagaaaatggtactttccttgattgttatgaaaaastgtcattgtgacatcacaggtattaatttacaaattagagtatttgaaataggatatttagcatttctgtagtttagaacagatgttacagtgtgtggttttggcatgtctgtttcaggtgcccttggtgcagtataaatttactgtatgtatttaaaattctgatgtttactgaacataaaacaatagtggcaacactcctattggctttgttcttatcaaatttctcagtgccttctcagggtctggtrtgaacagaaaaaacagtgttcctgcatttaccataatttaatcagtcaatttgcagatagctaaggaaaatcttccaaaatctgtaggtgcttcctctatatcaagtgagtttgctgattttaaaatcttaggaatataaataaagatcttaataaaagcaagcttaatgtagttaaggatcttcatattagaattgtgtcatttatcaaaccttttattacagaaaaaaatctgaactgagaaaggagctctgaatttatttgacagtctaacttttgaattacatttttgtaagtagatttattcttttattttatgaagtaatgttaattttactaagaataaaacatccaaattttaagtattatgaaatactaaaactacatgttttaaaacagaggtccagtttattctaacatcttgctgacttctgtagaatttctgattgcatgactattatttatcttcttttagtgtagaaaataattttttacaaaaagtcacttttgggctgggcgcagtggctcacgcctgtaatcccagcactttgggaggctgaggcaggtggatcacaatgtcaggagtttgagactagcctggccaatatggtgaaaccctgtctctactaaaaatacaaaaattagccgggtgtggtggtgggcacctgtagtcccagctactcgggaggctgaggcaggagaattgcttgaacctaggaggctgagattgcagtgagccgaaatcacgccactacactccagcctgggcaacagagggagactccatctcaaaaaaaaaaaaagtcacttttggctaatcatgcagtcttctgaaaaggtttaatagagaaatgctgtttaggctgggcttggtggctcacatctgtaataccagcgctttgggaggctgaggcaggaggattgyttgaggccaggagtttaagttacagaactatgatcacactgccgcactgaagcctggatgacagagtgagaccttatctcaaaaaaaaaaaaaaaaaragagagagagagaaaaagaaatgctgtgtttaatcttcttaaaatgtatcttgtcctacatagttctcagaatacatatggggtatagttaggagataacaataacaagacctaaacaaattgcttatgggagatagcactgtaattagagaatttatttcatataaaataataatataaagtttgaactgattagaatgttccttaaaycatggtttcgtttgttgcagctgtcagctaacatttggttgagctcatataatccaaacctaattgtccaactattgtattgccactattgttaatttgttccttccttactttcttattgttggatcttatatgactgtatgactgtagataatagacagctagctaaatgtagagcaccatttttctcaatgagtttgttttcaaaggctttgcactggagaagatatgtgtagaatttttgttttatttttaaaatgtgtaaaacatcttttgttttatatgcttttaagaatgtagattgtaatttaggaaatggcatatattctgcaaagtggtataatgttgtatatatgaaaaacaggtatatttggtttagttctgtgtttcagtgactgataaacaaaaatgaagctaaaatgaatcaacggctcattcatagttactaaagccatgtcatgactgtcattctattatgaagaaaacagttttatttgagtgctttaatataatgcaacatttaagtcatcttaaggtgaaaagttattgaagtgttcttctctcaagttaacaaaattttacaaatgttcctgaagtgtatcgattgagggaattattttattctagcctgtcatgagtctgtctgagcatgatacttaacatgaacttgatgtagtaggtgcacatttgcctaacaggataaattcagtgatagcccaagctggtcaggagagacagaagtgctggctaggaggtctcagcctcrsgcactacaatgtttatctttttctttttgaacaatattgtgaaaatgattgcattctcattgagcatgaaagtcaaaactggaattttctaaagctttggagaaaaggagagaattagtagggcaagatcaaagcatacattggaaataaacagtagaaataagcaaacaatataaagagacacgggaaatgcttctcgtgaagggcaaatgtaacaccataacagtagggaataaactgtgtcccacctgtttacttgtgtttatttgttgttatgatgagtatgcacctaccattttcctttattgtgatcactaaaatgaggccaaggtttaggaggtgagaaaaagtatcccttttacggattcagttcctgctaggatgttgtatcagaatcatgtgagaactcaggaagagrtagagcagaaataaaaaggaagaaaatgtagattagaaaataagacttctgagaaaaagttcaaggaataaagattgtttgactctggagaggagaaagctgttgagatagtttgctaagtttgctaataaagctttattgagtcttttattgaagggttcaaagtaagaaatactatgccatagtgttctccatctctagtgaagacagaaccagagggaataaggatctttttt

SEQ ID NO: 5270 - DNA, 2993 bp, Homo sapiens
agaagtatcgatatcaagatgaggacgctccacatgatcattccttacctcgactaacccacgaagtaagaggcccagaactcgtgcatgtatcagaaaagaacctctctcaaatagaaaatgtccatggatatgtcttgcagtctcatatttctcctctgaaggccagtcctgctcctataattgtcaacacagatactttggacacaattccttatgtggggaattctggcctgggattcagtattgctggggggacagataatccccacattggagatgaccctggcatatttattacgaagattataccaggaggtgctgcagcagaggatggcagactcagggtcaatgattgtatcttgcgggtgaatgaggttgatgtgtcagaggtttcccacagtaaagcggtggaagccctgaaggaagcagggtctatcgttcggctgtatgtgcgtagaagacgacctattttggagaccgttgtggaaatcaaactgttcaaaggccctaaaggtttaggcttcagtattgcaggaggtgtggggaaccaacacattcctggagacaacagcatttatgtaactaaaattatagatggaggagctgcacaaaaagatggaaggttgcaagtaggagatagactactaatggtaaacaactacagtttagaagaagtaacacacgaagaggcagtagcaatattaaagaacacatcagaggtagtttatttaaaagttggcaaacccactaccatttatatgactgatccttatggtccacctgatattactcactcttattctccaccaatggaaaaccatctactctctggcaacaatggcactttagaatataaaacctccctgccacccatctctccaggaaggtactcaccaattccaaagcacatgcttgttgacgacgactacaccaggcctccggaacctgtttacagcactgtgaacaaactatgtgataagcctgcttctcccaggcactattcccctgttgagtgtgacaaaagcttcctcctctcagctccctattcccactaccacctaggcctgctacctgactctgagatgaccagtcattcccaacatagcaccgcaactcgtcagccttcaatgactctccaacgggccgtctccctggaaggagagcctcgcaaggtagtcctgcacaaaggctccactggcctgggcttcaacattgtcggtggggaagatggagaaggtatttttgtgtccttcattctggctggtggaccagcagacctaagtggggagctccagagaggagaccagatcctatcggtgaatggcattgacctccgtggtgcwtcccacgagcaggcagctgctgcactaaagggggctggacagacagtgacgattatagcacaatatcaacctgaagattacgctcgatttgaggccaaaatccatgacctacgagagcagatgatgaaccacagcatgagctccgggtccggatccctgcgaaccaatcagaaacgctccctctacgtcagagccatgttcgactacgacaagagcaaggacagtgggctgccaagtcaaggacttagttttaaatatggagatattctccacgttatcaatgcctctgatgatgagtggtggcaagccaggagagtcatgctggagggagacagtgaggagatgggggtcatccccagcaaaaggagggtggaaagaaaggaacgtgcccgattgaagacagtgaagtttaatgccaaacctggagtgattgattcgaaagggtcattcaatgacaagcgtaaaaagagcttcatcttttcacgaaaattcccattctacaagaacaaggagcagagtgagcaggaaaccagtgatcctgaacgaggacaagaagacctcattctttcctatgagcctgttacaaggcaggaaataaactacacccggccggtgattatcctggggcccatgaaggatmggatcaatgacgacttgatatctgaattccctgataaatttggctcctgtgtgcctcatactacgaggccaaagcgagactacgaggtggatggcagagactatcactttgtcatttccagagaacaaatggagaaagatatccaagagcacaagtttatagaagccggccagtacaatgacaatttatatggaaccagtgtgcagtctgtgagatttgtagcagaaagaggcaaacactgtatacttgatgtatcaggaaatgctatcaagcggttacaagttgcccagctctatcccattgccatcttcataaaacccaggtctctggaacctcttatggagatgaataagcgtctaacagaggaacaagccaagaaaacctatgatcgagcaattaagctagaacaagaatttggagaatattttacagctattgtccaaggagatactttagaagatatatataaccaatgcaagcttgttattgaagagcaatctgggcctttcatctggattccctcaaaggaaaagttataaattagctactgcgcctctgacaacgacagaagagcatttagaagaacaaaatatatataacatactacttggaggcttttatgtttttgttgcatttatgtttttgcagtcaatgtgaattcttacgaatgtacaacacaaactgtatgaagccatgaaggaaacagaggggccaaagggtgggacagaaaagacattgcagtatgaaggaaggctttggtttgctcaaagtgccaggtgtagggatgaacctctgacgggctttctgcccaagagatgagatgagagcctcctcaccccagcagatgtccagagctgatttagctgcagagctctctgtgtcttttgctttaaagaaaaattgccagcactcgaacctcatcagccttcccattacccacatctgtaattggtacactttgaattttataactatgcacatcttttgatttcttaacaagcaaatga

SEQ ID NO: 5271 - DNA, 2437 bp, Homo sapiens
tgctagctgcttccgggcggaggtcctcggcctcccctaggcgaggcactaggtctgggggcggcgggtcttagcgtgcccgccacgctcgccgcctcccacctgccctggctgkctsgggcccgacccttgcgtcgctccggggcccaagttacggactcgggaatccagttgtccgcaccgaacaagccccgccgcagcgcccgcccctcctcttgctgctttggagtctcccggcttccgccttccgcagcagtcacgtgcctccgatcacgtgaccggcgcctctgtcattctactgcggccgccctggcttccttctacctgtgcggccctcaacgtctccttggtgcgggacccgcttcactttcggctcccggagtctccctccactgctcagacctctggacctgacaggagacgcctacttggctctgacgcggcgccccagcccggctgtgtccccggcgccccggaccaccctccctgccggctttgggtgcgttgtggggtcccgaggattcgcgagatttgttgaaagacattcargattacgaagtttagatgaccaaaatggatatccgaggtgctgtggatgctgctgtccccaccaatattattgctgccaaggctgcagaagttcgtgcaaacaaagtcaactggcaatcctatcttcagggacagatgatttctgctgaagattgtgagtttattcagaggtttgaaatgaaacgaagccctgaagagaagcaagagatgcttcaaactgaaggcagccagtgtgctaaaacatttataaatctgatgactcatatctgcaaagaacagaccgttcagtatatactaactatggtggatgatatgctgcaggaaaatcatcagcgtgttagcattttctttgactatgcaagatgtagcaagaacactgcgtggccctactttctgccaatgttgaatcgccaggatcccttcactgttcatatggcagcaagaattattgccaagttagcagcttggggaaragaactgatggaaggcagtgacttaaattactatttcaattggataaaaactcagctgagttcacagaaactgcgtggtagcggtgttgctgttgaaacaggaacagtctcttcaagtgatagttcgcagtatgtgcagtgcgtggccgggtgtttgcagctgatgctccgggtcaatgagtaccgctttgcttgggtggaagcagatggggtaaattgcataatgggagtgttgagtaacaagtgtggctttcagctccagtatcaaatgattttttcaatatggctcctggcattcagtcctcaaatgtgtgaacacctgcggcgctataatatcattccagttctgtctgatatccttcaggagtctgtcaaagagaaagtaacaagaatcattcttgcagcatttcgtaactttttagaaaaatcaactgaaagagaaactcgccaagaatatgccctggctatgattcagtgcaaagttctgaaacagttggagaacttggaacagcagaagtacgatgatgaagatatcagcgaagatatcaaatttcttttggaaaaacttggagagagtgtccaggaccttagttcatttgatgaatacagttcagaacttaaatctggaaggttggaatggagtcctgtgcacaaatctgagaaattttggagagagaatgctgtgaggttaaatgagaagaattatgaactcttgaaaatcttgacaaaacttttggaagtgtcagatgatccccaagtcttagctgttgctgctcacgatgttggagaatatgtgcggcattatccacgaggcaaacgggtcatcgagcagctcggtgggaagcagctggtcatgaaccacatgcatcatgaagaccagcaggtccgctataatgctctgctggccgtgcagaagctcatggtgcacaactgggaataccttggcaagcagctccagtccgagcagccccagaccgctgccgcccgaagctaagcctgcctctggccttcccctccgcctcaatgcagaaccagtagtgggagcactgtgtttagagttaagagtgaacactgtttgattttacttggaatttcctctgttatatagcttttcccaatgctaatttccaaacaacaacaacaaaataacatgtttgcctgttaagttgtataaaagtaggtgattctgtatttaaagaaaatattactgttacatatactgcttgcaatttctgtatttattgttctctggaaataaatatagttattaaaggattctcactccaaacatggcctctctctttacttggactttgaacaaaagtcaactgttgtctcttttcaaaccaaattgggagaattgttgcaaagtagtgaatggcaaataaatgttttaaaatctatcgctctatcaa

SEQ ID NO: 5272 - DNA, 2229 bp, Homo sapiens
tgctagctgcttccgggcggaggtcctcggcctcccctaggcgaggcactaggtctgggggcggcgggtcttagcgtgcccgccacgctcgccgcctcccacctgccctggctgkctsgggcccgacccttgcgtcgctccggggcccaagttacggactcgggaatccagttgtccgcaccgaacaagccccgccgcagcgcccgcccctcctcttgctgctttggagtctcccggcttccgccttccgcagcagtcacgtgcctccgatcacgtgaccggcgcctctgtcattctactgcggccgccctggcttccttctacctgtgcggccctcaacgtctccttggtgcgggacccgcttcactttcggctcccggagtctccctccactgctcagacctctggacctgacaggagacgcctacttggctctgacgcggcgccccagcccggctgtgtccccggcgccccggaccaccctccctgccggctttgggtgcgttgtggggtcccgaggattcgcgagatttgttgaaagacattcargattacgaagtttagatgaccaaaatggatatccgaggtgctgtggatgctgctgtccccaccaatattattgctgccaaggctgcagaagttcgtgcaaacaaagtcaactggcaatcctatcttcagggacagatgatttctgctgaagattgtgagtttattcagaggtttgaaatgaaacgaagccctgaagagaagcaagagatgcttcaaactgaaggcagccagtgtgctaaaacatttataaatctgatgactcatatctgcaaagaacagaccgttcagtatatactaactatggtggatgatatgctgcaggaaaatcatcagcgtgttagcattttctttgactatgcaagatgtagcaagaacactgcgtggccctactttctgccaatgttgaatcgccaggatcccttcactgttcatatggcagcaagaattattgccaagttagcagcttggggaaragaactgatggaaggcagtgacttaaattactatttcaattggataaaaactcagctgagttcacagagttcgcagtatgtgcagtgcgtggccgggtgtttgcagctgatgctccgggtcaatgagtaccgctttgcttgggtggaagcagatggggtaaattgcataatgggagtgttgagtaacaagtgtggctttcagctccagtatcaaatgattttttcaatatggctcctggcattcagtcctcaaatgtgtgaacacctgcggcgctataatatcattccagttctgtctgatatccttcaggagtctgtcaaagagaaagtaacaagaatcattcttgcagcatttcgtaactttttagaaaaatcaactgaaagagaaactcgccaagaatatgccctggctatgattcagtgcaaagttctgaaacagttggagaacttggaacagcagaagtacgatgatgaagatatcagcgaagatatcaaatttcttttggaaaaacttggagagagtgtccaggaccttagttcatttgatgaatacagttcagaacttaaatctggaaggttggaatggagtcctgtgcacaaatctgagaaattttggagagagaatgctgtgaggttaaatgagaagaattatgaactcttgaaaatcttgacaaaacttttggaagtgtcagatgatccccaagtcttagctgttgctgctcacgatgttggagaatatgtgcggcattatccacgaggcaaacgggtcatcgagcagctcggtgggaagcagctggtcatgaaccacatgcatcatgaagaccagcaggtccgctataatgctctgctggccgtgcagaagctcatggtgcacaactgggaataccttggcaagcagctccagtccgagcagccccagaccgctgccgcccgaagctaagcctgcctctggccttcccctccgcctcaatgcagaaccagtagtgggagcactgtgtttagagttaagagtgaacactgtttgattttacttggaatttcctctgttatatagcttttcccaatgctaatttccaaacaacaacaacaaaataacatgtttgcctgttaagttgtataaaagtaggtgattctgtatttaaagaaaataaatatagttattaaaggattctcactccaaacatggcctctctctttacttggactt

SEQ ID NO: 5273 - DNA, 2283 bp, Homo sapiens
tgctagctgcttccgggcggaggtcctcggcctcccctaggcgaggcactaggtctgggggcggcgggtcttagcgtgcccgccacgctcgccgcctcccacctgccctggctgkctsgggcccgacccttgcgtcgctccggggcccaagttacggactcgggaatccagttgtccgcaccgaacaagccccgccgcagcgcccgcccctcctcttgctgctttggagtctcccggcttccgccttccgcagcagtcacgtgcctccgatcacgtgaccggcgcctctgtcattctactgcggccgccctggcttccttctacctgtgcggccctcaacgtctccttggtgcgggacccgcttcactttcggctcccggagtctccctccactgctcagacctctggacctgacaggagacgcctacttggctctgacgcggcgccccagcccggctgtgtccccggcgccccggaccaccctccctgccggctttgggtgcgttgtggggtcccgaggattcgcgagatttgttgaaagacattcargattacgaagtttagatgaccaaaatggatatccgaggtgctgtggatgctgctgtccccaccaatattattgctgccaaggctgcagaagttcgtgcaaacaaagtcaactggcaatcctatcttcagggacagatgatttctgctgaagattgtgagtttattcagaggtttgaaatgaaacgaagccctgaagagaagcaagagatgcttcaaactgaaggcagccagtgtgctaaaacatttataaatctgatgactcatatctgcaaagaacagaccgttcagtatatactaactatggtggatgatatgctgcaggaaaatcatcagcgtgttagcattttctttgactatgcaagatgtagcaagaacactgcgtggccctactttctgccaatgttgaatcgccaggatcccttcactgttcatatggcagcaagaattattgccaagttagcagcttggggaaragaactgatggaaggcagtgacttaaattactatttcaattggataaaaactcagctgagttcacagaaactgcgtggtagcggtgttgctgttgaaacaggaacagtctcttcaagtgatagttcgcagtatgtgcagtgcgtggccgggtgtttgcagctgatgctccgggtcaatgagtaccgctttgcttgggtggaagcagatggggtaaattgcataatgggagtgttgagtaacaagtgtggctttcagctccagtatcaaatgattttttcaatatggctcctggcattcagtcctcaaatgtgtgaacacctgcggcgctataatatcattccagttctgtctgatatccttcaggagtctgtcaaagagaaagtaacaagaatcattcttgcagcatttcgtaactttttagaaaaatcaactgaaagagaaactcgccaagaatatgccctggctatgattcagtgcaaagttctgaaacagttggagaacttggaacagcagaagtacgatgatgaagatatcagcgaagatatcaaatttcttttggaaaaacttggagagagtgtccaggaccttagttcatttgatgaatacagttcagaacttaaatctggaaggttggaatggagtcctgtgcacaaatctgagaaattttggagagagaatgctgtgaggttaaatgagaagaattatgaactcttgaaaatcttgacaaaacttttggaagtgtcagatgatccccaagtcttagctgttgctgctcacgatgttggagaatatgtgcggcattatccacgaggcaaacgggtcatcgagcagctcggtgggaagcagctggtcatgaaccacatgcatcatgaagaccagcaggtccgctataatgctctgctggccgtgcagaagctcatggtgcacaactgggaataccttggcaagcagctccagtccgagcagccccagaccgctgccgcccgaagctaagcctgcctctggccttcccctccgcctcaatgcagaaccagtagtgggagcactgtgtttagagttaagagtgaacactgtttgattttacttggaatttcctctgttatatagcttttcccaatgctaatttccaaacaacaacaacaaaataacatgtttgcctgttaagttgtataaaagtaggtgattctgtatttaaagaaaataaatatagttattaaaggattctcactccaaacatggcctctctctttacttggactt

SEQ ID NO: 5274 - DNA, 2171 bp, Homo sapiens
cacgtgcctccgatcacgtgaccggcgcctctgtcattctactgcggccgccctggcttccttctacctgtgcggccctcaacgtctccttggtgcgggacccgcttcactttcggctcccggagtctccctccactgctcagacctctggacctgacaggagacgcctacttggctctgacgcggcgccccagcccggctgtgtccccggcgccccggaccaccctccctgccggctttgggtgcgttgtggggtcccgaggatttgttgaaagacattcargattacgaagtttagatgaccaaaatggatatccgaggtgctgtggatgctgctgtccccaccaatattattgctgccaaggctgcagaagttcgtgcaaacaaagtcaactggcaatcctatcttcagggacagatgatttctgctgaagattgtgagtttattcagaggtttgaaatgaaacgaagccctgaagagaagcaagagatgcttcaaactgaaggcagccagtgtgctaaaacatttataaatctgatgactcatatctgcaaagaacagaccgttcagtatatactaactatggtggatgatatgctgcaggaaaatcatcagcgtgttagcattttctttgactatgcaagatgtagcaagaacactgcgtggccctactttctgccaatgttgaatcgccaggatcccttcactgttcatatggcagcaagaattattgccaagttagcagcttggggaaragaactgatggaaggcagtgacttaaattactatttcaattggataaaaactcagctgagttcacagaaactgcgtggtagcggtgttgctgttgaaacaggaacagtctcttcaagtgatagttcgcagtatgtgcagtgcgtggccgggtgtttgcagctgatgctccgggtcaatgagtaccgctttgcttgggtggaagcagatggggtaaattgcataatgggagtgttgagtaacaagtgtggctttcagctccagtatcaaatgattttttcaatatggctcctggcattcagtcctcaaatgtgtgaacacctgcggcgctataatatcattccagttctgtctgatatccttcaggagtctgtcaaagagaaagtaacaagaatcattcttgcagcatttcgtaactttttagaaaaatcaactgaaagagaaactcgccaagaatatgccctggctatgattcagtgcaaagttctgaaacagttggagaacttggaacagcagaagtacgatgatgaagatatcagcgaagatatcaaatttcttttggaaaaacttggagagagtgtccaggaccttagttcatttgatgaatacagttcagaacttaaatctggaaggttggaatggagtcctgtgcacaaatctgagaaattttggagagagaatgctgtgaggttaaatgagaagaattatgaactcttgaaaatcttgacaaaacttttggaagtgtcagatgatccccaagtcttagctgttgctgctcacgatgttggagaatatgtgcggcattatccacgaggcaaacgggtcatcgagcagctcggtgggaagcagctggtcatgaaccacatgcatcatgaagaccagcaggtccgctataatgctctgctggccgtgcagaagctcatggtgcacaactgggaataccttggcaagcagctccagtccgagcagccccagaccgctgccgcccgaagctaagcctgcctctggccttcccctccgcctcaatgcagaaccagtagtgggagcactgtgtttagagttaagagtgaacactgtttgattttacttggaatttcctctgttatatagcttttcccaatgctaatttccaaacaacaacaacaaaataacatgtttgcctgttaagttgtataaaagtaggtgattctgtatttaaagaaaatattactgttacatatactgcttgcaatttctgtatttattgttctctggaaataaatatagttattaaaggattctcactccaaacatggcctctctctttacttggactttgaacaaaagtcaactgttgtctcttttcaaaccaaattgggagaattgttgcaaagtagtgaatggcaaataaatgttttaaaatctatcgctctatcaa

SEQ ID NO: 5275 - DNA, 1941 bp, Homo sapiens
ccgccccctggccgcgagcgcacctcggccccgctcccgaggccctacgggcgtggcctctgtcccgggtcccgccccccagcactccggaacagcgcgctcgcagcgggaggtcgcgaagcctgggactgtgtctgtcgcccatggccgccgcgctgctcgcccgggcctcgggccctgcccgcagagctctctgtcctagggcctggcggcagttacacaccatctaccagtctgtggaactgcccgagacacaccagatgttgctccagacatgcygggactttgccgagaaggagttgtttcccattgcagcccaggtggataaggaacatctcttcccagcggctcaggtgaagaagatgggcgggcttgggcttctggccatggacgtgcccgaggagcttggcrgtgctkgcctcgattacctggcctacgccatcgccatggaggagatcagcygyggctgcgcctccaccggagtcatcatgagtgtcaacaactctctctacctggggcccatcttgaagtttggctccaaggagcagaagcaggcgtgggtcacrcctttcaccagtggtgacaaaattggctgctttgccctcagcgaaccagggaacggcagtgatgcaggagctgcgtccaccaccgccygggccgagggcgactcaygggttctgaatggaaccaaagcctggatcaccaatgcctgggaggyttcggctgccgtggtctttgccagcacggacagagccctgcaaaacaagrgcatcagtgccttcctggtccccatgccaacgcctgggctcacgttggggaagaaagaagacaagctgggcatccggggctcatccacggccaacctcatctttgaggactgtcgcatccccaaggacagcatcctgggggagccagggatgggcttcaagatagccatgcaaaccctggacatgggccgcatcggcatcgcctcccaggccctgggcattgcccagaccgccctcgattgtgctgtgaactacgctgagaatcgcatggccttcggggcgcccctcascaagctccaggtcatccagttcaagttggcagacatggccctggccctggagagtgccyggctgctgacctggcgygctgccatgctgaaggataacaagaagcctttcatcaaggaggcagccatggccaagctggccgcctcggaggcsgcgaccgccatcagccaccaggccatccagatcctgggcggcatgggctacgtgacagagatgccggcagagyggcactacyrcgacgcccgcatcactgagatctacgagggcaccagcgaaatccagcggctggtgatcgccgggcatctgctcaggagctaccggagctgagcccrcggcggactgccccasgactgcgggaaggcgcgggagccaggggcctccaccccaaccccggctcagagactgggcggcccggcgggggctccctggggaccccagatgrgctcagtgctgccacccagatcagatcacatgggaatgaggccctccgaccattggcagctccgcctctgggcctttccgcctcctcaccactgtgcctcaagttcctcatctaagtggccctggcctcctggrggcggggttgtgggggggctgagcgacactcagggacacctcagttgtcctcccgcgggccctggtgccctggcatgaaggcccagtgcgacaggcccttggtggggtctgtcttttccttgaggtcagaggtcaggagcagggctggggtcaggatgacgaggcctggggtcctggtgttgggcaggtggtggggctgggccatggagctggcccagaggcccctcagccctttgtaaagtctgatgaargcaggggtggtgattcatgctgtgtgrctgactgtgggtaataaacacacctgtccccc

SEQ ID NO: 5276 - DNA, 1824 bp, Homo sapiens
cgggacagagatggcactgatgcaggaastgtatagcacaccagcctccaggctggactccttcgtggctcagtggctgcagccccaccgggagtggaaggaagaggtgctagacgctgtgcggaccgtggaggagtttctgaggcaggagcatttccaggggaagcgtgggctggaccaggatgtgcgggtgctgaaggtagtcaaggtgggctccttcgggaatggcacggttctcaggagcaccagagaggtggagctggtggcgtttctgagctgtttccacagcttccaggaggcagccaagcatcacaaagatgttctgaggctgatatggaaaaccatgtggcaaagccaggacctgctggacctcgggctcgaggacctgaggatggagcagagagtccccgatgctctygtcttcaccatycagaccagggggactgcggagcccatcacggtcaccattgtrcctgcctacagagccctggggccttctcttcccaactcccagccaccccctgaggtctrtgtgagcctgatcaaggcctgcggtggtcctggaaatttctgcccatccttcagcgagctgcagagaaatttcgtgaaacatcggccaactaagctgaagagcctcctgcgcctggtgaaacactggtaccagcagtatgtgaaagccaggtcccccagagccaatctgccccctctctatgctcttgaacttctaaccatctatgcctgggaaatgggtactgaagaagacgagaatttcatgttggacgaaggcttcaccactgtgatggacctgctcctggagtatgaagtcatctgtatctactggaccaagtactacacactccacaatgcaatcattgaggattgtgtcagaaaacagctcaaaaaagagaggcccatcatcctggatccggccgaccccaccctcaacgtggcagaagggtacagatgggacatcgttgctcagagggcctcccagtgcctgaaacaggactgttgctatgacaacagggagawccccatctccagctggaacgtgaagagggcacgagacatccacttgacagtggagcagaggggttacccagatttcaacctcatcgtgaacccttatgagcccataaggaaggttaaagagaaaatccggaggaccaggggctactctggcctgcagcgtctgtccttccaggttcctggcagtgagaggcagcttctcagcagcaggtgctccttagccaaatatgggatcttctcccacactcacatctatctgctggagaccatcccctccgagatccaggtcttcgtgaagaatcctgatggtgggagctacgcctatgccatcaaccccaacagcttcatcctgggtctgaagcagcagattgaagaccagcaggggcttcctaaaaagcagcagcagctsgaattccaaggccaagtcctgcaggactggttgggtctggggatctatggcatccaagacagtgacactctcatcctctcraagaagaaaggagaggctctgtttccagccagttagttttctctgggagacttctctgtacatttctgccatgtactccagaactcatcctgtcaatcactctgtcccattgtctactgggaaggtcccaggtcttcaccagttttacaatgagttatcccaggccagacgtggtagctcacacctgtaatcccagaactttgggaggccgaggtgggaggagcgcttgagccgaggagttcaagaccagcctgggtatcayagggagaccccgtctctacaaaataaaaaaataattcactggg

SEQ ID NO: 5277 - DNA, 1434 bp, Homo sapiens
cgggacagagatggcactgatgcaggaastgtatagcacaccagcctccaggctggactccttcgtggctcagtggctgcagccccaccgggagtggaaggaagaggtgctagacgctgtgcggaccgtggaggagtttctgaggcaggagcatttccaggggaagcgtgggctggaccaggatgtgcgggtgctgaaggtagtcaaggtgggctccttcgggaatggcacggttctcaggagcaccagagaggtggagctggtggcgtttctgagctgtttccacagcttccaggaggcagccaagcatcacaaagatgttctgaggctgatatggaaaaccatgtggcaaagccaggacctgctggacctcgggctcgaggacctgaggatggagcagagagtccccgatgctctygtcttcaccatycagaccagggggactgcggagcccatcacggtcaccattgtrcctgcctacagagccctggggccttctcttcccaactcccagccaccccctgaggtctrtgtgagcctgatcaaggcctgcggtggtcctggaaatttctgcccatccttcagcgagctgcagagaaatttcgtgaaacatcggccaactaagctgaagagcctcctgcgcctggtgaaacactggtaccagcagaagggtacagatgggacatcgttgctcagagggcctcccaagggcacgagacatccacttgacagtggagcagaggggttacccagatttcaacctcatcgtgaacccttatgagcccataaggaaggttaaagagaaaatccggaggaccaggggctactctggcctgcagcgtctgtccttccaggttcctggcagtgagaggcagcttctcagcagcaggtgctccttagccaaatatgggatcttctcccacactcacatctatctgctggagaccatcccctccgagatccaggtcttcgtgaagaatcctgatggtgggagctacgcctatgccatcaaccccaacagcttcatcctgggtctgaagcagcagattgaagaccagcaggggcttcctaaaaagcagcagcagctsgaattccaaggccaagtcctgcaggactggttgggtctggggatctatggcatccaagacagtgacactctcatcctctcraagaagaaaggagaggctctgtttccagccagttagttttctctgggagacttctctgtacatttctgccatgtactccagaactcatcctgtcaatcactctgtcccattgtctactgggaaggtcccaggtcttcaccagttttacaatgagttatcccaggccagacgtggtagctcacacctgtaatcccagaactttgggaggccgaggtgggaggagcgcttgagccgaggagttcaagaccagcctgggtatcayagg

SEQ ID NO: 5278 - DNA, 1527 bp, Homo sapiens
cactgatgcaggaastgtatagcacaccagcctccaggctggactccttcgtggctcagtggctgcagccccaccgggagtggaaggaagaggtgctagacgctgtgcggaccgtggaggagtttctgaggcaggagcatttccaggggaagcgtgggctggaccaggatgtgcgggtgctgaaggtagtcaagggccttctcttcccaactcccagccaccccctgaggtctrtgtgagcctgatcaaggcctgcggtggtcctggaaatttctgcccatccttcagcgagctgcagagaaatttcgtgaaacatcggccaactaagctgaagagcctcctgcgcctggtgaaacactggtaccagcagtatgtgaaagccaggtcccccagagccaatctgccccctctctatgctcttgaacttctaaccatctatgcctgggaaatgggtactgaagaagacgagaatttcatgttggacgaaggcttcaccactgtgatggacctgctcctggagtatgaagtcatctgtatctactggaccaagtactacacactccacaatgcaatcattgaggattgtgtcagaaaacagctcaaaaaagagaggcccatcatcctggatccggccgaccccaccctcaacgtggcagaagggtacagatgggacatcgttgctcagagggcctcccagtgcctgaaacaggactgttgctatgacaacagggagawccccatctccagctggaacgtgaagagggcacgagacatccacttgacagtggagcagaggggttacccagatttcaacctcatcgtgaacccttatgagcccataaggaaggttaaagagaaaatccggaggaccaggggctactctggcctgcagcgtctgtccttccaggttcctggcagtgagaggcagcttctcagcagcaggtgctccttagccaaatatgggatcttctcccacactcacatctatctgctggagaccatcccctccgagatccaggtcttcgtgaagaatcctgatggtgggagctacgcctatgccatcaaccccaacagcttcatcctgggtctgaagcagcagattgaagaccagcaggggcttcctaaaaagcagcagcagctsgaattccaaggccaagtcctgcaggactggttgggtctggggatctatggcatccaagacagtgacactctcatcctctcraagaagaaaggagaggctctgtttccagccagttagttttctctgggagacttctctgtacatttctgccatgtactccagaactcatcctgtcaatcactctgtcccattgtctactgggaaggtcccaggtcttcaccagttttacaatgagttatcccaggccagacgtggtagctcacacctgtaatcccagaactttgggaggccgaggtgggaggagcgcttgagccgaggagttcaagaccagcctgggtatcayagggagaccccgtctctacaaaataaaaaaataattcactggg

SEQ ID NO: 5279 - DNA, 1582 bp, Homo sapiens
cgggacagagatggcactgatgcaggaastgtatagcacaccagcctccaggctggactccttcgtggctcagtggctgcagccccaccgggagtggaaggaagaggtgctagacgctgtgcggaccgtggaggagtttctgaggcaggagcatttccaggggaagcgtgggctggaccaggatgtgcgggtgctgaaggtagtcaaggtgggctccttcgggaatggcacggttctcaggagcaccagagaggtggagctggtggcgtttctgagctgtttccacagcttccaggaggcagccaagcatcacaaagatgttctgaggctgatatggaaaaccatgtggcaaagccaggacctgctggacctcgggctcgaggacctgaggatggagcagagagtccccgatgctctygtcttcaccatycagaccagggggactgcggagcccatcacggtcaccattgtrcctgcctacagagccctggggccttctcttcccaactcccagccaccccctgaggtctrtgtgagcctgatcaaggcctgcggtggtcctggaaatttctgcccatccttcagcgagctgcagagaaatttcgtgaaacatcggccaactaagctgaagagcctcctgcgcctggtgaaacactggtaccagcaggcccatcatcctggatccggccgaccccaccctcaacgtggcagaagggtacagatgggacatcgttgctcagagggcctcccagtgcctgaaacaggactgttgctatgacaacagggagawccccatctccagctggaacgtgaagagggcacgagacatccacttgacagtggagcagaggggttacccagatttcaacctcatcgtgaacccttatgagcccataaggaaggttaaagagaaaatccggaggaccaggggctactctggcctgcagcgtctgtccttccaggttcctggcagtgagaggcagcttctcagcagcaggtgctccttagccaaatatgggatcttctcccacactcacatctatctgctggagaccatcccctccgagatccaggtcttcgtgaagaatcctgatggtgggagctacgcctatgccatcaaccccaacagcttcatcctgggtctgaagcagcagattgaagaccagcaggggcttcctaaaaagcagcagcagctsgaattccaaggccaagtcctgcaggactggttgggtctggggatctatggcatccaagacagtgacactctcatcctctcraagaagaaaggagaggctctgtttccagccagttagttttctctgggagacttctctgtacatttctgccatgtactccagaactcatcctgtcaatcactctgtcccattgtctactgggaaggtcccaggtcttcaccagttttacaatgagttatcccaggccagacgtggtagctcacacctgtaatcccagaactttgggaggccgaggtgggaggagcgcttgagccgaggagttcaagaccagcctgggtatcayagggagaccccgtctctacaaaataaaaaaataattcactggg

SEQ ID NO: 5280 - DNA, 3040 bp, Homo sapiens
ttcagagatccccctgtactttgtggacttgcaggatgacttagacgactatggatttgaagactatggtacagattgcgacaacatgagagtaacggccttcttggacattccaggccaggataacctgcctccactcactcgcctggagaagtatgctttcagcgagaacaccttcaaccggcagattattgccagagggctgcttgatatcttccgggacttcggtaacaatgaagaagacttcctcacggtaatggagattgtagtcagattgtcagaagatgcagagcccacagtgcggactgagctgatggaacagattcctcctattgccatttttttacaagaaaacagatcaaattttccagtggtgctctctgaatatctcatacctattgtagtgaggtacytcacagatccaaacaatcagataatctgcaaaatggcttcaatgctgagtaagagtaccgttgaacgcctgctactcccccgattctgtgaactgtgtggtgacaggaagctctttcaagttcggaaggtttgtgctgcaaattttggtgatatttgtcatgctgttggacaagaagccactgagaaatttttgatcccaaagttctttgagctctgctctgatgctgtttggggcatgcggaaagcctgtgcagaatgcttcacrgctgtgtcgcacagctcctcccmtggggtccgcagaacccagctcttcccgctcttcatcagacttgtcagcgacccctgccgatgggtgcaccaggctgccttccagtccctyggccccttcacttccacctttgcaaacccctccagggctggcctttatcttcgagaggatggcgccctgagcatctggccactcacccaggatttggactctggttttgcctctggctcccctgctcccagcagtggtggtaacacttcccctgccagcaaggacttagagctgcttctgagtgaggctgggcctcaggaggacgactgcagcagacctggggttgtgcacaacagctgtgtggcmcggagtgagattcagaaagtccttgrtagcttgcaggagcatctgatgaatgatccagatgttcaagctcaagttcaggtattatcygctgcactgagagctgcacagctcgactgcgtgaatgaagctgagagcaagccaacagcaggcctaaaggaagtgtccatttcacatcccagctctgcctctgacaatcagatcgctctggcggcctcatcatctcaggatgagctctttgtggccaggatattacaaagcccagatccaggtggacccaraaatggaaccagtgaccatctggagactgaccagaggcaggatcccaccccacttgaagagaataaatctaaattacaggatgtaatamctcagccgctgctagatcagtatgtgtccatgactgacccagctcgagcccagactgtcgatactgacatagccaaacactgtgcctacagcctcccaggggtggcactgaccctgggcaggcaaaattggcactgcctgaaagatacatatgaaacactggcttctgatgtacagtggaaggtacggcgagccctagccttctccattcacgagctggctgtgattcttggggatcagttaacagcagctgacctggtgcctatcttcaatggatttttaaaggatctggatgaagtgcgaataggagttcttagacacctgtatgattttctaaagttgcttcatgaagacaagaggagagactatctttatcagcttcaagaatttgtagtgactgataacagcaggaattggaggtttcgatatgaactagcagaacagctgatactgattctggaactctatagtcccaatgatgtttatgattacctaatgcacattgccttaaagttgtgtgcagatcaagtttctgaagttcggtggatctccttcaaactagtcgtggcaattctgcagaagttctattccaacagtgaaagtgcattggggttaaatttcatcaatgagctcatcataaggttccggcactgttctaagtgggttggaaggcaagctttcgctttcatttgtcaggcagtggtgagcaaggagtgtgtccccgtggaccagttcatggagcacctgcttcccagcctcctgagcctcgcatcagatcctgtgcccaacrtgagggttctgctagccaaggccctaaggcagatgctgttggaaaaggcgtattttagaaatgctggtaaccctcatcttgaagtcatkgaagagaccatcttagcattgcagtcagaccgggaccaagatgtttccttttttgcagccctagaaccaaagcggcggaatatcatagacactgctgtactagaaaaacagaattaactacktccgtgatgagttgcaatctgattatttcatgcttggcacatatggcttaccataacttgaaggggaactgattgtattataccagctgggggagattttggaacctttcatactrtgcactcagtgattgacgccttttccatctgtaccccgaagggactgaacctgatgggggctttttctggatggctgggccatcctgatcaagcctgatcagtaagtctgtggaaagattgcagaccaggtggctaactgggcactggagcctctgaaccatcaggctgtctgccagcaagttcttttctccatggcagactgtatgatctgaagtccccccaaccctctccaagtaaagtagtttattagaagctcttaagtctttaatagacctgcatatttccttcccttatgatttcctataaaatatagtttatggtgttatatttttaactgaaatactgtacatatgtaaataactcttgacaggaagaaaatatattaatgtagtatttgccccctatcagtgagctgaacaaatacatcatttaaatctatgctgcactttgagttgctacaaatatggttcgatttgtttatttttgaaaaatgtgataaagaaatctaaagaatgat

SEQ ID NO: 5281 - DNA, 1599 bp, Homo sapiens
ttcagagatccccctgtactttgtggacttgcaggatgacttagacgactatggatttgaagactatggtacagattgcgacaacatgagagtaacggccttcttggacattccaggccaggataacctgcctccactcactcgcctggagaagtatgctttcagcgagaacaccttcaaccggcagattattgccagagggctgcttgatatcttccgggacttcggtaacaatgaagaagacttcctcacggtaatggagattgtagtcagattgtcagaagatgcagagcccacagtgcggactgagctgatggaacagattcctcctattgccatttttttacaagaaaacagatcaaattttccagtggtgctctctgaatatctcatacctattgtagtgaggtacytcacagatccaaacaatcaggaagtgctcttgattcttctggaacaagacctaattttccagcatgatgttgaaaacaaagtatgtcccattctcctgcagctctctgccccagacagtgatgacgaatataaagcagaagctgtttgtgctgcaaattttggtgatatttgtcatgctgttggacaagaagccactgagaaatttttgatcccaaagttctttgagctctgctctgatgctgtttggggcatgcggaaagcctgtgcagaatgcttcacrgctgtgtcgcacagctcctcccmtggggtccgcagaacccagctcttcccgctcttcatcagacttgtcagcgacccctgccgatgggtgcaccaggctgccttccagtccctyggccccttcacttccacctttgcaaacccctccagggctggcctttatcttcgagaggatggcgccctgagcatctggccactcacccaggatttggactctggttttgcctctggctcccctgctcccagcagtggtggtaacacttcccctgccaggtatgctctggctagggtcaccaccaggaccctcgatgtaccttaagcacccacctaaaatttcagcaattatcttgtctcgagttttagtagtgaccttctgggcaagatggaatattagagctttaattatgtaaagaakcaaaaagtaattgcaataatgattttgaaacatgactactgggttataaataatgaagctactatgtctcctaaatttagataaaatattcattgagattagtgattaaataacctataaagaacattttctcttactttttgatgaatgaagttctctgggtaatttacttagggaaaaatgtgaagtctcccaaatgtacttttttggaggttgggttacatgtacataaaggcgacactcctgaccaacagcggtagaccctccagtgtttgctaatatggcgctggatcttggctttgtcatgtctttcctctgaggctgatgcgtatacaccagccatcctatttgaggtcgtttgtaaatgtctctccattgtcgctagcgtgcaggcatgtgagagtgggtaactgatgcctcacagaatacaaatccttccgaggttggcccatcctccctccatcccacttccatcagagttcattgagctc

SEQ ID NO: 5282 - DNA, 3355 bp, Homo sapiens
ttcagagatccccctgtactttgtggacttgcaggatgacttagacgactatggatttgaagactatggtacagattgcgacaacatgagagtaacggccttcttggacattccaggccaggataacctgcctccactcactcgcctggagaagtatgctttcagcgagaacaccttcaaccggcagattattgccagagggctgcttgatatcttccgggacttcggtaacaatgaagaagacttcctcacggtaatggagattgtagtcagattgtcagaagatgcagagcccacagtgcggactgagctgatggaacagattcctcctattgccatttttttacaagaaaacagatcaaattttccagtggtgctctctgaatatctcatacctattgtagtgaggtacytcacagatccaaacaatcagataatctgcaaaatggcttcaatgctgagtaagagtaccgttgaacgcctgctactcccccgattctgtgaactgtgtggtgacaggaagctctttcaagttcggaaggtttgtgctgcaaattttggtgatatttgtcatgctgttggacaagaagccactgagaaatttttgatcccaaagttctttgagctctgctctgatgctgtttggggcatgcggaaagcctgtgcagaatgcttcacrgctgtgtcgcacagctcctcccmtggggtccgcagaacccagctcttcccgctcttcatcagacttgtcagcgacccctgccgatgggtgcaccaggctgccttccagtccctyggccccttcacttccacctttgcaaacccctccagggctggcctttatcttcgagaggatggcgccctgagcatctggccactcacccaggatttggactctggttttgcctctggctcccctgctcccagcagtggtggtaacacttcccctgccagtttaactcgttcagcaaagcctgtgcggagcgagccagagctacctgtrgaagggacctcagcgaaaaccagtgattgcccacacagcagtagctcctctgacggcccagcggaaagccctgtggaaagctgtgtgtcggctggagctgagtggaccagggtttccccagagaccagcgccygctcaaagctttctgacatgaatgacctccccatcagcagctaccctggatcagattcctgggcctgcccagggaacactgaggatgtgttcagtcattttctttattggtgaactcctctccctgacataagcaaggacttagagctgcttctgagtgaggctgggcctcaggaggacgactgcagcagacctggggttgtgcacaacagctgtgtggcmcggagtgagattcagaaagtccttgrtagcttgcaggagcatctgatgaatgatccagatgttcaagctcaagttcaggtattatcygctgcactgagagctgcacagctcgactgcgtgaatgaagctgagagcaagccaacagcaggcctaaaggaagtgtccatttcacatcccagctctgcctctgacaatcagatcgctctggcggcctcatcatctcaggatgagctctttgtggccaggatattacaaagcccagatccaggtggacccaraaatggaaccagtgaccatctggagactgaccagaggcaggatcccaccccacttgaagagaataaatctaaattacaggatgtaatamctcagccgctgctagatcagtatgtgtccatgactgacccagctcgagcccagactgtcgatactgacatagccaaacactgtgcctacagcctcccaggggtggcactgaccctgggcaggcaaaattggcactgcctgaaagatacatatgaaacactggcttctgatgtacagtggaaggtacggcgagccctagccttctccattcacgagctggctgtgattcttggggatcagttaacagcagctgacctggtgcctatcttcaatggatttttaaaggatctggatgaagtgcgaataggagttcttagacacctgtatgattttctaaagttgcttcatgaagacaagaggagagactatctttatcagcttcaagaatttgtagtgactgataacagcaggaattggaggtttcgatatgaactagcagaacagctgatactgattctggaactctatagtcccaatgatgtttatgattacctaatgcacattgccttaaagttgtgtgcagatcaagtttctgaagttcggtggatctccttcaaactagtcgtggcaattctgcagaagttctattccaacagtgaaagtgcattggggttaaatttcatcaatgagctcatcataaggttccggcactgttctaagtgggttggaaggcaagctttcgctttcatttgtcaggcagtggtgagcaaggagtgtgtccccgtggaccagttcatggagcacctgcttcccagcctcctgagcctcgcatcagatcctgtgcccaacrtgagggttctgctagccaaggccctaaggcagatgctgttggaaaaggcgtattttagaaatgctggtaaccctcatcttgaagtcatkgaagagaccatcttagcattgcagtcagaccgggaccaagatgtttccttttttgcagccctagaaccaaagcggcggaatatcatagacactgctgtactagaaaaacagaattaactacktccgtgatgagttgcaatctgattatttcatgcttggcacatatggcttaccataacttgaaggggaactgattgtattataccagctgggggagattttggaacctttcatactrtgcactcagtgattgacgccttttccatctgtaccccgaagggactgaacctgatgggggctttttctggatggctgggccatcctgatcaagcctgatcagtaagtctgtggaaagattgcagaccaggtggctaactgggcactggagcctctgaaccatcaggctgtctgccagcaagttcttttctccatggcagactgtatgatctgaagtccccccaaccctctccaagtaaagtagtttattagaagctcttaagtctttaatagacctgcatatttccttcccttatgatttcctataaaatatagtttatggtgttatatttttaactgaaatactgtacatatgtaaataactcttgacaggaagaaaatatattaatgtagtatttgccccctatcagtgagctgaacaaatacatcatttaaatctatgctgcactttgagttgctacaaatatggttcgatttgtttatttttgaaaaatgtgataaagaaatctaaagaatgat

SEQ ID NO: 5283 - DNA, 3055 bp, Homo sapiens
ttcagagatccccctgtactttgtggacttgcaggatgacttagacgactatggatttgaagactatggtacagattgcgacaacatgagagtaacggccttcttggacattccaggccaggataacctgcctccactcactcgcctggagaagtatgctttcagcgagaacaccttcaaccggcagattattgccagagggctgcttgatatcttccgggacttcggtaacaatgaagaagacttcctcacggtaatggagattgtagtcagattgtcagaagatgcagagcccacagtgcggactgagctgatggaacagattcctcctattgccatttttttacaagaaaacagatcaaattttccagtggtgctctctgaatatctcatacctattgtagtgaggtacytcacagatccaaacaatcaggaagtgctcttgattcttctggaacaagacctaattttccagcatgatgttgaaaacaaagtatgtcccattctcctgcagctctctgccccagacagtgatgacgaatataaagcagaagctgtttgtgctgcaaattttggtgatatttgtcatgctgttggacaagaagccactgagaaatttttgatcccaaagttctttgagctctgctctgatgctgtttggggcatgcggaaagcctgtgcagaatgcttcacrgctgtgtcgcacagctcctcccmtggggtccgcagaacccagctcttcccgctcttcatcagacttgtcagcgacccctgccgatgggtgcaccaggctgccttccagtccctyggccccttcacttccacctttgcaaacccctccagggctggcctttatcttcgagaggatggcgccctgagcatctggccactcacccaggatttggactctggttttgcctctggctcccctgctcccagcagtggtggtaacacttcccctgccagcaaggacttagagctgcttctgagtgaggctgggcctcaggaggacgactgcagcagacctggggttgtgcacaacagctgtgtggcmcggagtgagattcagaaagtccttgrtagcttgcaggagcatctgatgaatgatccagatgttcaagctcaagttcaggtattatcygctgcactgagagctgcacagctcgactgcgtgaatgaagctgagagcaagccaacagcaggcctaaaggaagtgtccatttcacatcccagctctgcctctgacaatcagatcgctctggcggcctcatcatctcaggatgagctctttgtggccaggatattacaaagcccagatccaggtggacccaraaatggaaccagtgaccatctggagactgaccagaggcaggatcccaccccacttgaagagaataaatctaaattacaggatgtaatamctcagccgctgctagatcagtatgtgtccatgactgacccagctcgagcccagactgtcgatactgacatagccaaacactgtgcctacagcctcccaggggtggcactgaccctgggcaggcaaaattggcactgcctgaaagatacatatgaaacactggcttctgatgtacagtggaaggtacggcgagccctagccttctccattcacgagctggctgtgattcttggggatcagttaacagcagctgacctggtgcctatcttcaatggatttttaaaggatctggatgaagtgcgaataggagttcttagacacctgtatgattttctaaagttgcttcatgaagacaagaggagagactatctttatcagcttcaagaatttgtagtgactgataacagcaggaattggaggtttcgatatgaactagcagaacagctgatactgattctggaactctatagtcccaatgatgtttatgattacctaatgcacattgccttaaagttgtgtgcagatcaagtttctgaagttcggtggatctccttcaaactagtcgtggcaattctgcagaagttctattccaacagtgaaagtgcattggggttaaatttcatcaatgagctcatcataaggttccggcactgttctaagtgggttggaaggcaagctttcgctttcatttgtcaggcagtggtgagcaaggagtgtgtccccgtggaccagttcatggagcacctgcttcccagcctcctgagcctcgcatcagatcctgtgcccaacrtgagggttctgctagccaaggccctaaggcagatgctgttggaaaaggcgtattttagaaatgctggtaaccctcatcttgaagtcatkgaagagaccatcttagcattgcagtcagaccgggaccaagatgtttccttttttgcagccctagaaccaaagcggcggaatatcatagacactgctgtactagaaaaacagaattaactacktccgtgatgagttgcaatctgattatttcatgcttggcacatatggcttaccataacttgaaggggaactgattgtattataccagctgggggagattttggaacctttcatactrtgcactcagtgattgacgccttttccatctgtaccccgaagggactgaacctgatgggggctttttctggatggctgggccatcctgatcaagcctgatcagtaagtctgtggaaagattgcagaccaggtggctaactgggcactggagcctctgaaccatcaggctgtctgccagcaagttcttttctccatggcagactgtatgatctgaagtccccccaaccctctccaagtaaagtagtttattagaagctcttaagtctttaatagacctgcatatttccttcccttatgatttcctataaaatatagtttatggtgttatatttttaactgaaatactgtacatatgtaaataactcttgacaggaagaaaatatattaatgtagtatttgccccctatcagtgagctgaacaaatacatcatttaaatctatgctgcactttgagttgctacaaatatggttcgatttgtttatttttgaaaaatgtgataaagaaatctaaagaatgat

SEQ ID NO: 5284 - DNA, 2055 bp, Homo sapiens
tagtagacacagagtttcaccatgttggccaggctggtctcgagctcctgacctcaggtgatccacctgcctcggcctcccaaagtgctgagattacaggtgtgagccaccactgctttccaggagacccttggtcttcatgtctttggtgtgtgcactcttgaacacatgccaggcacacagggtgcatgacgacaagcctaatattgtcctaatcatggttgatgacctgggtattggagatctgggctgctacggcaatgacaccatgaggacgcctcacatcgaccgccttgccagggaaggcgtgcgactgactcagcacatctctgccgcctccctctgcagcccaagccggtccgcgttcttgacgggaagataccccatccgatcaggtatggtttctagtggtaatagacgtgtcatccaaaatcttgcagtccccgcaggcctccctcttaatgagacaacacttgcagccttgctaaagaagcaaggatacagcacggggcttataggcaaatggcaccaaggcttgaactgcgactcccgaagtgaccagtgccaccatccatataattatgggtttgactactactatggcatgccgttcactctcgttgacagctgctggccggacccctctcgtaacacggaattagcctttgagagtcagctctggctctgtgtgcagctagttgccattgccatcctcaccctaacctttgggaagctgagcggctgggtctctgttccctggctcctgatcttctccatgattctgtttattttcctcttgggctatgcttggttctccagccacacgtcccctttatactgggactgcctcctcatgcgggggcacgagatcacggagcagcccatgaaggctgaacgagctggatccattatggtgaaggaggcgatttcctttttagaaaggcacagtaaggaaactttccttctctttttctcctttcttcacgtgcacacacctctccccaccacggacgatttcactggcaccagcaagcatggcttgtatggggataatgtggaagagatggactccatggtgggcaagattcttgatgctatcgatgattttggcctaaggaacaacacccttgtctactttacatcagatcacggagggcatttggaagctaggcgagggcatgcccaacttggtggatggaatggaatatacaaaggtggaaaaggcatggggggctgggaaggtggaatccgcgtcccaggaattgtccgatggcctggaaaggtaccagctggacggttgattaaggaacctacaagtttaatggatattttaccaactgtcgcatcagtgtcaggaggaagtctccctcaggacagggtcattgacggccgagacctcatgcccttgctgcagggcaacgtcaggcactcggagcatgaatttcttttccactactgtggctcctacctgcacgccgtgcggtggatccccaaggacgacagtgggtcagtttggaaggctcactatgtgaccccggtattccagccaccagcttctggtggctgctatgtcacctcattatgcagatgtttcggagaacaggttacctaccacaacccccctctgctcttcgatctctccagggacccctcagagtccacacccctgacacctgccacagagcccctcyatgattttgtgattaaaaaggtggccaacgccctgaaggaacaccaggaaaccatcgtgcctgtgacctaccaactctcagaactgaatcagggcaggacgtggctgaagccttgctgtggggtgttcccattttgtctgtgtgacaaggaagaggaagtctctcagcctcggggtcctaacgagaagagataattacaatcaggctaccagaggaagcctttggtcctaacgagaagagataattacaatcaggctaccaaaggaagcactaactttggtgctttcaagttggcaaggagtgcatttaatagtcaataaattcatctaccattccagattattaaaggcccactggttgttcc

SEQ ID NO: 5285 - DNA, 2063 bp, Homo sapiens
tccttgacgcagttgcccgaacccggagctaagttacccgcagggccattggaagccctccctggctttaggtttctcctccagtggaaccgacaacaagaaggtattccaagctgcacaatgaggcccaggagacccttggtcttcatgtctttggtgtgtgcactcttgaacacatgccaggcacacagggtgcatgacgacaagcctaatattgtcctaatcatggttgatgacctgggtattggagatctgggctgctacggcaatgacaccatgaggacgcctcacatcgaccgccttgccagggaaggcgtgcgactgactcagcacatctctgccgcctccctctgcagcccaagccggtccgcgttcttgacgggaagataccccatccgatcaggtatggtttctagtggtaatagacgtgtcatccaaaatcttgcagtccccgcaggcctccctcttaatgagacaacacttgcagccttgctaaagaagcaaggatacagcacggggcttataggcaaatggcaccaaggcttgaactgcgactcccgaagtgaccagtgccaccatccatataattatgggtttgactactactatggcatgccgttcactctcgttgacagctgctggccggacccctctcgtaacacggaattagcctttgagagtcagctctggctctgtgtgcagctagttgccattgccatcctcaccctaacctttgggaagctgagcggctgggtctctgttccctggctcctgatcttctccatgattctgtttattttcctcttgggctatgcttggttctccagccacacgtcccctttatactgggactgcctcctcatgcgggggcacgagatcacggagcagcccatgaaggctgaacgagctggatccattatggtgaaggaggcgatttcctttttagaaaggcacagtaaggaaactttccttctctttttctcctttcttcacgtgcacacacctctccccaccacggacgatttcactggcaccagcaagcatggcttgtatggggataatgtggaagagatggactccatggtgggcaagattcttgatgctatcgatgattttggcctaaggaacaacacccttgtctactttacatcagatcacggagggcatttggaagctaggcgagggcatgcccaacttggtggatggaatggaatatacaaaggtggaaaaggcatggggggctgggaaggtggaatccgcgtcccaggaattgtccgatggcctggaaaggtaccagctggacggttgattaaggaacctacaagtttaatggatattttaccaactgtcgcatcagtgtcaggaggaagtctccctcaggacagggtcattgacggccgagacctcatgcccttgctgcagggcaacgtcaggcactcggagcatgaatttcttttccactactgtggctcctacctgcacgccgtgcggtggatccccaaggacgacagtgggtcagtttggaaggctcactatgtgaccccggtattccagccaccagcttctggtggctgctatgtcacctcattatgcagatgtttcggagaacaggttacctaccacaacccccctctgctcttcgatctctccagggacccctcagagtccacacccctgacacctgccacagagcccctcyatgattttgtgattaaaaaggtggccaacgccctgaaggaacaccaggaaaccatcgtgcctgtgacctaccaactctcagaactgaatcagggcaggacgtggctgaagccttgctgtggggtgttcccattttgtctgtgtgacaaggaagaggaagtctctcagcctcggggtcctaacgagaagagataattacaatcaggctaccagaggaagcctttggtcctaacgagaagagataattacaatcaggctaccaaaggaagcactaactttggtgctttcaagttggcaaggagtgcatttaatagtcaataaattcatctaccattccagattattaaaggcccactggttgttcc

SEQ ID NO: 5286 - DNA, 1932 bp, Homo sapiens
gagacccttggtcttcatgtctttggtgtgtgcactcttgaacacatgccaggcacacagggtgcatgacgacaagcctaatattgtcctaatcatggttgatgacctgggtattggagatctgggctgctacggcaatgacaccatgaggacgcctcacatcgaccgccttgccagggaaggcgtgcgactgactcagcacatctctgccgcctccctctgcagcccaagccggtccgcgttcttgacgggaagataccccatccgatcaggtatggtttctagtggtaatagacgtgtcatccaaaatcttgcagtccccgcaggcctccctcttaatgagacaacacttgcagccttgctaaagaagcaaggatacagcacggggcttataggcaaatggcaccaaggcttgaactgcgactcccgaagtgaccagtgccaccatccatataattatgggtttgactactactatggcatgccgttcactctcgttgacagctgctggccggacccctctcgtaacacggaattagcctttgagagtcagctctggctctgtgtgcagctagttgccattgccatcctcaccctaacctttgggaagctgagcggctgggtctctgttccctggctcctgatcttctccatgattctgtttattttcctcttgggctatgcttggttctccagccacacgtcccctttatactgggactgcctcctcatgcgggggcacgagatcacggagcagcccatgaaggctgaacgagctggatccattatggtgaaggaggcgatttcctttttagaaaggcacagtaaggaaactttccttctctttttctcctttcttcacgtgcacacacctctccccaccacggacgatttcactggcaccagcaagcatggcttgtatggggataatgtggaagagatggactccatggtgggcaagattcttgatgctatcgatgattttggcctaaggaacaacacccttgtctactttacatcagatcacggagggcatttggaagctaggcgagggcatgcccaacttggtggatggaatggaatatacaaaggtggaaaaggcatggggggctgggaaggtggaatccgcgtcccaggaattgtccgatggcctggaaaggtaccagctggacggttgattaaggaacctacaagtttaatggatattttaccaactgtcgcatcagtgtcaggaggaagtctccctcaggacagggtcattgacggccgagacctcatgcccttgctgcagggcaacgtcaggcactcggagcatgaatttcttttccactactgtggctcctacctgcacgccgtgcggtggatccccaaggacgacagtgggtcagtttggaaggctcactatgtgaccccggtattccagccaccagcttctggtggctgctatgtcacctcattatgcagatgtttcggagaacaggttacctaccacaacccccctctgctcttcgatctctccagggacccctcagagtccacacccctgacacctgccacagagcccctcyatgattttgtgattaaaaaggtggccaacgccctgaaggaacaccaggaaaccatcgtgcctgtgacctaccaactctcagaactgaatcagggcaggacgtggctgaagccttgctgtggggtgttcccattttgtctgtgtgacaaggaagaggaagtctctcagcctcggggtcctaacgagaagagataattacaatcaggctaccagaggaagcctttggtcctaacgagaagagataattacaatcaggctaccaaaggaagcactaactttggtgctttcaagttggcaaggagtgcatttaatagtcaataaattcatctaccattccagattattaaaggcccactggttgttcc

SEQ ID NO: 5287 - DNA, 2666 bp, Homo sapiens
agagaggaggcggccgttgggaactgagtctccccagccttggggccggtgcctcttccgggcttcggcgaatgagacctgcggacctgcccccgcgccccatggaagaatccccggcgtccagctctgccccgacagagacggaggagccggggtccagtgcagaggtcatggaagaagtgacaacatgctccttcaacagccctctgttccrgcaggaagatgacagagggattacctaccggatcccagccctgctctacataccccccacccacaccttcctggcctttgcagagaagcgttcyacgaggagagatgaggatgctctccacctggtgctgaggcgagggttgaggattgggcagttggtacagtgggggcccctgaagccactgatggaagccacactaccggggcatcggaccatgaacccctgtcctgtatgggagcagaagagtggttgtgtgttcctgttcttcatctgtgtgcggggccatgtcacagagcgtcaacagattgtgtcaggcaggaatgctgcccgcctttgcttcatctacagtcaggatgctggatgttcatggagtgaggtgagggacttgactgaggaggtcattggctcagagctgaagcactgggccacatttgctgtgggcccaggtcatggcatccagctgcagtcagggagactggtcatccctgcgtatacctactacatcccttcctggttcttttgcttccagctaccatgtaaaaccaggcctcattctctgatgatctacagtgatgacctaggggtcacatggcaccatggtagactcattaggcccatggttacagtagaatgtgaagtggcagaggtgactgggagggctggccaccctgtgctatattgcagtgcccggacaccaaacaggtgccgggcagaggcgctcagcactgaccatggtgaaggctttcagagactggccctgagtcgacagctctgtgagcccccacatggttgccaagggagtgtggtaagtttccggcccctggagatcccacataggtgccaggactctagcagcaaagatgcacccaccattcagcagagctctccaggcagttcactgaggctggaggaggaagctggaacaccgtcagaatcatggctcttgtactcacacccaaccagtaggaaacagagggttgacctaggtatctatctcaaccagacccccttggaggctgcctgctggtcccgcccctggatcttgcactgtgggccctgtggctactctgatctggctgctctggaggaggagggcttgtttgggtgtttgtttgaatgtgggaccaagcaagagtgtgagcagattgccttccgcctgtttacacaccgggagatcctgagtcacctgcagggggactgcaccagccctggtaggaacccaagccaattcaaaagcaattaattggcttaggacccaatttccatagatgcaaatggcagttacagacaggttaacagaagctactgaagtctacagataatmaaaaaacttaatattctgttccctaccttttttcacttttcctcctccaaagagcaaaatgaaaattttgccttagctactgcagtggaaagagcactgaactaggagttggaagacaaggatgtggtcctggctctgccactggcttgcttttggaccttggatgtgtcacctgaactctctggacctcaggtttccatctgtaaaatgagagtattggttctaagatttctcatcttctcatccctaggacaagcatagtgcctgcatgcttcatgatcagtaagtcctggctgcataaaggactctgatgtcaaaatggaaaccaggggacttaccttttcacatgacttacccctcatccgagtgtgaggttacaagcaggtgtcatggcaggaaggaagaccagatctgtatgatttgttccatttttaataacaaaaatatccacacccttttaataatgctcagagttctgtaggctctctatcctagaggaattgagcaaaacagaagaatcatgaagtctcctaccttctacagccttgtagttctgcttaccttctcttcctcatccagaaagcatcattttctagggagaacaatgagaatctcaatgccagtagtactggataatagtgcgtattgcttctggtggcattaccctgatgatgggctgaagttcatttattagggtggttcctgatgggaaaaggacatggattaggactttaaaacactggacagaatttcccacagtctttgccctcaaggagttcaccagtttatggggctagaagagcgagaaaattcaagaaaataaatgtagctggtgggagactttgtagatgttgggctatatgttggggtgatggtagctcctgatgtaattttcttagttgcatcttcaatatgcctggagtcgtctgtccaaggcttgtccaggcttctgggtttctctcaagtttgtttttctcaggatattgtcctggcccagctactcctttacctgtgagaagatcttcaccattaggaagatctctagacccccagatctcagaatcaggcctatttgtgtaggcccatggaaatcactacttgtgaagtagagatgcctttttgtctaat

SEQ ID NO: 5288 - DNA, 3522 bp, Homo sapiens
tttccttttattggygtttgtaaaatttcttctttttaaaattgttatattttagagacagggtctcgctctgtcacccaggctggagtgcagtggtgcaatcacagctcaccacagcctccaactcctgggctcaaggcatcctcccacgtaggccttccaaagcgctgagattgtaggcataagccaccaggcccagcctattacctttacgttgtacttagtcccagataaaaaatgaccttagatcagtcctttcctctttggctggggagaggggggcttaaattccggtactgtgaaacagaagaatggactcagtgctatgtgacaaatctatgtatgtaaatgtgtgtatatacacacacataaattatatatatgaatatattttcattttcatattttgcaaggagagtagccaatgctctggacctctggtcctttttgtagggtaccctctgaggccgggaacctttgctcaactctcaggctgtccagggaagctttaggcggtgataccgagctacagaccaatataagagctcggggctgtggcactgaagagaggaggcggccgttgggaactgaggtgggcccagggcttgagctgagttggcgagggtggaggtggtgccggtcccacgccgtggtggggaccgagctgcgggctggagggaggggcagcgccgagggggcgggacggggagggctcgcggagtaggccaacggttggccccaaccgccactgactacagcctgcgcccgcctcttttcgttgccgttacctgtttccggcagtcgacacgctcttcgcttctcggggcttgtctccgtgtcctccgtctcagttgtttctccctctctatcctcctctgtctcagtctccccagccttggggccggtgcctcttccgggcttcggcgaatgagacctgcggacctgcccccgcgccccatggaagaatccccggcgtccagctctgccccgacagagacggaggagccggggtccagtgcagaggtcatggaagaagtgacaacatgctccttcaacagccctctgttccrgcaggaagatgacagagggattacctaccggatcccagccctgctctacataccccccacccacaccttcctggcctttgcagagaagcgttcyacgaggagagatgaggatgctctccacctggtgctgaggcgagggttgaggattgggcagttggtacagtgggggcccctgaagccactgatggaagccacactaccggggcatcggaccatgaacccctgtcctgtatgggagcagaagagtggttgtgtgttcctgttcttcatctgtgtgcggggccatgtcacagagcgtcaacagattgtgtcaggcaggaatgctgcccgcctttgcttcatctacagtcaggatgctggatgttcatggagtgaggtgagggacttgactgaggaggtcattggctcagagctgaagcactgggccacatttgctgtgggcccaggtcatggcatccagctgcagtcagggagactggtcatccctgcgtatacctactacatcccttcctggttcttttgcttccagctaccatgtaaaaccaggcctcattctctgatgatctacagtgatgacctaggggtcacatggcaccatggtagactcattaggcccatggttacagtagaatgtgaagtggcagaggtgactgggagggctggccaccctgtgctatattgcagtgcccggacaccaaacaggtgccgggcagaggcgctcagcactgaccatggtgaaggctttcagagactggccctgagtcgacagctctgtgagcccccacatggttgccaagggagtgtggtaagtttccggcccctggagatcccacataggtgccaggactctagcagcaaagatgcacccaccattcagcagagctctccaggcagttcactgaggctggaggaggaagctggaacaccgtcagaatcatggctcttgtactcacacccaaccagtaggaaacagagggttgacctaggtatctatctcaaccagacccccttggaggctgcctgctggtcccgcccctggatcttgcactgtgggccctgtggctactctgatctggctgctctggaggaggagggcttgtttgggtgtttgtttgaatgtgggaccaagcaagagtgtgagcagattgccttccgcctgtttacacaccgggagatcctgagtcacctgcagggggactgcaccagccctggtaggaacccaagccaattcaaaagcaattaattggcttaggacccaatttccatagatgcaaatggcagttacagacaggttaacagaagctactgaagtctacagataatmaaaaaacttaatattctgttccctaccttttttcacttttcctcctccaaagagcaaaatgaaaattttgccttagctactgcagtggaaagagcactgaactaggagttggaagacaaggatgtggtcctggctctgccactggcttgcttttggaccttggatgtgtcacctgaactctctggacctcaggtttccatctgtaaaatgagagtattggttctaagatttctcatcttctcatccctaggacaagcatagtgcctgcatgcttcatgatcagtaagtcctggctgcataaaggactctgatgtcaaaatggaaaccaggggacttaccttttcacatgacttacccctcatccgagtgtgaggttacaagcaggtgtcatggcaggaaggaagaccagatctgtatgatttgttccatttttaataacaaaaatatccacacccttttaataatgctcagagttctgtaggctctctatcctagaggaattgagcaaaacagaagaatcatgaagtctcctaccttctacagccttgtagttctgcttaccttctcttcctcatccagaaagcatcattttctagggagaacaatgagaatctcaatgccagtagtactggataatagtgcgtattgcttctggtggcattaccctgatgatgggctgaagttcatttattagggtggttcctgatgggaaaaggacatggattaggactttaaaacactggacagaatttcccacagtctttgccctcaaggagttcaccagtttatggggctagaagagcgagaaaattcaagaaaataaatgtagctggtgggagactttgtagatgttgggctatatgttggggtgatggtagctcctgatgtaattttcttagttgcatcttcaatatgcctggagtcgtctgtccaaggcttgtccaggcttctgggtttctctcaagtttgtttttctcaggatattgtcctggcccagctactcctttacctgtgagaagatcttcaccattaggaagatctctagacccccagatctcagaatcaggcctatttgtgtaggcccatggaaatcactacttgtgaagtagagatgcctttttgtctaat

SEQ ID NO: 5289 - DNA, 609 bp, Homo sapiens
atgcggcaacccgccgttcggytggtgcgcctgggtcgggtgccgtacgccgagctactggggctgcaggaccgctggctgcggcggctgcaggccgagccaggcattgaggccccgtcggggactgaggcgggcgcgctcctgctctgcgagcccgyggggcccgtgtatacggccgggctgcgcggcggcctgacgcccgaggaaactgcgcggctacgggccttgggcgccgaggtgcgcgtcacaggccgcggtggcctggccaccttccacggcccgggccagctgctttgccacccgaaacaaaatttgaaaaccggtgatctaatccagttttctcatcgccctgagagggacaccaaagcccggagagtggagggagtccgctgtggaaggcacatcacatcccacggcctggctctcaactgctctaccgacctcacgtggtttgagcacatcgtgccctgtggactggttgggwcaggcgtcacttccttgagtaaggagctccagaggcacgtcaccgtggaagaagtaatgccacctttccttgtggcctttaaggagatctacaagtgcacactgatctcagaggacagccccaac

SEQ ID NO: 5290 - DNA, 2304 bp, Homo sapiens
agaataagcaaaaaaaygcartgagtaatgcacacaggtcttggccccatgtggggcattgtgggaaacctgttgttggcgtgtccagcctgcacrcatgccatttaattactttttgtgggaatgcatggggaaatccaggtgtgagcagaaaaactgcagcagaagagagctgggggggtcttttttcccaytggggatgttgcatgaactgggtgttgtgcacctgtgttttgactgcaactcacataaggtcaggtatgaaattttccatttgtggcataatgtcagcactcaaaaagtttaggattttggagcatttcagatttcagatttttatattacggatgctcagccaggacagatctttytcatacgctatgcaccgctgtatcaagcgcctatggcagggcctgcagaacacagcaggcactaaatactggttgttgaatgaaccgatgagtctggccccgcgcttttggtcctgggatcacatatcccccctccagcttttaacacgcacctgggagctgcggctcggggtgtgcccccgagtccccgcccctcaggccacgcccccaggcccacggagagggcggggccccgcggacgcaacggtgggcacgatgcggcaacccgccgttcggytggtgcgcctgggtcgggtgccgtacgccgagctactggggctgcaggaccgctggctgcggcggctgcaggccgagccaggcattgaggccccgtcggggactgaggcgggcgcgctcctgctctgcgagcccgyggggcccgtgtatacggccgggctgcgcggcggcctgacgcccgaggaaactgcgcggctacgggccttgggcgccgaggtgcgcgtcacaggccgcggtggcctggccaccttccacggcccgggccagctgctttgccacccggtactcgacctgcggcgtctcggcctgcgcttgcgcatgcacgtagcgtcgctggaggcgtgcgccgtgcgcctgtgcgagctccagggcctgcaggacgcccgcgcgcggcccccgccctacactggcgtctggctagacgatcgcaagatctgcgcgatcggagtccgctgtggaaggcacatcacatcccacggcctggctctcaactgctctaccgacctcacgtggtttgagcacatcgtgccctgtggactggttgggwcaggcgtcacttccttgagtaaggagctccagaggcacgtcaccgtggaagaagtaatgccacctttccttgtggcctttaaggagatctacaagtgcacactgatctcagaggacagccccaactgaagagtactcataacagccaggatgctcctgccttgggaagcatgaagtctgacttgagtcacctactgaaacccagattttagacctggcctgtcattcactgatcatgaaactaaggacataccatgagctctgagccactattttcatatgtatcctgttttatttatatcttycccacctacctcagagatactagatgtgacaatactgtgaaaagcaacacatgctatataaaacattagcactgctattgacagmagtgtctcagagaaattcagatgtcatagattgttatttctcgattgttgatgtcatagattgtcatttctcrattgttgcttcctcaatactgtgtctaactgagcaattctgggctctagttcctttgattttgtgggaatcaaatctctgaatggcccaggtgaaggtgatgtgatgtagtgctttttcattctcaagagacctgggttctttctgcaataaagggaaaagggaagaaccttctaagaataaaatgggatcttaccttcctgggtttgattccccaagtttgataatttagcagtttttagttgggttaccctgagctaggccaaagactggaggaaggataagaataatttctcacactgtacaaatgccaaagatagaagtgagtttttcttatatgagacctctaaatttgtaaggctgcgtattatctgttgctgtgtaacaaatcatcaaaacttagtgacttaacagtaaacattaattatctcgtttgtgggtcaggaatttggggraagcttagctgggtgtttctaggttagggtctcacacgaacttgcagttaagatgtcagctggaactgcacttattcaaaggcttggctgggctggaggatcagcgctccatatggtgcattcacttgcgtggttggttatggttgctgacaagaggcctcagttccttaccgtgtggacctccctatagggtt

SEQ ID NO: 5291 - DNA, 1133 bp, Homo sapiens
aatcgggacaagcgcgccgagaaatcctggatcttcccagggattccctctacgctccctcctcttcttcaataaccccaaagaggagaagaactgccccggagcgcagcagccaccctccgaccatgccccggtgaggggggcggacttcgagggcaacttgccgcggactgcctgggcttagccagcgagctacgcgctcccgggagcccggaattgcacggcgcagcccggcggggggctatcgtctatgtcttcttggggcgccagacgaatcggggtctcgtttttgctggaagagcccagtgttggtggcttcaggtggctgctgccgccgccgccgccgccgccgctgctagtgcggtttccgccgctggtgcgaagagaagagacacgcgagcggggagacctccaaggcagcgaggcatcggacatgtgtcagcacatctggggcgcacatccgtcgagcccgaggggagatttgccggaacaattcaaactgcgatattgatcttgggggtgactgtccctggccggctgtcgggtgggagtgcgagtgtgcactcgctcggaagtgtgtgcgagtgtgtatgtgtgtgtgccgtgtcgggctccccccttccccccgttttcccgtcgagtgatgcacttggaatgagaatcagaggatggraatagtctgggaggtgctttttcttcttcaagccaatttcatcgtctgcatatcagctcaacagaattcaccaaaaatccatgaaggctggtgggcatacaaggaggtggtccagggaagctttgttccagttccttctttctggggattggtgaactcagcttggaatctttgctctgtggggaaacggcagtcgccagtcaacatagagaccagtcacatgatcttcgacccctttctgacacctcttcgcatcaacacggggggcaggaaggtcagtgggaccatgtacaacactggaagacacgtatcccttcgcctggacaaggagcacttggtcaacatatctggagggcccatgacatacagccaccggctggaggagatccgactacactttgggagtgaggacagccaagggtcggagcacctcctcaatggacaggccttctctggggag

SEQ ID NO: 5292 - DNA, 2926 bp, Homo sapiens
aatcgggacaagcgcgccgagaaatcctggatcttcccagggattccctctacgctccctcctcttcttcaataaccccaaagaggagaagaactgccccggagcgcagcagccaccctccgaccatgccccggtgaggggggcggacttcgagggcaacttgccgcggactgcctgggcttagccagcgagctacgcgctcccgggagcccggaattgcacggcgcagcccggcggggggctatcgtctatgtcttcttggggcgccagacgaatcggggtctcgtttttgctggaagagcccagtgttggtggcttcaggtggctgctgccgccgccgccgccgccgccgctgctagtgcggtttccgccgctggtgcgaagagaagagacacgcgagcggggagacctccaaggcagcgaggcatcggacatgtgtcagcacatctggggcgcacatccgtcgagcccgaggggagatttgccggaacaattcaaactgcgatattgatcttgggggtgactgtccctggccggctgtcgggtgggagtgcgagtgtgcactcgctcggaagtgtgtgcgagtgtgtatgtgtgtgtgccgtgtcgggctccccccttccccccgttttcccgtcgagtgatgcacttggaatgagaatcagaggatggraatagtctgggaggtgctttttcttcttcaagccaatttcatcgtctgcatatcagctcaacagaattcaccaaaaatccatgaaggctggtgggcatacaaggaggtggtccagggaagctttgttccagttccttctttctggggattggtgaactcagcttggaatctttgctctgtggggaaacggcagtcgccagtcaacatagagaccagtcacatgatcttcgacccctttctgacacctcttcgcatcaacacggggggcaggaaggtcagtgggaccatgtacaacactggaagacacgtatcccttcgcctggacaaggagcacttggtcaacatatctggagggcccatgacatacagccaccggctggaggagatccgactacactttgggagtgaggacagccaagggtcggagcacctcctcaatggacaggccttctctggggaggtgcagctcatccactataaccatgagctatatacgaatgtcacagaagctgcaaagagtccaaatggattggtggtagtttctatatttataaaagtttctgattcatcaaacccatttcttaatcgaatgctcaacagagatacwatcacaagaataacatataaaaatgatgcatatttactacaggggcttaatatagaggaactatatccagagacctctagtttcatcacttaygatgggtcgatgactatcccaccctgctatgagacagcaagttggatcataatgaacaaacctgtctatataaccaggatgcagatgcattccttgcgcctgctcagccagaaccagccatctcagatctttctgagcatgagtgacaayttcaggcctgtccagccactcaacaaccgctgcatccgcaccaatatcaacttcagtttacaggggaaggactgtccaaacaaccgagcccagaagcttcagtatagagtaaatgaatggctcctcaagtagggaacaaagccmagaagaatcccacctcagtgaaatgctacaactgtgaattgacgtaacckagaatgtcccccttcttgcttctctctccttctttcccccaagcctcattcattcttgggattggccctttcttcatgaaaagtgtctgcaaaaccatggcagaggaatacatctctcacacatactcacaaacacacacacaagcacttgcacatacatacaaacacatgcaaacatacctacacacacacacwctcttacaacctccatcatgggaagtcaagtttcagaaacaaaagtctcattcataagaggtcttagaagaaaataaccagttaacctgatttcaattttgataccgttttcctgaactaataaatctacccaatgagacttttcagcytttgtacatacaaaattcttccaaaagagagaggagaaaatacagctctgatggcatcaaacggactttgcatcaagtaatttcagatagtgtcctaggatcctttgagggtgctggtagcaggtgagcaggacaaagttgaccaaggacacttatttctagattatgattcttctgtttactcaacaatttacaaagaaaaaaaggacagacattgaagagctacacattgtatatatatcaccacagactataaggaaatggaattatttccctctttgtcacatatctgtagtaggatttgccaagatcagaaatgatccatttgctgtttcttgttttccaaaggtcatacattgtgtttggttattgttaccagctcaataaatgtgtttaacgagttaatttcatttttctggctttggtctgttctccttccttacaggctaagccctggctccatgcaactgcattctttgatttcacttgttccttcatctacatgttttgttcatttgcagccagtttttactgagtttgtggcaatcaggaatgcatttgctaagcaagtatgactttaattccactccatggctcaatcattcacatgaggtgagcttcagcctgagatagcaggcgacagacttcttgcgtttcaaaactgccatgcccccctgtgatgctcccgtgaaggaatgcactttgccttgtaagttcctgggaaaggggtatgttttctctccaggtgcagccagatctcacaaagtacaaaacgaatgcctttcttttcttgtttataatggtcactcactgtgtttggttactgtcaagaaatcaataaatgtgtttaacaagttacccagta

SEQ ID NO: 5293 - DNA, 1207 bp, Homo sapiens
gatggggacaaaggctgggtcccgaagaagcgcagggtcagaaaagtgccccccaaagccgtccctgcacccgaaccctasgawggcctcgcgcaaccgcagggccgtcggcactggtttacgacctgggcggggcggcccggacactctatgcaaatcagcycggcggactccggaagcagcgctccctccgcttccggccgarcccrcgccccccagaccccgagagctcgcagctccggcccggcggcgatggcgcggagcgtgcgcgtgctggtggacatggacggcgtcctggccgacttcgaggccggcctcctgcggggcttccgccgccgcttccctgaggagccgcacgtgccgctggagcarcgccgcggcttcctggcccgcgagcagtaccgcgccctgcggcccgacctggcggataaagtggccagtgtgtacgaagccccgggctttttcctggacctggagcccatcccgggagccttggacgctgtgcgggagatraacgacctaccggacacgcaggtcttcatctgcaccagccccctgctgaagtaccaccactgtgtgggtgagaaggtgtggctgccccgcccctactccgcacgwggagctgcctaaatcctgattttaaaaagaaaccaccagaaacccagaagtaccgctgggtggagcagcacctggggccccagttcgtagaacgaattatcctgacaagggacaagacggtggtcttgggggacctgctcattgatgacaaggacacagttcgaggccaggaggagaccccaagctgggagcacatcttgttcacctgctgccacaatcggcacctggtcctgcccccgacaaggagacggctgctctcctggagtgacaactggagggagatcttagatagcaagcgcggagctgcgcagcgggaatgagcggggatgccgcgggcagcagctggagctaaaggaagggcaggcccacaggggccaccgcagagccgagtcggggcggcatcgtgctggtgcctctggccccgtggagtggagcaggcagayaccgttaagcgctgtgctaccgggccccaggcccagccacccggtacctcccgagaggctgtccctggaccctggctggcatggaaatacagtgggaaaaccagtcgggacctttaataaaagaccttggctttctagtcttctag

SEQ ID NO: 5294 - DNA, 1127 bp, Homo sapiens
gatggggacaaaggctgggtcccgaagaagcgcagggtcagaaaagtgccccccaaagccgtccctgcacccgaaccctasgawggcctcgcgcaaccgcagggccgtcggcactggtttacgacctgggcggggcggcccggacactctatgcaaatcagcycggcggactccggaagcagcgctccctccgcttccggccgarcccrcgccccccagaccccgagagctcgcagctccggcccggcggcgatggcgcggagcgtgcgcgtgctggtggacatggacggcgtcctggccgacttcgaggccggcctcctgcggggcttccgccgccgcttccctgaggagccgcacgtgccgctggagcarcgccgcggcttcctggcccgcgagcagtaccgcgccctgcggcccgacctggcggataaagtggccagtgtgtacgaagccccgggctttttcctggacctggagcccatcccgggagccttggacgctgtgcgggagatraacgacctaccggacacgcaggtcttcatctgcaccagccccctgctgaagtaccaccactgtgtgggtgagaagtaccgctgggtggagcagcacctggggccccagttcgtagaacgaattatcctgacaagggacaagacggtggtcttgggggacctgctcattgatgacaaggacacagttcgaggccaggaggagaccccaagctgggagcacatcttgttcacctgctgccacaatcggcacctggtcctgcccccgacaaggagacggctgctctcctggagtgacaactggagggagatcttagatagcaagcgcggagctgcgcagcgggaatgagcggggatgccgcgggcagcagctggagctaaaggaagggcaggcccacaggggccaccgcagagccgagtcggggcggcatcgtgctggtgcctctggccccgtggagtggagcaggcagayaccgttaagcgctgtgctaccgggccccaggcccagccacccggtacctcccgagaggctgtccctggaccctggctggcatggaaatacagtgggaaaaccagtcgggacctttaataaaagaccttggctttctagtcttctag

SEQ ID NO: 5295 - DNA, 971 bp, Homo sapiens
gatggggacaaaggctgggtcccgaagaagcgcagggtcagaaaagtgccccccaaagccgtccctgcacccgaaccctasgawggcctcgcgcaaccgcagggccgtcggcactggtttacgacctgggcggggcggcccggacactctatgcaaatcagcycggcggactccggaagcagcgctccctccgcttccggccgarcccrcgccccccagaccccgagagctcgcagctccggcccggcggcgatggcgcggagcgtgcgcgtgctggtggacatggacggcgtcctggccgacttcgaggccggcctcctgcggggcttccgccgccgcttccctgaggagccgcacgtgccgctggagcarcgccgcggcttcctggcccgcgagcagtaccgcgccctgcggcccgacctggcggataaagtggccagtgtgtacgaagccccgggctttttcctggacctggagcccatcccgggagccttggacgctgtgcgggagatraacgacctaccggaccccctgctgaagtaccaccactgtgtgggtgagaaggtgtggctgccccgcccctactccgcacgwggagctgcctaaatcctgattttaaaaagaaaccaccagaaacccagaagtaccgctgggtggagcagcacctggggccccagttcgtagaacgaattatcctgacaagggacaagacggtggtcttgggggacctgctcattgatgacaaggacacagttcgaggccaggaggagaccccaagctgggagcacatcttgttcacctgctgccacaatcggcacctggtcctgcccccgacaaggagacggctgctctcctggagtgacaactggagggagatcttagatagggccaccgcagagccgagtcggggcggcatcgtgctggtgcctctggccccgtggagtggagcaggcagayaccgttaagcgctg

SEQ ID NO: 5296 - DNA, 1461 bp, Homo sapiens
ggcggctgatggggacaaaggctgggtcccgaagaagcgcagggtcagaaaagtgccccccaaagccgtccctgcacccgaaccctasgawggcctcgcgcaaccgcagggccgtcggcactggtttacgacctgggcggggcggcccggacactctatgcaaatcagcycggcggactccggaagcagcgctccctccgcttccggccgarcccrcgccccccagaccccgagagctcgcagctccggcccggcggcgatggcgcggagcgtgcgcgtgctggtggacatggacggcgtcctggccgacttcgaggccggcctcctgcggggcttccgccgccgcttccctgaggagccgcacgtgccgctggagcarcgccgcggcttcctggcccgcgagcagtaccgcgccctgcggcccgacctggcggtagggggcgcagggtccccacccgggcagggcccgctcgctccgttccgggggtctcccccttctctgtgaagggcgcagagctctcaccctggaacccgcgggcagcgcaccctggggaggagcctttgggcgcgtgcccctgaccgacgccccctccgcccctctgagctcgggcccggagcccccaggagcctccctgcgggtcctcgcgggaacgggaagccgggacccagaactcttgtctttcaggataaagtggccagtgtgtacgaagccccgggctttttcctggacctggagcccatcccgggagccttggacgctgtgcgggagatraacgacctaccggagtaaggagagaggggggcgggcggagtcctgggcgggctcctggctcccggcggtaacsgcgtccttctccgcagcacgcaggtcttcatctgcaccagccccctgctgaagtaccaccactgtgtgggtgagaagtaccgctgggtggagcagcacctggggccccagttcgtagaacgaattatcctgacaagggacaagacggtggtcttgggggacctgctcattgatgacaaggacacagttcgaggccaggaggagaccccaagctgggagcacatcttgttcacctgctgccacaatcggcacctggtcctgcccccgacaaggagacggctgctctcctggagtgacaactggagggagatcttagatagcaagcgcggagctgcgcagcgggaatgagcggggatgccgcgggcagcagctggagctaaaggaagggcaggcccacaggggccaccgcagagccgagtcggggcggcatcgtgctggtgcctctggccccgtggagtggagcaggcagayaccgttaagcgctgtgctaccgggccccaggcccagccacccggtacctcccgagaggctgtccctggaccctggctggcatggaaatacagtgggaaaaccagtcgggacctttaataaaagaccttggctttctagtcttctag

SEQ ID NO: 5297 - DNA, 4148 bp, Homo sapiens
ccgcgcgcggcggcccgaggcggcggcggggacgcggggacgcgaggacgcggctttgtgcaggcgggtcgcggggcgcccatggcggagtgcggccgggggggcgccgccggcggggccctgcccacctccccgggcccggccctcggcgccaagggcgccctgaaagccggagtgggggaaggcggtggcgggggaggtcgcctcggccacgggcgggcgcgctatgacagcggcggggtttccaacggagactgcagcctcggcgtgtccggggacgaagcccgggctagccctaccaggggaccccgcggcgttgcgctcgccccgacccccagcgcggtcgtctgtaccctcccccgggagagcaagccgggcggcctgccccgccggagcagcatcatcaaggatggtacaaaacagaagagggaacggaaaaagacagtctcattcagcagcatgccaacagagaagaagatcagcagtgcaagtgattgtattaattcaatggttgagggttcagaactcaaaaaggttcgctccaactctagaatttatcataggtactttytactggatgctgacatgcagagcctaaggtgggagccatctaagaaggattctgagaaagccaagattgacattaaatccatcaaggaagtgagaacaggaaaaaacacagacatattccgmagcaatggcatttctgaccagatatctgaagattgtgcgttttccgtcatatatggagagaattatgagtcactggatttggttgccaactccgcagatgttgcaaacatctgggttacaggactgcggtacctaatttcttatggaaaacatacacttgatatgttagaaagtagccaagataacatgaggacttcttgggtttcacaaatgtttagtgaaattgatgtagataaccttggacatataactctgtgtaatgctgtgcaatgtatcagaaacctcaatcctggtttaaaaacgagcaaaattgagcttaagttcaaagaattgcataaatcaaaggacaaagctggtaccgaggtcacaaaggaagaatttattgaggtttttcatgagctttgtactagacctgaaatttatttccttttagttcagttttcaagcaataaagaattccttgataccaaggaccttatgatgtttcttgaggcagaacagggtgtggcacatataaatgaggaaataagccttgaaattattcacaaatatgaaccatccaaagagggtcaggaaaagggctggctctccatagacgggttcactaattaccttatgtcacctgactgttatatattcgatccagaacataagaaggtctgtcaggatatgaagcaacctctgtctcattactttataaactcatctcataatacatacttaatagaggatcagttccgaggtccctccgacatcacaggatatattcgagctcttaaaatgggttgccggagtgttgaattagatgtatgggatgggccggacaatgaacctgtaatttacacaggccacaccatgacctctcagatagttttccgcagtgtcattgatattattaacaagtatgcattctttgcttcagagtatcctcttatcttgtgtttagaaaaccactgttccattaaacaacagaaggtaatggttcagcacatgaagaaacttttaggagacaagctctatacaacatcacccaatgttgaggaatcttatctaccatccccagatgtcctgaaagggaaaatactaattaaagcaaagaagctgtcctcaaattgctctggggtagaaggagatgttactgacgaagatgaaggagcagaaatgtctcagaggatgggaaaagagaacatggagcaacccaataatgtgcctgtgaagcgatttcagctttgtaaagaactstctgaactggtcagcatctgcaaatcagttcagttcaaagaatttcaggtgtcgtttcaggttcagaagtactgggaagtctgttcctttaatgaagtgcttgccagcaagtacgccaatgaaaatccaggggactttgtaaattacaacaaacgttttcttgctagggtttttcccagtccartgagaattgattccagtaacatgaatcctcaagatttttggaaatgtggttgccaaattgtagccatgaactttcagacaccaggactgatgatggacctgaatattggctggtttaggcagaayggaaactgtggctatgtcctccggccagccatcatgagggaggaggtctccttcttcagcgccaatacaaaagactctgtcccaggggtctcacctcaacttcttcacattaaaatcatcagtgggcagaactttcccaagcccaaaggatcaggtgccaaaggtgatgtggtagatccttatgtctatgttgaaatccatggaatccctgctgattgtgcagaacaaaggacaaaaacagtgcaccagaatggagacgctcccatttttgatgaaagctttgaatttcaaatcaacctgcctgaactggccatggtgcgctttgtagtgctggatgatgactacattggggatgaattcatcggccagtacacaattccctttgaatgtttacagacgggctaccgccatgtccccctgcagtccttaactggagaggtccttgcacatgcttctttatttgtccacgtggctattactaaccgaagaggaggaggraagcctcataaaaggggcctttctgtgagaaaagggaagaaatccagggaatatgcatctttgagaacactgtggattaaaaccgtggatgaggtattcaagaatgcccagccycctatacgggatgccacagatctgagagaaaacatgcagaatgcggtggtgtcattcaaggagctgtgtggcctctcctctgtggccaatctcatgcagtgcatgttggcrgtgtctycccgctttctggggcccgataacacacccctagtggtcctaaatctcagcgagcagtaccccacaatggagctgcagggaattgtgccggaggttctgaagaagatcgtaacaacttatgacatgatgattcagtccctcaaggcgttgattgaaaatgcagatgctgtatatgaaaagatcgtacattgtcagaaggcagccatggaattccatgaacacttgcacagcataggcaccaaggaaggtttgaaggaaagaaaactacaaaaagcagtggagagctttacctggaatattaccatcttaaagggacaagcagatcttttgaaatatgctaagaatgagacattggagaacctgaaacaaatccattttgctgctgtttcatgtggactgaataaaccaggcaccgaaaatgctgatgtccagaagccacgccggagcttggaagtcataccygaaaaagcaaacratgaaactggagaakgaggaaacttacaataaaycattatggagtttataactctaggaccaattgtagtcagatgggacatttgctttgcactcactaatgagaataatattygggattttaaagcacaactggaatagctaattacagtctattaaaactgtgaatgtatgtagcaatcctgcgtgtgaaggcaaataaactctttaacaggcaattatattgctggccaaaatatgctatatttgtatacaaagacattctaactcagttccagtatgaagaaagattattcactctagctccactgagaaacattttcctaagtgaaaacaatttcttaagatggaaatggattggattgtcaaattattatttattggagaaaaaaacctgatctacacatttttacttatatggggttgccagagtctctgggttctagatgattttggtggcatgcttgctgagccataattactaaagagaatgtaagtggacgggttccctgaatccccrgggtccttggagagccatcgaggagaatgtgcaattggactgaagctccctggctgaagatacatgccgagtcagcacatgggtagagatgatgtaaaagcagccaatctggaaacaatacattgtaaatagtttttcattgtatgaagtagtgttcacattaaaaagatgttttatgata

SEQ ID NO: 5298 - DNA, 3126 bp, Homo sapiens
ccgcgcgcggcggcccgaggcggcggcggggacgcggggacgcgaggacgcggctttgtgcaggcgggtcgcggggcgcccatggcggagtgcggccgggggggcgccgccggcggggccctgcccacctccccgggcccggccctcggcgccaagggcgccctgaaagccggagtgggggaaggcggtggcgggggaggtcgcctcggccacgggcgggcgcgctatgacagcggcggggtttccaacggagactgcagcctcggcgtgtccggggacgaagcccgggctagccctaccaggggaccccgcggcgttgcgctcgccccgacccccagcgcggtcgtctgtaccctcccccgggagagcaagccgggcggcctgccccgccggagcagcatcatcaaggatggtacaaaacagaagagggaacggaaaaagacagtctcattcagcagcatgccaacagagaagaagatcagcagtgcaagtgattgtattaattcaatggttgagggttcagaactcaaaaaggttcgctccaactctagaatttatcataggtactttytactggatgctgacatgcagagcctaaggtgggagccatctaagaaggattctgagaaagccaagattgacattaaatccatcaaggaagtgagaacaggaaaaaacacagacatattccgmagcaatggcatttctgaccagatatctgaagattgtgcgttttccgtcatatatggagagaattatgagtcactggatttggttgccaactccgcagatgttgcaaacatctgggttacaggactgcggtacctaatttcttatggaaaacatacacttgatatgttagaaagtagccaagataacatgaggacttcttgggtttcacaaatgtttagtgaaattgatgtagataaccttggacatataactctgtgtaatgctgtgcaatgtatcagaaacctcaatcctggtttaaaaacgagcaaaattgagcttaagttcaaagaattgcataaatcaaaggacaaagctggtaccgaggtcacaaaggaagaatttattgaggtttttcatgagctttgtactagacctgaaatttatttccttttagttcagttttcaagcaataaagaattccttgataccaaggaccttatgatgtttcttgaggcagaacagggtgtggcacatataaatgaggaaataagccttgaaattattcacaaatatgaaccatccaaagagggtcaggaaaagggctggctctccatagacgggttcactaattaccttatgtcacctgactgttatatattcgatccagaacataagaaggtctgtcaggatatgaagcaacctctgtctcattactttataaactcatctcataatacatacttaatagaggatcagttccgaggtccctccgacatcacaggatatattcgagctcttaaaatgggttgccggagtgttgaattagatgtatgggatgggccggacaatgaacctgtaatttacacaggccacaccatgacctctcagatagttttccgcagtgtcattgatattattaacaagtatgcattctttgcttcagagtatcctcttatcttgtgtttagaaaaccactgttccattaaacaacagaaggtaatggttcagcacatgaagaaacttttaggagacaagctctatacaacatcacccaatgttgaggaatcttatctaccatccccagatgtcctgaaagggaaaatactaattaaagcaaagaagctgtcctcaaattgctctggggtagaaggagatgttactgacgaagatgaaggagcagaaatgtctcagaggatgggaaaagagaacatggagcaacccaataatgtgcctgtgaagcgatttcagctttgtaaagaactstctgaactggtcagcatctgcaaatcagttcagttcaaagaatttcaggtgtcgtttcaggttcagaagtactgggaagtctgttcctttaatgaagtgcttgccagcaagtacgccaatgaaaatccaggggactttgtaaattacaacaaacgttttcttgctagggtttttcccagtccartgagaattgattccagtaacatgaatcctcaagatttttggaaatgtggttgccaaattgtagccatgaactttcagacaccaggactgatgatggacctgaatattggctggtttaggcagaayggaaactgtggctatgtcctccggccagccatcatgagggaggaggtctccttcttcagcgccaatacaaaagactctgtcccaggggtctcacctcaacttcttcacattaaaatcatcagtgggcagaactttcccaagcccaaaggatcaggtgccaaaggtgatgtggtagatccttatgtctatgttgaaatccatggaatccctgctgattgtgcagaacaaaggacaaaaacagtgcaccagaatggagacgctcccatttttgatgaaagctttgaatttcaaatcaacctgcctgaactggccatggtgcgctttgtagtgctggatgatgactacattggggatgaattcatcggccagtacacaattccctttgaatgtttacagacgggctaccgccatgtccccctgcagtccttaactggagaggtccttgcacatgcttctttatttgtccacgtggctattactaaccgaagaggaggaggraagcctcataaaaggggcctttctgtgagaaaagggaagaaatccagggaatatgcatctttgagaacactgtggattaaaaccgtggatgaggtattcaagaatgcccagccycctatacgggatgccacagatctgagagaaaacatgcagaatgcggtggtgtcattcaaggagctgtgtggcctctcctctgtggccaatctcatgcagtgcatgttggcrgtgtctycccgctttctggggcccgataacacacccctagtggtcctaaatctcagcgagcagtaccccacaatggagctgcagggaattgtgccggaggttctgaagaagatcgtaacaacttatgacatggtgagttgtcctttgtccgtttacata

SEQ ID NO: 5299 - DNA, 3519 bp, Homo sapiens
caccgcgagcggaaatgcggagagcatcggggctccgcatgtggggcacaatgaaacaagagcagccccggccagaggtccagtaaagcggaaagacggtcccgcccgcacacccctccggaaaactgaagcgtctcctctgacccccaagctctcggcaccgacgagctccagatcccgcgttcgcatcccggcgctttgcgcgcagagctaagccttcggacccgtggactgcagcccccgcgcgtcgcggtaaagcgggtcgcgtctccagcccccgaggcgcagcgacggtgggagccggctcggcgttgggggcgggggcggggccggcgaagggggagggctgcgcggcggaggggaggagccgcggcgacagacggcggcgcgcaccaaccgggcgccggctggcaggagccgcgcagaggctggtccgagcgcgttgcgggcgcccggcgtaaggggagtcgggtagcagcatcctcctgggcgccgctttcgcgcggcggcggcggctgcggcggggtctttctttgcttaaatacctcgttggccagaagcgctggtaccgggggcgggttgggtcgggtcgggcagtgctgcacacctgggtttccttgcctagagctgtgtgttcggggtcctttggtccagtcggaggctgcggagcggcgggggttgcctgcgctgtccgcccgggcatcctcccggtgatggaagcagccgccgccgccgctgcggggtcgcgctgtgccccatccaccgctgccagagaggtgggaaaattcgccgcacggaggccgaaagcgagaggggctgcgccgctatgccgggagctgagtcccatataagccgcccccagccatcgcccccagccggcttcgttcccctgagcgagacaggaagctgcggtcccgagaaagcggaggagacgtcgctggagccgggaggcsccgggttcggcggagcgcggagyggggctctgggccgcgtgaaagtttttcttcccgagccgcagggckcccgctgcccggaaactgcccagggataagtcggccgactccccagacccctcgaaggtgcgggkacccccagcggaagcgagagggagcgaaatcgagsaacgagtgacagccggacagtccgccgggcrgtgatccggggccgctcccgggcgcgccctcggctccaggtcctacccggagccgctgccatgggagagccagccttgggcgctggggaccagccgccgygcccgcctcggagtcgcggcccgagtcccggcgccagcagccagcccgctgcgtccccttcccgggctgcagggctgcctccgccgcgccgccggcccggattgtgcctgtgatgagccgcagcccgcagcgagctctgcccccgggcgcgctccctcggctgctccaggctgcgcctgcagccgcgccgcgtgccctgctcccgcagtggccccggcgcccaggacgccgctggcccgcgtcccctctcggaatgaaggtgttccgtaggaaggcgctggtgttgtgcgcgggctatgcactgctgctggtgctcactatgctcaacctcctggactacaagtggcacaaggagccgctgcagcagtgcaaccccgatgggccgctgggtgccgcagcgggggcagccggaggcagctgggggcgcccagggccgcctccggccgggccgccccgtgctcatgcccgtttggacctccgcactccttaccgccctcccgctgccgccgtcggggcggctcctgcagccgcggcagggatggcgggggttgcggcccctccaggcaatggcactcggggcaccgggggcgtcggggacaagcggcagctggtgtacgtgttcaccacgtggcgctctggctcgtcgttcttcggcgagctattcaaccagaatcccgaggtgttctttctctacgagccagtgtggcatgtatggcaaaaactgtatccgggggacgccgtttccctgcagggggcagcgcgggacatgctgagcgctctttaccgctgcgacctctctgtcttccagttgtatagccccgcgggcagcggggggcgcaacctcaccacgctgggcatcttcggcgcagccaccaacaaggtggtgtgctcgtcaccactctgccccgcctaccgcaaggaggtcgtggggttggtggacgaccgcgtgtgcaagaagtgcccgccacagcgcctggcgcgtttcgaggaggagtgccgcaagtaccgcacactagtcataaagggtgtgcgcgtcttcgacgtggcggtcttggcgccactgctgcgagacccggccctggacctcaaggtcatccacttggtgcgtgatccccgcgcggtggcgagttcacggatccgctcgcgccacggcctcatccgtgagagcctacaggtggtgcgcagccgagacccgcgagctcaccgcatgcccttcttggaggccgcgggccacaagcttggcgccaagaaggagggcgtgggsggccccgcagactaccacgctctgggcgctatggaggtcatctgcaatagtatggctaagacgctgcagacagccctgcagccccctgactggctgcagggccactacctggtggtgcggtacgaggacctggtgggagaccccgtcaagacactacggagagtgtacgattttgtgggactgttggtgagccccgaaatggagcagtttgccctgaacatgaccagtggctcgggctcmtcctccaagcctttcgtggtatctgcacgcaatgccacgcaggccgccaatgcctggcggaccgccctcaccttccagcagatcaaacaggtggaggagttttgctaccagcccatggccgtcctgggctatgagcgggtcaacagccctgaggaggtcaaagacctcagcaagaccctgcttcggaagccccgtctctaaaaggggttcccaggagacctgattccctgtggtgatacctataaagaggatcgtagtgtgtttaaataaacacagtccagactcaaacggaggaagcccacatattctattatagatatataaataatcacacacacacttgctgtcaatgttttgagtcagtgcatttcaaggaacagccacaaaatacacacccctaagaaaaggcaagacttgaacgttctgaccaggtgcccctcttcttmtttgccttctcttgtcctctttctcctatttcttaccctgtcctccacctgccttccattttgaagtgggatgttaatgaaatcaagttccagtaacccaaatcttgtttacaaaatattcgtggtatctgtgaacatgttaagagtaatttggatgtgggggtgggggtggagaaaggggaagtggtccagaaacaaaaagccccattgggcatgataagccgaggaggcattcttctaaagyagacttttgtgtaaaaagcaaaggttacatgtgagtattaataaagaagataataaataatattctttttaa

SEQ ID NO: 5300 - DNA, 3278 bp, Homo sapiens
caccgcgagcggaaatgcggagagcatcggggctccgcatgtggggcacaatgaaacaagagcagccccggccagaggtccagtaaagcggaaagacggtcccgcccgcacacccctccggaaaactgaagcgtctcctctgacccccaagctctcggcaccgacgagctccagatcccgcgttcgcatcccggcgctttgcgcgcagagctaagccttcggacccgtggactgcagcccccgcgcgtcgcggtaaagcgggtcgcgtctccagcccccgaggcgcagcgacggtgggagccggctcggcgttgggggcgggggcggggccggcgaagggggagggctgcgcggcggaggggaggagccgcggcgacagacggcggcgcgcaccaaccgggcgccggctggcaggagccgcgcagaggctggtccgagcgcgttgcgggcgcccggcgtaaggggagtcgggtagcagcatcctcctgggcgccgtgcggggtcgcgctgtgccccatccaccgctgccagagaggtgggaaaattcgccgcacggaggccgaaagcgagaggggctgcgccgctatgccgggagctgagtcccatataagccgcccccagccatcgcccccagccggcttcgttcccctgagcgagacaggaagctgcggtcccgagaaagcggaggagacgtcgctggagccgggaggcsccgggttcggcggagcgcggagyggggctctgggccgcgtgaaagtttttcttcccgagccgcagggckcccgctgcccggaaactgcccagggataagtcggccgactccccagacccctcgaaggtgcgggkacccccagcggaagcgagagggagcgaaatcgagsaacgagtgacagccggacagtccgccgggcrgtgatccggggccgctcccgggcgcgccctcggctccaggtcctacccggagccgctgccatgggagagccagccttgggcgctggggaccagccgccgygcccgcctcggagtcgcggcccgagtcccggcgccagcagccagcccgctgcgtccccttcccgggctgcagggctgcctccgccgcgccgccggcccggattgtgcctgtgatgagccgcagcccgcagcgagctctgcccccgggcgcgctccctcggctgctccaggctgcgcctgcagccgcgccgcgtgccctgctcccgcagtggccccggcgcccaggacgccgctggcccgcgtcccctctcggaatgaaggtgttccgtaggaaggcgctggtgttgtgcgcgggctatgcactgctgctggtgctcactatgctcaacctcctggactacaagtggcacaaggagccgctgcagcagtgcaaccccgatgggccgctgggtgccgcagcgggggcagccggaggcagctgggggcgcccagggccgcctccggccgggccgccccgtgctcatgcccgtttggacctccgcactccttaccgccctcccgctgccgccgtcggggcggctcctgcagccgcggcagggatggcgggggttgcggcccctccaggcaatggcactcggggcaccgggggcgtcggggacaagcggcagctggtgtacgtgttcaccacgtggcgctctggctcgtcgttcttcggcgagctattcaaccagaatcccgaggtgttctttctctacgagccagtgtggcatgtatggcaaaaactgtatccgggggacgccgtttccctgcagggggcagcgcgggacatgctgagcgctctttaccgctgcgacctctctgtcttccagttgtatagccccgcgggcagcggggggcgcaacctcaccacgctgggcatcttcggcgcagccaccaacaaggtggtgtgctcgtcaccactctgccccgcctaccgcaaggaggtcgtggggttggtggacgaccgcgtgtgcaagaagtgcccgccacagcgcctggcgcgtttcgaggaggagtgccgcaagtaccgcacactagtcataaagggtgtgcgcgtcttcgacgtggcggtcttggcgccactgctgcgagacccggccctggacctcaaggtcatccacttggtgcgtgatccccgcgcggtggcgagttcacggatccgctcgcgccacggcctcatccgtgagagcctacaggtggtgcgcagccgagacccgcgagctcaccgcatgcccttcttggaggccgcgggccacaagcttggcgccaagaaggagggcgtgggsggccccgcagactaccacgctctgggcgctatggaggtcatctgcaatagtatggctaagacgctgcagacagccctgcagccccctgactggctgcagggccactacctggtggtgcggtacgaggacctggtgggagaccccgtcaagacactacggagagtgtacgattttgtgggactgttggtgagccccgaaatggagcagtttgccctgaacatgaccagtggctcgggctcmtcctccaagcctttcgtggtatctgcacgcaatgccacgcaggccgccaatgcctggcggaccgccctcaccttccagcagatcaaacaggtggaggagttttgctaccagcccatggccgtcctgggctatgagcgggtcaacagccctgaggaggtcaaagacctcagcaagaccctgcttcggaagccccgtctctaaaaggggttcccaggagacctgattccctgtggtgatacctataaagaggatcgtagtgtgtttaaataaacacagtccagactcaaacggaggaagcccacatattctattatagatatataaataatcacacacacacttgctgtcaatgttttgagtcagtgcatttcaaggaacagccacaaaatacacacccctaagaaaaggcaagacttgaacgttctgaccaggtgcccctcttcttmtttgccttctcttgtcctctttctcctatttcttaccctgtcctccacctgccttccattttgaagtgggatgttaatgaaatcaagttccagtaacccaaatcttgtttacaaaatattcgtggtatctgtgaacatgttaagagtaatttggatgtgggggtgggggtggagaaaggggaagtggtccagaaacaaaaagccccattgggcatgataagccgaggaggcattcttctaaagyagacttttgtgtaaaaagcaaaggttacatgtgagtattaataaagaagataataaataatattctttttaa

SEQ ID NO: 5301 - DNA, 3368 bp, Homo sapiens
ctctcggcaccgacgagctccagatcccgcgttcgcatcccggcgctttgcgcgcagagctaagccttcggacccgtggactgcagcccccgcgcgtcgcggtaaagcgggtcgcgtctccagcccccgaggcgcagcgacggtgggagccggctcggcgttgggggcgggggcggggccggcgaagggggagggctgcgcggcggaggggaggagccgcggcgacagacggcggcgcgcaccaaccgggcgccggctggcaggagccgcgcagaggctggtccgagcgcgttgcgggcgcccggcgtaaggggagtcgggtagcagcatcctcctgggcgccgctttcgcgcggcggcggcggctgcggcggggtctttctttgcttaaatacctcgttggccagaagcgctggtaccgggggcgggttgggtcgggtcgggcagtgctgcacacctgggtttccttgcctagagctgtgtgttcggggtcctttggtccagtcggaggctgcggagcggcgggggttgcctgcgctgtccgcccgggcatcctcccggtgatggaagcagccgccgccgccgctgcggggtcgcgctgtgccccatccaccgctgccagagaggtgggaaaattcgccgcacggaggccgaaagcgagaggggctgcgccgctatgccgggagctgagtcccatataagccgcccccagccatcgcccccagccggcttcgttcccctgagcgagacaggaagctgcggtcccgagaaagcggaggagacgtcgctggagccgggaggcsccgggttcggcggagcgcggagyggggctctgggccgcgtgaaagtttttcttcccgagccgcagggckcccgctgcccggaaactgcccagggataagtcggccgactccccagacccctcgaaggtgcgggkacccccagcggaagcgagagggagcgaaatcgagsaacgagtgacagccggacagtccgccgggcrgtgatccggggccgctcccgggcgcgccctcggctccaggtcctacccggagccgctgccatgggagagccagccttgggcgctggggaccagccgccgygcccgcctcggagtcgcggcccgagtcccggcgccagcagccagcccgctgcgtccccttcccgggctgcagggctgcctccgccgcgccgccggcccggattgtgcctgtgatgagccgcagcccgcagcgagctctgcccccgggcgcgctccctcggctgctccaggctgcgcctgcagccgcgccgcgtgccctgctcccgcagtggccccggcgcccaggacgccgctggcccgcgtcccctctcggaatgaaggtgttccgtaggaaggcgctggtgttgtgcgcgggctatgcactgctgctggtgctcactatgctcaacctcctggactacaagtggcacaaggagccgctgcagcagtgcaaccccgatgggccgctgggtgccgcagcgggggcagccggaggcagctgggggcgcccagggccgcctccggccgggccgccccgtgctcatgcccgtttggacctccgcactccttaccgccctcccgctgccgccgtcggggcggctcctgcagccgcggcagggatggcgggggttgcggcccctccaggcaatggcactcggggcaccgggggcgtcggggacaagcggcagctggtgtacgtgttcaccacgtggcgctctggctcgtcgttcttcggcgagctattcaaccagaatcccgaggtgttctttctctacgagccagtgtggcatgtatggcaaaaactgtatccgggggacgccgtttccctgcagggggcagcgcgggacatgctgagcgctctttaccgctgcgacctctctgtcttccagttgtatagccccgcgggcagcggggggcgcaacctcaccacgctgggcatcttcggcgcagccaccaacaaggtggtgtgctcgtcaccactctgccccgcctaccgcaaggaggtcgtggggttggtggacgaccgcgtgtgcaagaagtgcccgccacagcgcctggcgcgtttcgaggaggagtgccgcaagtaccgcacactagtcataaagggtgtgcgcgtcttcgacgtggcggtcttggcgccactgctgcgagacccggccctggacctcaaggtcatccacttggtgcgtgatccccgcgcggtggcgagttcacggatccgctcgcgccacggcctcatccgtgagagcctacaggtggtgcgcagccgagacccgcgagctcaccgcatgcccttcttggaggccgcgggccacaagcttggcgccaagaaggagggcgtgggsggccccgcagactaccacgctctgggcgctatggaggtcatctgcaatagtatggctaagacgctgcagacagccctgcagccccctgactggctgcagggccactacctggtggtgcggtacgaggacctggtgggagaccccgtcaagacactacggagagtgtacgattttgtgggactgttggtgagccccgaaatggagcagtttgccctgaacatgaccagtggctcgggctcmtcctccaagcctttcgtggtatctgcacgcaatgccacgcaggccgccaatgcctggcggaccgccctcaccttccagcagatcaaacaggtggaggagttttgctaccagcccatggccgtcctgggctatgagcgggtcaacagccctgaggaggtcaaagacctcagcaagaccctgcttcggaagccccgtctctaaaaggggttcccaggagacctgattccctgtggtgatacctataaagaggatcgtagtgtgtttaaataaacacagtccagactcaaacggaggaagcccacatattctattatagatatataaataatcacacacacacttgctgtcaatgttttgagtcagtgcatttcaaggaacagccacaaaatacacacccctaagaaaaggcaagacttgaacgttctgaccaggtgcccctcttcttmtttgccttctcttgtcctctttctcctatttcttaccctgtcctccacctgccttccattttgaagtgggatgttaatgaaatcaagttccagtaacccaaatcttgtttacaaaatattcgtggtatctgtgaacatgttaagagtaatttggatgtgggggtgggggtggagaaaggggaagtggtccagaaacaaaaagccccattgggcatgataagccgaggaggcattcttctaaagyagacttttgtgtaaaaagcaaaggttacatgtgagtattaataaagaagataataaataatattctttttaa

SEQ ID NO: 5302 - DNA, 4931 bp, Homo sapiens
aggtgaatcaaaggagagtcccagaaaacctgtgactgttgaagaaaattcatctgtgaatttttatattcaaggagtcagtatttatattcatcttttaaactgggaagatttatattttactttaaaacttcttgataataatttacaatgaatggacacagtgatgaagaaagtgttagaaacagtagtggagaatcaagccagtcggatgatgattctgggtcagcttcaggctctggatctggttcgagttctggaagcagtagtgatggaagcagtagccagtcaggtagcagtgactctgactccggatctgaatcaggcagtcagtcagagtctgagtcagacacttcccgagaaaacaaagttcaagcaaaaccaccgaaagttgatggagctgagttttggaaatctagtcctagtattctggccrttcagagatctgcaatcctcaagaagcagcaacagcagcagcagcaacaacaacatcaagcctcatctaatagcggatcagaagaggattcctctagcagtgaagattccgatgactcatcaagtgaggtcaaaaggaaaaagcataaagatgaagattggcaaatgtctgggtcaggatctccatctcagtctggttcagattcagaatctgaagaagagagagagaaaagcagttgtgatgaaacagaatctgattatgagccaaaaaacaaagtcaaaagcagaaaacctcaaaatagatctaagtcaaaaaatggaaagaagattcttggacaaaaaaagagacagattgattcatctgaggaggatgatgatgaagaagattatgataatgataaaagaagttctcgtcgccaagcaactgttaatgttagctataaggaggatgaagaaatgaaaacagattctgatgacctactggaagtctgtggagaggatgttcctcaacctgaggaagaggaatttgaaaccatagaaagatttatggattgtcggattgggagaaaaggagctactggtgctactacaaccatctatgcagttgaagcagatggtgacccaaatgcaggctttgaaaaaaacaaagaaccaggagagattcagtatttaattaaatggaaaggatggtcccatatccacaacacttgggagacagaagaaaccctcaagcagcagaatgttagaggaatgaaaaaattggataattataagaaaaaagatcaggaaacaaaaagatggttgaaaaatgcctctccagaagatgtggaatattataattgccagcaagaacttacagatgatctacataaacagtatcaaatagtggaacgtataattgctcattccaatcaaaagtcagcagctggttatcctgattattactgcaaatggcagggccttccatactcagagtgcagctgggaagatggagctctcatttccaaaaagtttcaagcatgcattgatgagtattttagcaggaaccaatcaaaaaccactccttttaaagattgcaaagtattaaaacaaaggccaaggtttgtagccctgaagaagcagccatcctatattggaggacatgagggcttagaattaagagattatcaactgaatggtttaaattggcttgctcattcttggtgcaaaggaaatagttgcatactcgctgatgaaatgggccttggaaaaacaatacagacgatctcatttctgaattatttgtttcatgaacatcaattatatggaccttttttattggtagtaccgctctccactcttacttcctggcaaagggaaattcagacttgggcttctcaaatgaatgctgtggtttatttaggtgacattaacagcagaaacatgataagaactcatgaatggacgcatcatcagaccaaacggttaaaatttaatatattgttaacaacttatgaaattttattaaaagataaggcattccttggaggtctaaattgggcatttataggtgttgatgaagcacaccgattaaagaatgatgactcccttctgtataaaactttaatagattttaaatccaatcatcgtctccttatcactggaactcctctacagaattccctcaaagagctctggtctttgctacatttcattatgccagaaaagttttcttcctgggaagattttgaagaagaacatggcaaagggagagaatatggttatgcaagccttcacaaggagcttgagccatttctgttacgccgagttaagaaagatgtggaaaaatctcttcctgccaaggttgagcagattttaagaatggaaatgagtgctttacagaaacaatattacaaatggattttaactaggaattacaaagccctcagcaaaggttccaagggcagtacctcaggctttttgaacattatgatggagctaaagaaatgttgtaaccattgctacctcattaaaccaccagataataatgaattctataataaacaggaggccttacaacacttaattcgtagtagcggaaaattgattcttcttgacaagctattaattcgcctaagagaacgaggcaatcgagttcttattttttcacaaatggtgcggatgttagatatacttgcagaatatttgaaatatcgtcaattcccctttcaaagattagatggatcaataaaaggagaactgaggaaacaagctctagatcattttaatgctgagggatcagaggatttttgctttttgctgtccacaagagctggaggtctagggattaatttagcctctgctgacactgttgttatatttgattccgattggaatccacagaatgatcttcaggcacaggctagagcccatcgaattgggcaaaagaaacaggtgaatatttatcgtctagttacaaagggatcagttgaagaagatattcttgaaagggcgaaaaagaagatggttttagatcatcttgtaattcaaagaatggacacaactgggaagacagtactacatacaggttctgccccatcaagttctactcctttcaataaagaagagttatcagccattttaaagtttggtgctgaagaactttttaaggaacctgaaggagaagaacaagagccccaggaaatggatatagatgaaatcttgaagagagctgaaactcatgaaaatgaaccaggtcctttaactgtaggagatgaattgctttcccagttcaaggttgccaacttctcaaatatggatgaggatgacattgagttggaacctgaaagaaattcaaagaattgggaggaaattattccagaagatcaaagaagacgattagaagaagaagaaagacaaaaggaacttgaagaaatttatatgctcccaagaatgagaaattgtgcaaaacagattagtttcaatggaagtgaagggaggcgcagtagaagtaggagatactctggatctgatagtgattccatctcagaagggaaaaggccaaagaaacgtggaagaccacggactattcctcgggagaatattaaaggatttagtgatgcagaaattaggcggtttatcaagagctataagaaatttggtggtcctctggaaagattagatgcaattgctcgagatgctgagttagttgataagtcagaaacagaccttagacgactgggagaattggtacataatggttgcattaaagcattaaaggatagttcttcaggaacagaacgaacaggtggtagactcggaaaagtgaagggtccaacattccgaatatcaggagtacaggtgaatgccaaactagtcatctcccatgaagaagaattaatacctttgcacaaatccattccttctgatccagaagaaagaaagcagtatactatcccatgccacacaaaggcagctcattttgatatagactggggcaaagaagatgattccaatttgttaattggcatctatgaatatggatatggaagctgggaaatgattaaaatggatcctgacctcagtctaacacacaagattcttccagatgatcccgataaaaaaccacaagcaaaacagttgcagacccgtgcagactacctcatcaaattacttagtagagatcttgcaaaaaaagaagctctttctggtgcgggaagttcaaagaggagaaaagcaagagctaagaagaataaagcaatgaagtctataaaagtgaaagaggaaataaagagtgattcttctcctctgccttcagagaagtctgatgaagatgatgataaattgagtgaatccaagtctgatggtagggaaagatccaagaaatcttcagtgtcagatgctccagttcatatcacggcaagtggtgaaccagttcccatttctgaagaatctgaagagctggatcagaagacattcagcattaaacctgtggatttttgtatctaagtttactgaatttgatgcaagaaaattacataaattatataagcatgctattaaaaaacggcaggagtctcagcaaaacagtgatcaaaacagcaacttgaatcctcacgtgattagaaatccagatgtggaaagattaaaagagaatacaaatcacgatgatagcagcagggacagttattcctctgatagacacttaactcagtaccatgatcatcataaagaccgacatcagggagattcttacaaaaaaagtgattccaggaaaagaccctattcttcttttagtaatggtaaagaccatcgtgattgggatcactacaagcaagacagcagatattacagtgacagagagaaacacagaaaactggatgatcatgtttcaggaaggaatgaaagagagttctttcttaataaagaaaaacactcaaggactttgttcatttccaaagctacttgtttacattgtacactgcgaccaccttgccgcttttcatcacaagcttgaa

SEQ ID NO: 5303 - DNA, 6737 bp, Homo sapiens
aggtgaatcaaaggagagtcccagaaaacctgtgactgttgaagaaaattcatctgtgaatttttatattcaaggagtcagtatttatattcatcttttaaactgggaagatttatattttactttaaaacttcttgataataatttacaatgaatggacacagtgatgaagaaagtgttagaaacagtagtggagaatcaagccagtcggatgatgattctgggtcagcttcaggctctggatctggttcgagttctggaagcagtagtgatggaagcagtagccagtcaggtagcagtgactctgactccggatctgaatcaggcagtcagtcagagtctgagtcagacacttcccgagaaaacaaagttcaagcaaaaccaccgaaagttgatggagctgagttttggaaatctagtcctagtattctggccrttcagagatctgcaatcctcaagaagcagcaacagcagcagcagcaacaacaacatcaagcctcatctaatagcggatcagaagaggattcctctagcagtgaagattccgatgactcatcaagtgaggtcaaaaggaaaaagcataaagatgaagattggcaaatgtctgggtcaggatctccatctcagtctggttcagattcagaatctgaagaagagagagagaaaagcagttgtgatgaaacagaatctgattatgagccaaaaaacaaagtcaaaagcagaaaacctcaaaatagatctaagtcaaaaaatggaaagaagattcttggacaaaaaaagagacagattgattcatctgaggaggatgatgatgaagaagattatgataatgataaaagaagttctcgtcgccaagcaactgttaatgttagctataaggaggatgaagaaatgaaaacagattctgatgacctactggaagtctgtggagaggatgttcctcaacctgaggaagaggaatttgaaaccatagaaagatttatggattgtcggattgggagaaaaggagctactggtgctactacaaccatctatgcagttgaagcagatggtgacccaaatgcaggctttgaaaaaaacaaagaaccaggagagattcagtatttaattaaatggaaaggatggtcccatatccacaacacttgggagacagaagaaaccctcaagcagcagaatgttagaggaatgaaaaaattggataattataagaaaaaagatcaggaaacaaaaagatggttgaaaaatgcctctccagaagatgtggaatattataattgccagcaagaacttacagatgatctacataaacagtatcaaatagtggaacgtataattgctcattccaatcaaaagtcagcagctggttatcctgattattactgcaaatggcagggccttccatactcagagtgcagctgggaagatggagctctcatttccaaaaagtttcaagcatgcattgatgagtattttagcaggaaccaatcaaaaaccactccttttaaagattgcaaagtattaaaacaaaggccaaggtttgtagccctgaagaagcagccatcctatattggaggacatgagggcttagaattaagagattatcaactgaatggtttaaattggcttgctcattcttggtgcaaaggaaatagttgcatactcgctgatgaaatgggccttggaaaaacaatacagacgatctcatttctgaattatttgtttcatgaacatcaattatatggaccttttttattggtagtaccgctctccactcttacttcctggcaaagggaaattcagacttgggcttctcaaatgaatgctgtggtttatttaggtgacattaacagcagaaacatgataagaactcatgaatggacgcatcatcagaccaaacggttaaaatttaatatattgttaacaacttatgaaattttattaaaagataaggcattccttggaggtctaaattgggcatttataggtgttgatgaagcacaccgattaaagaatgatgactcccttctgtataaaactttaatagattttaaatccaatcatcgtctccttatcactggaactcctctacagaattccctcaaagagctctggtctttgctacatttcattatgccagaaaagttttcttcctgggaagattttgaagaagaacatggcaaagggagagaatatggttatgcaagccttcacaaggagcttgagccatttctgttacgccgagttaagaaagatgtggaaaaatctcttcctgccaaggttgagcagattttaagaatggaaatgagtgctttacagaaacaatattacaaatggattttaactaggaattacaaagccctcagcaaaggttccaagggcagtacctcaggctttttgaacattatgatggagctaaagaaatgttgtaaccattgctacctcattaaaccaccagataataatgaattctataataaacaggaggccttacaacacttaattcgtagtagcggaaaattgattcttcttgacaagctattaattcgcctaagagaacgaggcaatcgagttcttattttttcacaaatggtgcggatgttagatatacttgcagaatatttgaaatatcgtcaattcccctttcaaagattagatggatcaataaaaggagaactgaggaaacaagctctagatcattttaatgctgagggatcagaggatttttgctttttgctgtccacaagagctggaggtctagggattaatttagcctctgctgacactgttgttatatttgattccgattggaatccacagaatgatcttcaggcacaggctagagcccatcgaattgggcaaaagaaacaggtgaatatttatcgtctagttacaaagggatcagttgaagaagatattcttgaaagggcgaaaaagaagatggttttagatcatcttgtaattcaaagaatggacacaactgggaagacagtactacatacaggttctgccccatcaagttctactcctttcaataaagaagagttatcagccattttaaagtttggtgctgaagaactttttaaggaacctgaaggagaagaacaagagccccaggaaatggatatagatgaaatcttgaagagagctgaaactcatgaaaatgaaccaggtcctttaactgtaggagatgaattgctttcccagttcaaggttgccaacttctcaaatatggatgaggatgacattgagttggaacctgaaagaaattcaaagaattgggaggaaattattccagaagatcaaagaagacgattagaagaagaagaaagacaaaaggaacttgaagaaatttatatgctcccaagaatgagaaattgtgcaaaacagattagtttcaatggaagtgaagggaggcgcagtagaagtaggagatactctggatctgatagtgattccatctcagaagggaaaaggccaaagaaacgtggaagaccacggactattcctcgggagaatattaaaggatttagtgatgcagaaattaggcggtttatcaagagctataagaaatttggtggtcctctggaaagattagatgcaattgctcgagatgctgagttagttgataagtcagaaacagaccttagacgactgggagaattggtacataatggttgcattaaagcattaaaggatagttcttcaggaacagaacgaacaggtggtagactcggaaaagtgaagggtccaacattccgaatatcaggagtacaggtgaatgccaaactagtcatctcccatgaagaagaattaatacctttgcacaaatccattccttctgatccagaagaaagaaagcagtatactatcccatgccacacaaaggcagctcattttgatatagactggggcaaagaagatgattccaatttgttaattggcatctatgaatatggatatggaagctgggaaatgattaaaatggatcctgacctcagtctaacacacaagattcttccagatgatcccgataaaaaaccacaagcaaaacagttgcagacccgtgcagactacctcatcaaattacttagtagagatcttgcaaaaaaagaagctctttctggtgcgggaagttcaaagaggagaaaagcaagagctaagaagaataaagcaatgaagtctataaaagtgaaagaggaaataaagagtgattcttctcctctgccttcagagaagtctgatgaagatgatgataaattgagtgaatccaagtctgatggtagggaaagatccaagaaatcttcagtgtcagatgctccagttcatatcacggcaagtggtgaaccagttcccatttctgaagaatctgaagagctggatcagaagacattcagcatttgtaaagaaagaatgaggcctgttaaagcagctttgaaacaacttgataggcctgagaaaggcctttcagaaagagaacaactagarcatactagacaatgtttaataaaaattggagaccatatcacagaatgtctaaaagagtatacaaatcctgaacaaattaagcaatggagaaaaaacctgtggatttttgtatctaagtttactgaatttgatgcaagaaaattacataaattatataagcatgctattaaaaaacggcaggagtctcagcaaaacagtgatcaaaacagcaacttgaatcctcacgtgattagaaatccagatgtggaaagattaaaagagaatacaaatcacgatgatagcagcagggacagttattcctctgatagacacttaactcagtaccatgatcatcataaagaccgacatcagggagattcttacaaaaaaagtgattccaggaaaagaccctattcttcttttagtaatggtaaagaccatcgtgattgggatcactacaagcaagacagcagatattacagtgacagagagaaacacagaaaactggatgatcacaggagtagagatcacaggtcaaatttggaaggaagtttaaaagatagatctcattctgatcatcgttctcactcagatcatcggttacattcagaccaccggtcaagttctgaatatacgcaccataaatcttccagggattataggtatcactcagactggcaaatggaccacagagcttccagcagtggccctaggtcaccactagatcagagatctccttatggctccagatctccatttgaacattcagttgaacacaaaagtacaccggagcatacctggagtagtcggaaaacataacaaaaactgatacttcgtctttctggacttttcttttagccatatatcataaaccaacacagtaattgccttacatgacttgaaagatataaacagatcttctatcagtagcagtattgttacttctttccaggatgcaaggtctattatcccaacagaagagaaaatatttttatatttaaggattatgctgcactgtactacaaaattgtagtacttttttttgttttcttttttaaagaaatggaaaatgtttactattacagggacctcaacactgccctcccatacaggctggataaaactgtttttaagtcagtgattttagactgacctccatttaaattrtgtttatatatgaactttactctgacctgtgatcatgtttcaggaaggaatgaaagagagttctttcttaataaagaaaaacactcaaggactttgttcatttccaaagctacttgtttacattgtacactgcgaccaccttgccgcttttcatcacaagcttgaatatttaaattctgtacttatatctgtaaaatagccaggaatttcctgtttgtgatctattatgcctttttacaaaaaaaatggctgtaaattattgtaaatattaaaggaactttccttacttccttccctttctcaggctttttttgactgttcctttccctaccaactcaggccttcttattaaaaaaaaaaaaatcagtgtaataacactttttaatgatttgtcttgatggaatcattgtttagaatgtaaaaatggggaaaggggccacttaattccattagtcctctttttatactgaatattttattagatacatgttattcccttttttttccttttttagtcaatattgtgtttgtagttttaaaaaatggcgagatatgtaaaatctaaactgcatgctctggaaacacttttttcagatgcatctggtttaaaagggtaggtgtataaacacttttcagaatccaaaacggccaaaagttattgtaaatccgtttgttttcccgttttatgtgggcaataatgtcaaatgtgctatgcagccaggttaacattttagataaacttgattgacttttaatataaactgttacaatgcacactgattgtatataaaaacgttatatatgacaaattaaatttaagaaaaaggatatgtgggctcctgtaattttctgctgcattcttactccctcaagcacttaccaccaccaccaccgccccctacccccgtttttaagtaacattttgctgccagaaaaagtattttggtaagcagttgaatatttgtaatgtgtagcattacaactaaatctgttttggagactatgaatattcctatgaagtaaaacttaggtcatagacatttttgttggccccttttggcttcctacagatattattatgggatgctttatatttattcacagat

SEQ ID NO: 5304 - DNA, 5059 bp, Homo sapiens
  misc_feature (1)...(5059): n = A,T,C or G
cccgttggaggccattggctggcctttgcgcacagcggatcgattttccaggtgcggagttcactcttgccgcggttgcttcctttgggacccacggcgtccggcagccaggcgcagagtccgaggagggggcagcgcagagcggacccgacgcggcgccgccgggcaccttccccgcaggcggtgggtgagccctgggagctgagtctgcggcccggctctgcgcagctcacctgccctcccgctcccgcacacgcgtgagatcccagtacagtgtcggagcgcaccagcgcgaggtggccgagaccgcggaggaggacaggcctccgccctgcggcgccggcacggcagaggacattgtggcactggcacggcagagaacactgtggcaccggcggggccggcagttccagggtgggcactcccagccacctggggagtgggcgagggtccgaggcccactctcccctcacgctctcatccccgtgcccccaggtcgggaggacggcggcgcgcaactttgaatcatccgtgtgaagagggctgcggcttccccggtcccaaatgaaggggcggttcccggacccctgtttgctttagagccgagccgcgccgatgccctcacactctgcgcctcctctcccgggactttaacaccmcgctctcctccaccgaccaggtgaccttttgctctgagccagatcagagaagaattcggtgtccgtgcgggacgatgcctgagcaggagagacagatcacagccagagaaggggccagtcggaaaatcttatctaagctttctttgcctacccgtgcctgggaaccagcaatgaagaagagttttgcttttgacaatgttggctatgaaggtggtctggatggcctgggcccttcttctcaggtggccaccagcacagtcaggatcttgggcatgacttgccagtcatgtgtgaagtccattgaggacaggatttccaatttgaaagkcatcatcagcatgaaggtttccctggaayaaggcagtgccactgtgaaatatgtgccatmggttgtgtgcctgyaayaggtttgccatcaaattggggacatgggcttcgaggccagcattgcagaaggaaaggcagcctcctggccctcaaggtccttgcctgcccaggaggctgtggtcaagctccgggtggagggcatgacctgccagtcctgtgtcagctccattgaaggcaaggtccggaaactgcaaggagtagtgagagtcaaagtctcactcagcaaccaagaggccgtcatcacttatcagccttatctcattcagcccgaagacctcagggaccatgtaaatgacatgggatttgaagctgccrtcaagagcaaagtggctcccttaagcctgggaccaattgatattgagcggttacaaagcactaacccaaagagacctttatcttctgctaaccagaattttaataattctgagaccttggggcaccaaggaagccatgtggtcaccctccaactgagaatagatggaatgcattgtaagtcttgmgtcttgaatattgaagaaaatattggccagctcctaggggttcaaagtattyaagtgtccttggagaacaaaactgcccaagtaaagtatgacccttcttgwaccagcccagtggctctgcagagggctatcgaggcacttccacctgggaattttaaagtttctcttcctgatggagccgaagggagtgggacagatcacaggtcttccagttctcattcccctggctccccaccgagaaaccaggtccagggcacatgcagtaccactctgattgccattgccggcatgacctgtgcatcctgtgtccattccattgaaggcatgatctcccaactggaaggggtgcagcaaatatcggtgtctttggccgaagggactgcaacagttctttataatccckctgtaattagcccagaagaactcagagctgctatagaagacatgggatttgaggcttcagtcgtttctgaaagctgttctactaaccctsttggaaaccacagtgctgggaattccatggtgcaaactacagatggtacacctacatctstgyaggaagtggctccccacactgggaggctccctgcaaaccatgccccggacatcttggcaaagtccccacaatcaaccagagcagtgkcaccgcagaagtgmttctyacagatcaaaggcatgacctstgcatcctgtgtgtctaacatagaaaggaatctgcagaaagaagctggtgttctctccgtgttggttgccttgatggcaggaaaggcagagatcaagyatgacccagaggtcatccagcccctcgagatagctyagttcatccaggacctgggttttgaggcagcagtcatggaggactacgcaggctccgatggcaacattgagctgacaatcacagggatgacctgcgcgtcctgtgtccacaacatagagtccaaactcacgaggacaaatggcatcacttatgcctccgttgcccttgccaccagcaaagcccttgttaagtttgacccggaaattatcggtccacrggatattatcaaaattattgaggaaattgsctttcatgcttccctggcccagagaaaccccarcgctcatcacttggaccacaagakggaaataaagcrgtggaagaagtctttcctgtgcagcctggtgtttggcatccctgtcatrgccttaatgatctatatgctgatacccagcaacragccccaccagtccatggtcctggaccacaacatcattccargactgtscattctaaatctcatcttctttatcttgtgtacctttgtccagcycctcvstdrgtggtrcttctacgttcaggcctacaaayctctgagacacagrtcagccaacatggacgtgctcatcgtcctggccacaagcattgcttrwgtttatyctctggtcwtcctggtggttgctgtggctgagaaggcggagaggagccytgtgacattcttcracaygccccccrkkctctttgtgttcattgccctgggccdgtrgctggracacttggcaaagagcaaaacctcagaagccctggctaaactcatgtctctccaagccacagaagccaccgttgtgacccttggtgaggacaatttaatcatcagggaggagcaagtccccatggagctggtgcagcggggcgatatcgtcanggtggtccctgggggaaagtttcyagtggatgggaaagtcctggaaggcaataccatggctgatgagtccctcaycacaggagaagccatgccagtcactaagaaacccggaagcactgtaattgyggggtctataaatgcacatggctctgtgctcattaaagctacccacgtggkcaatgacaccactttggctcagattgtgaaactggtggaagaggctcagatgtcaaaggcacccattcagcrgctggctraccggtttagtggatattttgtcccatttatcatcatcatgtcamctttgaygtwggtggtatggattgtaatcggttttatcgattttggtgttgttcagaratactttcctaaccccaacaagcacatctcccagacagaggtgatcatccggtttgctttccagacgtccatcayggtgctgtgcattgcctgcccctrctccctggggctggccacrcycacggctgtcatggtgggcaccggggtggccryrcagaacggcatcctcatcaagggaggcaagcccctrgagatggygcacaagataaagactgtgatgtttgacaagactggcaccattacccatgkcgtccccarggtcatgysggtgcycctgctgggggatgtggccacactgcycctcaggaaggttctggctgtggtggrgactgygrmgsccagcagtgracaccccttgggcgtggcagtcaccaaatactgtaaagaggaayttggaacagagaccttgggatactgcacggacttccmggcagtgccargctgtrgaaytgggtkcaaagwcagcaacgtggaaggcatcctggcccacagtgagcgccctttgagtgcrccrgccagtcacctgaatgaggctggcagccttcccgcagaaaaagatgcagnccccyasaccttctctgtgctgattggaaaccgtgagygkctgaggcgcaacggtttaaccatttctagcgatgtcagtgacgctrygacagaccacgagatgaaaggacagacagccatcctggtgrstattgacdgtgtgctctgtgggatgatcgcaatcgcagaygctgtcaagcaggaggctgccctggctgtgcrcacgctgcagagcatggktgtggacrtggttctgatcaygggggacaaccggaagacagccagagctattgccacccaggttggcatcaacaaagkctttgcagaggtgctgccttcgcacaaggtggccaagrtccaggagctccagaataaagggaagaaaktcgccatggtgrkggmtggggtcavtgactcccyggccttggcccaggyagrcatgggtgtggccattggcaccggcacggatgtggccatcgaggcagccracgtcgtccttatcagaaatgatttgcyggatgtggtggctagcattcacctttccaagaggactgtcygaaggatacscatcaacctggtcstggcactgatttataacctggttgggayacccattgcagcagrtgtcttcatgcccatcggcattgtgctgcagccctggatgrgctcagcgkccatggcagcctcctctgtgtctgtggtgctctcatcccygcagcycaagtgctataagaagcctgacctggagaggtatgaggcacaggcgcatggccacatgaagcccctgacggcatcccagaactttgtcagcgagcaagaacaatgccaggaggtctggagaaaacgtgtcatcagtgcatttctaaaatcgccagcaatgcctgcttcgttgttgtgctctgtgctttcctggctctgccgctgtcca

SEQ ID NO: 5305 - DNA, 5808 bp, Homo sapiens
  misc_feature (1)...(5808): n = A,T,C or G
cccgttggaggccattggctggcctttgcgcacagcggatcgattttccaggtgcggagttcactcttgccgcggttgcttcctttgggacccacggcgtccggcagccaggcgcagagtccgaggagggggcagcgcagagcggacccgacgcggcgccgccgggcaccttccccgcaggcggtgggtgagccctgggagctgagtctgcggcccggctctgcgcagctcacctgccctcccgctcccgcacacgcgtgagatcccagtacagtgtcggagcgcaccagcgcgaggtggccgagaccgcggaggaggacaggcctccgccctgcggcgccggcacggcagaggacattgtggcactggcacggcagagaacactgtggcaccggcggggccggcagttccagggtgggcactcccagccacctggggagtgggcgagggtccgaggcccactctcccctcacgctctcatccccgtgcccccaggtcgggaggacggcggcgcgcaactttgaatcatccgtgtgaagagggctgcggcttccccggtcccaaatgaaggggcggttcccggacccctgtttgctttagagccgagccgcgccgatgccctcacactctgcgcctcctctcccgggactttaacaccmcgctctcctccaccgaccaggtgaccttttgctctgagccagatcagagaagaattcggtgtccgtgcgggacgatgcctgagcaggagagacagatcacagccagagaaggggccagtcggaaaatcttatctaagctttctttgcctacccgtgcctgggaaccagcaatgaagaagagttttgcttttgacaatgttggctatgaaggtggtctggatggcctgggcccttcttctcaggtggccaccagcacagtcaggatcttgggcatgacttgccagtcatgtgtgaagtccattgaggacaggatttccaatttgaaagkcatcatcagcatgaaggtttccctggaayaaggcagtgccactgtgaaatatgtgccatmggttgtgtgcctgyaayaggtttgccatcaaattggggacatgggcttcgaggccagcattgcagaaggaaaggcagcctcctggccctcaaggtccttgcctgcccaggaggctgtggtcaagctccgggtggagggcatgacctgccagtcctgtgtcagctccattgaaggcaaggtccggaaactgcaaggagtagtgagagtcaaagtctcactcagcaaccaagaggccgtcatcacttatcagccttatctcattcagcccgaagacctcagggaccatgtaaatgacatgggatttgaagctgccrtcaagagcaaagtggctcccttaagcctgggaccaattgatattgagcggttacaaagcactaacccaaagagacctttatcttctgctaaccagaattttaataattctgagaccttggggcaccaaggaagccatgtggtcaccctccaactgagaatagatggaatgcattgtaagtcttgmgtcttgaatattgaagaaaatattggccagctcctaggggttcaaagtattyaagtgtccttggagaacaaaactgcccaagtaaagtatgacccttcttgwaccagcccagtggctctgcagagggctatcgaggcacttccacctgggaattttaaagtttctcttcctgatggagccgaagggagtgggacagatcacaggtcttccagttctcattcccctggctccccaccgagaaaccaggtccagggcacatgcagtaccactctgattgccattgccggcatgacctgtgcatcctgtgtccattccattgaaggcatgatctcccaactggaaggggtgcagcaaatatcggtgtctttggccgaagggactgcaacagttctttataatccckctgtaattagcccagaagaactcagagctgctatagaagacatgggatttgaggcttcagtcgtttctgaaagctgttctactaaccctsttggaaaccacagtgctgggaattccatggtgcaaactacagatggtacacctacatctstgyaggaagtggctccccacactgggaggctccctgcaaaccatgccccggacatcttggcaaagtccccacaatcaaccagagcagtgkcaccgcagaagtgmttctyacagatcaaaggcatgacctstgcatcctgtgtgtctaacatagaaaggaatctgcagaaagaagctggtgttctctccgtgttggttgccttgatggcaggaaaggcagagatcaagyatgacccagaggtcatccagcccctcgagatagctyagttcatccaggacctgggttttgaggcagcagtcatggaggactacgcaggctccgatggcaacattgagctgacaatcacagggatgacctgcgcgtcctgtgtccacaacatagagtccaaactcacgaggacaaatggcatcacttatgcctccgttgcccttgccaccagcaaagcccttgttaagtttgacccggaaattatcggtccacrggatattatcaaaattattgaggaaattgsctttcatgcttccctggcccagagaaaccccarcgctcatcacttggaccacaagakggaaataaagcrgtggaagaagtctttcctgtgcagcctggtgtttggcatccctgtcatrgccttaatgatctatatgctgatacccagcaacragccccaccagtccatggtcctggaccacaacatcattccargactgtscattctaaatctcatcttctttatcttgtgtacctttgtccagcycctcvstdrgtggtrcttctacgttcaggcctacaaayctctgagacacagrtcagccaacatggacgtgctcatcgtcctggccacaagcattgcttrwgtttatyctctggtcwtcctggtggttgctgtggctgagaaggcggagaggagccytgtgacattcttcracaygccccccrkkctctttgtgttcattgccctgggccdgtrgctggracacttggcaaagagcaaaacctcagaagccctggctaaactcatgtctctccaagccacagaagccaccgttgtgacccttggtgaggacaatttaatcatcagggaggagcaagtccccatggagctggtgcagcggggcgatatcgtcanggtggtccctgggggaaagtttcyagtggatgggaaagtcctggaaggcaataccatggctgatgagtccctcaycacaggagaagccatgccagtcactaagaaacccggaagcactgtaattgyggggtctataaatgcacatggctctgtgctcattaaagctacccacgtggkcaatgacaccactttggctcagattgtgaaactggtggaagaggctcagatgtcaaaggcacccattcagcrgctggctraccggtttagtggatattttgtcccatttatcatcatcatgtcamctttgaygtwggtggtatggattgtaatcggttttatcgattttggtgttgttcagaratactttcctaaccccaacaagcacatctcccagacagaggtgatcatccggtttgctttccagacgtccatcayggtgctgtgcattgcctgcccctrctccctggggctggccacrcycacggctgtcatggtgggcaccggggtggccryrcagaacggcatcctcatcaagggaggcaagcccctrgagatggygcacaagataaagactgtgatgtttgacaagactggcaccattacccatgkcgtccccarggtcatgysggtgcycctgctgggggatgtggccacactgcycctcaggaaggttctggctgtggtggrgactgygrmgsccagcagtgracaccccttgggcgtggcagtcaccaaatactgtaaagaggaayttggaacagagaccttgggatactgcacggacttccmggcagtgccargctgtrgaaytgggtkcaaagwcagcaacgtggaaggcatcctggcccacagtgagcgccctttgagtgcrccrgccagtcacctgaatgaggctggcagccttcccgcagaaaaagatgcagnccccyasaccttctctgtgctgattggaaaccgtgagygkctgaggcgcaacggtttaaccatttctagcgatgtcagtgacgctrygacagaccacgagatgaaaggacagacagccatcctggtgrstattgacdgtgtgctctgtgggatgatcgcaatcgcagaygctgtcaagcaggaggctgccctggctgtgcrcacgctgcagagcatggktgtggacrtggttctgatcaygggggacaaccggaagacagccagagctattgccacccaggttggcatcaacaaagkctttgcagaggtgctgccttcgcacaaggtggccaagrtccaggagctccagaataaagggaagaaaktcgccatggtgrkggmtggggtcavtgactcccyggccttggcccaggyagrcatgggtgtggccattggcaccggcacggatgtggccatcgaggcagccracgtcgtccttatcagaaatgatttgcyggatgtggtggctagcattcacctttccaagaggactgtcygaaggatacscatcaacctggtcstggcactgatttataacctggttgggayacccattgcagcagrtgtcttcatgcccatcggcattgtgctgcagccctggatgrgctcagcgkccatggcagcctcctctgtgtctgtggtgctctcatcccygcagcycaagtgaatggctcagatgctgttgcgttcctgctttccagctataagaagcctgacctggagaggtatgaggcacaggcgcatggccacatgaagcccctgacggcatcccaggtcagtgtgcacataggcatggatgacaggtggcgggactcccccagggccacaccatgggaccaggtcagctatgtcagccaggtgtcgctgtcctccctgaygtccgacaagccatctcggcacagcgctgcagcagacgatgatggggacaagtggtctctgctcctgaatggcagggatgaggagcagtacatctgatgacttcaggcaggcgggccggggcagggacttgcctccactcaccacaagctgagcaggacagccagcagcaggatgggctgagctagcctccagctttggggacttccgctccctggatatgtccagtcatcctgccctgcagcacgcggccttgtctgggtgcagctgggcttggcctggagaggacggccctgcctgcctcttggcctcacgggaccgtcagcatgggctttgtcttggactctagtccttggctggactgtagaaggtgagaggcgagtcaccctcctcacagacctctgcttggagtatttaggatgactgctgtgaaatggagaacagtttcatcaggaccaaaaaacctcactgggcctttccagagaactgcagacctcactgtcagggtctttctgatgacgcctgtctgtgtgcatcatgtttctgagaccacagtttacctcaggcaaggaaacaggctccaagaggctgaggactttgcccaggatgacatagccaatggacaagcagtgtctgtcagctgtgaaggcttcactcttattgtccttctaccttgaatagaagttttcctgataagaataaacgaggaaaaggtccttgcctcctggaagaacaaatcta

SEQ ID NO: 5306 - DNA, 5152 bp, Homo sapiens
  misc_feature (1)...(5152): n = A,T,C or G
cccgttggaggccattggctggcctttgcgcacagcggatcgattttccaggtgcggagttcactcttgccgcggttgcttcctttgggacccacggcgtccggcagccaggcgcagagtccgaggagggggcagcgcagagcggacccgacgcggcgccgccgggcaccttccccgcaggcggtgggtgagccctgggagctgagtctgcggcccggctctgcgcagctcacctgccctcccgctcccgcacacgcgtgagatcccagtacagtgtcggagcgcaccagcgcgaggtggccgagaccgcggaggaggacaggcctccgccctgcggcgccggcacggcagaggacattgtggcactggcacggcagagaacactgtggcaccggcggggccggcagttccagggtgggcactcccagccacctggggagtgggcgagggtccgaggcccactctcccctcacgctctcatccccgtgcccccaggtcgggaggacggcggcgcgcaactttgaatcatccgtgtgaagagggctgcggcttccccggtcccaaatgaaggggcggttcccggacccctgtttgctttagagccgagccgcgccgatgccctcacactctgcgcctcctctcccgggactttaacaccmcgctctcctccaccgaccaggtgaccttttgctctgagccagatcagagaagaattcggtgtccgtgcgggacgatgcctgagcaggagagacagatcacagccagagaaggggccagtcggaaaatcttatctaagctttctttgcctacccgtgcctgggaaccagcaatgaagaagagttttgcttttgacaatgttggctatgaaggtggtctggatggcctgggcccttcttctcaggtggccaccagcacagtcaggatcttgggcatgacttgccagtcatgtgtgaagtccattgaggacaggatttccaatttgaaagkcatcatcagcatgaaggtttccctggaayaaggcagtgccactgtgaaatatgtgccatmggttgtgtgcctgyaayaggtttgccatcaaattggggacatgggcttcgaggccagcattgcagaaggaaaggcagcctcctggccctcaaggtccttgcctgcccaggaggctgtggtcaagctccgggtggagggcatgacctgccagtcctgtgtcagctccattgaaggcaaggtccggaaactgcaaggagtagtgagagtcaaagtctcactcagcaaccaagaggccgtcatcacttatcagccttatctcattcagcccgaagacctcagggaccatgtaaatgacatgggatttgaagctgccrtcaagagcaaagtggctcccttaagcctgggaccaattgatattgagcggttacaaagcactaacccaaagagacctttatcttctgctaaccagaattttaataattctgagaccttggggcaccaaggaagccatgtggtcaccctccaactgagaatagatggaatgcattgtaagtcttgmgtcttgaatattgaagaaaatattggccagctcctaggggttcaaagtattyaagtgtccttggagaacaaaactgcccaagtaaagtatgacccttcttgwaccagcccagtggctctgcagagggctatcgaggcacttccacctgggaattttaaagtttctcttcctgatggagccgaagggagtgggacagatcacaggtcttccagttctcattcccctggctccccaccgagaaaccaggtccagggcacatgcagtaccactctgattgccattgccggcatgacctgtgcatcctgtgtccattccattgaaggcatgatctcccaactggaaggggtgcagcaaatatcggtgtctttggccgaagggactgcaacagttctttataatccckctgtaattagcccagaagaactcagagctgctatagaagacatgggatttgaggcttcagtcgtttctgaaagctgttctactaaccctsttggaaaccacagtgctgggaattccatggtgcaaactacagatggtacacctacatctstgyaggaagtggctccccacactgggaggctccctgcaaaccatgccccggacatcttggcaaagtccccacaatcaaccagagcagtgkcaccgcagaagtgmttctyacagatcaaaggcatgacctstgcatcctgtgtgtctaacatagaaaggaatctgcagaaagaagctggtgttctctccgtgttggttgccttgatggcaggaaaggcagagatcaagyatgacccagaggtcatccagcccctcgagatagctyagttcatccaggacctgggttttgaggcagcagtcatggaggactacgcaggctccgatggcaacattgagctgacaatcacagggatgacctgcgcgtcctgtgtccacaacatagagtccaaactcacgaggacaaatggcatcacttatgcctccgttgcccttgccaccagcaaagcccttgttaagtttgacccggaaattatcggtccacrggatattatcaaaattattgagagcaaaacctcagaagccctggctaaactcatgtctctccaagccacagaagccaccgttgtgacccttggtgaggacaatttaatcatcagggaggagcaagtccccatggagctggtgcagcggggcgatatcgtcanggtggtccctgggggaaagtttcyagtggatgggaaagtcctggaaggcaataccatggctgatgagtccctcaycacaggagaagccatgccagtcactaagaaacccggaagcactgtaattgyggggtctataaatgcacatggctctgtgctcattaaagctacccacgtggkcaatgacaccactttggctcagattgtgaaactggtggaagaggctcagatgtcaaagaaccccaacaagcacatctcccagacagaggtgatcatccggtttgctttccagacgtccatcayggtgctgtgcattgcctgcccctrctccctggggctggccacrcycacggctgtcatggtgggcaccggggtggccryrcagaacggcatcctcatcaagggaggcaagcccctrgagatggygcacaagataaagactgtgatgtttgacaagactggcaccattacccatgkcgtccccarggtcatgysggtgcycctgctgggggatgtggccacactgcycctcaggaaggttctggctgtggtggrgactgygrmgsccagcagtgracaccccttgggcgtggcagtcaccaaatactgtaaagaggaayttggaacagagaccttgggatactgcacggacttccmggcagtgccargctgtrgaaytgggtkcaaagwcagcaacgtggaaggcatcctggcccacagtgagcgccctttgagtgcrccrgccagtcacctgaatgaggctggcagccttcccgcagaaaaagatgcagnccccyasaccttctctgtgctgattggaaaccgtgagygkctgaggcgcaacggtttaaccatttctagcgatgtcagtgacgctrygacagaccacgagatgaaaggacagacagccatcctggtgrstattgacdgtgtgctctgtgggatgatcgcaatcgcagaygctgtcaagcaggaggctgccctggctgtgcrcacgctgcagagcatggktgtggacrtggttctgatcaygggggacaaccggaagacagccagagctattgccacccaggttggcatcaacaaagkctttgcagaggtgctgccttcgcacaaggtggccaagrtccaggagctccagaataaagggaagaaaktcgccatggtgrkggmtggggtcavtgactcccyggccttggcccaggyagrcatgggtgtggccattggcaccggcacggatgtggccatcgaggcagccracgtcgtccttatcagaaatgatttgcyggatgtggtggctagcattcacctttccaagaggactgtcygaaggatacscatcaacctggtcstggcactgatttataacctggttgggayacccattgcagcagrtgtcttcatgcccatcggcattgtgctgcagccctggatgrgctcagcgkccatggcagcctcctctgtgtctgtggtgctctcatcccygcagcycaagtgctataagaagcctgacctggagaggtatgaggcacaggcgcatggccacatgaagcccctgacggcatcccaggtcagtgtgcacataggcatggatgacaggtggcgggactcccccagggccacaccatgggaccaggtcagctatgtcagccaggtgtcgctgtcctccctgaygtccgacaagccatctcggcacagcgctgcagcagacgatgatggggacaagtggtctctgctcctgaatggcagggatgaggagcagtacatctgatgacttcaggcaggcgggccggggcagggacttgcctccactcaccacaagctgagcaggacagccagcagcaggatgggctgagctagcctccagctttggggacttccgctccctggatatgtccagtcatcctgccctgcagcacgcggccttgtctgggtgcagctgggcttggcctggagaggacggccctgcctgcctcttggcctcacgggaccgtcagcatgggctttgtcttggactctagtccttggctggactgtagaaggtgagaggcgagtcaccctcctcacagacctctgcttggagtatttaggatgactgctgtgaaatggagaacagtttcatcaggaccaaaaaacctcactgggcctttccagagaactgcagacctcactgtcagggtctttctgatgacgcctgtctgtgtgcatcatgtttctgagaccacagtttacctcaggcaaggaaacaggctccaagaggctgaggactttgcccaggatgacatagccaatggacaagcagtgtctgtcagctgtgaaggcttcactcttattgtccttctaccttgaatagaagttttcctgataagaataaacgaggaaaaggtccttgcctcctggaagaacaaatcta

SEQ ID NO: 5307 - DNA, 7214 bp, Homo sapiens
  misc_feature (1)...(7214): n = A,T,C or G
cccgttggaggccattggctggcctttgcgcacagcggatcgattttccaggtgcggagttcactcttgccgcggttgcttcctttgggacccacggcgtccggcagccaggcgcagagtccgaggagggggcagcgcagagcggacccgacgcggcgccgccgggcaccttccccgcaggcggtgggtgagccctgggagctgagtctgcggcccggctctgcgcagctcacctgccctcccgctcccgcacacgcgtgagatcccagtacagtgtcggagcgcaccagcgcgaggtggccgagaccgcggaggaggacaggcctccgccctgcggcgccggcacggcagaggacattgtggcactggcacggcagagaacactgtggcaccggcggggccggcagttccagggtgggcactcccagccacctggggagtgggcgagggtccgaggcccactctcccctcacgctctcatccccgtgcccccaggtcgggaggacggcggcgcgcaactttgaatcatccgtgtgaagagggctgcggcttccccggtcccaaatgaaggggcggttcccggacccctgtttgctttagagccgagccgcgccgatgccctcacactctgcgcctcctctcccgggactttaacaccmcgctctcctccaccgaccaggtgaccttttgctctgagccagatcagagaagaattcggtgtccgtgcgggacgatgcctgagcaggagagacagatcacagccagagaaggggccagtcggaaaatcttatctaagctttctttgcctacccgtgcctgggaaccagcaatgaagaagagttttgcttttgacaatgttggctatgaaggtggtctggatggcctgggcccttcttctcaggtggccaccagcacagtcaggatcttgggcatgacttgccagtcatgtgtgaagtccattgaggacaggatttccaatttgaaagkcatcatcagcatgaaggtttccctggaayaaggcagtgccactgtgaaatatgtgccatmggttgtgtgcctgyaayaggtttgccatcaaattggggacatgggcttcgaggccagcattgcagaaggaaaggcagcctcctggccctcaaggtccttgcctgcccaggaggctgtggtcaagctccgggtggagggcatgacctgccagtcctgtgtcagctccattgaaggcaaggtccggaaactgcaaggagtagtgagagtcaaagtctcactcagcaaccaagaggccgtcatcacttatcagccttatctcattcagcccgaagacctcagggaccatgtaaatgacatgggatttgaagctgccrtcaagagcaaagtggctcccttaagcctgggaccaattgatattgagcggttacaaagcactaacccaaagagacctttatcttctgctaaccagaattttaataattctgagaccttggggcaccaaggaagccatgtggtcaccctccaactgagaatagatggaatgcattgtaagtcttgmgtcttgaatattgaagaaaatattggccagctcctaggggttcaaagtattyaagtgtccttggagaacaaaactgcccaagtaaagtatgacccttcttgwaccagcccagtggctctgcagagggctatcgaggcacttccacctgggaattttaaagtttctcttcctgatggagccgaagggagtgggacagatcacaggtcttccagttctcattcccctggctccccaccgagaaaccaggtccagggcacatgcagtaccactctgattgccattgccggcatgacctgtgcatcctgtgtccattccattgaaggcatgatctcccaactggaaggggtgcagcaaatatcggtgtctttggccgaagggactgcaacagttctttataatccckctgtaattagcccagaagaactcagagctgctatagaagacatgggatttgaggcttcagtcgtttctgaaagctgttctactaaccctsttggaaaccacagtgctgggaattccatggtgcaaactacagatggtacacctacatctstgyaggaagtggctccccacactgggaggctccctgcaaaccatgccccggacatcttggcaaagtccccacaatcaaccagagcagtgkcaccgcagaagtgmttctyacagatcaaaggcatgacctstgcatcctgtgtgtctaacatagaaaggaatctgcagaaagaagctggtgttctctccgtgttggttgccttgatggcaggaaaggcagagatcaagyatgacccagaggtcatccagcccctcgagatagctyagttcatccaggacctgggttttgaggcagcagtcatggaggactacgcaggctccgatggcaacattgagctgacaatcacagggatgacctgcgcgtcctgtgtccacaacatagagtccaaactcacgaggacaaatggcatcacttatgcctccgttgcccttgccaccagcaaagcccttgttaagtttgacccggaaattatcggtccacrggatattatcaaaattattgaggaaattgsctttcatgcttccctggcccagagaaaccccarcgctcatcacttggaccacaagakggaaataaagcrgtggaagaagtctttcctgtgcagcctggtgtttggcatccctgtcatrgccttaatgatctatatgctgatacccagcaacragccccaccagtccatggtcctggaccacaacatcattccargactgtscattctaaatctcatcttctttatcttgtgtacctttgtccagcycctcvstdrgtggtrcttctacgttcaggcctacaaayctctgagacacagrtcagccaacatggacgtgctcatcgtcctggccacaagcattgcttrwgtttatyctctggtcwtcctggtggttgctgtggctgagaaggcggagaggagccytgtgacattcttcracaygccccccrkkctctttgtgttcattgccctgggccdgtrgctggracacttggcaaagagcaaaacctcagaagccctggctaaactcatgtctctccaagccacagaagccaccgttgtgacccttggtgaggacaatttaatcatcagggaggagcaagtccccatggagctggtgcagcggggcgatatcgtcanggtggtccctgggggaaagtttcyagtggatgggaaagtcctggaaggcaataccatggctgatgagtccctcaycacaggagaagccatgccagtcactaagaaacccggaagcactgtaattgyggggtctataaatgcacatggctctgtgctcattaaagctacccacgtggkcaatgacaccactttggctcagattgtgaaactggtggaagaggctcagatgtcaaaggcacccattcagcrgctggctraccggtttagtggatattttgtcccatttatcatcatcatgtcamctttgaygtwggtggtatggattgtaatcggttttatcgattttggtgttgttcagaratactttcctaaccccaacaagcacatctcccagacagaggtgatcatccggtttgctttccagacgtccatcayggtgctgtgcattgcctgcccctrctccctggggctggccacrcycacggctgtcatggtgggcaccggggtggccryrcagaacggcatcctcatcaagggaggcaagcccctrgagatggygcacaagataaagactgtgatgtttgacaagactggcaccattacccatgkcgtccccarggtcatgysggtgcycctgctgggggatgtggccacactgcycctcaggaaggttctggctgtggtggrgactgygrmgsccagcagtgracaccccttgggcgtggcagtcaccaaatactgtaaagaggaayttggaacagagaccttgggatactgcacggacttccmggcagtgccargctgtrgaaytgggtkcaaagwcagcaacgtggaaggcatcctggcccacagtgagcgccctttgagtgcrccrgccagtcacctgaatgaggctggcagccttcccgcagaaaaagatgcagnccccyasaccttctctgtgctgattggaaaccgtgagygkctgaggcgcaacggtttaaccatttctagcgatgtcagtgacgctrygacagaccacgagatgaaaggacagacagccatcctggtgrstattgacdgtgtgctctgtgggatgatcgcaatcgcagaygctgtcaagcaggaggctgccctggctgtgcrcacgctgcagagcatggktgtggacrtggttctgatcaygggggacaaccggaagacagccagagctattgccacccaggttggcatcaacaaagkctttgcagaggtgctgccttcgcacaaggtggccaagrtccaggagctccagaataaagggaagaaaktcgccatggtgrkggmtggggtcavtgactcccyggccttggcccaggyagrcatgggtgtggccattggcaccggcacggatgtggccatcgaggcagccracgtcgtccttatcagaaatgatttgcyggatgtggtggctagcattcacctttccaagaggactgtcygaaggatacscatcaacctggtcstggcactgatttataacctggttgggayacccattgcagcagrtgtcttcatgcccatcggcattgtgctgcagccctggatgrgctcagcgkccatggcagcctcctctgtgtctgtggtgctctcatcccygcagcycaagtgctataagaagcctgacctggagaggtatgaggcacaggcgcatggccacatgaagcccctgacggcatcccaggtcagtgtgcacataggcatggatgacaggtggcgggactcccccagggccacaccatgggaccaggtcagctatgtcagccaggtgtcgctgtcctccctgaygtccgacaagccatctcggcacagcgctgcagcagacgatgatggggacaagtggtctctgctcctgaatggcagggatgaggagcagtacatctgatgacttcaggcaggcgggccggggcagggacttgcctccactcaccacaagctgagcaggacagccagcagcaggatgggctgagctagcctccagctttggggacttccgctccctggatatgtccagtcatcctgccctgcagcacgcggccttgtctgggtgcagctgggcttggcctggagaggacggccctgcctgcctcttggcctcacgggaccgtcagcatgggctttgtcttggactctagtccttggctggactgtagaaggtgagaggcgagtcaccctcctcacagacctctgcttggagtatttaggatgactgctgtgaaatggagaacagtttcatcaggaccaaaaaacctcactgggcctttccagagaactgcagacctcactgtcagggtctttctgatgacgcctgtctgtgtgcatcatgtttctgagaccacagtttacctcaggtgtgcctgttgctttcttcctgcatagtctgttcctttcttcgtacatagtctgttccttttctctcctgtgtgcttgtcagtggggacccctcgcaaccctgcctgtcacctgggagggtgggaccaatgtccttgtggtctttgctgctgctctcaggcgcttctccaatgctctggagtgtgcatttcagcttgaacctgcttcctggctcacacatccccagccagggagcttgccacactcttcttcaagttgaggagagttcttttttgcttaaagcccccttctccatggagtgttggcttctcaatagagtgttgttgctgaccagctggagtgagggcctcagagcctgacctgagagtccgtactcggcttcctgtggggtgtaggttctcgcgattcaggacgtccttccatatccctgcccagcctgtggtgcttgaaacgtttgccccatgggaaacgtatgtgtgcaggagcctccctgcacggcccaaggggcttcgttttcagtcttctgactgtcacctcgtggggttcagtagagaattcatgtgactagcgcctggccttgtgtggcttggaggaaatggtactgcccaaataggaggaaaacacagcctccctgagcctgcattctgcacgctgcccaggggcttcagaaaaggagtggccacagcaccccgaagggagcatctrtttacctggcagtggctctcagagcagcagaacgggttcagttttagactctgaagttggttgtgattgacagaaccctttgggagcaaactagtagagttggattaaattctgggtgaaacccttttctcccacacaaaatagttttagtgatttttttcattgtccattacttgccaggggcagttttagcagcacttttgatagattacgtctaatcctcccaaccaaccagcagggtagctattactgtccacattttacaggcaaggaaacaggctccaagaggctgaggactttgcccaggatgacatagccaatggacaagcagtgtctgtcagctgtgaaggcttcactcttattgtccttctaccttgaatagaagttttcctgataagaataaacgaggaaaaggtccttgcctcctggaagaacaaatctaccaggtgatctattcattgtttcaactcagaatgcacttgattcaggaggtcatctgaccttcaccttggatggttagtttcactttttacatatagtttttgcagggttttattttataaaatccaagcgcgctgttgattgtgttttccttgttttcagccccccsactccagcccgcagcacatttccgctgtccgtcagtaattgtgtcctctctttatgcttgcttggggaatgttgttttctgactaggctgatcattatctaaagaatctaattctgttgatttttaaaacttttaggaccataaacgttgtgttcatatatggacatggaaatatttatataattttatagaaaataaccttttagatggtcaaagtgtaaggagtttttttgtcagataatcatttctacttcaaaaacatttcatgcaatattagaataaagttcctgtcattcctcta

SEQ ID NO: 5308 - DNA, 5773 bp, Homo sapiens
  misc_feature (1)...(5773): n = A,T,C or G
cccgttggaggccattggctggcctttgcgcacagcggatcgattttccaggtgcggagttcactcttgccgcggttgcttcctttgggacccacggcgtccggcagccaggcgcagagtccgaggagggggcagcgcagagcggacccgacgcggcgccgccgggcaccttccccgcaggcggtgggtgagccctgggagctgagtctgcggcccggctctgcgcagctcacctgccctcccgctcccgcacacgcgtgagatcccagtacagtgtcggagcgcaccagcgcgaggtggccgagaccgcggaggaggacaggcctccgccctgcggcgccggcacggcagaggacattgtggcactggcacggcagagaacactgtggcaccggcggggccggcagttccagggtgggcactcccagccacctggggagtgggcgagggtccgaggcccactctcccctcacgctctcatccccgtgcccccaggtcgggaggacggcggcgcgcaactttgaatcatccgtgtgaagagggctgcggcttccccggtcccaaatgaaggggcggttcccggacccctgtttgctttagagccgagccgcgccgatgccctcacactctgcgcctcctctcccgggactttaacaccmcgctctcctccaccgaccaggtgaccttttgctctgagccagatcagagaagaattcggtgtccgtgcgggacgatgcctgagcaggagagacagatcacagccagagaaggggccagtcggaaaatcttatctaagctttctttgcctacccgtgcctgggaaccagcaatgaagaagagttttgcttttgacaatgttggctatgaaggtggtctggatggcctgggcccttcttctcaggtggccaccagcacagtcaggatcttgggcatgacttgccagtcatgtgtgaagtccattgaggacaggatttccaatttgaaagkcatcatcagcatgaaggtttccctggaayaaggcagtgccactgtgaaatatgtgccatmggttgtgtgcctgyaayaggtttgccatcaaattggggacatgggcttcgaggccagcattgcagaaggaaaggcagcctcctggccctcaaggtccttgcctgcccaggaggctgtggtcaagctccgggtggagggcatgacctgccagtcctgtgtcagctccattgaaggcaaggtccggaaactgcaaggagtagtgagagtcaaagtctcactcagcaaccaagaggccgtcatcacttatcagccttatctcattcagcccgaagacctcagggaccatgtaaatgacatgggatttgaagctgccrtcaagagcaaagtggctcccttaagcctgggaccaattgatattgagcggttacaaagcactaacccaaagagacctttatcttctgctaaccagaattttaataattctgagaccttggggcaccaaggaagccatgtggtcaccctccaactgagaatagatggaatgcattgtaagtcttgmgtcttgaatattgaagaaaatattggccagctcctaggggttcaaagtattyaagtgtccttggagaacaaaactgcccaagtaaagtatgacccttcttgwaccagcccagtggctctgcagagggctatcgaggcacttccacctgggaattttaaagtttctcttcctgatggagccgaagggagtgggacagatcacaggtcttccagttctcattcccctggctccccaccgagaaaccaggtccagggcacatgcagtaccactctgattgccattgccggcatgacctgtgcatcctgtgtccattccattgaaggcatgatctcccaactggaaggggtgcagcaaatatcggtgtctttggccgaagggactgcaacagttctttataatccckctgtaattagcccagaagaactcagagctgctatagaagacatgggatttgaggcttcagtcgtttctgaaagctgttctactaaccctsttggaaaccacagtgctgggaattccatggtgcaaactacagatggtacacctacatctstgyaggaagtggctccccacactgggaggctccctgcaaaccatgccccggacatcttggcaaagtccccacaatcaaccagagcagtgkcaccgcagaagtgmttctyacagatcaaaggcatgacctstgcatcctgtgtgtctaacatagaaaggaatctgcagaaagaagctggtgttctctccgtgttggttgccttgatggcaggaaaggcagagatcaagyatgacccagaggtcatccagcccctcgagatagctyagttcatccaggacctgggttttgaggcagcagtcatggaggactacgcaggctccgatggcaacattgagctgacaatcacagggatgacctgcgcgtcctgtgtccacaacatagagtccaaactcacgaggacaaatggcatcacttatgcctccgttgcccttgccaccagcaaagcccttgttaagtttgacccggaaattatcggtccacrggatattatcaaaattattgaggaaattgsctttcatgcttccctggcccagagaaaccccarcgctcatcacttggaccacaagakggaaataaagcrgtggaagaagtctttcctgtgcagcctggtgtttggcatccctgtcatrgccttaatgatctatatgctgatacccagcaacragccccaccagtccatggtcctggaccacaacatcattccargactgtscattctaaatctcatcttctttatcttgtgtacctttgtccagcycctcvstdrgtggtrcttctacgttcaggcctacaaayctctgagacacagrtcagccaacatggacgtgctcatcgtcctggccacaagcattgcttrwgtttatyctctggtcwtcctggtggttgctgtggctgagaaggcggagaggagccytgtgacattcttcracaygccccccrkkctctttgtgttcattgccctgggccdgtrgctggracacttggcaaagagcaaaacctcagaagccctggctaaactcatgtctctccaagccacagaagccaccgttgtgacccttggtgaggacaatttaatcatcagggaggagcaagtccccatggagctggtgcagcggggcgatatcgtcanggtggtccctgggggaaagtttcyagtggatgggaaagtcctggaaggcaataccatggctgatgagtccctcaycacaggagaagccatgccagtcactaagaaacccggaagcactgtaattgyggggtctataaatgcacatggctctgtgctcattaaagctacccacgtggkcaatgacaccactttggctcagattgtgaaactggtggaagaggctcagatgtcaaaggcacccattcagcrgctggctraccggtttagtggatattttgtcccatttatcatcatcatgtcamctttgaygtwggtggtatggattgtaatcggttttatcgattttggtgttgttcagaratactttcctaaccccaacaagcacatctcccagacagaggtgatcatccggtttgctttccagacgtccatcayggtgctgtgcattgcctgcccctrctccctggggctggccacrcycacggctgtcatggtgggcaccggggtggccryrcagaacggcatcctcatcaagggaggcaagcccctrgagatggygcacaagataaagactgtgatgtttgacaagactggcaccattacccatgkcgtccccarggtcatgysggtgcycctgctgggggatgtggccacactgcycctcaggaaggttctggctgtggtggrgactgygrmgsccagcagtgracaccccttgggcgtggcagtcaccaaatactgtaaagaggaayttggaacagagaccttgggatactgcacggacttccmggcagtgccargctgtrgaaytgggtkcaaagwcagcaacgtggaaggcatcctggcccacagtgagcgccctttgagtgcrccrgccagtcacctgaatgaggctggcagccttcccgcagaaaaagatgcagnccccyasaccttctctgtgctgattggaaaccgtgagygkctgaggcgcaacggtttaaccatttctagcgatgtcagtgacgctrygacagaccacgagatgaaaggacagacagccatcctggtgrstattgacdgtgtgctctgtgggatgatcgcaatcgcagaygctgtcaagcaggaggctgccctggctgtgcrcacgctgcagagcatggktgtggacrtggttctgatcaygggggacaaccggaagacagccagagctattgccacccaggttggcatcaacaaagkctttgcagaggtgctgccttcgcacaaggtggccaagrtccaggagctccagaataaagggaagaaaktcgccatggtgrkggmtggggtcavtgactcccyggccttggcccaggyagrcatgggtgtggccattggcaccggcacggatgtggccatcgaggcagccracgtcgtccttatcagaaatgatttgcyggatgtggtggctagcattcacctttccaagaggactgtcygaaggatacscatcaacctggtcstggcactgatttataacctggttgggayacccattgcagcagrtgtcttcatgcccatcggcattgtgctgcagccctggatgrgctcagcgkccatggcagcctcctctgtgtctgtggtgctctcatcccygcagcycaagtgctataagaagcctgacctggagaggtatgaggcacaggcgcatggccacatgaagcccctgacggcatcccaggtcagtgtgcacataggcatggatgacaggtggcgggactcccccagggccacaccatgggaccaggtcagctatgtcagccaggtgtcgctgtcctccctgaygtccgacaagccatctcggcacagcgctgcagcagacgatgatggggacaagtggtctctgctcctgaatggcagggatgaggagcagtacatctgatgacttcaggcaggcgggccggggcagggacttgcctccactcaccacaagctgagcaggacagccagcagcaggatgggctgagctagcctccagctttggggacttccgctccctggatatgtccagtcatcctgccctgcagcacgcggccttgtctgggtgcagctgggcttggcctggagaggacggccctgcctgcctcttggcctcacgggaccgtcagcatgggctttgtcttggactctagtccttggctggactgtagaaggtgagaggcgagtcaccctcctcacagacctctgcttggagtatttaggatgactgctgtgaaatggagaacagtttcatcaggaccaaaaaacctcactgggcctttccagagaactgcagacctcactgtcagggtctttctgatgacgcctgtctgtgtgcatcatgtttctgagaccacagtttacctcaggcaaggaaacaggctccaagaggctgaggactttgcccaggatgacatagccaatggacaagcagtgtctgtcagctgtgaaggcttcactcttattgtccttctaccttgaatagaagttttcctgataagaataaacgaggaaaaggtccttgcctcctggaagaacaaatcta

SEQ ID NO: 5309 - DNA, 3080 bp, Homo sapiens
gtctacagctcccagcgtgagcgacgcagaagacgggtgatttctgcatttccatctgaggtgactgaggacccaacagtgtgctccttgctyggaggcyagtgatgagctcctaatttcactgtggactgcccagatttctacaagacaggcttctggagacgctgtggattctctcctgagtgactaggggctggcaggaagggcgggcgcttggtgctgcatctcaatccctgtggccccaggagcagctgcggcaggaacatgtatggatttatcaacacctgtctgcaatctcttgtgatagagaaatttggtgaagaaacatgggaaaaattgaaaacttctgcagaagtacaagatgccttcatgacctacacaatgtatgatgacgtcatcaccattaagctcatccaagaggcctgcaacattctgggtgtctccatggaagccatcctgaaactctttggagaatactttcaattctgaagatgtctggctatgacaggatgctacggacactgggaggaaatctcatggagtttattgaaaacctggatgccctccacagttacctggcactctcttatcaggagatgaatgcaccatcgtttcgtgtggagagaggagcagatgggaaaatgtttctccattrctactcggatagaagtggtctgtgccacattgtaccrggtatcattgaggctgtggccaaagacttctttgatattgatgtaatcatggacattcttgacatgaatgaagaagtggagaggacagggaagaaggagcatgttgtgtttctgattgtacagaaggctcacaggaagatgagaaagacaaagcyaaaaaggttacaagacagtcagggcatsgagagagaccaagaggccctccaggcagctttcctcaagatgaaggagaaatatttgaatgtctctgcttgtcctgtgaaaaaatcccactgggatgttgtgagaagcatagtcatgtttggaaaagggcatctcatgaacacctttgagccaatttatcctgagagactctggattgaagagaagacattctgcaacgcttttcctttccacattgtattcgatgaatcactacaggtgaagcaagccagagtgaacattcagaagtacgtaccaggactccaaacccagaatattcaactggatgagtatttctccatcattcatcctcaagttaccttcaacattttcagcatccgcagatttatcaacagtcaatttgtcctgaagacacgaagagaaatgatgcctgtagcatggcaaagtcggactacactcaaacttcaaggccagatgatytggatggagtccatgtggtgcatggtgtacctgygctytccgaagctccgcagcctgcaagagctggaagaactcaatatgcatctttctgacatcgcccccmacgacaccaccagggatctcatcctcctgaaccagcagcggctggctgagatagagctgtccaaccagctggaaaggaagaaggaggagctacaggtcctctccaagcacttggccattgaaaagaagaaaacagagaccttactttatgccatgctgcccaaacacgtggccaaccagctgagggagggcaaaaaggtggctgcaggagaatttaaaagctgcacgattcttttcagcgatgtagtgacatttactaacatctgtactgcctgtgaacctatacaaatagtgaacgtgctgaattccatgtactccaagtktgacagattaaccagtgtgcacgcagtctataaagtagaaacaataggagatgcttatatggtgrtaggaggtgtaccagtgcctattggaaaccatgctcaaagagtggctaattttgccttggggatgagaatttctgcaaaggaagtgacgaatcctgttactggagaacccatccagctcagagtggggatccatactggaccagtcttagcagatgttgtaggagacaagatgccacggtactgcttgtttggtgacactgtgaacacagcttctaggatggaaagtcatgggcttcccaacaaagtgcacctcagtcccacagcctacagagccttgaaaaatcaagggtttaaaatcattgagaggggtgaaattgaagtgaaaggtaaagggagaatgaccacatactttttgatccagaacttgaatgccacagaggatgagatcatggggagrtctaaaaccccagttgatcacaagggktcaacacagaaagcatccttgcccaccaccaagctccagggctcagttcaaccatcttgccctgaacactcttctcttgcatcctggttattatgacgttctttgagctgggccratagatccagctgaagagttctacatacattagtcttcaaggttcttctctgggcrtttcccatgcagctctctggtagctggggaatgatttgtaatgagtacatgaaacacgttaaatgtccttcagcctccctaccacgacatccaacagctggaacttccatccagtccttcacatgatgggcacctgtgggaaacctgccaggggcagccgatgttcagaggcatccaaaaaaagtctcccacttcggcagccatgaagcccactcatgcaaccgtcctcacttttccttcctctcacggttttttgcagaagcaagtgctcagggaaatgaagacaggagaactgctgccgtcatgagctatgccgacagtcagcagctgatccccgacagaracgcagcagatgcagacgctcctgatgaaatcatccctgtggggagtgcagggccagatggggactccatggagacagccgaccggcgacagccttcagctccgacaaagacacatcaccttgcaaatgacactttgccgtctggtttctgtgttttgttgtaacaggttaaatgaacccctgggcttaattttccccctacttagttctgtggcagcaaagaaaagtgacttcttttcatttctcagctcaaaacttcttaagccgtgtctcttcctcatcatccctttgagaataaaagtctagaaatgaaacac

SEQ ID NO: 5310 - DNA, 3020 bp, Homo sapiens
gtgactgaggacccaacagtgtgctccttgctyggaggcyagtgatgagctcctaatttcactgtggactgcccagatttctacaagacaggcttctggagacgctgtggattctctcctgagtgactaggggctggcaggaagggcgggcgcttggtgctgcatctcaatccctgtggccccaggagcagctgcggcaggaacatgtatggatttatcaacacctgtctgcaatctcttgtgatagagaaatttggtgaagaaacatgggaaaaattgaaaacttctgcagaagtacaagatgccttcatgacctacacaatgtatgatgacgtcatcaccattaagctcatccaagaggcctgcaacattctgggtgtctccatggaagccatcctgaaactctttggagaatactttcaattctgaagatgtctggctatgacaggatgctacggacactgggaggaaatctcatggagtttattgaaaacctggatgccctccacagttacctggcactctcttatcaggagatgaatgcaccatcgtttcgtgtggagagaggagcagatgggaaaatgtttctccattrctactcggatagaagtggtctgtgccacattgtaccrggtatcattgaggctgtggccaaagacttctttgatattgatgtaatcatggacattcttgacatgaatgaagaagtggagaggacagggaagaaggagcatgttgtgtttctgattgtacagaaggctcacaggaagatgagaaagacaaagcyaaaaaggttacaagacagtcagggcatsgagagagaccaagaggccctccaggcagctttcctcaagatgaaggagaaatatttgaatgtctctgcttgtcctgtgaaaaaatcccactgggatgttgtgagaagcatagtcatgtttggaaaagggcatctcatgaacacctttgagccaatttatcctgagagactctggattgaagagaagacattctgcaacgcttttcctttccacattgtattcgatgaatcactacaggtgaagcaagccagagtgaacattcagaagtacgtaccaggactccaaacccagaatattcaactggatgagtatttctccatcattcatcctcaagttaccttcaacattttcagcatccgcagatttatcaacagtcaatttgtcctgaagacacgaagagaaatgatgcctgtagcatggcaaagtcggactacactcaaacttcaaggccagatgatytggatggagtccatgtggtgcatggtgtacctgygctytccgaagctccgcagcctgcaagagctggaagaactcaatatgcatctttctgacatcgcccccmacgacaccaccagggatctcatcctcctgaaccagcagcggctggctgagatagagctgtccaaccagctggaaaggaagaaggaggagctacaggtcctctccaagcacttggccattgaaaagaagaaaacagagaccttactttatgccatgctgcccaaacacgtggccaaccagctgagggagggcaaaaaggtggctgcaggagaatttaaaagctgcacgattcttttcagcgatgtagtgacatttactaacatctgtactgcctgtgaacctatacaaatagtgaacgtgctgaattccatgtactccaagtktgacagattaaccagtgtgcacgcagtctataaagtagaaacaataggagatgcttatatggtgrtaggaggtgtaccagtgcctattggaaaccatgctcaaagagtggctaattttgccttggggatgagaatttctgcaaaggaagtgacgaatcctgttactggagaacccatccagctcagagtggggatccatactggaccagtcttagcagatgttgtaggagacaagatgccacggtactgcttgtttggtgacactgtgaacacagcttctaggatggaaagtcatgggcttcccaacaaagtgcacctcagtcccacagcctacagagccttgaaaaatcaagggtttaaaatcattgagaggggtgaaattgaagtgaaaggtaaagggagaatgaccacatactttttgatccagaacttgaatgccacagaggatgagatcatggggagrtctaaaaccccagttgatcacaagggktcaacacagaaagcatccttgcccaccaccaagctccagggctcagttcaaccatcttgccctgaacactcttctcttgcatcctggttattatgacgttctttgagctgggccratagatccagctgaagagttctacatacattagtcttcaaggttcttctctgggcrtttcccatgcagctctctggtagctggggaatgatttgtaatgagtacatgaaacacgttaaatgtccttcagcctccctaccacgacatccaacagctggaacttccatccagtccttcacatgatgggcacctgtgggaaacctgccaggggcagccgatgttcagaggcatccaaaaaaagtctcccacttcggcagccatgaagcccactcatgcaaccgtcctcacttttccttcctctcacggttttttgcagaagcaagtgctcagggaaatgaagacaggagaactgctgccgtcatgagctatgccgacagtcagcagctgatccccgacagaracgcagcagatgcagacgctcctgatgaaatcatccctgtggggagtgcagggccagatggggactccatggagacagccgaccggcgacagccttcagctccgacaaagacacatcaccttgcaaatgacactttgccgtctggtttctgtgttttgttgtaacaggttaaatgaacccctgggcttaattttccccctacttagttctgtggcagcaaagaaaagtgacttcttttcatttctcagctcaaaacttcttaagccgtgtctcttcctcatcatccctttgagaataaaagtctagaaatgaaacac

SEQ ID NO: 5311 - DNA, 1933 bp, Homo sapiens
ctgcgagaaggatgtgtctgctccgggggcctcgggggtcgcgggcctgcgaggatccggccgatcctgcagggtggggccggcgccgtggacgcgactggagatctagaaactgaggccctgtgatgtgaagtgacttgccccccagccacacagctggaccattctggctgctgtctggacaagaagtcgtagggggtgagggtggaagctgggaaacccacaggaggcaaccacactagtttagatcttctggtgaccccacttctcgctgctcatgccgctgggactggggcggcggaaaaaggcgccccctctagtggaaaatgaggaggctgagccaggccgtggagggctgggcgtgggggagccagggcctctgggcggaggtgggtcggggggcccccaaatgggcttgcccccccctcccccagccctgcggccccgcctcgtgttccacacccagctggcccatggcagtcccactggccgcatcgagggsttcaccaacgtcaaggagctgtatggcaagatygccgaggccttccgcctgccaactgccgaggtgatgttctgcaccctgaacacccacaaagtggacatggacaagctcctggggggccaratcgggctggaggacttcatcttcgcccacgtgaaggggcagcgcaaggmggtggaggtgttcaagtcggaggatgcactcgggctcaccatcacggacaacggggctggctacgccttcatcaagcgcatcaaggagggcagcgtgatcgaccacatccacctcatcagcgtgggcgacatgatcgaggccattaacgggcagagcctgctgggctgccggcactacgaggtggcccggctgctcaaggagctgccccgaggccgtaccttcacgctgaagctcacggagcctcgcaaggccttcgacatgatcagccagcgttcagcgggtggccgccctggctctggcccacaactgggcastggccgagggaccctgcggctccgatcccggggccccgccacrgtggaggatctgccctctgcctttgaagagaaggccattgagaaggtggatgacctgctggagagttacatgggtatcagggacacggagctggcrgccaccatggtggagctgggaaaggacaaaaggaacccggatgagctggccgaggccctggacgaacggctgggtgactttgccttccctgacgagttcgtctttgacgtctggggcgccattggggacgccaaggtcggcygctactaggactgcccccggaccctgcgatgatgacccgggcgcaacctggtgggggcccccagcagggacactgwcgtcaggacccgagcctccagcctgagcctagctcagcagcccaaggacgatggtgaggggaggtggggccaggccccctgccccgctccaatcggtaccatcccctccctggttcccagtctggccggggtccccggcccccctgtgccctgttccccacctacctcagctgggtcaggcacagggaggggagggatcagccaaattgggcrgccacccccgcctccaccactttccaccatcagctgccaaactggtccctctgtctccctggggccttgggttctgtttgggggtcatgaccttcctagtttcctgacgcagggaatacaggggagagggttgtccttccccccagcaaatgcaataatgccctcacccctcctgagaggagccccctccctgtggagcctgttacctccgcatttgacacgagtctgctgtgaaccccgcaacctcctccccacctcccatctctccttccaggcccatccctggcccagagcaggagggagggagggacgatggcggtgggtttttgtatctgaatttgctgtcttgaacataaagaatctatctgctgtt

SEQ ID NO: 5312 - DNA, 1741 bp, Homo sapiens
gcacggggaggcggaggcagcggcggcggcggcggcggcggcggcggcggagcagatcttctggtgaccccacttctcgctgctcatgccgctgggactggggcggcggaaaaaggcgccccctctagtggaaaatgaggaggctgagccaggccgtggagggctgggcgtgggggagccagggcctctgggcggaggtgggtcggggggcccccaaatgggcttgcccccccctcccccagccctgcggccccgcctcgtgttccacacccagctggcccatggcagtcccactggccgcatcgagggsttcaccaacgtcaaggagctgtatggcaagatygccgaggccttccgcctgccaactgccgaggtgatgttctgcaccctgaacacccacaaagtggacatggacaagctcctggggggccaratcgggctggaggacttcatcttcgcccacgtgaaggggcagcgcaaggmggtggaggtgttcaagtcggaggatgcactcgggctcaccatcacggacaacggggctggctacgccttcatcaagcgcatcaaggagggcagcgtgatcgaccacatccacctcatcagcgtgggcgacatgatcgaggccattaacgggcagagcctgctgggctgccggcactacgaggtggcccggctgctcaaggagctgccccgaggccgtaccttcacgctgaagctcacggagcctcgcaaggccttcgacatgatcagccagcgttcagcgggtggccgccctggctctggcccacaactgggcastggccgagggaccctgcggctccgatcccggggccccgccacrgtggaggatctgccctctgcctttgaagagaaggccattgagaaggtggatgacctgctggagagttacatgggtatcagggacacggagctggcrgccaccatggtggagctgggaaaggacaaaaggaacccggatgagctggccgaggccctggacgaacggctgggtgactttgccttccctgacgagttcgtctttgacgtctggggcgccattggggacgccaaggtcggcygctactaggactgcccccggaccctgcgatgatgacccgggcgcaacctggtgggggcccccagcagggacactgwcgtcaggacccgagcctccagcctgagcctagctcagcagcccaaggacgatggtgaggggaggtggggccaggccccctgccccgctccaatcggtaccatcccctccctggttcccagtctggccggggtccccggcccccctgtgccctgttccccacctacctcagctgggtcaggcacagggaggggagggatcagccaaattgggcrgccacccccgcctccaccactttccaccatcagctgccaaactggtccctctgtctccctggggccttgggttctgtttgggggtcatgaccttcctagtttcctgacgcagggaatacaggggagagggttgtccttccccccagcaaatgcaataatgccctcacccctcctgagaggagccccctccctgtggagcctgttacctccgcatttgacacgagtctgctgtgaaccccgcaacctcctccccacctcccatctctccttccaggcccatccctggcccagagcaggagggagggagggacgatggcggtgggtttttgtatctgaatttgctgtcttgaacataaagaatctatctgctgtt

SEQ ID NO: 5313 - DNA, 1810 bp, Homo sapiens
gtctggagtttgcggagggccgagccgggtgcgcacgaccattctggctgctgtctggacaagaagtcgtagggggtgagggtggaagctgggaaacccacaggaggcaaccacactagtttagatcttctggtgaccccacttctcgctgctcatgccgctgggactggggcggcggaaaaaggcgccccctctagtggaaaatgaggaggctgagccaggccgtggagggctgggcgtgggggagccagggcctctgggcggaggtgggtcggggggcccccaaatgggcttgcccccccctcccccagccctgcggccccgcctcgtgttccacacccagctggcccatggcagtcccactggccgcatcgagggsttcaccaacgtcaaggagctgtatggcaagatygccgaggccttccgcctgccaactgccgaggtgatgttctgcaccctgaacacccacaaagtggacatggacaagctcctggggggccaratcgggctggaggacttcatcttcgcccacgtgaaggggcagcgcaaggmggtggaggtgttcaagtcggaggatgcactcgggctcaccatcacggacaacggggctggctacgccttcatcaagcgcatcaaggagggcagcgtgatcgaccacatccacctcatcagcgtgggcgacatgatcgaggccattaacgggcagagcctgctgggctgccggcactacgaggtggcccggctgctcaaggagctgccccgaggccgtaccttcacgctgaagctcacggagcctcgcaaggccttcgacatgatcagccagcgttcagcgggtggccgccctggctctggcccacaactgggcastggccgagggaccctgcggctccgatcccggggccccgccacrgtggaggatctgccctctgcctttgaagagaaggccattgagaaggtggatgacctgctggagagttacatgggtatcagggacacggagctggcrgccaccatggtggagctgggaaaggacaaaaggaacccggatgagctggccgaggccctggacgaacggctgggtgactttgccttccctgacgagttcgtctttgacgtctggggcgccattggggacgccaaggtcggcygctactaggactgcccccggaccctgcgatgatgacccgggcgcaacctggtgggggcccccagcagggacactgwcgtcaggacccgagcctccagcctgagcctagctcagcagcccaaggacgatggtgaggggaggtggggccaggccccctgccccgctccaatcggtaccatcccctccctggttcccagtctggccggggtccccggcccccctgtgccctgttccccacctacctcagctgggtcaggcacagggaggggagggatcagccaaattgggcrgccacccccgcctccaccactttccaccatcagctgccaaactggtccctctgtctccctggggccttgggttctgtttgggggtcatgaccttcctagtttcctgacgcagggaatacaggggagagggttgtccttccccccagcaaatgcaataatgccctcacccctcctgagaggagccccctccctgtggagcctgttacctccgcatttgacacgagtctgctgtgaaccccgcaacctcctccccacctcccatctctccttccaggcccatccctggcccagagcaggagggagggagggacgatggcggtgggtttttgtatctgaatttgctgtcttgaacataaagaatctatctgctgtt

SEQ ID NO: 5314 - DNA, 1759 bp, Homo sapiens
gcacggggaggcggaggcagcggcggcggcggcggcggcggcggcggcggagcagatcttctggtgaccccacttctcgctgctcatgccgctgggactggggcggcggaaaaaggcgccccctctagtggaaaatgaggaggctgagccaggccgtggagggctgggcgtgggggagccagggcctctgggcggaggtgggtcggggggcccccaaatgggcttgcccccccctcccccagccctgcggccccgcctcgtgttccacacccagctggcccatggcagtcccactggccgcatcgagggsttcaccaacgtcaaggagctgtatggcaagatygccgaggccttccgcctgccaactgccgagcgtctcccacccctgcaggtgatgttctgcaccctgaacacccacaaagtggacatggacaagctcctggggggccaratcgggctggaggacttcatcttcgcccacgtgaaggggcagcgcaaggmggtggaggtgttcaagtcggaggatgcactcgggctcaccatcacggacaacggggctggctacgccttcatcaagcgcatcaaggagggcagcgtgatcgaccacatccacctcatcagcgtgggcgacatgatcgaggccattaacgggcagagcctgctgggctgccggcactacgaggtggcccggctgctcaaggagctgccccgaggccgtaccttcacgctgaagctcacggagcctcgcaaggccttcgacatgatcagccagcgttcagcgggtggccgccctggctctggcccacaactgggcastggccgagggaccctgcggctccgatcccggggccccgccacrgtggaggatctgccctctgcctttgaagagaaggccattgagaaggtggatgacctgctggagagttacatgggtatcagggacacggagctggcrgccaccatggtggagctgggaaaggacaaaaggaacccggatgagctggccgaggccctggacgaacggctgggtgactttgccttccctgacgagttcgtctttgacgtctggggcgccattggggacgccaaggtcggcygctactaggactgcccccggaccctgcgatgatgacccgggcgcaacctggtgggggcccccagcagggacactgwcgtcaggacccgagcctccagcctgagcctagctcagcagcccaaggacgatggtgaggggaggtggggccaggccccctgccccgctccaatcggtaccatcccctccctggttcccagtctggccggggtccccggcccccctgtgccctgttccccacctacctcagctgggtcaggcacagggaggggagggatcagccaaattgggcrgccacccccgcctccaccactttccaccatcagctgccaaactggtccctctgtctccctggggccttgggttctgtttgggggtcatgaccttcctagtttcctgacgcagggaatacaggggagagggttgtccttccccccagcaaatgcaataatgccctcacccctcctgagaggagccccctccctgtggagcctgttacctccgcatttgacacgagtctgctgtgaaccccgcaacctcctccccacctcccatctctccttccaggcccatccctggcccagagcaggagggagggagggacgatggcggtgggtttttgtatctgaatttgctgtcttgaacataaagaatctatctgctgtt

SEQ ID NO: 5315 - DNA, 1494 bp, Homo sapiens
gccacccaccacccagcagctggattcccacgggagttgcgggtgggggcggaaccggctgaggtctgggggcggggcgtccgggcgcggggcggggctggcgggaatgtgcgcacccccgcgcggggccccgcccgagcatcccgcgccgacggggctgtgccggagcagctgtgcagagctgcaggcgcgcgtcatkgctgctttgagacagccccaggtcgcggagctgctggccgaggcccggcgagccttccgggaggagttcggggccgagmccgagctggccrtgtcagcgccgsgccgcgtcaacctcatcggggaacacacggactacaaccagggcctggtgctgcctatggctctggagctcatgacggtgctrgtgggcagccccygcaaggatgggctggtgtctctcctcaccacctctkagggtgccgatgagccccagcggctgcagtttccactgcccacagcccagcgctcgctggagcctgggactcctcggtgggccaactatgtcaagggagtgattcagtactacccagctgcccccctccctggcttcagtgcagtggtggtcagctcagtgcccctggggggtggcctgtccagctcagcatccttggaagtggccacgtacaccttcctccagcagctctgtccagactcgggcacaatagctgcccgcgcccaggtgtgtcagcaggccgagcacagcttcgcagggatgccctgtggcatcatggaccagttcatctcacttatgggacagaaaggccacgygctgctcattgactgcaggtccttggagaccagcctggtgccactctcggaccccaagctggccgtgctcatcaccaactctaatgtccgccactccctggcctccagcgagtaccctgtgcggcggcgccaatgtgaagaagtggcccgggcgctgggcaaggaaagcctccgggaggtacaactggaagagctagaggctgccagggacctggtgagcaaagagggcttccggcgggcccggcacgtggtgggggagattcggcgcayggcccaggcagcggccgccctgagacgtggcgactacagagcctttggccgcctcatggtggagagccaccgctcactcagagacgactatgaggtgagctgcccagagctggaccagctggtggaggctgcgcttgctgtgcctggggtttatggcasccgcatgaygggcrgtggcttcrgtggctgcacggtgacactgctggaggcctccgctgctccccacgccatgcggcacatccaggagcactacggcgggactgccaccttctacctctctcaagcasccgatggagccaaggtgctgtgcttgtgaggcacccccaggacagcacacggtgagggtgcggggcytgcaggccagtcccacggctctgtgcccggtgccatcttccatatccgggtgctcaataaacttgtgcctccaatgtggta

SEQ ID NO: 5316 - DNA, 3573 bp, Homo sapiens
ccggtgcagcggctggcgatcggccgcggaggtgcgtgcagggcccgcgccgccgccggtatctccaccgccaacacctcagccactgccactgccacagccacacgaggccccccaccgtgcgctccgccgctgcggtcccggatccgcgctccacgcccgcagcccgcggcgccaccagcccagcatgcaccagctctttcagaaaacmccagaaatttactccgtggagctcagcggaactaaggacatcgtgaaaacagacaagggggatggcaaggagaagtataggggtctgaagaacaactgcctggaactcaaaaagaaaaatcacaaagaggagtttcagaaagaactccatctggatgaccacaaactcagcaatagggaattggaagagaaatatggcacagacatcattatgggtctctccagcaccagagctgccgagctcctggcccgggatgggcccaactccctcacccctcccaagcagacgcctgagatcgtcaagttcctcaagcagatggtgggggggttctctatcctcctgtgggtgggcgcctttctctgttggattgcatatgggattcagtactccagcgacaagtctgcatccctgaacaacgtgtacttgggctgtgtgcttggtctggtggtcattttaacggggatctttgcttattaccaagaggcaaaaagcaccaacatcatgtccagcttcaataagatgatccctcagcaagctctcgtcatccgagattccgagaagaagaccatcccttcagagcagctggtggtgggggacattgtggaggtcaaaggaggagaccagatccctgcagacatcagggtgctgtcttctcaggggtgtcgggtggataactcatctctcacgggggagtctgagccccagccccgctcctctgagtttacccatgaaaaccccctggaaacaaagaacatctgcttctattccacaacgtgtctggaaggcactgtcaccggcatggtyatcaacacgggtgaccgcaccatcattggccatattgcctcattggcctcaggagttggaaatgagaagacrcccattgccattgagatcgagcactttgttcacattgtggcaggagtggctgtctccatyggcatccttttcttcatcatcgctgtgtccctgaagtatcaagtcctggactccatcatcttcctcattggcatcattgtggccaatgtgcccgagggcctcctggccactgtcactgtgaccctgtcgctgacagcaaaacggatggccaagaagaactgcctggtgaagaacctggaggctgtggagaccctcggctccacctccatcatctgctcggacaagactgggacactgacccagaacaggatgacagtggcccatctgtggttcgacaatcagatctttgtggctgacaccagtgaggaccattcaaaccaagtmtttgaccaaagctctaggacttgggcctccttatccaagataataacattgtgtaaccgagcagagttcaagccaggacaggaamatgtccccatcatgaagaaagctgtgattggagatgcctcagaaactgctcttttaaaattctcagaggtcattttgggtgatgtgatggaaattagaaaaagaaaccgcaaagtagctgaaatcccttttaactctactaataaatttcagctctccatccacgagatggatgacccccacrgcaagcrcttcctcatggtgatgaagggggcccctgagcgcatyctagagaaatgcagcaccatcatgatcaacggcgaggagcacccactggacaagagcactgccaagaccttccacacagcctacatggagctgggcgggttgggcgagcgtgtgctgggtttctgtcatctctacctgccagcagaygagtttccagaaacctactcatttgacatagacgctatgaactttccgacctccaacctctgttttgtgggactcttgtcaatgatcgatccccctcggtccaccgtgccagatgcagtcaccaaatgccggagtgcagggatcaaggttattatggttactggtgatcatcccatcacagccaaagctattgccaagagtgtggggatcatttcagccaacagtgaaacagtggaagacattgcacatcgcctcaacattgctgtggagcaagttaacaaacgggatgccaaggccgctgtggtgactggcatggagctgaaggacatgagctcagaacagctggatgagatcttagccaactaccaggagattgtctttgcccggacatcccccmagcagaagctgatcattgtggagggctgtcagaggcaggatgctgttgttgctgtgacyggggatggagttaatgactctccggctctaaagaaggcagacattgggattgccatggggatagcaggttctgatgcagccaaaaatgcagccgacatggtcttgctggacgacaacttcgcatccatcgtcacaggggtggaggaaggtcgcctgatctttgacaacctcaagaagactattgcttattccctgaccaagaacattgccgagctgtgcccctttctgatctacatcattgtcgggctccccctgcccattggcaccatcaccattctgttcattgacttggggacagacattatcccctccattgccttggcgtacgagaaagctgaaagtgacatcatgaacaggaagcctcgccacaagaataaggacaggctggtgaaccagcygctcgctgtgtactcatacctgcacattggcctcatgcaagccctgggagctttccttgtgtatttcaccgtctatgcacaagagggctttctgccccgcactctcattaacctgcgggtagaatgggagaaggactacgtgaatgacttgaaagacagctatgggcaggaatggacaaggtaccagagggaatacctagaatggacgggctacacggctttctttgttggcatcctagtccagcaaatagcagatctgatcatcaggaaaacccggaggaattccatcttccagcagggtctcttcagaaataaagtcatctgggtggggatcacctcacagatcatcattggtctgatcctctcctatggcctcggaagtgtcacagccttgagtttcaccatgcttagggctcagtactggtttgtggctgtgccgcacgccatcctgatctgggtgtatgatgaggtgcggaagctcttcatcaggctctaccctggaagctggtgggataagaacatgtattattaagaccacctcccttcctatgtctctcagcagcaygttggggcacacttgttcatcttctgaccgtttgctgggctattcccctgcagtgcagacatcgtcaaaattcakacaagaggaaattttcatgcagaaagctgtatgcaggatgctcactgatgttttgcactttaaaactgaaattcaactctttatataggattttcttttctatctccatctcctcattaaaaaatacgtacatttcgaggtaatggtat

SEQ ID NO: 5317 - DNA, 1246 bp, Homo sapiens
ccggtgcagcggctggcgatcggccgcggaggtgcgtgcagggcccgcgccgccgccggtatctccaccgccaacacctcagccactgccactgccacagccacacgaggccccccaccgtgcgctccgccgctgcggtcccggatccgcgctccacgcccgcagcccgcggcgccaccagcccagcatgcaccagctctttcagaaaacmccagaaatttactccgtggagctcagcggaactaaggacatcgtgaaaacagacaagggggatggcaaggagaagtataggggtctgaagaacaactgcctggaactcaaaaagaaaaatcacaaagaggagtttcagaaagaactccatctggatgaccacaaactcagcaatagggaattggaagagaaatatggcacagacatcattatgggtctctccagcaccagagctgccgagctcctggcccgggatgggcccaactccctcacccctcccaagcagacgcctgagatcgtcaagttcctcaagcagatggtgggggggttctctatcctcctgtgggtgggcgcctttctctgttggattgcatatgggattcagtactccagcgacaagtctgcatccctgaacaacgtgtacttgggctgtgtgcttggtctggtggtcattttaacggggatctttgcttattaccaagaggcaaaaagcaccaacatcatgtccagcttcaataagatgatccctcagcaagctctcgtcatccgagattccgagaagaagaccatcccttcagagcagctggtggtgggggacattgtggaggtcaaaggaggagaccagatccctgcagacatcagggtgctgtcttctcaggggtgtcggacaaggtaccagagggaatacctagaatggacgggctacacggctttctttgttggcatcctagtccagcaaatagcagatctgatcatcaggaaaacccggaggaattccatcttccagcagggtctcttcaggtactgcctgtkcccggcctcctggggcagccctgggcctgccgtgcaaggatgatgatgatttgtttttcacaagacagagttctggccacacttgtaaccccagaggcattgatttttctggtggcatggtctgctgggtgtatgatcatgaagccacaagaatcccaagtctgtctgcttttgtgtgtcttgcagaaataaagtcatctgggtggggatcacctcacagatc

SEQ ID NO: 5318 - DNA, 1951 bp, Homo sapiens
agggcggggccagacctgcaccgggccaggcaagatggcggccatggagaccgagacggcgccgctgaccctagagtcgctgcccaccgatcccctgctcctcatcttatcctttttggactatcgggatctaatcaactgttgttatgtcagtcgaagacttagccagctatcaagtcatgatccgctgtggagaagacattgcaaaaaatactggctgatatctgaggaagagaaaacacagaagaatcagtgttggaaatcyctcttcatagatacttactctgatgtaggaagatacattgaccattatgctgctattaaaaaggcctgggatgatctcaagaaatatttggagcccaggtgtcctcggatggttttatctctgaaagagggtgctcgagaggaagacctcgatgctgtggaagcgcagattggctgcaagcttcctgacgattatcgatgttcataccgaattcacaatggacagaagttagtggttcctgggttattgggaagcatggcactgtctaatcactatcgttctgaagatttgttagacgtcgatacagctgccggaggattccagcagagacagggactgaaatactgtctccctttaactttttgcatacatactggtttgagtcagtacatagcagtggaagctgcagagggccgaaacaaaaatgaarttttctaccaatgtccagaccaaatggctcgaaatccagctgctattgacatgtttattataggtgctacttttactgactggtttacctcttatgtcaaaaatgttgtatcaggtggcttccccatcatcagagaccaaattttcagatatgttcacgatccagaatgtgtagcaacaactggggatattactgtgtcagtttccacatcgtttctgccagaacttagctctgtacatccaccccactatttcttcacataccgaatcaggattgaaatgtcaaaagatgcacttcctgagaaggcctgtcagttggacagtcgctattggagaataacaaatgctaagggtgacgtggaagaagttcaaggacctggagtagttggtgaatttccaatcatcagcccaggtcgggtatatgaatacacaagctgtaccacattctctacaacatcaggatacatggaaggatattataccttccattttctttactttaaagacaagatctttaatgttgccattccccgattccatatggcatgtccaacattcagggtgtctatagcccgattggaaatgggtcctgatgaatatgaagagatggaagaagaggaggaggaggaagaggaggaagacgaggatgatgattcagcagatatggatgaatcagatgaagatgatgaagaggagagacggaggagagtctttgatgttcccattcgcagacgccgctgctcacgccttttttagcaagccttctgctgatggaagcactaggatgattctaggctgttaaatagatttctcaataatgtaaataactaaattgttctctgcatatagcaggaaaactagcatgaaatattgtttcaggccctgggttctatgtgacactacattaggaattggattgtttgggtttgctttgtgtttttgaggtagaggaagaaatgggaatcttttttttctcttccaggagtcagtggaagaatagttctctagctaaggaayggacatacctttgttttaaaatattttatacttacaaaaatctagaaatggagagggaactgttttgaataaggatttaaaatacctgcacaaggatagagagaaactatgtgactcattctgtgaaaagacttcttgcagttgtgagttatttagaaatgatcaaaagaactaattgactaaacaacttgaacgctagtggtttgtccttagacaatctgtctttgaatttaaagtctt

SEQ ID NO: 5319 - DNA, 2412 bp, Homo sapiens
agggcggggccagacctgcaccgggccaggcaagatggcggccatggagaccgagacggcgccgctgaccctagagtcgctgcccaccgatcccctgctcctcatcttatcctttttggactatcgggatctaatcaactgttgttatgtcagtcgaagacttagccagctatcaagtcatgatccgctgtggagaagacattgcaaaaaatactggctgatatctgaggaagagaaaacacagaagaatcagtgttggaaatcyctcttcatagatacttactctgatgtaggaagatacattgaccattatgctgctattaaaaaggcctgggatgatctcaagaaatatttggagcccaggtgtcctcggatggttttatctctgaaagagggtgctcgagaggaagacctcgatgctgtggaagcgcagattggctgcaagcttcctgacgattatcgatgttcataccgaattcacaatggacagaagttagtggttcctgggttattgggaagcatggcactgtctaatcactatcgttctgaagatttgttagacgtcgatacagctgccggaggattccagcagagacagggactgaaatactgtctccctttaactttttgcatacatactggtttgagtcagtacatagcagtggaagctgcagagggccgaaacaaaaatgaarttttctaccaatgtccagaccaaatggctcgaaatccagctgctattgacatgtttattataggtgctacttttactgactggtttacctcttatgtcaaaaatgttgtatcaggtggcttccccatcatcagagaccaaattttcagatatgttcacgatccagaatgtgtagcaacaactggggatattactgtgtcagtttccacatcgtttctgccagaacttagctctgtacatccaccccactatttcttcacataccgaatcaggattgaaatgtcaaaagatgcacttcctgagaaggcctgtcagttggacagtcgctattggagaataacaaatgctaagggtgacgtggaagaagttcaaggacctggagtagttggtgaatttccaatcatcagcccaggtcgggtatatgaatacacaagctgtaccacattctctacaacatcaggatacatggaaggatattataccttccattttctttactttaaagacaagatctttaatgttgccattccccgattccatatggcatgtccaacattcagggtgtctatagcccgattggaaatgggtcctgatgaatatgaagagatggaagaagaggaggaggaggaagaggaggaagacgaggatgatgattcagcagatatggatgaatcagatgaagatgatgaagaggagagacggaggagagtctttgatgttcccattcgcagacgccgctgctcacgccttttttagcaagccttctgctgatggaagcactaggatgattctaggctgttaaatagatttctcaataatgtaaataactaaattgttctctgcatatagcaggaaaactagcatgaaatattgtttcaggccctgggttctatgtgacactacattaggaattggattgtttgggtttgctttgtgtttttgaggtagaggaagaaatgggaatcttttttttctcttccaggagtcagtggaagaatagttctctagctaaggaayggacatacctttgttttaaaatattttatacttacaaaaatctagaaatggagagggaactgttttgaataaggatttaaaatacctgcacaaggatagagagaaactatgtgactcattctgtgaaaagacttcttgcagttgtgagttatttagaaatgatcaaaatttgtaattaggctaatccatttagtgattcctaatattttgtactcacagagaactaattgactaaacaacttgaacgctagtggtttgtccttagacaatctgtctttgaatttaaagtctttatcgctaagaccttgactttaaatttttcatcactacaaccttgaatttaatttcaggtcttcaacatgatgaccttggatttaatttaaagtcttcaacactatgcgctttatcatattattcacagatgcatttttgaaatgtagtatgtaaaagtatgtaacgtgctgtttattaacaaaagattgttcacaacatctcatgtagtttaaatttgtaaatactgcttctgttttgtttctcctttatacacttgactgtctttgtgataagtgacatgaattttatgttaggattaagtatgttttcctgaaacttggattttttttgtaattatataattgagagttaagaatgaaatccttcaagtgttaaaaactcacattttaaaagcaaattttggttcc

SEQ ID NO: 5320 - DNA, 2011 bp, Homo sapiens
agggcggggccagacctgcaccgggccaggcaagatggcggccatggagaccgagacggcgccgctgaccctagagtcgctgcccaccgatcccctgctcctcatcttatcctttttggactatcgggatctaatcaactgttgttatgtcagtcgaagacttagccagctatcaagtcatgatccgctgtggagaagacattgcaaaaaatactggctgatatctgaggaagagaaaacacagaagaatcagtgttggaaatcyctcttcatagatacttactctgatgtaggaagatacattgaccattatgctgctattaaaaaggcctgggatgatctcaagaaatatttggagcccaggtgtcctcggatggttttatctctgaaagagggtgctcgagaggaagacctcgatgctgtggaagcgcagattggctgcaagcttcctgacgattatcgatgttcataccgaattcacaatggacagaagttagtggttcctgggttattgggaagcatggcactgtctaatcactatcgttctgaagatttgttagacgtcgatacagctgccggaggattccagcagagacagggactgaaatactgtctccctttaactttttgcatacatactggtttgagtcagtacatagcagtggaagctgcagagggccgaaacaaaaatgaarttttctaccaatgtccagaccaaatggctcgaaatccagctgctattgacatgtttattataggtgctacttttactgactggtttacctcttatgtcaaaaatgttgtatcaggtggcttccccatcatcagagaccaaattttcagatatgttcacgatccagaatgtgtagcaacaactggggatattactgtgtcagtttccacatcgtttctgccagaacttagctctgtacatccaccccactatttcttcacataccgaatcaggattgaaatgtcaaaagatgcacttcctgagaaggcctgtcagttggacagtcgctattggagaataacaaatgctaagggtgacgtggaagaagttcaaggacctggagtagttggtgaatttccaatcatcagcccaggtcgggtatatgaatacacaagctgtaccacattctctacaacatcaggatacatggaaggatattataccttccattttctttactttaaagacaagatctttaatgttgccattccccgattccatatggcatgtccaacattcagggtgtctatagcccgattggtaagttaaattttcctctagtgctgatttacatgactttgtagggttaacactgcagataagccaggcaaatagttagtttataaatagtgttccagagaaccctagagattttgagaaagtatcttgggggtcatgtgaatttgttgagagaaatggacaagtaaatgaggctccatagtctctaaccagagaatttctgctgttttaaagattcaacttgtttttcactgttcagtggcctaaatgtagattatgagaaataccacattagaccagtagaatcagctttaagactgggaaaacaacttcttacagtgtttttgctcaaacttccaatttaatgtcaaataaacaaatattccataaagatcattataaagaaaatttaatgtgtggatgtgtacttttggcagtctctctgggatcatttcttaagtcaactaggtatattttttaaaatctcgtttttagggttaccttatgacaagtgtaacagtaactccaaccttagagactataacatgattaaagaaagttatgaagctccagttatacaatggggataaaatatgaattatatacccagaatgcaattgagttgtaggtgttgaatctttggaaaatgccctctagcttctggaatgaccctgatggatgggtttaagtttggaaagatggacatgatattaatctgatccagagctgacacattttcaactccagtttgaaaagaga

SEQ ID NO: 5321 - DNA, 4791 bp, Homo sapiens
tttgcatttctttgacagctaatatggttgagtacctgtttttgttttcttcctgttttctaaggagttttctgttacttcctctcactaggttagcaggagcactccatatattcttggcagatgtatatattgcgactatctcctcccactctatcggttgcctttttgctgccctaaatggtgtctctcaatgaatagaggtccttaattttaatatcagtttatcaatgagtcttttcacatttgaaatcatatttataccatgtttagttctgtaaaaccttagaggtagaacacaaatacataaaattgtgaaacataaataaaaatttaaaagcctgggaaatataaattagaagactcagaccagggagttaataagacatgcaaataagccacgtaattctgtgaacgtacaatttagcaatacatattgcttagagcatcttagaagtcaaaactcaattggaaacatgatctgctatgtagttctcattatctgtgagtccstcagacagtatcgagaggatgggatctgacaggtatctgcactcacaagtaactgacrattcgcatattaaagcactaacaggtatattttatgttacaggttattcagcgatagttatgacctcccggttacgtgcgttgggtggaagaattaataatatacgcacctcggagttacccaaagagaaaactcgatcagaagtcatttgcagcatccactttttagatggcgtggtacagacctttaaagttactaaacaagacactggccaggttcttctggatatggtgcacaaccacctgggtgtgactgaaaaggaatattttggtttacagcatgatgacractcygtggactctcctagatggctggaagcaagcaaasccatcaggaagcagttaaaaggaggtttcccctgtaccctgcattttcgagtaagattttttatacctgatcccaacacactgcagcaagaacaaaccaggcacttgtatttcttacaactgaagatggatatttgcgaaggaaggttaacctgycctcttaactcagcagtggttctagcgtcctatgccgtacaatctcattttggagactataattcttccatacatcatccaggctatctttccgatagtcactttatacccgatcaaaatgaggactttttaacaaaagtcgaatctctgcatgagcagcacagtgggctaaaacaatcagaagcagaatcctgctatatcaacatagcgcggaccctcgacttctatggagtagaactgcacagtggtagggatctgcacaatttagacctaatgattggaattgcttccgcgggtgttgctgtgtaccgaaaatacatttgcacaagtttctatccttgggtgaacattctcaaaatttctttcaaaaggaaaaagttcttcatacatcagcgacagaaacaggctgaatccagggaacatattgtggccttcaacatgctgaattaccgatcttgcaaaaacttgtggaaatcctgtgttgagcaccatacgttctttcaggcaaagaagctactacctcaggaaaagartgttctgtctcagtactggactatgggctctcggaacaccaaaaagtcggtaaataaccaatattgcaaaaaggtgattggcgggatggtgtggaacccagccatgcggagatccttatcagtggagcacttagaaaccaagagtctgccttctcgttcccctcccattactcccaactggcgaagtcctcggctccggcacgaaatccgaaagccacgccactcttctgcagataaccttgcaaatgaaatgacctacatcacggaaacggaagatgtattttacacgtacaagggctctctggcccctcaagacagcgattctgaagtttctcagaaccgaagcccgcaccaagagagtttatccgagaacaatccrgcacaaagctacctgacccagaagtcatccagttctgtgtctccatcttcaaatgctccaggctcctgctcacctgacggcgttgatcagcagctcttagatgacttccacagggtgaccaaagggggctccaccgaggacgccagccagtactactgtgacaagaatgataatggtgacagctacttagtcttgatccgtatcacaccagatgaagatggaaaatttggatttaatcttaagggaggagtggatcaaaagatgcctcttgtggtatcaaggataaacccagagtcacctgcggacacctgcattcctaagctgaacgaaggggatcaaatcgtgttaatcaatggccgggacatctcagaacacacgcatgaccaagtggtgatgttcatcaaagccagccgggagtcccactcacgggagctggccctggtgatcaggaggagagctgtccgctcatttgctgacttcaagtctgaagatgaactgaaycagcttttccccgaagccattttccccatgtgtccggagggtggggacactttggagggatccatggcacagctaaagaagggcctcgaaagcgggacggtgctgatccagtttgagcaactctacagaaaaaagccaggtttggccatcacgtttgcaaagctgcctcaaaatttggacaaaaaccgatataaagatgtgctgccttatgacaccacccgggtattattgcagggaaatgaagattatattaatgcaagttacgtgaacatggaaattcctgctgctaaccttgtgaacaagtacatcgccactcaggggcccctgccgcatacctgtgcacagttttggcaggttgtctgggatcagaagttgtcactcattgtcatgttgacgactctcacagaacgagggcggaccaaatgtcaccagtactggccagatcccccyracgtcatgaaccacggcggctttcacatccagtgtcagtcagaggactgcaccatcgcctatgtgtcccgagaaatgctggtcacaaacacccagaccggggaagaacacacagtgacacatctccagtacgtcgcatggcctgaccacggtgtgcccgatgactcctccgactttctggaatttgtaaactatgtgaggtctctgagagtggacagcgagcccgtcctagttcactgcagtgctggaataggtcgaaccggtgtgttggtcactatggaaacagccatgtgcctaactgagaggaacctgcccatttacccactggatattgtccgaaaaatgcgagaccagcgcgccatgatggtgcagacatcaagccagtacaagtttgtgtgtgaagcgattcttcgtgtgtatgaagaaggtttagtccaaatgctggatcctagttaagacaactgtgaaaaagttcattcctctttcccaagggcatcctccttgaaagaggaggacagacctctctggaagcagcaagaggaaccagtagctgtgggaaaggaatgggcacctctgaacccaggcactttaaacttctatagaaaagatatcgtgtacataggaactggtgtagataagcatgcaattatggcatcatttaggcctgtatttctatggaaagatacaaaaaggatctcagtttggggcctgtcctaatgccttcttccctaacatcaccacacacacccctgtcggcatcctggagcaattgagaccggacacccacagagctgttgtcctcccagcaacaagatggtgtggttatcttgggtcatttggatgttttgtttgtttctgtgtgtcagactgtaagggctgagctttctgtgcttctaggtggagctggaacaattcagattcacccgccctgatgctaaggaaaccctgacgtatgtactagatggcagggcactgggggtcaggctgaaggctgagcaacacctctctgccctccctccctttgtcccatctcccagcgacttccaatattcatgtttctgagaattgtgtccctcttcaggttccctcttggtgcctaacctggattagtaatgtgcattcaggtgaattttcagctgaggctctgagaactggtactctcagtgtgttctggtcatcttgtggcttagttgtagaagcaggtgtgtctcttgcctctgcttgcctcctactgcacactcagcacccaggactggaatcaccgactactgaatctcctacatgtattgctgctacttcaagctcctccacttgaaaccttatgattttcccaaggggagatgggacagtgtcatctaaatattccgaatgtttggccttctgagaaaagagcttctagtaattgaaccatgggaaacccagcttctggagggttggccgtggggctgtgtacatgtgtgtgcccaggggtgagtgtttctcaggattcctaacgattcaaattaccgttgagtatatataaagaatgagtctctgtatggaagaacaaatgtgtgcattcacccccagtcacaatggtctccattgcatttcaaaggagaggatcagactatctgaatataaacacaatctgatgttaatttattctaagaacaccatcattttgattgtcctaaagaattctgcctttgtgaataccgtgttaaatttttttaaatttgtgacaggattgtagcaaattattatttaaggaaaataaattgtgtaaacatttaatgtggtatttttgaacagcggtttttatgtactcagaagaggaagtaaagccaggttcttaatggtatttatagaaaagatgttttcatattataatgc

SEQ ID NO: 5322 - DNA, 4188 bp, Homo sapiens
tttgcatttctttgacagctaatatggttgagtacctgtttttgttttcttcctgttttctaaggagttttctgttacttcctctcactaggttagcaggagcactccatatattcttggcagatgtatatattgcgactatctcctcccactctatcggttgcctttttgctgccctaaatggtgtctctcaatgaatagaggtccttaattttaatatcagtttatcaatgagtcttttcacatttgaaatcatatttataccatgtttagttctgtaaaaccttagaggtagaacacaaatacataaaattgtgaaacataaataaaaatttaaaagcctgggaaatataaattagaagactcagaccagggagttaataagacatgcaaataagccacgtaattctgtgaacgtacaatttagcaatacatattgcttagagcatcttagaagtcaaaactcaattggaaacatgatctgctatgtagttctcattatctgtgagtccstcagacagtatcgagaggatgggatctgacaggtatctgcactcacaagtaactgacrattcgcatattaaagcactaacaggtatattttatgttacaggttattcagcgatagttatgacctcccggttacgtgcgttgggtggaagaattaataatatacgcacctcggagttacccaaagagaaaactcgatcagaagtcatttgcagcatccactttttagatggcgtggtacagacctttaaagttactaaacaagacactggccaggttcttctggatatggtgcacaaccacctgggtgtgactgaaaaggaatattttggtttacagcatgatgacractcygtggactctcctagatggctggaagcaagcaaasccatcaggaagcagttaaaaggaggtttcccctgtaccctgcattttcgagtaagattttttatacctgatcccaacacactgcagcaagaacaaaccaggcacttgtatttcttacaactgaagatggatatttgcgaaggaaggttaacctgycctcttaactcagcagtggttctagcgtcctatgccgtacaatctcattttggagactataattcttccatacatcatccaggctatctttccgatagtcactttatacccgatcaaaatgaggactttttaacaaaagtcgaatctctgcatgagcagcacagtgggctaaaacaatcagaagcagaatcctgctatatcaacatagcgcggaccctcgacttctatggagtagaactgcacagtggtagggatctgcacaatttagacctaatgattggaattgcttccgcgggtgttgctgtgtaccgaaaatacatttgcacaagtttctatccttgggtgaacattctcaaaatttctttcaaaaggaaaaagttcttcatacatcagcgacagaaacaggctgaatccagggaacatattgtggccttcaacatgctgaattaccgatcttgcaaaaacttgtggaaatcctgtgttgagcaccatacgttctttcaggcaaagaagctactacctcaggaaaagartgttctgtctcagtactggactatgggctctcggaacaccaaaaagtcggtaaataaccaatattgcaaaaaggtgattggcgggatggtgtggaacccagccatgcggagatccttatcagtggagcacttagaaaccaagagtctgccttctcgttcccctcccattactcccaactgggaggagtggatcaaaagatgcctcttgtggtatcaaggataaacccagagtcacctgcggacacctgcattcctaagctgaacgaaggggatcaaatcgtgttaatcaatggccgggacatctcagaacacacgcatgaccaagtggtgatgttcatcaaagccagccgggagtcccactcacgggagctggccctggtgatcaggaggagagcaactctacagaaaaaagccaggtttggccatcacgtttgcaaagctgcctcaaaatttggacaaaaaccgatataaagatgtgctgccttatgacaccacccgggtattattgcagggaaatgaagattatattaatgcaagttacgtgaacatggaaattcctgctgctaaccttgtgaacaagtacatcgccactcaggggcccctgccgcatacctgtgcacagttttggcaggttgtctgggatcagaagttgtcactcattgtcatgttgacgactctcacagaacgagggcggaccaaatgtcaccagtactggccagatccccccgacgtcatgaaccacggcggctttcacatccagtgtcagtcagaggactgcaccatcgcctatgtgtcccgagaaatgctggtcacaaacacccagaccggggaagaacacacagtgacacatctccagtacgtcgcatggcctgaccacggtgtgcccgatgactcctccgactttctggaatttgtaaactatgtgaggtctctgagagtggacagcgagcccgtcctagttcactgcagtgctggaataggtcgaaccggtgtgttggtcactatggaaacagccatgtgcctaactgagaggaacctgcccatttacccactggatattgtccgaaaaatgcgagaccagcgcgccatgatggtgcagacatcaagccagtacaagtttgtgtgtgaagcgattcttcgtgtgtatgaagaaggtttagtccaaatgctggatcctagttaagacaactgtgaaaaagttcattcctctttcccaagggcatcctccttgaaagaggaggacagacctctctggaagcagcaagaggaaccagtagctgtgggaaaggaatgggcacctctgaacccaggcactttaaacttctatagaaaagatatcgtgtacataggaactggtgtagataagcatgcaattatggcatcatttaggcctgtatttctatggaaagatacaaaaaggatctcagtttggggcctgtcctaatgccttcttccctaacatcaccacacacacccctgtcggcatcctggagcaattgagaccggacacccacagagctgttgtcctcccagcaacaagatggtgtggttatcttgggtcatttggatgttttgtttgtttctgtgtgtcagactgtaagggctgagctttctgtgcttctaggtggagctggaacaattcagattcacccgccctgatgctaaggaaaccctgacgtatgtactagatggcagggcactgggggtcaggctgaaggctgagcaacacctctctgccctccctccctttgtcccatctcccagcgacttccaatattcatgtttctgagaattgtgtccctcttcaggttccctcttggtgcctaacctggattagtaatgtgcattcaggtgaattttcagctgaggctctgagaactggtactctcagtgtgttctggtcatcttgtggcttagttgtagaagcaggtgtgtctcttgcctctgcttgcctcctactgcacactcagcacccaggactggaatcaccgactactgaatctcctacatgtattgctgctacttcaagctcctccacttgaaaccttatgattttcccaaggggagatgggacagtgtcatctaaatattccgaatgtttggccttctgagaaaagagcttctagtaattgaaccatgggaaacccagcttctggagggttggccgtggggctgtgtacatgtgtgtgcccaggggtgagtgtttctcaggattcctaacgattcaaattaccgttgagtatatataaagaatgagtctctgtatggaagaacaaatgtgtgcattcacccccagtcacaatggtctccattgcatttcaaaggagaggatcagactatctgaatataaacacaatctgatgttaatttattctaagaacaccatcattttgattgtcctaaagaattctgcctttgtgaataccgtgttaaatttttttaaatttgtgacaggattgtagcaaattattatttaaggaaaataaattgtgtaaacatttaatgtggtatttttgaacagcggtttttatgtactcagaagaggaagtaaagccaggttcttaatggtatttatagaaaagatgttttcatattataatgc

SEQ ID NO: 5323 - DNA, 4178 bp, Homo sapiens
gttattcagcgatagttatgacctcccggttacgtgcgttgggtggaagaattaataatatacgcacctcggagttacccaaagagaaaactcgatcagaagtcatttgcagcatccactttttagatggcgtggtacagacctttaaagttactaaacaagacactggccaggttcttctggatatggtgcacaaccacctgggtgtgactgaaaaggaatattttggtttacagcatgatgacractcygtggactctcctagatggctggaagcaagcaaasccatcaggaagcagttaaaaggaggtttcccctgtaccctgcattttcgagtaagattttttatacctgatcccaacacactgcagcaagaacaaaccaggcacttgtatttcttacaactgaagatggatatttgcgaaggaaggttaacctgycctcttaactcagcagtggttctagcgtcctatgccgtacaatctcattttggagactataattcttccatacatcatccaggctatctttccgatagtcactttatacccgatcaaaatgaggactttttaacaaaagtcgaatctctgcatgagcagcacagtgggctaaaacaatcagaagcagaatcctgctatatcaacatagcgcggaccctcgacttctatggagtagaactgcacagtggtagggatctgcacaatttagacctaatgattggaattgcttccgcgggtgttgctgtgtaccgaaaatacatttgcacaagtttctatccttgggtgaacattctcaaaatttctttcaaaaggaaaaagttcttcatacatcagcgacagaaacaggctgaatccagggaacatattgtggccttcaacatgctgaattaccgatcttgcaaaaacttgtggaaatcctgtgttgagcaccatacgttctttcaggcaaagaagctactacctcaggaaaagartgttctgtctcagtactggactatgggctctcggaacaccaaaaagtcggtaaataaccaatattgcaaaaaggtgattggcgggatggtgtggaacccagccatgcggagatccttatcagtggagcacttagaaaccaagagtctgccttctcgttcccctcccattactcccaactggcgaagtcctcggctccggcacgaaatccgaaagccacgccactcttctgcagataaccttgcaaatgaaatgacctacatcacggaaacggaagatgtattttacacgtacaagggctctctggcccctcaagacagcgattctgaagtttctcagaaccgaagcccgcaccaagagagtttatccgagaacaatccrgcacaaagctacctgacccagaagtcatccagttctgtgtctccatcttcaaatgctccaggctcctgctcacctgacggcgttgatcagcagctcttagatgacttccacagggtgaccaaagggggctccaccgaggacgccagccagtactactgtgacaagaatgataatggtgacagctacttagtcttgatccgtatcacaccagatgaagatggaaaatttggatttaatcttaagggaggagtggatcaaaagatgcctcttgtggtatcaaggataaacccagagtcacctgcggacacctgcattcctaagctgaacgaaggggatcaaatcgtgttaatcaatggccgggacatctcagaacacacgcatgaccaagtggtgatgttcatcaaagccagccgggagtcccactcacgggagctggccctggtgatcaggaggagagctgtccgctcatttgctgacttcaagtctgaagatgaactgaaycagcttttccccgaagccattttccccatgtgtccggagggtggggacactttggagggatccatggcacagctaaagaagggcctcgaaagcgggacggtgctgatccagtttgagcaactctacagaaaaaagccaggtttggccatcacgtttgcaaagctgcctcaaaatttggacaaaaaccgatataaagatgtgctgccttatgacaccacccgggtattattgcagggaaatgaagattatattaatgcaagttacgtgaacatggaaattcctgctgctaaccttgtgaacaagtacatcgccactcaggggcccctgccgcatacctgtgcacagttttggcaggttgtctgggatcagaagttgtcactcattgtcatgttgacgactctcacagaacgagggcggaccaaatgtcaccagtactggccagatcccccyracgtcatgaaccacggcggctttcacatccagtgtcagtcagaggactgcaccatcgcctatgtgtcccgagaaatgctggtcacaaacacccagaccggggaagaacacacagtgacacatctccagtacgtcgcatggcctgaccacggtgtgcccgatgactcctccgactttctggaatttgtaaactatgtgaggtctctgagagtggacagcgagcccgtcctagttcactgcagtgctggaataggtcgaaccggtgtgttggtcactatggaaacagccatgtgcctaactgagaggaacctgcccatttacccactggatattgtccgaaaaatgcgagaccagcgcgccatgatggtgcagacatcaagccagtacaagtttgtgtgtgaagcgattcttcgtgtgtatgaagaaggtttagtccaaatgctggatcctagttaagacaactgtgaaaaagttcattcctctttcccaagggcatcctccttgaaagaggaggacagacctctctggaagcagcaagaggaaccagtagctgtgggaaaggaatgggcacctctgaacccaggcactttaaacttctatagaaaagatatcgtgtacataggaactggtgtagataagcatgcaattatggcatcatttaggcctgtatttctatggaaagatacaaaaaggatctcagtttggggcctgtcctaatgccttcttccctaacatcaccacacacacccctgtcggcatcctggagcaattgagaccggacacccacagagctgttgtcctcccagcaacaagatggtgtggttatcttgggtcatttggatgttttgtttgtttctgtgtgtcagactgtaagggctgagctttctgtgcttctaggtggagctggaacaattcagattcacccgccctgatgctaaggaaaccctgacgtatgtactagatggcagggcactgggggtcaggctgaaggctgagcaacacctctctgccctccctccctttgtcccatctcccagcgacttccaatattcatgtttctgagaattgtgtccctcttcaggttccctcttggtgcctaacctggattagtaatgtgcattcaggtgaattttcagctgaggctctgagaactggtactctcagtgtgttctggtcatcttgtggcttagttgtagaagcaggtgtgtctcttgcctctgcttgcctcctactgcacactcagcacccaggactggaatcaccgactactgaatctcctacatgtattgctgctacttcaagctcctccacttgaaaccttatgattttcccaaggggagatgggacagtgtcatctaaatattccgaatgtttggccttctgagaaaagagcttctagtaattgaaccatgggaaacccagcttctggagggttggccgtggggctgtgtacatgtgtgtgcccaggggtgagtgtttctcaggattcctaacgattcaaattaccgttgagtatatataaagaatgagtctctgtatggaagaacaaatgtgtgcattcacccccagtcacaatggtctccattgcatttcaaaggagaggatcagactatctgaatataaacacaatctgatgttaatttattctaagaacaccatcattttgattgtcctaaagaattctgcctttgtgaataccgtgttaaatttttttaaatttgtgacaggattgtagcaaattattatttaaggaaaataaattgtgtaaacatttaatgtggtatttttgaacagcggtttttatgtactcagaagaggaagtaaagccaggttcttaatggtatttatagaaaagatgttttcatattataatgc

SEQ ID NO: 5324 - DNA, 3936 bp, Homo sapiens
gcgagcgagcttccgcgccgcccgcacgcgcgacctacctgggcgctccgcgcccccggatgctgcaggttattcagcgatagttatgacctcccggttacgtgcgttgggtggaagaattaataatatacgcacctcggagttacccaaagagaaaactcgatcagaagtcatttgcagcatccactttttagatggcgtggtacagacctttaaagttactaaacaagacactggccaggttcttctggatatggtgcacaaccacctgggtgtgactgaaaaggaatattttggtttacagcatgatgacractcygtggactctcctagatggctggaagcaagcaaasccatcaggaagcagttaaaaggaggtttcccctgtaccctgcattttcgagtaagattttttatacctgatcccaacacactgcagcaagaacaaaccaggcacttgtatttcttacaactgaagatggatatttgcgaaggaaggttaacctgycctcttaactcagcagtggttctagcgtcctatgccgtacaatctcattttggagactataattcttccatacatcatccaggctatctttccgatagtcactttatacccgatcaaaatgaggactttttaacaaaagtcgaatctctgcatgagcagcacagtgggctaaaacaatcagaagcagaatcctgctatatcaacatagcgcggaccctcgacttctatggagtagaactgcacagtggtagggatctgcacaatttagacctaatgattggaattgcttccgcgggtgttgctgtgtaccgaaaatacatttgcacaagtttctatccttgggtgaacattctcaaaatttctttcaaaaggaaaaagttcttcatacatcagcgacagaaacaggctgaatccagggaacatattgtggccttcaacatgctgaattaccgatcttgcaaaaacttgtggaaatcctgtgttgagcaccatacgttctttcaggcaaagaagctactacctcaggaaaagartgttctgtctcagtactggactatgggctctcggaacaccaaaaagtcggtaaataaccaatattgcaaaaaggtgattggcgggatggtgtggaacccagccatgcggagatccttatcagtggagcacttagaaaccaagagtctgccttctcgttcccctcccattactcccaactggcgaagtcctcggctccggcacgaaatccgaaagccacgccactcttctgcagataaccttgcaaatgaaatgacctacatcacggaaacggaagatgtattttacacgtacaagggctctctggcccctcaagacagcgattctgaagtttctcagaaccgaagcccgcaccaagagagtttatccgagaacaatccrgcacaaagctacctgacccagaagtcatccagttctgtgtctccatcttcaaatgctccaggctcctgctcacctgacggcgttgatcagcagctcttagatgacttccacagggtgaccaaagggggctccaccgaggacgccagccagtactactgtgacaagaatgataatggtgacagctacttagtcttgatccgtatcacaccagatgaagatggaaaatttggatttaatcttaagggaggagtggatcaaaagatgcctcttgtggtatcaaggataaacccagagtcacctgcggacacctgcattcctaagctgaacgaaggggatcaaatcgtgttaatcaatggccgggacatctcagaacacacgcatgaccaagtggtgatgttcatcaaagccagccgggagtcccactcacgggagctggccctggtgatcaggaggagagctgtccgctcatttgctgacttcaagtctgaagatgaactgaaycagcttttccccgaagccattttccccatgtgtccggagggtggggacactttggagggatccatggcacagctaaagaagggcctcgaaagcgggacggtgctgatccagtttgagcaactctacagaaaaaagccaggtttggccatcacgtttgcaaagctgcctcaaaatttggacaaaaaccgatataaagatgtgctgccttatgacaccacccgggtattattgcagggaaatgaagattatattaatgcaagttacgtgaacatggaaattcctgctgctaaccttgtgaacaagtacatcgccactcaggggcccctgccgcatacctgtgcacagttttggcaggttgtctgggatcagaagttgtcactcattgtcatgttgacgactctcacagaacgagggcggaccaaatgtcaccagtactggccagatcccccyracgtcatgaaccacggcggctttcacatccagtgtcagtcagaggactgcaccatcgcctatgtgtcccgagaaatgctggtcacaaacacccagaccggggaagaacacacagtgacacatctccagtacgtcgcatggcctgaccacggtgtgcccgatgactcctccgactttctggaatttgtaaactatgtgaggtctctgagagtggacagcgagcccgtcctagttcactgcagtgctggaataggtcgaaccggtgtgttggtcactatggaaacagccatgtgcctaactgagaggaacctgcccatttacccactggatattgtccgaaaaatgcgagaccagcgcgccatgatggtgcagacatcaagccagtacaagtttgtgtgtgaagcgattcttcgtgtgtatgaagaaggtttagtccaaatgctggatcctagttaagacaactgtgaaaaagttcattcctctttcccaagggcatcctccttgaaagaggaggacagacctctctggaagcagcaagaggaaccagtagctgtgggaaaggaatgggcacctctgaacccaggcactttaaacttctatagaaaagatatcgtgtacataggaactggtgtagataagcatgcaattatggcatcatttaggcctgtatttctatggaaagatacacacacacccctgtcggcatcctggagcaattgagaccggacacccacagagctgttgtcctcccagcaacaagatggtgtggttatcttgggtcatttggatgttttgtttgtttctgtgtgtcagactgtaagggctgagctttctgtgcttctaggtggagctggaacaattcagattcacccgccctgatgctaaggaaaccctgacgtatgtactagatggcagggcactgggggtcaggctgaaggctgagcaacacctctctgccctccctccctttgtcccatctcccagcgacttccaatattcatgtttctgagaattgtgtccctcttcaggttccctcttggtgcctaacctggattagtaatgtgcattcaggtgaattttcagctgaggctctgagaactggtactctcagtgtgttctggtcatcttgtggcttagttgtagaagcaggtgtgtctcttgcctctgcttgcctcctactgcacactcagcacccaggactggaatcaccgactactgaatctcctacatgtattgctgctacttcaagctcctccacttgaaaccttatgattttcccaaggggagatgggacagtgtcatctaaatattccgaatgtttggccttctgagaaaagagcttctagtaattgaaccatgggaaacccagcttctggagggttggccgtggggctgtgtacatgtgtgtgcccagggaaatcaactcttttggaggagagtgctctctgctcatctccaccttccctctggtcaggagcatgaactcccatcttggccttgtcctggggtattagtccattctcatgctgctaataaagacatacctgagactgggtaatttatga

SEQ ID NO: 5325 - DNA, 4246 bp, Homo sapiens
gcgagcgagcttccgcgccgcccgcacgcgcgacctacctgggcgctccgcgcccccggatgctgcaggttattcagcgatagttatgacctcccggttacgtgcgttgggtggaagaattaataatatacgcacctcggagttacccaaagagaaaactcgatcagaagtcatttgcagcatccactttttagatggcgtggtacagacctttaaagttactaaacaagacactggccaggttcttctggatatggtgcacaaccacctgggtgtgactgaaaaggaatattttggtttacagcatgatgacractcygtggactctcctagatggctggaagcaagcaaasccatcaggaagcagttaaaaggaggtttcccctgtaccctgcattttcgagtaagattttttatacctgatcccaacacactgcagcaagaacaaaccaggcacttgtatttcttacaactgaagatggatatttgcgaaggaaggttaacctgycctcttaactcagcagtggttctagcgtcctatgccgtacaatctcattttggagactataattcttccatacatcatccaggctatctttccgatagtcactttatacccgatcaaaatgaggactttttaacaaaagtcgaatctctgcatgagcagcacagtgggctaaaacaatcagaagcagaatcctgctatatcaacatagcgcggaccctcgacttctatggagtagaactgcacagtggtagggatctgcacaatttagacctaatgattggaattgcttccgcgggtgttgctgtgtaccgaaaatacatttgcacaagtttctatccttgggtgaacattctcaaaatttctttcaaaaggaaaaagttcttcatacatcagcgacagaaacaggctgaatccagggaacatattgtggccttcaacatgctgaattaccgatcttgcaaaaacttgtggaaatcctgtgttgagcaccatacgttctttcaggcaaagaagctactacctcaggaaaagartgttctgtctcagtactggactatgggctctcggaacaccaaaaagtcggtaaataaccaatattgcaaaaaggtgattggcgggatggtgtggaacccagccatgcggagatccttatcagtggagcacttagaaaccaagagtctgccttctcgttcccctcccattactcccaactggcgaagtcctcggctccggcacgaaatccgaaagccacgccactcttctgcagataaccttgcaaatgaaatgacctacatcacggaaacggaagatgtattttacacgtacaagggctctctggcccctcaagacagcgattctgaagtttctcagaaccgaagcccgcaccaagagagtttatccgagaacaatccrgcacaaagctacctgacccagaagtcatccagttctgtgtctccatcttcaaatgctccaggctcctgctcacctgacggcgttgatcagcagctcttagatgacttccacagggtgaccaaagggggctccaccgaggacgccagccagtactactgtgacaagaatgataatggtgacagctacttagtcttgatccgtatcacaccagatgaagatggaaaatttggatttaatcttaagggaggagtggatcaaaagatgcctcttgtggtatcaaggataaacccagagtcacctgcggacacctgcattcctaagctgaacgaaggggatcaaatcgtgttaatcaatggccgggacatctcagaacacacgcatgaccaagtggtgatgttcatcaaagccagccgggagtcccactcacgggagctggccctggtgatcaggaggagagctgtccgctcatttgctgacttcaagtctgaagatgaactgaaycagcttttccccgaagccattttccccatgtgtccggagggtggggacactttggagggatccatggcacagctaaagaagggcctcgaaagcgggacggtgctgatccagtttgagcaactctacagaaaaaagccaggtttggccatcacgtttgcaaagctgcctcaaaatttggacaaaaaccgatataaagatgtgctgccttatgacaccacccgggtattattgcagggaaatgaagattatattaatgcaagttacgtgaacatggaaattcctgctgctaaccttgtgaacaagtacatcgccactcaggggcccctgccgcatacctgtgcacagttttggcaggttgtctgggatcagaagttgtcactcattgtcatgttgacgactctcacagaacgagggcggaccaaatgtcaccagtactggccagatcccccyracgtcatgaaccacggcggctttcacatccagtgtcagtcagaggactgcaccatcgcctatgtgtcccgagaaatgctggtcacaaacacccagaccggggaagaacacacagtgacacatctccagtacgtcgcatggcctgaccacggtgtgcccgatgactcctccgactttctggaatttgtaaactatgtgaggtctctgagagtggacagcgagcccgtcctagttcactgcagtgctggaataggtcgaaccggtgtgttggtcactatggaaacagccatgtgcctaactgagaggaacctgcccatttacccactggatattgtccgaaaaatgcgagaccagcgcgccatgatggtgcagacatcaagccagtacaagtttgtgtgtgaagcgattcttcgtgtgtatgaagaaggtttagtccaaatgctggatcctagttaagacaactgtgaaaaagttcattcctctttcccaagggcatcctccttgaaagaggaggacagacctctctggaagcagcaagaggaaccagtagctgtgggaaaggaatgggcacctctgaacccaggcactttaaacttctatagaaaagatatcgtgtacataggaactggtgtagataagcatgcaattatggcatcatttaggcctgtatttctatggaaagatacaaaaaggatctcagtttggggcctgtcctaatgccttcttccctaacatcaccacacacacccctgtcggcatcctggagcaattgagaccggacacccacagagctgttgtcctcccagcaacaagatggtgtggttatcttgggtcatttggatgttttgtttgtttctgtgtgtcagactgtaagggctgagctttctgtgcttctaggtggagctggaacaattcagattcacccgccctgatgctaaggaaaccctgacgtatgtactagatggcagggcactgggggtcaggctgaaggctgagcaacacctctctgccctccctccctttgtcccatctcccagcgacttccaatattcatgtttctgagaattgtgtccctcttcaggttccctcttggtgcctaacctggattagtaatgtgcattcaggtgaattttcagctgaggctctgagaactggtactctcagtgtgttctggtcatcttgtggcttagttgtagaagcaggtgtgtctcttgcctctgcttgcctcctactgcacactcagcacccaggactggaatcaccgactactgaatctcctacatgtattgctgctacttcaagctcctccacttgaaaccttatgattttcccaaggggagatgggacagtgtcatctaaatattccgaatgtttggccttctgagaaaagagcttctagtaattgaaccatgggaaacccagcttctggagggttggccgtggggctgtgtacatgtgtgtgcccaggggtgagtgtttctcaggattcctaacgattcaaattaccgttgagtatatataaagaatgagtctctgtatggaagaacaaatgtgtgcattcacccccagtcacaatggtctccattgcatttcaaaggagaggatcagactatctgaatataaacacaatctgatgttaatttattctaagaacaccatcattttgattgtcctaaagaattctgcctttgtgaataccgtgttaaatttttttaaatttgtgacaggattgtagcaaattattatttaaggaaaataaattgtgtaaacatttaatgtggtatttttgaacagcggtttttatgtactcagaagaggaagtaaagccaggttcttaatggtatttatagaaaagatgttttcatattataatgc

SEQ ID NO: 5326 - DNA, 1700 bp, Homo sapiens
cgctgccgctgccgctgccgctgccgccgccggcccggactcgtccggagcgcagggtgtctgcccagctgcgcgcggcgcgcggaggctccggcgtccgccgtgcgccctccggcccctgctcctcgcgccggcccgcttgggtcctggcgggcgcgaacccaccatgcagctgcagttccggagctggatgctggccgcgctcacgctgctcgtggtcttcctcatcttcgcagacatctcagagatcgaagaagaaatcgggaattcgggaggcagaggtacaatcagatcagctgtgaacagcttacatagcaaatctaatagagctgaagttgtaataaacggctcctcatcaccagctgttgttgacagaagtaatgaaagcatcaagcacaacatccagccagcctcgtccaaatggagacataaccagacgctctctctgaggatcaggaagcagattttaaagttcttggatgctgaaaaggacatttctgtcctaaagggaaccctgaagcctggagatattattcattacatcttcgatcgagacagcaccatgaatgtgtcccagaacctctacgagctcctccccaggacttcgccactgaagaataagcactttgggacttgtgccatcgtgggcaactcgggggtcttgctgaacagcggctgtgggcaggagattgacgcccacagcttcgtcatcaggtgcaacctggccccagtacaggagtatgcccgggatgtggggctcaagacagacctggtaaccatgaacccstcggtcatccagcgggcctttgaggacttggtcaatgccacgtggcgggagaagctgctgcaacggctgcacagcctcaatggcagcatcctgtggatccctgccttcatggcccggggcggcaaggagcgtgttgagtgggtcaacgagcttatcctgaagcaccacgtcaacgtgcgcactgcatacccctcgctgcgcctgctgcacgccgttcgcggatactggctgaccaacaaagtccacatcaaaagacccaccaccggcctcttgatgtataccctggccacacgtttctgcaaacaaatctacctcgaggcaktcctgaccactagaactgtgcttggcacagagtaggcacttaataaactcctgctgcatgaacaaaagaacaagtgtggatgcttcaaaggaagacttgcacccgrctgacccccagagtggggaaggggtcccacctaataggaagaacaccaagacttccccaagaggagaaggaacggctccccctttctcggcgaggccatgtgtctggaccctgtgtgagatgctttctatactagcccttgttggggtgttgcacccattttacagatcaaacaaccaagtttatcagaaattaaagactcatttaagatgccaaagctcacgagtggatggtttgatgctgaagccaacattgttaacaccatctcagctcaaaagccctgaaggccacttaattctaccaaccttcaaccatcttgtcataagacacatcctcgacccaaagcagatattctgtgtagctgatgtgtgtacagattgcaaattcaattgcggaagcatagagaggcaccagaagaggcatcttatgagagtcagccaggactgggaacatttaataagatacagaaaccagatttgcttgagc

SEQ ID NO: 5327 - DNA, 1294 bp, Homo sapiens
cgctgccgctgccgctgccgctgccgccgccggcccggactcgtccggagcgcagggtgtctgcccagctgcgcgcggcgcgcggaggctccggcgtccgccgtgcgccctccggcccctgctcctcgcgccggcccgcttgggtcctggcgggcgcgaacccaccatgcagctgcagttccggagctggatgctggccgcgctcacgctgctcgtggtcttcctcatcttcgcagacatctcagagatcgaagaagaaatcgggaattcgggaggcagaggtacaatcagatcagctgtgaacagcttacatagcaaatctaatagagctgaagttgtaataaacggctcctcatcaccagctgttgttgacagaagtaatgaaagcatcaagcacaacatccagccagcctcgtccaaatggagacataaccagacgctctctctgaggatcaggaagcagattttaaagttcttggatgctgaaaaggacatttctgtcctaaagggaaccctgaagcctggagatattattcattacatcttcgatcgagacagcaccatgaatgtgtcccagaacctctacgagctcctccccaggacttcgccactgaagaataagcactttgggacttgtgccatcgtgggcaactcgggggtcttgctgaacagcggctgtgggcaggagattgacgcccacagcttcgtcatcaggtgcaacctggccccagtacaggagtatgcccgggatgtggggctcaagacagacctggtaaccatgaacccstcggtcatccagcgggcctttgaggacttggtcaatgccacgtggcgggagaagctgctgcaacggctgcacagcctcaatggcagcatcctgtggatccctgccttcatggcccggggcggcaaggagcgtgttgagtgggtcaacgagcttatcctgaagcaccacgtcaacgtgcgcactgcatacccctcgctgcgcctgctgcacgccgttcgcggatactggctgaccaacaaagtccacatcaaaagacccaccaccggcctcttgatgtataccctggccacacgtttctgcaaacaaatctacctctacggcttctggccctttccgctggatcagaaccagaacccagtcaagtaccactattatgacagcctcaagtatggctacacctcccaggccagcccgcataccatgcccttggagtttaaggccctcaagagcctacatgagcagggggctttgaaactgactgtcggccagtgcgatggggccacgtag

SEQ ID NO: 5328 - DNA, 3526 bp, Homo sapiens
ttccgggggcgggacgcgccgaggagtggggcgcgagccgccggttttgattagtgcggcggagctgcggcggtggagctgctcggccgggagcccggcggcgagacggagaggcggcggaggtgcccgcgcgcagggtctggtgggcggccgcgaggctcgggagaggcgaaccggagcgcgggaccgcggtcgccccgaccagagccgggagaccgcagcacccgcagccgcccgcgagcgcgccgaagacagcgcgcaggcgagagcgcgcgggcgggggcgcgcaggccctgcccgccccttccgtccccacccccctccgccctttcctctccccaccttcctctcgcctcccgcgcccccgcaccgggcgcccaccctgtcctcctcctgcgggagcgttgtccgtgttggcggccgcagcgggccgggccggtccggcgggccgggggatggcgctgctggacctggccttggagggaatggccgtcttcgggttcgtcctcttcttggtgctgtggctgatgcatttcatggctatcatctacacccgattacacctcaacaagaaggcaactgacaaacagccttatagcaagctcccaggtgtctctcttctgaaaccactgaaaggggtagatcctaacttaatcaacaacctggaaacattctttgaattggattatcccaaatatgaagtrctcctttgtgtacaagatcatgatgatccagccattgatgtatgtaagaagcttcttggaaaatatccaaatgttgatgctagattgtttataggtggcaaaaaagttggcattaatcctaaaattaataatttaatgccaggatatgaagttgcaaagtatgatcttatatggatttgtgatagtggaataagagtaattccagatacrcttactgacatggtgaatcaaatgacagaaaaagtaggcttggttcacgggctgccttacgtagcagacagacagggctttgctgccaccttagagcaggtatattttggaacttcacatccaagatactatatctctgccaatgtaactggtttcaaatgtgtgacaggaatgtcttgtttaatgagaaaagatgtgttggatcaagcaggaggacttatagcttttgctcagtacattgccgaagattactttatggccaaagcgatagctgaccgaggttggaggtttgcaatgtccactcaagttgcaatgcaaaactctggctcatattcaatttctcagtttcaatccagaatgatcaggtggaccaaactacgaattaacatgcttcctgctacrataatttgtgagccaatttcagaatgctttgttgccagtttaattattggatgggcagcccaccatgtgttcagatgggatattatggtatttttcatgtgtcattgcctggcatggtttatatttgactacattcaactcaggggtgtccagggtggcacactgtgtttttcaaaacttgattatgcagtcgcctggttcatccgcgaatccatgacaatatacatttttttgtctgcattatgggacccaactataagctggagaactggtcgctacagattacgctgtgggggtacagcagaggaaatcctagatgtataactacagctttgtgactgtatataaaggaaaaaagagaagtattataaattatgtttatataaatgcttttaaaaatctaccttctgtagttttatcacatgtatgttttggtatctgttctttaatttatttttgcatggcacttgcatctgtgaaaaaaaaaaaaaacacatctgtagtcttggccaaatgatacactttattttgtggaagtagagaatcaagagaattggttctaggaacctgggttcgttcatcattgttgtttatttttttaaaataaataaataaatatatatatagatgctctgcaacaaactctgtgacagtatccttcagtagagaaagtttcttacttgtgagtacactcttttagaacatttacgggtggcagcagctttgctttagagtttagaagataatagaaggaatgactattcatgtccaaagtgaatggttttgtgcagtgaacaacacatggygaggtactaactgagaaactttttcatgctttatgcctacctcttgtagttgttgcagagcaaatayaaattgtaataagatagctaggccttgcagaaacaaacagaaaaacttaaaaaaaaatgatataagagctggagtctagtatttatatgaatctgtgagagataatttttttggtctcactgcaatgaaccaaaagcggctgagtttggtttttaattgtagccatgtattgaaggcatctttttgaccaactcttgttggttctgtcttgaaccattgttaatcactgtgctgtaattagtatagctaaatcttttccttccttgctcctcccccagcccaccccgtcttcccttaacattttttcagggggggttgggagtggtttcattttagtgtgagtggatgttttgatagttgtaaggaaaaaatgcatttcagacacatttcacacatgagctattttcttacacagtatgtcttattgttaataagaatgtaatttcatgatacaagtatttaataccttttttaagtcagtaaatattctagccatcaataaattgcagtagagtattaagaggggacaggatgagtttactcttaaaattaatcagtatcaaactaagtctactgtgtgtgttttttttttttgttttttgtttttgtttgtttactattatagtaagtctagtcttatttaaattggatttttgtattcmagtttatatgacaaaatagactagatcagcgctggttgtaaatgcatgctgtacctcactgttttctccccatcatgccgctaaacttgctcgccaggttgtgcttaacttgtggtgaactggacttgattctgttttgttttgttttttwaaaaaaaaaaaacaaaaatgtaagggacagtgcataagccttttctttgttaagtagtggtgttttgctttttcttcaggattggatggcatgttgtccacaggaatgcctactgcagggctaacactggcaatatggcagctttaaattctgagttactacagtctccatgtcaaagcataatgtgtagcatatcagcaataactacatatttatagaaaacactttttcactttactgagccaattcatttaattgtcaaatgtctatatccatggtttaaatggcaacatatctataagtatgtatacacattatatttaagcttttctctgggccaaactgcttcatccttttttctttctttttttttttttttagccttatgatgaatttgtttgaagggcattttctttatgaacaaaggcacagtgaaaaccagtctggttgtgacccactacatgttttgtttttaatcactattacctgagttgaactttgctcaccatgtttgtacttgttgg

SEQ ID NO: 5329 - DNA, 4012 bp, Homo sapiens
ttccgggggcgggacgcgccgaggagtggggcgcgagccgccggttttgattagtgcggcggagctgcggcggtggagctgctcggccgggagcccggcggcgagacggagaggcggcggaggtgcccgcgcgcagggtctggtgggcggccgcgaggctcgggagaggcgaaccggagcgcgggaccgcggtcgccccgaccagagccgggagaccgcagcacccgcagccgcccgcgagcgcgccgaagacagcgcgcaggcgagagcgcgcgggcgggggcgcgcaggccctgcccgccccttccgtccccacccccctccgccctttcctctccccaccttcctctcgcctcccgcgcccccgcaccgggcgcccaccctgtcctcctcctgcgggagcgttgtccgtgttggcggccgcagcgggccgggccggtccggcgggccgggggatggcgctgctggacctggccttggagggaatggccgtcttcgggttcgtcctcttcttggtgctgtggctgatgcatttcatggctatcatctacacccgattacacctcaacaagaaggcaactgacaaacagccttatagcaagctcccaggtgtctctcttctgaaaccactgaaaggggtagatcctaacttaatcaacaacctggaaacattctttgaattggattatcccaaatatgaagtrctcctttgtgtacaagatcatgatgatccagccattgatgtatgtaagaagcttcttggaaaatatccaaatgttgatgctagattgtttataggtggcaaaaaagttggcattaatcctaaaattaataatttaatgccaggatatgaagttgcaaagtatgatcttatatggatttgtgatagtggaataagagtaattccagatacrcttactgacatggtgaatcaaatgacagaaaaagtaggcttggttcacgggctgccttacgtagcagacagacagggctttgctgccaccttagagcaggtatattttggaacttcacatccaagatactatatctctgccaatgtaactggtttcaaatgtgtgacaggaatgtcttgtttaatgagaaaagatgtgttggatcaagcaggaggacttatagcttttgctcagtacattgccgaagattactttatggccaaagcgatagctgaccgaggttggaggtttgcaatgtccactcaagttgcaatgcaaaactctggctcatattcaatttctcagtttcaatccagaatgatcaggtggaccaaactacgaattaacatgcttcctgctacrataatttgtgagccaatttcagaatgctttgttgccagtttaattattggatgggcagcccaccatgtgttcagatgggatattatggtatttttcatgtgtcattgcctggcatggtttatatttgactacattcaactcaggggtgtccagggtggcacactgtgtttttcaaaacttgattatgcagtcgcctggttcatccgcgaatccatgacaatatacatttttttgtctgcattatgggacccaactataagctggagaactggtcgctacagattacgctgtgggggtacagcagaggaaatcctagatgtataactacagctttgtgactgtatataaaggaaaaaagagaagtattataaattatgtttatataaatgcttttaaaaatctaccttctgtagttttatcacatgtatgttttggtatctgttctttaatttatttttgcatggcacttgcatctgtgaaaaaaaaaaaaaacacatctgtagtcttggccaaatgatacactttattttgtggaagtagagaatcaagagaattggttctaggaacctgggttcgttcatcattgttgtttatttttttaaaataaataaataaatatatatatagatgctctgcaacaaactctgtgacagtatccttcagtagagaaagtttcttacttgtgagtacactcttttagaacatttacgggtggcagcagctttgctttagagtttagaagataatagaaggaatgactattcatgtccaaagtgaatggttttgtgcagtgaacaacacatggygaggtactaactgagaaactttttcatgctttatgcctacctcttgtagttgttgcagagcaaatayaaattgtaataagatagctaggccttgcagaaacaaacagaaaaacttaaaaaaaaatgatataagagctggagtctagtatttatatgaatctgtgagagataatttttttggtctcactgcaatgaaccaaaagcggctgagtttggtttttaattgtagccatgtattgaaggcatctttttgaccaactcttgttggttctgtcttgaaccattgttaatcactgtgctgtaattagtatagctaaatcttttccttccttgctcctcccccagcccaccccgtcttcccttaacattttttcagggggggttgggagtggtttcattttagtgtgagtggatgttttgatagttgtaaggaaaaaatgcatttcagacacatttcacacatgagctattttcttacacagtatgtcttattgttaataagaatgtaatttcatgatacaagtatttaataccttttttaagtcagtaaatattctagccatcaataaattgcagtagagtattaagaggggacaggatgagtttactcttaaaattaatcagtatcaaactaagtctactgtgtgtgttttttttttttgttttttgtttttgtttgtttactattatagtaagtctagtcttatttaaattggatttttgtattcmagtttatatgacaaaatagactagatcagcgctggttgtaaatgcatgctgtacctcactgttttctccccatcatgccgctaaacttgctcgccaggttgtgcttaacttgtggtgaactggacttgattctgttttgttttgttttttwaaaaaaaaaaaacaaaaatgtaagggacagtgcataagccttttctttgttaagtagtggtgttttgctttttcttcaggattggatggcatgttgtccacaggaatgcctactgcagggctaacactggcaatatggcagctttaaattctgagttactacagtctccatgtcaaagcataatgtgtagcatatcagcaataactacatatttatagaaaacactttttcactttactgagccaattcatttaattgtcaaatgtctatatccatggtttaaatggcaacatatctataagtatgtatacacattatatttaagcttttctctgggccaaactgcttcatccttttttctttctttttttttttttttagccttatgatgaatttgtttgaagggcattttctttatgaacaaaggcttggatgcatattcctttctttctgtgaatgggtattattccctgaggaaagttgcacagtgaaaaccagtctggttgtgacccactacatgttttgtttttaatcactattacctgagttgaactttgctcaccatgtttgtacttgttggtctgtttaatgaagtttggttgatgccatcctttgcactgccgaagcgtaatcttgtgtattacttagctctctgctgatctcagtatggacagtgtaacarcaaaaccaaaatggctggacagacttcttgtgttttgtaaatataaactaggacagttctgtaggtttgttcagtgtgctagtggagtatttccttaatgtaaaacttcacttaacagagagattctttgtttagcaagcttggagtgatgataaaatggtaagaaataatataaatgttgaagaaagcatcacaacagaactataggagtctaaatttaataaatctttaaaaaaaamcagtgtctagaatatataccatgttttattatttaaaatcattgtcttaaatttttgttcaaaaaataaaaatttgaatacaatcaaaa

SEQ ID NO: 5330 - DNA, 6922 bp, Homo sapiens
agatgtgtatatctcatgattgatatggagaaactagtcatgggccaaaggtcaagatacttctctgggaaatgttgctgctgatgctgctttacaaagtcatacaatgagtgtttggtttaagaaagattttcatacttaaaagattttcatcttggaaatacatcaagtgaaaattaaattcttttgggaaacattttccttctgatatattatacttgtaatgggcgacatggcaaacaactcagttgcttacagtggtgtgaaaaactctttgaaggaagctaatcatgatggagactttggaattacgctcgcagagctgcgggctctcatggagctcaggtccacagatgcattacgaaaaatacaggaaagctatggagatgtctatggaatttgcaccaaattgaaaacatctcccaatgaaggtttaagtggaaaccctgcagatttagaaagaagagaagcagtgtttggaaagaattttatacctcctaaaaagccaaaaacctttcttcaattagtatgggaagcattacaagatgtcactttaattatattagaaattgcagccatagtatcattgggcctttctttttatcagcctccagaaggggataatgcactttgtggagaagtttctgttggggaggaagaaggtgaaggtgaaactggktggattgaaggagctgcaatcctcttgtctgtagtgtgtgtggtgttagtaacagctttcaatgactggagtaaggaraaacagtttagaggtttgcagagccgaattgaacaagaacagaagttcactgtcatcaggggtggtcaggtcattcagatacctgtagctgacattactgttggagatattgctcaagtgaaatatggtgatcttcttccagctgacggcatacttattcaaggcaacgatcttaaaattgatgaaagctcattgactggtgaatcagatcatgttaaaaagtctttagataaggatcccttacttctatcaggtactcatgtaatggaaggctctggaagaatggtagttacagctgtaggtgtaaattctcaaactggaattatctttaccttacttggagctggaggtgaagaggaagagaagaaagatgagaagaaaaaggaaaagaaaaataagaaacaagatggagctattgagaatcgcaacaaagcaaaagcmcaggatggtgcagccatggaaatgcagccattgaagagtgaagaaggtggagatggtgatgaaaaagataaaaagaaagcaaatttgccaaaaaaggaaaaatctgttttacaagggaaacttacaaaactggctgttcagattggcaaagcaggtctgttgatgtctgccatcacagttatcattctagtattatattttgtcattgacaccttctgggttcagaaaagaccatggcttgctgagtgcacaccaatttatatacaatactttgtgaagttcttcattattggagttacagttttagtggtcgcagtgccagaaggtcttccacttgcagtcacgatctcactggcttattcagtcaaaaaaatgatgaaagataataacttagtaaggcatctggatgcttgtgaaaccatgggaaatgctacagctatttgttcagataaaacaggaactttgacaatgaacagaatgacagtcgttcaagcttacataaatgaaaaacattataaaaaggttcctgaaccagaagctattccaccaaatattttgtcctatcttgtaacaggaatttctgtgaattgtgcttatacatcaaaaatattgccaccagagaaagagggtggattacctcgtcacgttggtaataaaactgaatgtgccttgttgggacttcttttggatttaaaacgggattatcaggatgttagaaatgaaataccagaagaagcactgtacaaagtctacaccttcaattctgttaggaagtccatgagtactgtcctgaaaaattcagatggaagttatcgaatattcagcaagggtgcatctgagataattctgaaaaagtgtttcaaaatcttgagtgctaatggtgaggcaaaagtattcagaccaagggaccgtgatgatattgtaaaaactgtgattgaaccgatggcatcagaaggcttgagaaccatatgtcttgcattcagagattttccagcaggagaaccagaaccagagtgggataatgaaaatgatattgtcaccggccttacatgcattgctgttgtggggattgaagaycctgtgagacctgaggtgccagatgcaattaaaaagtgtcagagggctggaattactgtgcggatggtcactggtgataatattaatactgctcgggccattgctaccaaatgtggtattttacatcctggggaagattttctgtgcctagaaggtaaagattttaacagaagaatacgaaatgaaaaaggagagattgagcaagagaggatagacaagatttggccaaaacttcgagtacttgcaagatcatctcctactgataagcatacactggttaaaggtataattgacagcactgtctcagaccaacgccaggttgtagctgtaactggtgatggtacaaatgatggcccagcactaaagaaagcagatgttggatttgcaatgggtattgctggaactgatgtagctaaagaagcatccgatattattctcacagatgacaactttacaagcattgttaaagcagttatgtggggacgaaatgtctaygacagcatctcaaaattccttcagttccaacttactgttaatgtagtagcagtgattgttgcttttacgggcgcctgcattactcaagactcaccgcttaaggctgtgcagatgctgtgggtaaacctcataatggatacactcgcttccctggctctggcaacggaaccacccactgagtctctcttgcttcggaaaccttatggtagaaataagcctctcatctcacgtacaatgatgaagaatattttgggtcatgcattctatcaacttgtagtagtctttacactcttatttgctggagaaaagttttttgacattgatagtggaagaaatgctcctttgcatgctcctccttcagaacattatactattgtttttaatacctttgtgctgatgcaacttttcaacgaaataaatgcccggaaaattcatggtgaaagaaatgtattcgaaggaatctttaacaatgccatcttctgcacaattgttttaggcacttttgtggtacagataataattgtgcagtttggtggaaaacctttcagttgttcagaactttcaatagaacagtggctatggtcaatattcctaggaatgggaacattactctggggccagcttatttcaacaattccaactagccgtttaaaattcctcaaagaagctggtcatggaacacaaaaggaagaaatacctgaggaggaattagcagaggatgttgaagagattgatcacgctgaaagggagttgcggcgtggccaaatcttgtggtttagaggtctgaacagaatccaaacacagatggatgtagtgaatgctttccagagtggaagttccattcagggggctctaaggcggcaaccctccatcgccagccagcatcatgatgtaacaaatatttctacccctacacatgtagtgttttcctcttctactgcttctactactgtggggtattcgagtggtgaatgcatttcgtagttctttatatgaagggttagaaaaaccggaatcaagaagttckattcacaactttatgacacatcctgagtttaggatagaagattcagagcctcatatcccccttattgatgacactgatgccgaagatgatgctcctacaaaacgtaactccagtcctccaccctctcccaacaaaaataacaatgctgttgacartggaattcaccttacaatagaaatgaacaagtctgctacctcttcatccccaggaagcccactacatagtttggaaacatcactctgattgtaagctgaatgttaacacactagctgcattgtaaagaaacaaattgaaactgggtcttttcacatattgtgatggacaagctagtattcttgtctttggacttcaacagaagacacacttgtacgaatgtagatttatttttttaaaaaaaaaaaagcaaagctttctgccagactgagggtgctttttggggggtgggagaaatgaactgacagataaacagtaactcagcgtaagtgacctgtggatcatcagtagtacccaagcatggtcctgaacagtgtattagcagagctttagtttatctcagtcctggatgggagagagagggaggagtaaaactgggcaagacaaagagccctggatcgttgaattgatagtttaatttctgctgttggctgttaataatttggattatttatgtttataaatgatacagatctgtttacaaggtttgtagatactttttttgtycctgttcatagatgggaagcttccttataactgatgcagagaaaaattagtccttcaaatactgctgtattttcaggaaaaaaaaaaaaaggggtgtttctattgaaactgtactaaatttttgcctacaatttaccttgttaaatattgtagataaattgctaatactaatagccaaatagataacactaatgctttgtttaaaaaaacgaaaaaaacaaaacaaaacaaaaaaacatgagcagtggtgttctaatgaagttatgacatctgtcctaattagtttcttaaatacatttactacttaatggttttgaagcaactgtttaatttttaaaatttttgaaaacttgctaataaccttttgttcagaatttagtagattgtttaatgcaggacatcaactacataatgaaagatgcttgaaatgcttttgttatttcaggcaaatcaaattaaatcagactatcaaactacaagagaaccttagtcttttttgtttttgtctaaacatgttagtttagtgatgtcttggtgaactgtgagtgaactgtattgatttttctaatctttagagaccttcacacagcatgagggctgttggcattttgaaaaaggttaataagtagaagcatacatgttttccttttgtttttgaaacttgtttgtaaacataaataaatatgcccttttattaaataaattcatggcaatgtttttctgttctctttgaccacaattggaatacatttcaagatggtaacagccccatgaagtaccgctttaattccttgctggtaatctaatagaatcagattaagaaaattaacacaattttaccatttgacatactcttcattgaatttagtttgtctaaaatagtctcacaggtaaaaaacataacaacaatgaccaccattgtctttgatacatttattttaattcttaagtggccaaataacagattaggtaaaatgagattacatgaaaaggttctaaaatgatatatttagatgcaataattaaccatatgctagaatgcccacctctaagccaattggattctttagctctctttttctttccttcatctaccttcttctcttttttgcctctgtctttaccctttagaaactggcatgtgttagggcccagatttcaccagatacacaatcctcaggctgacataaagtttacgaggactgctactataactgagagtgctgaccaagcaaagaaacatttagttgatggtgcttgatatttttggtgggtgggggaaatctttttctcaccatcaaatctttgcagtaatcctctgcaggtcttagaaacacattggctctgtcagcatttgtaattgtacatttattcatcaggtatttatagtgaatcatactgtaaaaaagaggtagcatgatatgctggaaagcatattagactaggagtcaagacctggtttctagtcttggttttgccattaatgtgctgcatgatcttgggaaaatcatttaccctaaataagggtggtggactatcttgaagaaccctttcaactctaaaaattgaccctatcaactggagagcccacaaggcatagggaatagagaaaagggaaatgttttcagttttcttttttattttggttatgcttaaatatgaatgtaattaccaaaagatttagaagtgcatgtgctttggaggatttgtattgagcttttacagtattcatttttcaactcaaggcaatggctttctacaccaactctaatccataaacgggtcttatgacatctatgaagtagtagcaagacatgcttagtgtgtatttctctctttgagacactgtaatttctaccagaaatttccagagcattatgtaggtagaaaaaaatgcaagcaagctgttaaagatcttggatcccattatatagtatgtatagctgaaatctgtaattcaatcactttttctcttttatcctctaaccaaaaaattgtttaattttgcatcccaaatgtttttaatctttgtatattttttaaaaatccttttctcctcatcattgccttttttgtggttgtaaatagacttacttgcactttgaagatgagttactccttgtcatcttacaaatatgtgatatggtaattttcataacagatgtcagttttgaaccaagaattggtgatttgtttataagaaaaaaactggcttcatttctgtgaaattgctctttgaaaatttctttttacacgtgtaagccaactgagataccgtgatggtgttgatttctttcaatgatgcttaccatctattttagccactgagccttttattatttgtctatttgtaaagtttatttgtcttaactcatttaataaatatactgtttatctgtttctga

SEQ ID NO: 5331 - DNA, 6821 bp, Homo sapiens
agatgtgtatatctcatgattgatatggagaaactagtcatgggccaaaggtcaagatacttctctgggaaatgttgctgctgatgctgctttacaaagtcatacaatgagtgtttggtttaagaaagattttcatacttaaaagattttcatcttggaaatacatcaagtgaaaattaaattcttttgggaaacattttccttctgatatattatacttgtaatgggcgacatggcaaacaactcagttgcttacagtggtgtgaaaaactctttgaaggaagctaatcatgatggagactttggaattacgctcgcagagctgcgggctctcatggagctcaggtccacagatgcattacgaaaaatacaggaaagctatggagatgtctatggaatttgcaccaaattgaaaacatctcccaatgaaggtttaagtggaaaccctgcagatttagaaagaagagaagcagtgtttggaaagaattttatacctcctaaaaagccaaaaacctttcttcaattagtatgggaagcattacaagatgtcactttaattatattagaaattgcagccatagtatcattgggcctttctttttatcagcctccagaaggggataatgcactttgtggagaagtttctgttggggaggaagaaggtgaaggtgaaactggktggattgaaggagctgcaatcctcttgtctgtagtgtgtgtggtgttagtaacagctttcaatgactggagtaaggaraaacagtttagaggtttgcagagccgaattgaacaagaacagaagttcactgtcatcaggggtggtcaggtcattcagatacctgtagctgacattactgttggagatattgctcaagtgaaatatggtgatcttcttccagctgacggcatacttattcaaggcaacgatcttaaaattgatgaaagctcattgactggtgaatcagatcatgttaaaaagtctttagataaggatcccttacttctatcaggtactcatgtaatggaaggctctggaagaatggtagttacagctgtaggtgtaaattctcaaactggaattatctttaccttacttggagctggaggtgaagaggaagagaagaaagatgagaagaaaaaggaaaagaaaaataagaaacaagatggagctattgagaatcgcaacaaagcaaaagcmcaggatggtgcagccatggaaatgcagccattgaagagtgaagaaggtggagatggtgatgaaaaagataaaaagaaagcaaatttgccaaaaaaggaaaaatctgttttacaagggaaacttacaaaactggctgttcagattggcaaagcaggtctgttgatgtctgccatcacagttatcattctagtattatattttgtcattgacaccttctgggttcagaaaagaccatggcttgctgagtgcacaccaatttatatacaatactttgtgaagttcttcattattggagttacagttttagtggtcgcagtgccagaaggtcttccacttgcagtcacgatctcactggcttattcagtcaaaaaaatgatgaaagataataacttagtaaggcatctggatgcttgtgaaaccatgggaaatgctacagctatttgttcagataaaacaggaactttgacaatgaacagaatgacagtcgttcaagcttacataaatgaaaaacattataaaaaggttcctgaaccagaagctattccaccaaatattttgtcctatcttgtaacaggaatttctgtgaattgtgcttatacatcaaaaatattgccaccagagaaagagggtggattacctcgtcacgttggtaataaaactgaatgtgccttgttgggacttcttttggatttaaaacgggattatcaggatgttagaaatgaaataccagaagaagcactgtacaaagtctacaccttcaattctgttaggaagtccatgagtactgtcctgaaaaattcagatggaagttatcgaatattcagcaagggtgcatctgagataattctgaaaaagtgtttcaaaatcttgagtgctaatggtgaggcaaaagtattcagaccaagggaccgtgatgatattgtaaaaactgtgattgaaccgatggcatcagaaggcttgagaaccatatgtcttgcattcagagattttccagcaggagaaccagaaccagagtgggataatgaaaatgatattgtcaccggccttacatgcattgctgttgtggggattgaagaycctgtgagacctgaggtgccagatgcaattaaaaagtgtcagagggctggaattactgtgcggatggtcactggtgataatattaatactgctcgggccattgctaccaaatgtggtattttacatcctggggaagattttctgtgcctagaaggtaaagattttaacagaagaatacgaaatgaaaaaggagagattgagcaagagaggatagacaagatttggccaaaacttcgagtacttgcaagatcatctcctactgataagcatacactggttaaaggtataattgacagcactgtctcagaccaacgccaggttgtagctgtaactggtgatggtacaaatgatggcccagcactaaagaaagcagatgttggatttgcaatgggtattgctggaactgatgtagctaaagaagcatccgatattattctcacagatgacaactttacaagcattgttaaagcagttatgtggggacgaaatgtctaygacagcatctcaaaattccttcagttccaacttactgttaatgtagtagcagtgattgttgcttttacgggcgcctgcattactcaagactcaccgcttaaggctgtgcagatgctgtgggtaaacctcataatggatacactcgcttccctggctctggcaacggaaccacccactgagtctctcttgcttcggaaaccttatggtagaaataagcctctcatctcacgtacaatgatgaagaatattttgggtcatgcattctatcaacttgtagtagtctttacactcttatttgctggagaaaagttttttgacattgatagtggaagaaatgctcctttgcatgctcctccttcagaacattatactattgtttttaatacctttgtgctgatgcaacttttcaacgaaataaatgcccggaaaattcatggtgaaagaaatgtattcgaaggaatctttaacaatgccatcttctgcacaattgttttaggcacttttgtggtacagataataattgtgcagtttggtggaaaacctttcagttgttcagaactttcaatagaacagtggctatggtcaatattcctaggaatgggaacattactctggggccagcttatttcaacaattccaactagccgtttaaaattcctcaaagaagctggtcatggaacacaaaaggaagaaatacctgaggaggaattagcagaggatgttgaagagattgatcacgctgaaagggagttgcggcgtggccaaatcttgtggtttagaggtctgaacagaatccaaacacagattcgagtggtgaatgcatttcgtagttctttatatgaagggttagaaaaaccggaatcaagaagttckattcacaactttatgacacatcctgagtttaggatagaagattcagagcctcatatcccccttattgatgacactgatgccgaagatgatgctcctacaaaacgtaactccagtcctccaccctctcccaacaaaaataacaatgctgttgacartggaattcaccttacaatagaaatgaacaagtctgctacctcttcatccccaggaagcccactacatagtttggaaacatcactctgattgtaagctgaatgttaacacactagctgcattgtaaagaaacaaattgaaactgggtcttttcacatattgtgatggacaagctagtattcttgtctttggacttcaacagaagacacacttgtacgaatgtagatttatttttttaaaaaaaaaaaagcaaagctttctgccagactgagggtgctttttggggggtgggagaaatgaactgacagataaacagtaactcagcgtaagtgacctgtggatcatcagtagtacccaagcatggtcctgaacagtgtattagcagagctttagtttatctcagtcctggatgggagagagagggaggagtaaaactgggcaagacaaagagccctggatcgttgaattgatagtttaatttctgctgttggctgttaataatttggattatttatgtttataaatgatacagatctgtttacaaggtttgtagatactttttttgtycctgttcatagatgggaagcttccttataactgatgcagagaaaaattagtccttcaaatactgctgtattttcaggaaaaaaaaaaaaaggggtgtttctattgaaactgtactaaatttttgcctacaatttaccttgttaaatattgtagataaattgctaatactaatagccaaatagataacactaatgctttgtttaaaaaaacgaaaaaaacaaaacaaaacaaaaaaacatgagcagtggtgttctaatgaagttatgacatctgtcctaattagtttcttaaatacatttactacttaatggttttgaagcaactgtttaatttttaaaatttttgaaaacttgctaataaccttttgttcagaatttagtagattgtttaatgcaggacatcaactacataatgaaagatgcttgaaatgcttttgttatttcaggcaaatcaaattaaatcagactatcaaactacaagagaaccttagtcttttttgtttttgtctaaacatgttagtttagtgatgtcttggtgaactgtgagtgaactgtattgatttttctaatctttagagaccttcacacagcatgagggctgttggcattttgaaaaaggttaataagtagaagcatacatgttttccttttgtttttgaaacttgtttgtaaacataaataaatatgcccttttattaaataaattcatggcaatgtttttttaaaagacatttcagcttctttactcagttctgcatatacagtgcatcagtctgttctctttgaccacaattggaatacatttcaagatggtaacagccccatgaagtaccgctttaattccttgctggtaatctaatagaatcagattaagaaaattaacacaattttaccatttgacatactcttcattgaatttagtttgtctaaaatagtctcacaggtaaaaaacataacaacaatgaccaccattgtctttgatacatttattttaattcttaagtggccaaataacagattaggtaaaatgagattacatgaaaaggttctaaaatgatatatttagatgcaataattaaccatatgctagaatgcccacctctaagccaattggattctttagctctctttttctttccttcatctaccttcttctcttttttgcctctgtctttaccctttagaaactggcatgtgttagggcccagatttcaccagatacacaatcctcaggctgacataaagtttacgaggactgctactataactgagagtgctgaccaagcaaagaaacatttagttgatggtgcttgatatttttggtgggtgggggaaatctttttctcaccatcaaatctttgcagtaatcctctgcaggtcttagaaacacattggctctgtcagcatttgtaattgtacatttattcatcaggtatttatagtgaatcatactgtaaaaaagaggtagcatgatatgctggaaagcatattagactaggagtcaagacctggtttctagtcttggttttgccattaatgtgctgcatgatcttgggaaaatcatttaccctaaataagggtggtggactatcttgaagaaccctttcaactctaaaaattgaccctatcaactggagagcccacaaggcatagggaatagagaaaagggaaatgttttcagttttcttttttattttggttatgcttaaatatgaatgtaattaccaaaagatttagaagtgcatgtgctttggaggatttgtattgagcttttacagtattcatttttcaactcaaggcaatggctttctacaccaactctaatccataaacgggtcttatgacatctatgaagtagtagcaagacatgcttagtgtgtatttctctctttgagacactgtaatttctaccagaaatttccagagcattatgtaggtagaaaaaaatgcaagcaagctgttaaagatcttggatcccattatatagtatgtatagctgaaatctgtaattcaatcactttttctcttttatcctctaaccaaaaaattgtttaattttgcatcccaaatgtttttaatctttgtatattttttaaaaatccttttctcctcatcattgccttttttgtggttgtaaatagacttacttgcactttgaagatgagttactccttgtcatcttacaaatatgtgatatggtaattttcataacagatgtcagttttgaaccaagaattggtgatttgtttataagaaaaaaactggcttcatttctgtgaaattgctctttgaaaatttctttttacacgtgtaagccaactgagataccgtgatggtgttgatttctttcaatgatgcttaccatctattttagccactgagccttttattatttgtctatttgtaaagtttatttgtcttaactcatttaataaatatactgtttatctgtttctgaa

SEQ ID NO: 5332 - DNA, 6882 bp, Homo sapiens
agatgtgtatatctcatgattgatatggagaaactagtcatgggccaaaggtcaagatacttctctgggaaatgttgctgctgatgctgctttacaaagtcatacaatgagtgtttggtttaagaaagattttcatacttaaaagattttcatcttggaaatacatcaagtgaaaattaaattcttttgggaaacattttccttctgatatattatacttgtaatgggcgacatggcaaacaactcagttgcttacagtggtgtgaaaaactctttgaaggaagctaatcatgatggagactttggaattacgctcgcagagctgcgggctctcatggagctcaggtccacagatgcattacgaaaaatacaggaaagctatggagatgtctatggaatttgcaccaaattgaaaacatctcccaatgaaggtttaagtggaaaccctgcagatttagaaagaagagaagcagtgtttggaaagaattttatacctcctaaaaagccaaaaacctttcttcaattagtatgggaagcattacaagatgtcactttaattatattagaaattgcagccatagtatcattgggcctttctttttatcagcctccagaaggggataatgcactttgtggagaagtttctgttggggaggaagaaggtgaaggtgaaactggktggattgaaggagctgcaatcctcttgtctgtagtgtgtgtggtgttagtaacagctttcaatgactggagtaaggaraaacagtttagaggtttgcagagccgaattgaacaagaacagaagttcactgtcatcaggggtggtcaggtcattcagatacctgtagctgacattactgttggagatattgctcaagtgaaatatggtgatcttcttccagctgacggcatacttattcaaggcaacgatcttaaaattgatgaaagctcattgactggtgaatcagatcatgttaaaaagtctttagataaggatcccttacttctatcaggtactcatgtaatggaaggctctggaagaatggtagttacagctgtaggtgtaaattctcaaactggaattatctttaccttacttggagctggaggtgaagaggaagagaagaaagatgagaagaaaaaggaaaagaaaaataagaaacaagatggagctattgagaatcgcaacaaagcaaaagcmcaggatggtgcagccatggaaatgcagccattgaagagtgaagaaggtggagatggtgatgaaaaagataaaaagaaagcaaatttgccaaaaaaggaaaaatctgttttacaagggaaacttacaaaactggctgttcagattggcaaagcaggtctgttgatgtctgccatcacagttatcattctagtattatattttgtcattgacaccttctgggttcagaaaagaccatggcttgctgagtgcacaccaatttatatacaatactttgtgaagttcttcattattggagttacagttttagtggtcgcagtgccagaaggtcttccacttgcagtcacgatctcactggcttattcagtcaaaaaaatgatgaaagataataacttagtaaggcatctggatgcttgtgaaaccatgggaaatgctacagctatttgttcagataaaacaggaactttgacaatgaacagaatgacagtcgttcaagcttacataaatgaaaaacattataaaaaggttcctgaaccagaagctattccaccaaatattttgtcctatcttgtaacaggaatttctgtgaattgtgcttatacatcaaaaatattgccaccagagaaagagggtggattacctcgtcacgttggtaataaaactgaatgtgccttgttgggacttcttttggatttaaaacgggattatcaggatgttagaaatgaaataccagaagaagcactgtacaaagtctacaccttcaattctgttaggaagtccatgagtactgtcctgaaaaattcagatggaagttatcgaatattcagcaagggtgcatctgagataattctgaaaaagtgtttcaaaatcttgagtgctaatggtgaggcaaaagtattcagaccaagggaccgtgatgatattgtaaaaactgtgattgaaccgatggcatcagaaggcttgagaaccatatgtcttgcattcagagattttccagcaggagaaccagaaccagagtgggataatgaaaatgatattgtcaccggccttacatgcattgctgttgtggggattgaagaycctgtgagacctgaggtgccagatgcaattaaaaagtgtcagagggctggaattactgtgcggatggtcactggtgataatattaatactgctcgggccattgctaccaaatgtggtattttacatcctggggaagattttctgtgcctagaaggtaaagattttaacagaagaatacgaaatgaaaaaggagagattgagcaagagaggatagacaagatttggccaaaacttcgagtacttgcaagatcatctcctactgataagcatacactggttaaaggtataattgacagcactgtctcagaccaacgccaggttgtagctgtaactggtgatggtacaaatgatggcccagcactaaagaaagcagatgttggatttgcaatgggtattgctggaactgatgtagctaaagaagcatccgatattattctcacagatgacaactttacaagcattgttaaagcagttatgtggggacgaaatgtctaygacagcatctcaaaattccttcagttccaacttactgttaatgtagtagcagtgattgttgcttttacgggcgcctgcattactcaagactcaccgcttaaggctgtgcagatgctgtgggtaaacctcataatggatacactcgcttccctggctctggcaacggaaccacccactgagtctctcttgcttcggaaaccttatggtagaaataagcctctcatctcacgtacaatgatgaagaatattttgggtcatgcattctatcaacttgtagtagtctttacactcttatttgctggagaaaagttttttgacattgatagtggaagaaatgctcctttgcatgctcctccttcagaacattatactattgtttttaatacctttgtgctgatgcaacttttcaacgaaataaatgcccggaaaattcatggtgaaagaaatgtattcgaaggaatctttaacaatgccatcttctgcacaattgttttaggcacttttgtggtacagataataattgtgcagtttggtggaaaacctttcagttgttcagaactttcaatagaacagtggctatggtcaatattcctaggaatgggaacattactctggggccagcttatttcaacaattccaactagccgtttaaaattcctcaaagaagctggtcatggaacacaaaaggaagaaatacctgaggaggaattagcagaggatgttgaagagattgatcacgctgaaagggagttgcggcgtggccaaatcttgtggtttagaggtctgaacagaatccaaacacagatggatgtagtgaatgctttccagagtggaagttccattcagggggctctaaggcggcaaccctccatcgccagccagcatcatgatgtaacaaatatttctacccctacacatattcgagtggtgaatgcatttcgtagttctttatatgaagggttagaaaaaccggaatcaagaagttckattcacaactttatgacacatcctgagtttaggatagaagattcagagcctcatatcccccttattgatgacactgatgccgaagatgatgctcctacaaaacgtaactccagtcctccaccctctcccaacaaaaataacaatgctgttgacartggaattcaccttacaatagaaatgaacaagtctgctacctcttcatccccaggaagcccactacatagtttggaaacatcactctgattgtaagctgaatgttaacacactagctgcattgtaaagaaacaaattgaaactgggtcttttcacatattgtgatggacaagctagtattcttgtctttggacttcaacagaagacacacttgtacgaatgtagatttatttttttaaaaaaaaaaaagcaaagctttctgccagactgagggtgctttttggggggtgggagaaatgaactgacagataaacagtaactcagcgtaagtgacctgtggatcatcagtagtacccaagcatggtcctgaacagtgtattagcagagctttagtttatctcagtcctggatgggagagagagggaggagtaaaactgggcaagacaaagagccctggatcgttgaattgatagtttaatttctgctgttggctgttaataatttggattatttatgtttataaatgatacagatctgtttacaaggtttgtagatactttttttgtycctgttcatagatgggaagcttccttataactgatgcagagaaaaattagtccttcaaatactgctgtattttcaggaaaaaaaaaaaaaggggtgtttctattgaaactgtactaaatttttgcctacaatttaccttgttaaatattgtagataaattgctaatactaatagccaaatagataacactaatgctttgtttaaaaaaacgaaaaaaacaaaacaaaacaaaaaaacatgagcagtggtgttctaatgaagttatgacatctgtcctaattagtttcttaaatacatttactacttaatggttttgaagcaactgtttaatttttaaaatttttgaaaacttgctaataaccttttgttcagaatttagtagattgtttaatgcaggacatcaactacataatgaaagatgcttgaaatgcttttgttatttcaggcaaatcaaattaaatcagactatcaaactacaagagaaccttagtcttttttgtttttgtctaaacatgttagtttagtgatgtcttggtgaactgtgagtgaactgtattgatttttctaatctttagagaccttcacacagcatgagggctgttggcattttgaaaaaggttaataagtagaagcatacatgttttccttttgtttttgaaacttgtttgtaaacataaataaatatgcccttttattaaataaattcatggcaatgtttttctgttctctttgaccacaattggaatacatttcaagatggtaacagccccatgaagtaccgctttaattccttgctggtaatctaatagaatcagattaagaaaattaacacaattttaccatttgacatactcttcattgaatttagtttgtctaaaatagtctcacaggtaaaaaacataacaacaatgaccaccattgtctttgatacatttattttaattcttaagtggccaaataacagattaggtaaaatgagattacatgaaaaggttctaaaatgatatatttagatgcaataattaaccatatgctagaatgcccacctctaagccaattggattctttagctctctttttctttccttcatctaccttcttctcttttttgcctctgtctttaccctttagaaactggcatgtgttagggcccagatttcaccagatacacaatcctcaggctgacataaagtttacgaggactgctactataactgagagtgctgaccaagcaaagaaacatttagttgatggtgcttgatatttttggtgggtgggggaaatctttttctcaccatcaaatctttgcagtaatcctctgcaggtcttagaaacacattggctctgtcagcatttgtaattgtacatttattcatcaggtatttatagtgaatcatactgtaaaaaagaggtagcatgatatgctggaaagcatattagactaggagtcaagacctggtttctagtcttggttttgccattaatgtgctgcatgatcttgggaaaatcatttaccctaaataagggtggtggactatcttgaagaaccctttcaactctaaaaattgaccctatcaactggagagcccacaaggcatagggaatagagaaaagggaaatgttttcagttttcttttttattttggttatgcttaaatatgaatgtaattaccaaaagatttagaagtgcatgtgctttggaggatttgtattgagcttttacagtattcatttttcaactcaaggcaatggctttctacaccaactctaatccataaacgggtcttatgacatctatgaagtagtagcaagacatgcttagtgtgtatttctctctttgagacactgtaatttctaccagaaatttccagagcattatgtaggtagaaaaaaatgcaagcaagctgttaaagatcttggatcccattatatagtatgtatagctgaaatctgtaattcaatcactttttctcttttatcctctaaccaaaaaattgtttaattttgcatcccaaatgtttttaatctttgtatattttttaaaaatccttttctcctcatcattgccttttttgtggttgtaaatagacttacttgcactttgaagatgagttactccttgtcatcttacaaatatgtgatatggtaattttcataacagatgtcagttttgaaccaagaattggtgatttgtttataagaaaaaaactggcttcatttctgtgaaattgctctttgaaaatttctttttacacgtgtaagccaactgagataccgtgatggtgttgatttctttcaatgatgcttaccatctattttagccactgagccttttattatttgtctatttgtaaagtttatttgtcttaactcatttaataaatatactgtttatctgtttctga

SEQ ID NO: 5333 - DNA, 6855 bp, Homo sapiens
agatgtgtatatctcatgattgatatggagaaactagtcatgggccaaaggtcaagatacttctctgggaaatgttgctgctgatgctgctttacaaagtcatacaatgagtgtttggtttaagaaagattttcatacttaaaagattttcatcttggaaatacatcaagtgaaaattaaattcttttgggaaacattttccttctgatatattatacttgtaatgggcgacatggcaaacaactcagttgcttacagtggtgtgaaaaactctttgaaggaagctaatcatgatggagactttggaattacgctcgcagagctgcgggctctcatggagctcaggtccacagatgcattacgaaaaatacaggaaagctatggagatgtctatggaatttgcaccaaattgaaaacatctcccaatgaaggtttaagtggaaaccctgcagatttagaaagaagagaagcagtgtttggaaagaattttatacctcctaaaaagccaaaaacctttcttcaattagtatgggaagcattacaagatgtcactttaattatattagaaattgcagccatagtatcattgggcctttctttttatcagcctccagaaggggataatgcactttgtggagaagtttctgttggggaggaagaaggtgaaggtgaaactggktggattgaaggagctgcaatcctcttgtctgtagtgtgtgtggtgttagtaacagctttcaatgactggagtaaggaraaacagtttagaggtttgcagagccgaattgaacaagaacagaagttcactgtcatcaggggtggtcaggtcattcagatacctgtagctgacattactgttggagatattgctcaagtgaaatatggtgatcttcttccagctgacggcatacttattcaaggcaacgatcttaaaattgatgaaagctcattgactggtgaatcagatcatgttaaaaagtctttagataaggatcccttacttctatcaggtactcatgtaatggaaggctctggaagaatggtagttacagctgtaggtgtaaattctcaaactggaattatctttaccttacttggagctggaggtgaagaggaagagaagaaagatgagaagaaaaaggaaaagaaaaataagaaacaagatggagctattgagaatcgcaacaaagcaaaagcmcaggatggtgcagccatggaaatgcagccattgaagagtgaagaaggtggagatggtgatgaaaaagataaaaagaaagcaaatttgccaaaaaaggaaaaatctgttttacaagggaaacttacaaaactggctgttcagattggcaaagcaggtctgttgatgtctgccatcacagttatcattctagtattatattttgtcattgacaccttctgggttcagaaaagaccatggcttgctgagtgcacaccaatttatatacaatactttgtgaagttcttcattattggagttacagttttagtggtcgcagtgccagaaggtcttccacttgcagtcacgatctcactggcttattcagtcaaaaaaatgatgaaagataataacttagtaaggcatctggatgcttgtgaaaccatgggaaatgctacagctatttgttcagataaaacaggaactttgacaatgaacagaatgacagtcgttcaagcttacataaatgaaaaacattataaaaaggttcctgaaccagaagctattccaccaaatattttgtcctatcttgtaacaggaatttctgtgaattgtgcttatacatcaaaaatattgccaccagagaaagagggtggattacctcgtcacgttggtaataaaactgaatgtgccttgttgggacttcttttggatttaaaacgggattatcaggatgttagaaatgaaataccagaagaagcactgtacaaagtctacaccttcaattctgttaggaagtccatgagtactgtcctgaaaaattcagatggaagttatcgaatattcagcaagggtgcatctgagataattctgaaaaagtgtttcaaaatcttgagtgctaatggtgaggcaaaagtattcagaccaagggaccgtgatgatattgtaaaaactgtgattgaaccgatggcatcagaaggcttgagaaccatatgtcttgcattcagagattttccagcaggagaaccagaaccagagtgggataatgaaaatgatattgtcaccggccttacatgcattgctgttgtggggattgaagaycctgtgagacctgaggtgccagatgcaattaaaaagtgtcagagggctggaattactgtgcggatggtcactggtgataatattaatactgctcgggccattgctaccaaatgtggtattttacatcctggggaagattttctgtgcctagaaggtaaagattttaacagaagaatacgaaatgaaaaaggagagattgagcaagagaggatagacaagatttggccaaaacttcgagtacttgcaagatcatctcctactgataagcatacactggttaaaggtataattgacagcactgtctcagaccaacgccaggttgtagctgtaactggtgatggtacaaatgatggcccagcactaaagaaagcagatgttggatttgcaatgggtattgctggaactgatgtagctaaagaagcatccgatattattctcacagatgacaactttacaagcattgttaaagcagttatgtggggacgaaatgtctaygacagcatctcaaaattccttcagttccaacttactgttaatgtagtagcagtgattgttgcttttacgggcgcctgcattactcaagactcaccgcttaaggctgtgcagatgctgtgggtaaacctcataatggatacactcgcttccctggctctggcaacggaaccacccactgagtctctcttgcttcggaaaccttatggtagaaataagcctctcatctcacgtacaatgatgaagaatattttgggtcatgcattctatcaacttgtagtagtctttacactcttatttgctggagaaaagttttttgacattgatagtggaagaaatgctcctttgcatgctcctccttcagaacattatactattgtttttaatacctttgtgctgatgcaacttttcaacgaaataaatgcccggaaaattcatggtgaaagaaatgtattcgaaggaatctttaacaatgccatcttctgcacaattgttttaggcacttttgtggtacagataataattgtgcagtttggtggaaaacctttcagttgttcagaactttcaatagaacagtggctatggtcaatattcctaggaatgggaacattactctggggccagcttatttcaacaattccaactagccgtttaaaattcctcaaagaagctggtcatggaacacaaaaggaagaaatacctgaggaggaattagcagaggatgttgaagagattgatcacgctgaaagggagttgcggcgtggccaaatcttgtggtttagaggtctgaacagaatccaaacacagatggatgtagtgaatgctttccagagtggaagttccattcagggggctctaaggcggcaaccctccatcgccagccagcatcatgatattcgagtggtgaatgcatttcgtagttctttatatgaagggttagaaaaaccggaatcaagaagttckattcacaactttatgacacatcctgagtttaggatagaagattcagagcctcatatcccccttattgatgacactgatgccgaagatgatgctcctacaaaacgtaactccagtcctccaccctctcccaacaaaaataacaatgctgttgacartggaattcaccttacaatagaaatgaacaagtctgctacctcttcatccccaggaagcccactacatagtttggaaacatcactctgattgtaagctgaatgttaacacactagctgcattgtaaagaaacaaattgaaactgggtcttttcacatattgtgatggacaagctagtattcttgtctttggacttcaacagaagacacacttgtacgaatgtagatttatttttttaaaaaaaaaaaagcaaagctttctgccagactgagggtgctttttggggggtgggagaaatgaactgacagataaacagtaactcagcgtaagtgacctgtggatcatcagtagtacccaagcatggtcctgaacagtgtattagcagagctttagtttatctcagtcctggatgggagagagagggaggagtaaaactgggcaagacaaagagccctggatcgttgaattgatagtttaatttctgctgttggctgttaataatttggattatttatgtttataaatgatacagatctgtttacaaggtttgtagatactttttttgtycctgttcatagatgggaagcttccttataactgatgcagagaaaaattagtccttcaaatactgctgtattttcaggaaaaaaaaaaaaaggggtgtttctattgaaactgtactaaatttttgcctacaatttaccttgttaaatattgtagataaattgctaatactaatagccaaatagataacactaatgctttgtttaaaaaaacgaaaaaaacaaaacaaaacaaaaaaacatgagcagtggtgttctaatgaagttatgacatctgtcctaattagtttcttaaatacatttactacttaatggttttgaagcaactgtttaatttttaaaatttttgaaaacttgctaataaccttttgttcagaatttagtagattgtttaatgcaggacatcaactacataatgaaagatgcttgaaatgcttttgttatttcaggcaaatcaaattaaatcagactatcaaactacaagagaaccttagtcttttttgtttttgtctaaacatgttagtttagtgatgtcttggtgaactgtgagtgaactgtattgatttttctaatctttagagaccttcacacagcatgagggctgttggcattttgaaaaaggttaataagtagaagcatacatgttttccttttgtttttgaaacttgtttgtaaacataaataaatatgcccttttattaaataaattcatggcaatgtttttctgttctctttgaccacaattggaatacatttcaagatggtaacagccccatgaagtaccgctttaattccttgctggtaatctaatagaatcagattaagaaaattaacacaattttaccatttgacatactcttcattgaatttagtttgtctaaaatagtctcacaggtaaaaaacataacaacaatgaccaccattgtctttgatacatttattttaattcttaagtggccaaataacagattaggtaaaatgagattacatgaaaaggttctaaaatgatatatttagatgcaataattaaccatatgctagaatgcccacctctaagccaattggattctttagctctctttttctttccttcatctaccttcttctcttttttgcctctgtctttaccctttagaaactggcatgtgttagggcccagatttcaccagatacacaatcctcaggctgacataaagtttacgaggactgctactataactgagagtgctgaccaagcaaagaaacatttagttgatggtgcttgatatttttggtgggtgggggaaatctttttctcaccatcaaatctttgcagtaatcctctgcaggtcttagaaacacattggctctgtcagcatttgtaattgtacatttattcatcaggtatttatagtgaatcatactgtaaaaaagaggtagcatgatatgctggaaagcatattagactaggagtcaagacctggtttctagtcttggttttgccattaatgtgctgcatgatcttgggaaaatcatttaccctaaataagggtggtggactatcttgaagaaccctttcaactctaaaaattgaccctatcaactggagagcccacaaggcatagggaatagagaaaagggaaatgttttcagttttcttttttattttggttatgcttaaatatgaatgtaattaccaaaagatttagaagtgcatgtgctttggaggatttgtattgagcttttacagtattcatttttcaactcaaggcaatggctttctacaccaactctaatccataaacgggtcttatgacatctatgaagtagtagcaagacatgcttagtgtgtatttctctctttgagacactgtaatttctaccagaaatttccagagcattatgtaggtagaaaaaaatgcaagcaagctgttaaagatcttggatcccattatatagtatgtatagctgaaatctgtaattcaatcactttttctcttttatcctctaaccaaaaaattgtttaattttgcatcccaaatgtttttaatctttgtatattttttaaaaatccttttctcctcatcattgccttttttgtggttgtaaatagacttacttgcactttgaagatgagttactccttgtcatcttacaaatatgtgatatggtaattttcataacagatgtcagttttgaaccaagaattggtgatttgtttataagaaaaaaactggcttcatttctgtgaaattgctctttgaaaatttctttttacacgtgtaagccaactgagataccgtgatggtgttgatttctttcaatgatgcttaccatctattttagccactgagccttttattatttgtctatttgtaaagtttatttgtcttaactcatttaataaatatactgtttatctgtttctga

SEQ ID NO: 5334 - DNA, 6768 bp, Homo sapiens
agatgtgtatatctcatgattgatatggagaaactagtcatgggccaaaggtcaagatacttctctgggaaatgttgctgctgatgctgctttacaaagtcatacaatgagtgtttggtttaagaaagattttcatacttaaaagattttcatcttggaaatacatcaagtgaaaattaaattcttttgggaaacattttccttctgatatattatacttgtaatgggcgacatggcaaacaactcagttgcttacagtggtgtgaaaaactctttgaaggaagctaatcatgatggagactttggaattacgctcgcagagctgcgggctctcatggagctcaggtccacagatgcattacgaaaaatacaggaaagctatggagatgtctatggaatttgcaccaaattgaaaacatctcccaatgaaggtttaagtggaaaccctgcagatttagaaagaagagaagcagtgtttggaaagaattttatacctcctaaaaagccaaaaacctttcttcaattagtatgggaagcattacaagatgtcactttaattatattagaaattgcagccatagtatcattgggcctttctttttatcagcctccagaaggggataatgcactttgtggagaagtttctgttggggaggaagaaggtgaaggtgaaactggktggattgaaggagctgcaatcctcttgtctgtagtgtgtgtggtgttagtaacagctttcaatgactggagtaaggaraaacagtttagaggtttgcagagccgaattgaacaagaacagaagttcactgtcatcaggggtggtcaggtcattcagatacctgtagctgacattactgttggagatattgctcaagtgaaatatggtgatcttcttccagctgacggcatacttattcaaggcaacgatcttaaaattgatgaaagctcattgactggtgaatcagatcatgttaaaaagtctttagataaggatcccttacttctatcaggtactcatgtaatggaaggctctggaagaatggtagttacagctgtaggtgtaaattctcaaactggaattatctttaccttacttggagctggaggtgaagaggaagagaagaaagatgagaagaaaaaggaaaagaaaaataagaaacaagatggagctattgagaatcgcaacaaagcaaaagcmcaggatggtgcagccatggaaatgcagccattgaagagtgaagaaggtggagatggtgatgaaaaagataaaaagaaagcaaatttgccaaaaaaggaaaaatctgttttacaagggaaacttacaaaactggctgttcagattggcaaagcaggtctgttgatgtctgccatcacagttatcattctagtattatattttgtcattgacaccttctgggttcagaaaagaccatggcttgctgagtgcacaccaatttatatacaatactttgtgaagttcttcattattggagttacagttttagtggtcgcagtgccagaaggtcttccacttgcagtcacgatctcactggcttattcagtcaaaaaaatgatgaaagataataacttagtaaggcatctggatgcttgtgaaaccatgggaaatgctacagctatttgttcagataaaacaggaactttgacaatgaacagaatgacagtcgttcaagcttacataaatgaaaaacattataaaaaggttcctgaaccagaagctattccaccaaatattttgtcctatcttgtaacaggaatttctgtgaattgtgcttatacatcaaaaatattgccaccagagaaagagggtggattacctcgtcacgttggtaataaaactgaatgtgccttgttgggacttcttttggatttaaaacgggattatcaggatgttagaaatgaaataccagaagaagcactgtacaaagtctacaccttcaattctgttaggaagtccatgagtactgtcctgaaaaattcagatggaagttatcgaatattcagcaagggtgcatctgagataattctgaaaaagtgtttcaaaatcttgagtgctaatggtgaggcaaaagtattcagaccaagggaccgtgatgatattgtaaaaactgtgattgaaccgatggcatcagaaggcttgagaaccatatgtcttgcattcagagattttccagcaggagaaccagaaccagagtgggataatgaaaatgatattgtcaccggccttacatgcattgctgttgtggggattgaagaycctgtgagacctgaggtgccagatgcaattaaaaagtgtcagagggctggaattactgtgcggatggtcactggtgataatattaatactgctcgggccattgctaccaaatgtggtattttacatcctggggaagattttctgtgcctagaaggtaaagattttaacagaagaatacgaaatgaaaaaggagagattgagcaagagaggatagacaagatttggccaaaacttcgagtacttgcaagatcatctcctactgataagcatacactggttaaaggtataattgacagcactgtctcagaccaacgccaggttgtagctgtaactggtgatggtacaaatgatggcccagcactaaagaaagcagatgttggatttgcaatgggtattgctggaactgatgtagctaaagaagcatccgatattattctcacagatgacaactttacaagcattgttaaagcagttatgtggggacgaaatgtctaygacagcatctcaaaattccttcagttccaacttactgttaatgtagtagcagtgattgttgcttttacgggcgcctgcattactcaagactcaccgcttaaggctgtgcagatgctgtgggtaaacctcataatggatacactcgcttccctggctctggcaacggaaccacccactgagtctctcttgcttcggaaaccttatggtagaaataagcctctcatctcacgtacaatgatgaagaatattttgggtcatgcattctatcaacttgtagtagtctttacactcttatttgctggagaaaagttttttgacattgatagtggaagaaatgctcctttgcatgctcctccttcagaacattatactattgtttttaatacctttgtgctgatgcaacttttcaacgaaataaatgcccggaaaattcatggtgaaagaaatgtattcgaaggaatctttaacaatgccatcttctgcacaattgttttaggcacttttgtggtacagataataattgtgcagtttggtggaaaacctttcagttgttcagaactttcaatagaacagtggctatggtcaatattcctaggaatgggaacattactctggggccagcttatttcaacaattccaactagccgtttaaaattcctcaaagaagctggtcatggaacacaaaaggaagaaatacctgaggaggaattagcagaggatgttgaagagattgatcacgctgaaagggagttgcggcgtggccaaatcttgtggtttagaggtctgaacagaatccaaacacagattcgagtggtgaatgcatttcgtagttctttatatgaagggttagaaaaaccggaatcaagaagttckattcacaactttatgacacatcctgagtttaggatagaagattcagagcctcatatcccccttattgatgacactgatgccgaagatgatgctcctacaaaacgtaactccagtcctccaccctctcccaacaaaaataacaatgctgttgacartggaattcaccttacaatagaaatgaacaagtctgctacctcttcatccccaggaagcccactacatagtttggaaacatcactctgattgtaagctgaatgttaacacactagctgcattgtaaagaaacaaattgaaactgggtcttttcacatattgtgatggacaagctagtattcttgtctttggacttcaacagaagacacacttgtacgaatgtagatttatttttttaaaaaaaaaaaagcaaagctttctgccagactgagggtgctttttggggggtgggagaaatgaactgacagataaacagtaactcagcgtaagtgacctgtggatcatcagtagtacccaagcatggtcctgaacagtgtattagcagagctttagtttatctcagtcctggatgggagagagagggaggagtaaaactgggcaagacaaagagccctggatcgttgaattgatagtttaatttctgctgttggctgttaataatttggattatttatgtttataaatgatacagatctgtttacaaggtttgtagatactttttttgtycctgttcatagatgggaagcttccttataactgatgcagagaaaaattagtccttcaaatactgctgtattttcaggaaaaaaaaaaaaaggggtgtttctattgaaactgtactaaatttttgcctacaatttaccttgttaaatattgtagataaattgctaatactaatagccaaatagataacactaatgctttgtttaaaaaaacgaaaaaaacaaaacaaaacaaaaaaacatgagcagtggtgttctaatgaagttatgacatctgtcctaattagtttcttaaatacatttactacttaatggttttgaagcaactgtttaatttttaaaatttttgaaaacttgctaataaccttttgttcagaatttagtagattgtttaatgcaggacatcaactacataatgaaagatgcttgaaatgcttttgttatttcaggcaaatcaaattaaatcagactatcaaactacaagagaaccttagtcttttttgtttttgtctaaacatgttagtttagtgatgtcttggtgaactgtgagtgaactgtattgatttttctaatctttagagaccttcacacagcatgagggctgttggcattttgaaaaaggttaataagtagaagcatacatgttttccttttgtttttgaaacttgtttgtaaacataaataaatatgcccttttattaaataaattcatggcaatgtttttctgttctctttgaccacaattggaatacatttcaagatggtaacagccccatgaagtaccgctttaattccttgctggtaatctaatagaatcagattaagaaaattaacacaattttaccatttgacatactcttcattgaatttagtttgtctaaaatagtctcacaggtaaaaaacataacaacaatgaccaccattgtctttgatacatttattttaattcttaagtggccaaataacagattaggtaaaatgagattacatgaaaaggttctaaaatgatatatttagatgcaataattaaccatatgctagaatgcccacctctaagccaattggattctttagctctctttttctttccttcatctaccttcttctcttttttgcctctgtctttaccctttagaaactggcatgtgttagggcccagatttcaccagatacacaatcctcaggctgacataaagtttacgaggactgctactataactgagagtgctgaccaagcaaagaaacatttagttgatggtgcttgatatttttggtgggtgggggaaatctttttctcaccatcaaatctttgcagtaatcctctgcaggtcttagaaacacattggctctgtcagcatttgtaattgtacatttattcatcaggtatttatagtgaatcatactgtaaaaaagaggtagcatgatatgctggaaagcatattagactaggagtcaagacctggtttctagtcttggttttgccattaatgtgctgcatgatcttgggaaaatcatttaccctaaataagggtggtggactatcttgaagaaccctttcaactctaaaaattgaccctatcaactggagagcccacaaggcatagggaatagagaaaagggaaatgttttcagttttcttttttattttggttatgcttaaatatgaatgtaattaccaaaagatttagaagtgcatgtgctttggaggatttgtattgagcttttacagtattcatttttcaactcaaggcaatggctttctacaccaactctaatccataaacgggtcttatgacatctatgaagtagtagcaagacatgcttagtgtgtatttctctctttgagacactgtaatttctaccagaaatttccagagcattatgtaggtagaaaaaaatgcaagcaagctgttaaagatcttggatcccattatatagtatgtatagctgaaatctgtaattcaatcactttttctcttttatcctctaaccaaaaaattgtttaattttgcatcccaaatgtttttaatctttgtatattttttaaaaatccttttctcctcatcattgccttttttgtggttgtaaatagacttacttgcactttgaagatgagttactccttgtcatcttacaaatatgtgatatggtaattttcataacagatgtcagttttgaaccaagaattggtgatttgtttataagaaaaaaactggcttcatttctgtgaaattgctctttgaaaatttctttttacacgtgtaagccaactgagataccgtgatggtgttgatttctttcaatgatgcttaccatctattttagccactgagccttttattatttgtctatttgtaaagtttatttgtcttaactcatttaataaatatactgtttatctgtttctga

SEQ ID NO: 5335 - DNA, 6812 bp, Homo sapiens
agatgtgtatatctcatgattgatatggagaaactagtcatgggccaaaggtcaagatacttctctgggaaatgttgctgctgatgctgctttacaaagtcatacaatgagtgtttggtttaagaaagattttcatacttaaaagattttcatcttggaaatacatcaagtgaaaattaaattcttttgggaaacattttccttctgatatattatacttgtaatgggcgacatggcaaacaactcagttgcttacagtggtgtgaaaaactctttgaaggaagctaatcatgatggagactttggaattacgctcgcagagctgcgggctctcatggagctcaggtccacagatgcattacgaaaaatacaggaaagctatggagatgtctatggaatttgcaccaaattgaaaacatctcccaatgaaggtttaagtggaaaccctgcagatttagaaagaagagaagcagtgtttggaaagaattttatacctcctaaaaagccaaaaacctttcttcaattagtatgggaagcattacaagatgtcactttaattatattagaaattgcagccatagtatcattgggcctttctttttatcagcctccagaaggggataatgcactttgtggagaagtttctgttggggaggaagaaggtgaaggtgaaactggktggattgaaggagctgcaatcctcttgtctgtagtgtgtgtggtgttagtaacagctttcaatgactggagtaaggaraaacagtttagaggtttgcagagccgaattgaacaagaacagaagttcactgtcatcaggggtggtcaggtcattcagatacctgtagctgacattactgttggagatattgctcaagtgaaatatggtgatcttcttccagctgacggcatacttattcaaggcaacgatcttaaaattgatgaaagctcattgactggtgaatcagatcatgttaaaaagtctttagataaggatcccttacttctatcaggtactcatgtaatggaaggctctggaagaatggtagttacagctgtaggtgtaaattctcaaactggaattatctttaccttacttggagctggaggtgaagaggaagagaagaaagatgagaagaaaaaggaaaagaaaaataagaaacaagatggagctattgagaatcgcaacaaagcaaaagcmcaggatggtgcagccatggaaatgcagccattgaagagtgaagaaggtggagatggtgatgaaaaagataaaaagaaagcaaatttgccaaaaaaggaaaaatctgttttacaagggaaacttacaaaactggctgttcagattggcaaagcaggtctgttgatgtctgccatcacagttatcattctagtattatattttgtcattgacaccttctgggttcagaaaagaccatggcttgctgagtgcacaccaatttatatacaatactttgtgaagttcttcattattggagttacagttttagtggtcgcagtgccagaaggtcttccacttgcagtcacgatctcactggcttattcagtcaaaaaaatgatgaaagataataacttagtaaggcatctggatgcttgtgaaaccatgggaaatgctacagctatttgttcagataaaacaggaactttgacaatgaacagaatgacagtcgttcaagcttacataaatgaaaaacattataaaaaggttcctgaaccagaagctattccaccaaatattttgtcctatcttgtaacaggaatttctgtgaattgtgcttatacatcaaaaatattgccaccagagaaagagggtggattacctcgtcacgttggtaataaaactgaatgtgccttgttgggacttcttttggatttaaaacgggattatcaggatgttagaaatgaaataccagaagaagcactgtacaaagtctacaccttcaattctgttaggaagtccatgagtactgtcctgaaaaattcagatggaagttatcgaatattcagcaagggtgcatctgagataattctgaaaaagtgtttcaaaatcttgagtgctaatggtgaggcaaaagtattcagaccaagggaccgtgatgatattgtaaaaactgtgattgaaccgatggcatcagaaggcttgagaaccatatgtcttgcattcagagattttccagcaggagaaccagaaccagagtgggataatgaaaatgatattgtcaccggccttacatgcattgctgttgtggggattgaagaycctgtgagacctgaggtgccagatgcaattaaaaagtgtcagagggctggaattactgtgcggatggtcactggtgataatattaatactgctcgggccattgctaccaaatgtggtattttacatcctggggaagattttctgtgcctagaaggtaaagattttaacagaagaatacgaaatgaaaaaggagagattgagcaagagaggatagacaagatttggccaaaacttcgagtacttgcaagatcatctcctactgataagcatacactggttaaaggtataattgacagcactgtctcagaccaacgccaggttgtagctgtaactggtgatggtacaaatgatggcccagcactaaagaaagcagatgttggatttgcaatgggtattgctggaactgatgtagctaaagaagcatccgatattattctcacagatgacaactttacaagcattgttaaagcagttatgtggggacgaaatgtctaygacagcatctcaaaattccttcagttccaacttactgttaatgtagtagcagtgattgttgcttttacgggcgcctgcattactcaagactcaccgcttaaggctgtgcagatgctgtgggtaaacctcataatggatacactcgcttccctggctctggcaacggaaccacccactgagtctctcttgcttcggaaaccttatggtagaaataagcctctcatctcacgtacaatgatgaagaatattttgggtcatgcattctatcaacttgtagtagtctttacactcttatttgctggagaaaagttttttgacattgatagtggaagaaatgctcctttgcatgctcctccttcagaacattatactattgtttttaatacctttgtgctgatgcaacttttcaacgaaataaatgcccggaaaattcatggtgaaagaaatgtattcgaaggaatctttaacaatgccatcttctgcacaattgttttaggcacttttgtggtacagcttatttcaacaattccaactagccgtttaaaattcctcaaagaagctggtcatggaacacaaaaggaagaaatacctgaggaggaattagcagaggatgttgaagagattgatcacgctgaaagggagttgcggcgtggccaaatcttgtggtttagaggtctgaacagaatccaaacacagatggatgtagtgaatgctttccagagtggaagttccattcagggggctctaaggcggcaaccctccatcgccagccagcatcatgatgtaacaaatatttctacccctacacatgtagtgttttcctcttctactgcttctactactgtgggattcgagtggtgaatgcatttcgtagttctttatatgaagggttagaaaaaccggaatcaagaagttckattcacaactttatgacacatcctgagtttaggatagaagattcagagcctcatatcccccttattgatgacactgatgccgaagatgatgctcctacaaaacgtaactccagtcctccaccctctcccaacaaaaataacaatgctgttgacartggaattcaccttacaatagaaatgaacaagtctgctacctcttcatccccaggaagcccactacatagtttggaaacatcactctgattgtaagctgaatgttaacacactagctgcattgtaaagaaacaaattgaaactgggtcttttcacatattgtgatggacaagctagtattcttgtctttggacttcaacagaagacacacttgtacgaatgtagatttatttttttaaaaaaaaaaaagcaaagctttctgccagactgagggtgctttttggggggtgggagaaatgaactgacagataaacagtaactcagcgtaagtgacctgtggatcatcagtagtacccaagcatggtcctgaacagtgtattagcagagctttagtttatctcagtcctggatgggagagagagggaggagtaaaactgggcaagacaaagagccctggatcgttgaattgatagtttaatttctgctgttggctgttaataatttggattatttatgtttataaatgatacagatctgtttacaaggtttgtagatactttttttgtycctgttcatagatgggaagcttccttataactgatgcagagaaaaattagtccttcaaatactgctgtattttcaggaaaaaaaaaaaaaggggtgtttctattgaaactgtactaaatttttgcctacaatttaccttgttaaatattgtagataaattgctaatactaatagccaaatagataacactaatgctttgtttaaaaaaacgaaaaaaacaaaacaaaacaaaaaaacatgagcagtggtgttctaatgaagttatgacatctgtcctaattagtttcttaaatacatttactacttaatggttttgaagcaactgtttaatttttaaaatttttgaaaacttgctaataaccttttgttcagaatttagtagattgtttaatgcaggacatcaactacataatgaaagatgcttgaaatgcttttgttatttcaggcaaatcaaattaaatcagactatcaaactacaagagaaccttagtcttttttgtttttgtctaaacatgttagtttagtgatgtcttggtgaactgtgagtgaactgtattgatttttctaatctttagagaccttcacacagcatgagggctgttggcattttgaaaaaggttaataagtagaagcatacatgttttccttttgtttttgaaacttgtttgtaaacataaataaatatgcccttttattaaataaattcatggcaatgtttttctgttctctttgaccacaattggaatacatttcaagatggtaacagccccatgaagtaccgctttaattccttgctggtaatctaatagaatcagattaagaaaattaacacaattttaccatttgacatactcttcattgaatttagtttgtctaaaatagtctcacaggtaaaaaacataacaacaatgaccaccattgtctttgatacatttattttaattcttaagtggccaaataacagattaggtaaaatgagattacatgaaaaggttctaaaatgatatatttagatgcaataattaaccatatgctagaatgcccacctctaagccaattggattctttagctctctttttctttccttcatctaccttcttctcttttttgcctctgtctttaccctttagaaactggcatgtgttagggcccagatttcaccagatacacaatcctcaggctgacataaagtttacgaggactgctactataactgagagtgctgaccaagcaaagaaacatttagttgatggtgcttgatatttttggtgggtgggggaaatctttttctcaccatcaaatctttgcagtaatcctctgcaggtcttagaaacacattggctctgtcagcatttgtaattgtacatttattcatcaggtatttatagtgaatcatactgtaaaaaagaggtagcatgatatgctggaaagcatattagactaggagtcaagacctggtttctagtcttggttttgccattaatgtgctgcatgatcttgggaaaatcatttaccctaaataagggtggtggactatcttgaagaaccctttcaactctaaaaattgaccctatcaactggagagcccacaaggcatagggaatagagaaaagggaaatgttttcagttttcttttttattttggttatgcttaaatatgaatgtaattaccaaaagatttagaagtgcatgtgctttggaggatttgtattgagcttttacagtattcatttttcaactcaaggcaatggctttctacaccaactctaatccataaacgggtcttatgacatctatgaagtagtagcaagacatgcttagtgtgtatttctctctttgagacactgtaatttctaccagaaatttccagagcattatgtaggtagaaaaaaatgcaagcaagctgttaaagatcttggatcccattatatagtatgtatagctgaaatctgtaattcaatcactttttctcttttatcctctaaccaaaaaattgtttaattttgcatcccaaatgtttttaatctttgtatattttttaaaaatccttttctcctcatcattgccttttttgtggttgtaaatagacttacttgcactttgaagatgagttactccttgtcatcttacaaatatgtgatatggtaattttcataacagatgtcagttttgaaccaagaattggtgatttgtttataagaaaaaaactggcttcatttctgtgaaattgctctttgaaaatttctttttacacgtgtaagccaactgagataccgtgatggtgttgatttctttcaatgatgcttaccatctattttagccactgagccttttattatttgtctatttgtaaagtttatttgtcttaactcatttaataaatatactgtttatctgtttctga

SEQ ID NO: 5336 - DNA, 3038 bp, Homo sapiens
aggtcatagagcggctcccagcgttccctgcggcgtaggaggcggtccagactayaaaagcggctgccggaaagcggccggcacctcattcatttctacsggtctctagtagtgcagcttcggctggtgtcatcggtgtccttcctccgctgccgcccccgcaaggcttcgccgtcatcgaggccatttccagcgacttgtcgcacgcttttctatatacttcgttccccgccaaccgcaaccattgacgccatgtcgggttattcgagtgaccgagaccgcggccgggaccgagggtttggtgcacctcgatttggaggaagtagggcagggcccttatctggaaagaagtttggaaaccctggggagaaattagttaaaaagaagtggaatcttgatgagctgcctaaatttgagaagaatttttatcaagagcaccctgatttggctaggcgcacagcacaagaggyggaaacatacagaagaagcaaggaaattacagttagaggtcacaactgcccgaagccagttctaaatttttatgaagccaatttccctgcaaatgtcatggatgttattgcaagacagaatttcactgaacccactgctattcaagctcagggatggccagttgctctaagtggattggatatggttggagtggcacagactggatctgggaaaacattgtcttatttgcttcctgccattgtccacatcaatcatcagccattcctagagagaggcgatgggcctatttgtttggtgctggcaccaactcgggaactggcccaacaggtgcagcaagtagctgctgaatattgtagagcatgtcgcttgaagtctacttgtatctacggtggtgctcctaagggaccacaaatacgtgatttggagagaggtgtggaaatctgtattgcaacacctggaagactgattgactttttagagtgtggaaaaaccaatctgagaagaacaacctaccttgtccttgatgaagcagatagaatgcttgatatgggctttgaaccccaaataaggaagattgtggatcarataagacctgataggcaaactctaatgtggagtgcgacttggccaaaagaagtaagacagcttgctgaagatttcctgaaagactatattcatataaacattggtgcacttgaactgagtgcaaaccacaacattcttcagattgtggatgtgtgtcatgacgtagaaaaggatgaaaaacttattcgtctaatggaagagatcatgagtgagaaggagaataaaaccattgtttttgtggaaaccaaaagaagatgtgatgagcttaccagaaaaatgargagagatgggtggcctgccatgggtatccatggtgacaagagtcaacaagagcgtgactgggttctaaatgaattcaaacatggaaaagctcctattctgattgctacagatgtggcctccagagggctagatgtggaagatgtgaaatttgtcatcaattatgactaccctaactcctcagaggattatattcatcgaattggaagaactgctcgcagtaccaaaacaggcacagcatacactttctttacacctaataacataaagcaagtgagcgaccttatctctgtgcttcgtgaagctaatcaagcaattaatcccaagttgcttcagttggtcgaagacagaggtkcaggtcgttccaggggtagaggaggcatgaaggatgaccgtcgggacagatactctgcgggcaaaaggggtggatttaatacctttagagacagggaaaattatgacagaggttactctagcctgcttaaaagagattttggggcaaaaactcagaatggtgtttacagtgctgcaaattacaccaatgggagctttggaagtaattttgtgtctgctggtatacagaccagttttaggactggtaatccaacagggacttaccagaatggttatgatagcactcagcaatacggaagtaatgttccaaatatgcacaatggtatgaaccaacaggcatatgcatatcctgctactgcagctgcacctatgattggttatccaatgccaacaggatattcccaataagactttagaagtatatgtaaatgtctgtttttcataattgctctttatattgtgtgttatctgacaagatagttrtttaagaaacatgggaattgcagaaatgactgyagtgcagcagtaattatggtgcactttttcgctatttaagttggatatttctctacattcctgaaacaatttttaggttttttttgtactagaaaatgcaggcagtgttttcacaaaagtaaatgtacagtgatttgaaatacaataaatgaaggcaatgcatggccttccaataaaaaatatttgaagactgaattaagtggaaattgtactttattttatataatgtcatgtaaaactttgcttaagatggtctggttttttttttgtttttgtttggttttttttttccatgaaaacaaatgactgttcctttttatttaatttgggaggcagggggaatcagaaggcccttctttataatgagctattcatattgcaggagtcagaatgaattgatacaggtgaatttttagttacaggctaaattgcataaaagctttgtcagcttccagcatcaggggagtcatttaatagcctttttccttatttgctagtatggttaaatgagaaaatagtaaaatagatacaaagtcatctatatagtgtgagaacgtgggtgactttttcaaagtttataatttaaaaagctccaaataactggctttttcaagagacttatactcatgctcttggctatactgtgaattactgaaatgttgaacaaacctgtgaaagacatacattagccctttaagatggccaggagctaagcttgagtctcctttactgaatttcgttcttagtgcaggttacttgtagattctagtcttcacaggctccctggggctcttaactagtcacactgggagtcatgaatgtctttccaataa

SEQ ID NO: 5337 - DNA, 3557 bp, Homo sapiens
caggacgtgaaacgggggcggtttgggaagtttagagaccattctccgccgaccaaaacccstcaaaggattatcagacacgcgggtcggacggtccacatcagccggcagcccgggcgggtcccggggtgcgagcagcgcacttccgtagtgcagcttcggctggtgtcatcggtgtccttcctccgctgccgcccccgcaaggcttcgccgtcatcgaggccatttccagcgacttgtcgcacgcttttctatatacttcgttccccgccaaccgcaaccattgacgccatgtcgggttattcgagtgaccgagaccgcggccgggaccgagggtttggtgcacctcgatttggaggaagtagggcagggcccttatctggaaagaagtttggaaaccctggggagaaattagttaaaaagaagtggaatcttgatgagctgcctaaatttgagaagaatttttatcaagagcaccctgatttggctaggcgcacagcacaagaggyggaaacatacagaagaagcaaggaaattacagttagaggtcacaactgcccgaagccagttctaaatttttatgaagccaatttccctgcaaatgtcatggatgttattgcaagacagaatttcactgaacccactgctattcaagctcagggatggccagttgctctaagtggattggatatggttggagtggcacagactggatctgggaaaacattgtcttatttgcttcctgccattgtccacatcaatcatcagccattcctagagagaggcgatgggcctatttgtttggtgctggcaccaactcgggaactggcccaacaggtgcagcaagtagctgctgaatattgtagagcatgtcgcttgaagtctacttgtatctacggtggtgctcctaagggaccacaaatacgtgatttggagagaggtgtggaaatctgtattgcaacacctggaagactgattgactttttagagtgtggaaaaaccaatctgagaagaacaacctaccttgtccttgatgaagcagatagaatgcttgatatgggctttgaaccccaaataaggaagattgtggatcarataagacctgataggcaaactctaatgtggagtgcgacttggccaaaagaagtaagacagcttgctgaagatttcctgaaagactatattcatataaacattggtgcacttgaactgagtgcaaaccacaacattcttcagattgtggatgtgtgtcatgacgtagaaaaggatgaaaaacttattcgtctaatggaagagatcatgagtgagaaggagaataaaaccattgtttttgtggaaaccaaaagaagatgtgatgagcttaccagaaaaatgargagagatgggtggcctgccatgggtatccatggtgacaagagtcaacaagagcgtgactgggttctaaatgaattcaaacatggaaaagctcctattctgattgctacagatgtggcctccagagggctagatgtggaagatgtgaaatttgtcatcaattatgactaccctaactcctcagaggattatattcatcgaattggaagaactgctcgcagtaccaaaacaggcacagcatacactttctttacacctaataacataaagcaagtgagcgaccttatctctgtgcttcgtgaagctaatcaagcaattaatcccaagttgcttcagttggtcgaagacagaggtkcaggtcgttccaggggtagaggaggcatgaaggatgaccgtcgggacagatactctgcgggcaaaaggggtggatttaatacctttagagacagggaaaattatgacagaggttactctagcctgcttaaaagagattttggggcaaaaactcagaatggtgtttacagtgctgcaaattacaccaatgggagctttggaagtaattttgtgtctgctggtatacagaccagttttaggactggtaatccaacagggacttaccagaatggttatgatagcactcagcaatacggaagtaatgttccaaatatgcacaatggtatgaaccaacaggcatatgcatatcctgctactgcagctgcacctatgattggttatccaatgccaacaggatattcccaataagactttagaagtatatgtaaatgtctgtttttcataattgctctttatattgtgtgttatctgacaagatagttrtttaagaaacatgggaattgcagaaatgactgyagtgcagcagtaattatggtgcactttttcgctatttaagttggatatttctctacattcctgaaacaatttttaggttttttttgtactagaaaatgcaggcagtgttttcacaaaagtaaatgtacagtgatttgaaatacaataaatgaaggcaatgcatggccttccaataaaaaatatttgaagactgaattaagtggaaattgtactttattttatataatgtcatgtaaaactttgctagtatggttaaatgagaaaatagtaaaatagatacaaagtcatctatatagtgtgagaacgtgggtgactttttcaaagtttataatttaaaaagctccaaataactggctttttcaagagacttatactcatgctcttggctatactgtgaattactgaaatgttgaacaaacctgtgaaagacatacattagccctttaagatggccaggagctaagcttgagtctcctttactgaatttcgttcttagtgcaggttacttgtagattctagtcttcacaggctccctggggctcttaactagtcacactgggagtcatgaatgtctttccaataattcagggaattctagagatcctcaaactgtaaggtctattcatactcaacacaaggaaaaaacctcattaaaattaatgactaatcaggaggcaacgtaaccaaaagcacagtgaatgaaagttttcatggtaggttcaacatgggtttattgctagaaagatccaggggatagctttaggtttaacttcggctcaccaacgtaactttctaatcatttatttcagtaatagctagaagtgggtctgaatgttttcccagagtctgatacgtgtttttttttgccagaagagaggtcttcaggagacttcatttaaattctgattattaaactgaggctttaattgatgttaatgccttatgtcaaatgtaaagttagaatttgctagggctgggatagggagtgatatttctaggacttagacattgaaaactaattcagcctgtagtaacctggatggttttcaatggcatggttagtcaaattcatggttttaaacttagaagcagctttcgggggagagggtaggttggagcatttattacatattttactgtttaatgtcttaaccgtgggccttttaatttgtaaacactgaaatgattgttgggctgtggaaaacatttacctatttaccttggaagttttaaaagacagtccactttttagcatgtgtgttgtgtccagcctgtggtcgtcttaactaataaatgtgatttttctccccatt

SEQ ID NO: 5338 - DNA, 498 bp, Homo sapiens
cctatgcaaagcaggtaagaagccgaactctgaggcctctcgccattgtctccgagtcggycagctggagcgttttcggggctgtaaagggagaatggcgcatgcgcatattcagggcggaaggcgcgctaagagcagatttgtggtctgcattatgtctggagccagaagtaagcttgctcttttcctctgcggtctggccatcatgttgacagccttgcacttccacaggctacaagccctgggaccatctttctgccttaagggcaggagcccacttctgtggcaccagattccaccctgggaactgtggaaaaagtaggagaggcagattccctcagtgtcttcctcttaaacctcaatcatcgagacattagggggtattttctgttcacatttatctttttcaagccacatcttcctctaacaaatctctcagtatgcgattggtctcaagctaaaacaaaaataaatgtcagtttatattttacacatcca

SEQ ID NO: 5339 - DNA, 2065 bp, Homo sapiens
cctatgcaaagcaggtaagaagccgaactctgaggcctctcgccattgtctccgagtcggycagctggagcgttttcggggctgtaaagggagaatggcgcatgcgcatattcagggcggaaggcgcgctaagagcagatttgtggtctgcattatgtctggagccagaagtaagcttgctcttttcctctgcggctgttacgtggttgccctgggagcccacaccrgggaggagagcgtggctgaccatcacgaggctgaataktatgtggctgccdtgtatgagcatccatccatcctgagtctgaaccctctggctctcatcagcygccaagaggccttggagctcatgaacyagaaccttgacatctatgaacagcaagtgatgactgcagcccaaaaggatgtacagattatagtgtttccagaagatggcattcatggattcaactttacargaacatccatttatccakttttggacttcatgccgtctccccaggtggtcaggtggaacccatgcctggagcctcaccgcytcaatgacacagaggtgctcyagcrcctgagttgtatggccatcaggggagatatgttcttggtgrccartcttgggacaaakgagccttgtcatagcagtgacccaaggtrcccaaaagatgggagataccagttcracasaaatgtcgtgttcagcaataatggaacccttgttgaccgctrcygtaaacacaacytctactttgaggcagcattcgatgttcctcttaaagtgkatctcatcacctttgataccccctttgctggcaggtttggcatcttcacatgctttgatatattgttctttgrccctgccatcagagtcctcagagactacaaggtgaagcatgttgtgtacccaactgcctggatgaaccagctcccacyctkggcagcaattgagattcagaaagcttttsctgttgcctttggcrtcaacgttctggcagctaatgtccaccacccagttctggggatgacagraartgrcatacacacccctctggagtccttttggtaccrtgacatggaaaatcccaaaagtcaccttataattgcccaggtggccaaaaatccagtgggtctcattggtgcagagaatgcaacaggtgaaacggacccatcccatagtaagtttttaaaaattttgtcaggcgatccgtactgtgagaaggatgctcaggaagtccactgtgatgaggccaccaagtgraacgtgaatgctyctcccacatttcactctgagatgatgtatgacaatktcaycctggtccctgtctggggaaaggaaggctatctccacgtctgttccaatggcctcygctgttatttactttaygagaggcccaccttatccaaagagctgtatgccctgggggtctttsatgkgcttcacacagtacatgrcacttactacatccamrtgtgtgccctggtcaggtgtgggggtcttggcttcgacacctgyggacaggaaatcacagaggccacggggatatttgagtttcacctgygggrcamcttcagtacttcctatatctttyctttgtttctgacctcagggatgaccctagaagtccctgaccagcttggctgggagaatgaccactatttcctgaggaaaagtaggctgtcctctgggctggtgayggcggctctctatgggygcttgtrtgagaggsactaggaaaagtgtgtggtctgtggggcggactctggccatcatgttgacagccttgcacttccacaggctacaagccctgggaccatctttctgccttaagggcaggagcccacttctgtggcaccagattccaccctgggaactgtggaaaaagtaggagaggcagattccctcagtgtcttcctcttaaacctcaatcatcgagacattagggggtattttctgttcacatttatctttttcaagccacatcttcctctaacaaatctctcagtatgcgattggtctcaagctaaaacaaaaataaatgtcagtttatattttacacatccacaaagcagt

SEQ ID NO: 5340 - DNA, 1163 bp, Homo sapiens
gttttgatggccaggaaagccaagctgtgttattagggtcatgacaatcacagacattacggatggctgacctgtagtatggatagagggcagagggtagagtgtgaaatatatcacaraattatgtcaaataatctggatagttactactgcttaaaatctaagtgcacagctagaaaagtgggtagtgacgcactacagtcttgctgaacactgggtaagaaaatcatagcaaacgttgagtctgttttggaaatgttctaaaaccagactattaacacagtgagccattttaaatgtggcttgctacgtgtttggagagaaacacatactcttttattaggaacatgaaacaaactctttgagccgcagtatcactgcgagtgagtttaattgctgggattaataaatcacagctgcaaacgttaaattcttggcaggattctttattcagctgttttccccttgccccattacattccagatttgtggtctgcattatgtctggagccagaagtaagcttgctcttttcctctgcggctgttacgtggttgccctgggagcccacaccrgggaggagagcgtggctgaccatcacgaggctgaataktatgtggctgccdtgtatgagcatccatccatcctgagtctgaaccctctggctctcatcagcygccaagaggccttggagctcatgaacyagaaccttgacatctatgaacagcaagtgatgactgcagcccaaaaggatgtacagattatagtgtttccagaagatggcattcatggattcaactttacargaacatccatttatccakttttggacttcatgccgtctccccaggtggtcaggtggaacccatgcctggagcctcaccgcytcaatgacacagaggtgattcctgcctttttcctcagtaggctgagggtacacagaggtgatctaagtcagggaccagaagctgtgacatgttaactaagattgataggagaccttaacatccccaaaatccaacccaaactcccaaagatccatgtgccacaygttcattccattawagaatgtctgacgttacaaggcagttattcatctatggatctttccatttattaattacacaataaatacaggaatgtatacttaaaccaaaccaaaagt

SEQ ID NO: 5341 - DNA, 1507 bp, Homo sapiens
atggcggactacctgatcaccrgcagcaccggctacgtgcccagggatgggctcactgtgccccagctcttcgtcggcgctgacggcctcacccacaacgacttcctgattcttccaggattcatagacttcatagctgatgaggtggacctgacctcagccctgacccagaaggtcacgctgaagacgccgctgatctcctcccctatggacactgtgacagaggctgacatggccatcgcgatggctctgatgggacctattggtttcattcaccacaactgtaccgcagagttccaggccaaggaggtacagaagatcaagaagtttgaacagggcttcatcacggaccccgtggtgctgagcccctcgcgcactgtgggtgatgtgctggaggccaagatgcggcatggcttctctggcatccccatcactagacgggcaccaagctggtgggcatcgtcacctcccgagacactgactttcttgctgagaaggacaacaccaccctcctcagtgaggtgatgacgccaaggattgagctggtggtggctccagcaggtgtgacgttgaaagaggcaaaagagatcctaagtgtagcgagaaagggaagctgcctatcgtcaatgatcgcgattaactggtggccatcatcacccactccgacctgaagaagaacagagactaccctctggcctccaaggattcccacaagcagctgctgtgcagggcagctgtgggcacccgtgaggatgacaaatactgcctggacctgctcttccaggcgggtctcaacgtatagtcttggactcgtcccagggaactcggcacatcagatcaccatggtgcattacatcaaacaaaagtacccccacctccaggtgactggggggaacatggtgacagcagcccaggccaagaacctgacgctggtgtggatgggctgctagtgggcacgggctgtggctctatctgcatcacccaggaagtgatggcctgtggtcggccccagggcactgctatgtacaaggtggccgagtatgcctggcactttggtgtgcccatcatattcaatggtggcatccagatcgtggagcacatggtcaaggccctggcccttggagcctccacagtgatgacgggctccctgttggctgccaccatggaggcccccggtgagtacttcttctcagatggggtgtggctcaagaagtaccgtggcatgggctcgctggatgccatggggaagagcagcagcagccagaaacgatacttcggcgagggggataaggtgaagatcgcgcaggatgtctcaaactccatccaggacaaagggtccattcaaaacttcgtgtcctacctcatagtggacatccagcaaggctgccaggatagcagggcccacagcctgtctgccctttggtccatgatgtactcaggggagctcaagtttgagaagtggaccatattggcccagatcaagggtggcgtccacggcctgcattct

SEQ ID NO: 5342 - DNA, 2230 bp, Homo sapiens
aaaaacatgatgagaagtctataaaaattgtgtgctaccaaagatctgtcttatttggcagctgctgcctcacccacagcttttgatatctaggaggactcttctctyccaaactacctgtcaccayggcccacygatttccagccctcacccaggagcagaagaaggagctctcagaaattgcccagagcattgttgccaatggaaaggggatcctggctgcagatgaatctgtaggtaccatggggaaccgcctgcagaggatcaaggtggaaaacactgaagasaaccgccggcagttcygagaaatcctcttctctgtggacagttccatcaaccagagcatcgggggtgtgatccttttccacgagaccctctaccagaaggacagccagggaaagctgttcagaaacatcctcaaggaaaaggggatcgtggtgggaatcaagttagaccaaggaggtgctcctcttgcaggaacaaacaaagaaaccaccattcaagggcttgatggcctctcagagcgctgtgctcagtacaagaaagatggtgttgactttgggaagyggcgtsctgtgctgaggattgccgaccagtgtccatccagcctcgctatccaggaaaacgccaacgccctggctcgctacgmcagcatctgtcagcagaakggactggtacstattgttgaaccagaggtaattcctgatggagaccatgacctggaacactgccagtawgttactsagaaggtcctggctgctgtctacaagrccctgaatgaccatcatgtttacctggagggcaccctgctaaagcccaacatggtgactgctggacatgcctgmaccaagaagtatactccagaacaagtagctatggccaccgtaacagctctccaccgtactgttcctgcagctgttcctggcatctgctttttgtctggtggcatgagtgaagaggatgccactctcaacctcaatgctatcaacctttgccctctaccaaagccctggaaactaagtttctcttatggayrggccctgcaggccagtgcactggctgcctggggtggcaaggctgcaaacaaggaggcaacccaggaggcttttatgaagcgggccatggctaastgccaggyggccaaaggacagtatgttcacacgggttcttctggggctgcttccacccagtcgstcttcacagcctgctatacctactagggtccaatgcccgccagcctagctccagtgcttctagtaggagggctgaaagggagcaacttttcctcyaatcctggaaattcgacacaattagatttgaactgctggaaatacaacacatgttaaatcttaagtacaagggggaaaaaataaatcagttattgaaacataaaaatgaataccaaggacctgatcaaatttcacacagcagtttccttgcaacactttcagctccccatgctccagaatacccacccaagaaaataataggctttaaaacaatatcggctcctcatccaaagaacaactgctgattgaaacacctcattagctgagtgtagagaagtgcatcttatgaaacagtcttagcagtggtaggttgggaaggagatagctgcaaccaaaaaagaaataaatattctataaaccttcagctgctatcgggtttcacttttctgctcttgctgtccaaagactcagtgtatttcattacttttgactctactagacatgactgggtttcaacagtaaaggtcttcaactcttgctagtcattggaatcaagccgcaaaattttaaaaactgagatgctcaggccacaccccagctcaattaaatcagaaaccctagacttgggatcctctaactattagatttcttaaagctccctcagtaattccaatgtacagtcaagtttgagaactaccaatctaaatttcaagtttgagggtatttgaaaattaaagccattcacaatacgaagccagctaaaaatgtagaatgattttgagcaacttgtggagtataataagagaattaatgtgacttcaatgcttggagcattcttgttcaagtggcccaggtttggtgaaacaggactaccttgtcatctgcacgtccaggcatatttcgtagttttgcagtaaataatattcacataatgatactgtattgactttcaattttcagaattaacctatagttacagcacttaagacaaccagagttat

SEQ ID NO: 5343 - DNA, 2180 bp, Homo sapiens
aaaaacatgatgagaagtctataaaaattgtgtgctaccaaagatctgtcttatttggcagctgctgcctcacccacagcttttgatatctaggaggactcttctctyccaaactacctgtcaccayggcccacygatttccagccctcacccaggagcagaagaaggagctctcagaaattgcccagagcattgttgccaatggaaaggggatcctggctgcagatgaatctgtaggtaccatggggaaccgcctgcagaggatcaaggtggaaaacactgaagasaaccgccggcagttcygagaaatcctcttctctgtggacagttccatcaaccagagcatcgggggtgtgatccttttccacgagaccctctaccagaaggacagccagggaaagctgttcagaaacatcctcaaggaaaaggggatcgtggtgggaatcaagttagaccaaggaggtgctcctcttgcaggaacaaacaaagaaaccaccattcaagggcttgatggcctctcagagcgctgtgctcagtacaagaaagatggtgttgactttgggaagyggcgtsctgtgctgaggattgccgaccagtgtccatccagcctcgctatccaggaaaacgccaacgccctggctcgctacgmcagcatctgtcagcagaakggactggtacstattgttgaaccagaggtaattcctgatggagaccatgacctggaacactgccagtawgttactsagaaggtcctggctgctgtctacaagrccctgaatgaccatcatgtttacctggagggcaccctgctaaagcccaacatggtgactgctggacatgcctgmaccaagaagtatactccagaacaagtagctatggccaccgtaacagctctccaccgtactgttcctgcagctgttcctggcatctgctttttgtctggtggcatgagtgaagaggatgccactctcaacctcaatgctatcaacctttgccctctaccaaagccctggaaactaagtttctcttatggayrggccctgcaggccagtgcactggctgcctggggtggcaaggctgcaaacaaggaggcaacccaggaggcttttatgaagcgggccatggctaastgccaggyggccaaaggacagtatgttcacacgggttcttctggggctgcttccacccagtcgstcttcacagcctgctatacctactagggtccaatgcttttcctcyaatcctggaaattcgacacaattagatttgaactgctggaaatacaacacatgttaaatcttaagtacaagggggaaaaaataaatcagttattgaaacataaaaatgaataccaaggacctgatcaaatttcacacagcagtttccttgcaacactttcagctccccatgctccagaatacccacccaagaaaataataggctttaaaacaatatcggctcctcatccaaagaacaactgctgattgaaacacctcattagctgagtgtagagaagtgcatcttatgaaacagtcttagcagtggtaggttgggaaggagatagctgcaaccaaaaaagaaataaatattctataaaccttcagctgctatcgggtttcacttttctgctcttgctgtccaaagactcagtgtatttcattacttttgactctactagacatgactgggtttcaacagtaaaggtcttcaactcttgctagtcattggaatcaagccgcaaaattttaaaaactgagatgctcaggccacaccccagctcaattaaatcagaaaccctagacttgggatcctctaactattagatttcttaaagctccctcagtaattccaatgtacagtcaagtttgagaactaccaatctaaatttcaagtttgagggtatttgaaaattaaagccattcacaatacgaagccagctaaaaatgtagaatgattttgagcaacttgtggagtataataagagaattaatgtgacttcaatgcttggagcattcttgttcaagtggcccaggtttggtgaaacaggactaccttgtcatctgcacgtccaggcatatttcgtagttttgcagtaaataatattcacataatgatactgtattgactttcaattttcagaattaacctatagttacagcacttaagacaaccagagttat

SEQ ID NO: 5344 - DNA, 1717 bp, Homo sapiens
cgcgctgccagggggagcaccgagcaccacggtgtcgtgcgcttcgaggcgcggcgtgggaagaaggctggttcattctgccacccctctgcattaagacacaaggtgctgaccgcagagacctgccatgaaaccacacttgaagcaatggagacaacgaatgcttttcggaatattcgcttgggggctcctctttttgctgattttcatctacttcaccgacagcaaccccgctgagcctgtacccagctccctctccttcctggagaccaggaggctcctgccggtgcaggggaagcagcgggccatcatgggcgccgcacatgagccctccccgcctgggggcctggacgcacgccaggcgctgccccgcgcccacccagccggttcctttcatgcggggcctggagacctgcagaaatgggcccagtcccaagatgggtttgaacataaagagtttttttcatcccaggtggggagaaaatctcaaagtgctttctacccggaggatgacgactacttttttgctgctggtcagccagggtggcacagccacactcaggggacattgggattcccttcccccrgggagccaggcccacgggagggggcttttccggctgcacaggtccagaggaggcgggtgaagaagaggcaccggaggcagagaaggagccacgtgttggargagggcgacgacggcgacaggctgtactcctccatgtccagggccttcctgtaccggctctggaaggggaacgtctcttccaaaatgctgaacccgcgcctgcagaaggcgatgaaggattacctgaccgccaacaagcacggggtgcgcttccgcgggaagcgggaggccgggctgagcagggcacagctgctgtgccagctgcggagccgcgcgcgcgtgcggacgctggacggcaccgaggcgcccttttctgcgctgggctggcggcgcctggtgcccgccgtgcccctgagccagctgcacccccgcggcctgcgcagctgcgctgtcgtcatgtctgcaggcgcaatcctcaactcttccttgggcgaggaaatagattctcatgatgcrgttttgagatttaactctgctcctacacgtggttatgagaaagatgttgggaataaaaccaccrtacgcatcattaattcgcagattctgaccaaccccagccatcacttcattgacagttcactgtataaagacgtcattttggtggcctgggaccctgccccatattccgcaaatcttaacctgtggtacaaaaaaccggattacaacctgttcactccatatattcagcatcgtcagagaaacccaaatcagccattttacattcttcatcctaaatttatatggcagctctgggatattatccaggagaacactaaagagaagattcaaccaaacccaccatcttctggtttcattggaatcctcatmatgatgtccatgtgcagagaggtgcacgtgtatgaatatatcccatccgtgcggcagacggagctgtgccactaccacgagctgtactacgacgcagcctgcaccctcggggcgtaccacccactactctatgagaagctcctggtgcagcgcctgaacatgggcacgcagggggatttgcatcgcaagggcaaggtggttsttccyggcttccaggcggtgcactgccctgcaccaagtccagtcattccacactcttaa

SEQ ID NO: 5345 - DNA, 1479 bp, Homo sapiens
atgagcacggccagaacagagaaccttgttataatgggtctgtccagtcaaaatggtcagcggaggggccctgtgaaacccattagtggccctggaggagggggcacccagacacagcaacagatgaaccagctaaaaaacactagcacaatcaataatggcacccagtagcaagcacagtgtatgaccaccactattaggcctggtgacgactggaaaaagactataaaactccctccaaaggatctaagaatcaaaacttcggaagtgccctccacactccaaacaagaaaatgagtttgaagattattgtttgaaacgggagttactgaagggaatttttgaaatgggctgggaaaagccacctcctgttcaggaggagagcattcccattgctttatctggtaggcatatcttagctagagcaaaacatggaacaggcaagagcagaacctacctcattcccttacttgaacggcgagatctgaagaagcacaatatacaagcagtggtgcttgttccgactagagaacttgctctacaggtcagtcaaatttgcgtccaggtcaggaaacacatgggaggggccmaagtgatggcaaccacaggaggaaccaatttacgagatgacataattaggcttgatgatacaatgcacgtagtgattgctacccctaggagaatcctggatgttactaagaaaagagtagcccgggcagtagcaaaggttgatcatgtccagatgatagtattgcatgagcaggcagataagttgctgtcacaggattttgtgcagataatggaggatattattatcgtgctacctaaaaacaggaagattttactacattctgctactttcccttttagtgtacagaagttcatgaattcccacttgcagaaaccctatgagattaacctgatggaggaactaactctaaagggagtaacccagtactatgcatgtataactgagcttcaaaaagtacactgcctcaacgcacttttctccaggcttcagataaaccagtcgatcattttctgtaactcctctcagcaagttgaattgctagccaagacttctcaactaggttattcttgcttctatattcatgctaaaatgaggcaggaacatcaaaatcgtgtatttcatgatttccgaaatggcttatgatgcgatcttgtttacactgatctgtttacccgaggtactgatatacaaggtgtgaatgtgttaataaactttgatttcccaaagctcgcagagacctatctccatcgtattggaagatcaggtcgctttggtcatcctggcttagccatcaacttgatcacatatgatgatcacttcaacctgaaaagtattgaggagcagctgggaacagaaattaaacctattccaagcaatattgacaagagcctgtgtggggcagaataccacagcgagcctgtagaagatgagaagccttaaaaagcatg

SEQ ID NO: 5346 - DNA, 1292 bp, Homo sapiens
atgtctgacaaactgccctacaaagtcactgacattggcctggacttctggggatgcaaagccctggatattgtggagaaccagatgccgggcctgacgtgcatgtgggagctgtactcaaccctccaagccctcgaagggcacgcgcatcaccagttgcctccataggacccatggagatggccatcctcattgagaccctcattaccctgggtgccaagctgcagtggtccagctgcaacatcacccaggaccatgaggcagctgccattgccaaggctggcattccagttgtaygcctggaagggcgaaacagaggaggagtacctgtggtgcaccaagcagacattatacttcaaagacggcctcctcaacgtgattctggatgtcgctkgggcccccaccaacctcatccacaccaagtacccacagctcttgtyggggatgtgaggcatcttcaaggagaccatgattggggtccacaagctacacaagatgatggccaatgggatcctgaaagtgcctgccatcaatgtcaacaactccgtcaccaagagcaagtttgacaacctctccggctgccaggagtccctcatagatagcatcaagtgggccacagacgtgatgattgccagcaaggtagcagtggtagcaggctgtggcgacatgggcaaaggctgtgcccaggccctgtggggtttcaggcccatgtcatcatcatcaagatcgaccccatcaacatactgcaggctgccatgaagggctatgaggtggccaccatagacgaggcctgtcaggaggacaacatctttgtcaccaccacaggctgtgttaacatcatccttggctggcactttaagcagatgaaggatgatgccatcatttgtaacactggacactttgacatggagattgatgtcaagtggctcaacaagaatactgtggagagagtcaacatcaagccccaggtggactggtatcagctgaagaatgcacaccacatcatcctgctagctgagggtcagctggtcaacctgggttgtgccatgggccacctcagcttcttgataagtaactccttcaccaaccaagtgatggcgcagactgagctgcagacccacccagacaagtaccaggttatggttctcttcctgcccaagaagctgaatgaggcaatggctgaagcccacctgggcaagctgaatgtgaaattgaccaagctgactgagctgcaagcccattacctgtacttgtcccgtgatggccccttcaagccagatcactaccactac

SEQ ID NO: 5347 - DNA, 1201 bp, Homo sapiens
atgtctgacaaactgccctacaaagtcactgacattggcctggacttctggggatgcaaagccctggatattgtggagaaccagatgccgggcctgacgtgcatccctcgaagggcacgcgcatcaccagttgcctccataggacccatggagatggccatcctcattgagaccctcattaccctgggtgccaagctgcagtggtccagctgcaacatcacccaggaccatgaggcagctgccattgccaaggctggcattccagttgtaygcctggaagggcgaaacagaggaggagtacctgtggtgcaccaagcagacattatacttcaaagacggcctcctcaacgtgattctggatgtcgctkgggcccccaccaacctcatccacaccaagtacccacagctcttgtyggggatgtgaggcatcttcaaggagaccatgattggggtccacaagctacacaagatgatggccaatgggatcctgaaagtgcctgccatcaatgtcaacaactccgtcaccaagagcaagtttgacaacctctccggctgccaggagtccctcatagatagcatcaagtgggccacagacgtgatgattgccagcaaggcccatgtcatcatcatcaagatcgaccccatcaacatactgcaggctgccatgaagggctatgaggtggccaccatagacgaggcctgtcaggaggacaacatctttgtcaccaccacaggctgtgttaacatcatccttggctggcactttaagcagatgaaggatgatgccatcatttgtaacactggacactttgacatggagattgatgtcaagtggctcaacaagaatactgtggagagagtcaacatcaagccccaggtggactggtatcagctgaagaatgcacaccacatcatcctgctagctgagggtcagctggtcaacctgggttgtgccatgggccacctcagcttcttgataagtaactccttcaccaaccaagtgatggcgcagactgagctgcagacccacccagacaagtaccaggttatggttctcttcctgcccaagaagctgaatgaggcaatggctgaagcccacctgggcaagctgaatgtgaaattgaccaagctgactgagctgcaagcccattacctgtacttgtcccgtgatggccccttcaagccagatcactaccactac

SEQ ID NO: 5348 - DNA, 3679 bp, Homo sapiens
ccgtcgtgggctgcccgcggcctgtaatgagcaagttccgaggcctacggtgagcgccggagccggagaggcagctatatgtctttggctttcaagatcttctttccacaaaccctccgtgcactcagccgaaaagaactgtgcctattccgaaaacatcactggygtgatgtaagacaattcagccagtggtcagaaacagatctgcttcatggacatcccctcttcctgagaagaaagcctgttctatcattccagggaagccatctaagatcacgtgccacctaccttgttttcttgccagggttgcatgtgggactctgcagtggcccctgtgagatggctgagcaacggttctgtgtggactatgccaagygtggcacagctggctgcaaaaaatgcaaggaaaagattgtgaagggcgtatgccgaattggcaaagtggtgcccaatcccttctcagagtctgggggtgatatgaaagagtggtaccacattaaatgcatgtttgagaaactagagcgggcccgggccaccacaaaaaaaatcgaggacctcacagagctggaaggctgggaagagctggaagataatgagaaggaacagataacccagcacattgcagatctgtcttctaaggcagcaggtacaccaaagaagaaagctgttgtccaggctaagttgacaaccactggccaggtgacttctccagtgaaaggcgcctcatttgtcaccagtaccaatcccyggaaattttctggcttttcagccaagcccaacaactctggggaagccccctcgagccccacccctaagagaagtctgtcttcaagcaaatgtgaccccaggcataaggactgtctgctacgggagtttcgaaagttatgcgccatggtggccgataatcctagctacaacacgaagacccagatcatccaggacttccttcggaaaggctcagcaggagatggtttccacggtgatgtgtacctaacagtgaagctgctgctgccaggagtcattaagactgtttacaacttgaacgataagcagattgtgaagcttttcagtcgcatttttaactgcaacccagatgatatggcacgggacctagagcagggtgacgtgtcagagacaatcagagtcttctttgagcagagcaagtctttccccccagctgccaagagcctccttaccatccaggaagtggatgagttccttctgcggctgtccaagctcaccaaggaggatgagcagcaacaggccctacaggacattgcctccaggtgtacagccaatgaccttaaatgcatcatcaggttgatcaaacatgatctgaagatgaactcaggtgcaaaacatgtgttagacgcccttgaccccaatgcctatgaagccttcaaagcctcgcgcaacctgcaggatgtggtggagcgggtccttcacaacgcgcaggaggtggagaaggagccgggccagagacgagctctgagcgtccaggcctcgctgatgacacctgtgcagcccatgttggcggaggcctgcaagtccgttgagtatgcaatgaagaaatgtcccaatggcatgttctctgagatcaagtacgatggagagcgagtccaggtgcataagaatggagaccacttcagctacttcagccgcagtctcaagcccgtccttcctcacaaggtggcccactttaaggactacattccccaggcttttcctgggggccacagcatgatcttggattctgaagtgcttctgattgacaacaagacaggcaaaccactgccctttgggactctgggagtacacaagaaagcagccttccaggatgctaatgtctgcctgtttgtttttgattgtatctactttaatgatgtcagcttgatggacagacctctgtgtgagcggcggaagtttcttcatgacaacatggttgaaattccaaaccggatcatgttctcagaaatgaagcgagtcacacatctctcttgtccctyygaaagctttggacttggctgacatgataacccgggtgatccaggagggattggaggggctggtgctgaaggatgtgaagggtacatatgagcctgggaagcggcactggctgaaagtgaagaaagwctatttgaacgagggggccatggccgacacagctgacctggtggtccttggagccttctatgggcaagggagcaaaggcggcatgatgtcaatcttcctcatgggctgctacgaccctggcagccagaagtggtgcacagtcaccaagtgtgcaggaggccatgatgatgccacgcttgcccgcctgcagaatgaactagacatggtgaagatcagcaaggaccccagcaaaatacccagctggttgaaggtcaacaagatctactatcctgacttcatcgtcccagacccaaagaaagctgccgtgtgggagatcacaggggctgaattctccaaatcggaggctcatacagctgacgggatctccatccgattccctcgctgcacccgaatccgagaygataaggactggaaatctgccactaaccttccccarctcaaggaactgtaccagttgtcyaaggagaaggcagacttcactgtagtggctggagatgaggggagctccactacagggggtagcagtgaagagaataagggtccctcagggtctgctgtgtcccrcaaggcccccagcaagccctcagccagtaccaagaaagcagaagggaagctgagtaactycaacagcaaagatggcaacatgcagactgcaamgccttccgctatgaaggtgggggagaagctggccacaaagtcttctccagtgaaagtaggggagaagcggaaagctgctgatgagaygctgtgccaaacaaaggtattgctggacatcttcactggggtgcggctttacttgccaccctccacaccagacttcagccgtctcagacgctactttgtggcattcgacggggacctggtacaggaatttgatatgacttcagccacgcacgtgctgggtagcagggacaagaacyctgcrgcccagcaggtctccccagagtggatttgggcatgtatccggaaacggagactggtagctccctgctaggtttgctgtcttccctctccctcaggccatactctcctttaccatactaytggactggactcaggctggaggcagatagacacagtatagggggaatgggcttgcttctcccaaacccaccagttctccactgtctcttctggaccaggaattagttgctgtgggtgccacagctgaagtcagtttgtcttgctggtttaaatagatctttcagagctgggtgctgggtttgccatctttttgttttctttgaaaagcagcttagttaccctttttataaataaaatatcttgcagttatctttgtcctttccccacctacacccccaataatttccctagagattaaggagtaaaggctgggctatggcagctctgtccacaaagccttctctcccatccttgcctgttcctttgtacttccaggctcattttaaagttgtatttaaaggactgccctcggaaatgcttctgtttagcggaacttgtattcagsctgacacgctttgccaggaacaaacctcatgtgaaagaaaacaaaatgaattttttt

SEQ ID NO: 5349 - DNA, 3660 bp, Homo sapiens
ccgtcgtgggctgcccgcggcctgtaatgagcaagttccgaggcctacggtgagcgccggagccggagaggcagctatatgtctttggctttcaagatcttctttccacaaaccctccgtgcactcagccgaaaagaactgtgcctattccgaaaacatcactggygtgatgtaagacaattcagccagtggtcagaaacagatctgcttcatggacatcccctcttcctgagaagaaagcctgttctatcattccagggaagccatctaagatcacgtgccacctaccttgttttcttgccagggttgcatgtgggactctgcagtggcccctgtgagatggctgagcaacggttctgtgtggactatgccaagygtggcacagctggctgcaaaaaatgcaaggaaaagattgtgaagggcgtatgccgaattggcaaagtggtgcccaatcccttctcagagtctgggggtgatatgaaagagtggtaccacattaaatgcatgtttgagaaactagagcgggcccgggccaccacaaaaaaaatcgaggacctcacagagctggaaggctgggaagagctggaagataatgagaaggaacagataacccagcacattgcagatctgtcttctaaggcagcaggtacaccaaagaagaaagctgttgtccaggctaagttgacaaccactggccaggtgacttctccagtgaaaggcgcctcatttgtcaccagtaccaatcccyggaaattttctggcttttcagccaagcccaacaactctggggaagccccctcgagccccacccctaagagaagtctgtcttcaagcaaatgtgaccccaggcataaggactgtctgctacgggagtttcgaaagttatgcgccatggtggccgataatcctagctacaacacgaagacccagatcatccaggacttccttcggaaaggctcagcaggagatggtttccacggtgatgtgtacctaacagtgaagctgctgctgccaggagtcattaagactgtttacaacttgaacgataagcagattgtgaagcttttcagtcgcatttttaactgcaacccagatgatatggcacgggacctagagcagggtgacgtgtcagagacaatcagagtcttctttgagcagagcaagtctttccccccagctgccaagagcctccttaccatccaggaagtggatgagttccttctgcggctgtccaagctcaccaaggaggatgagcagcaacaggccctacaggacattgcctccaggtgtacagccaatgaccttaaatgcatcatcaggttgatcaaacatgatctgaagatgaactcaggtgcaaaacatgtgttagacgcccttgaccccaatgcctatgaagccttcaaagcctcgcgcaacctgcaggatgtggtggagcgggtccttcacaacgcgcaggaggtggagaaggagccgggccagagacgagctctgagcgtccaggcctcgctgatgacacctgtgcagcccatgttggcggaggcctgcaagtccgttgagtatgcaatgaagaaatgtcccaatggcatgttctctgagatcaagtacgatggagagcgagtccaggtgcataagaatggagaccacttcagctacttcagccgcagtctcaagcccgtccttcctcacaaggtggcccactttaaggactacattccccaggcttttcctgggggccacagcatgatcttggattctgaagtgcttctgattgacaacaagacaggcaaaccactgccctttgggactctgggagtacacaagaaagcagccttccaggatgctaatgtctgcctgtttgtttttgattgtatctactttaatgatgtcagcttgatggacagacctctgtgtgagcggcggaagtttcttcatgacaacatggttgaaattccaaaccggatcatgttctcagaaatgaagcgagtcacayaagctttggacttggctgacatgataacccgggtgatccaggagggattggaggggctggtgctgaaggatgtgaagggtacatatgagcctgggaagcggcactggctgaaagtgaagaaagwctatttgaacgagggggccatggccgacacagctgacctggtggtccttggagccttctatgggcaagggagcaaaggcggcatgatgtcaatcttcctcatgggctgctacgaccctggcagccagaagtggtgcacagtcaccaagtgtgcaggaggccatgatgatgccacgcttgcccgcctgcagaatgaactagacatggtgaagatcagcaaggaccccagcaaaatacccagctggttgaaggtcaacaagatctactatcctgacttcatcgtcccagacccaaagaaagctgccgtgtgggagatcacaggggctgaattctccaaatcggaggctcatacagctgacgggatctccatccgattccctcgctgcacccgaatccgagaygataaggactggaaatctgccactaaccttccccarctcaaggaactgtaccagttgtcyaaggagaaggcagacttcactgtagtggctggagatgaggggagctccactacagggggtagcagtgaagagaataagggtccctcagggtctgctgtgtcccrcaaggcccccagcaagccctcagccagtaccaagaaagcagaagggaagctgagtaactycaacagcaaagatggcaacatgcagactgcaamgccttccgctatgaaggtgggggagaagctggccacaaagtcttctccagtgaaagtaggggagaagcggaaagctgctgatgagaygctgtgccaaacaaaggtattgctggacatcttcactggggtgcggctttacttgccaccctccacaccagacttcagccgtctcagacgctactttgtggcattcgacggggacctggtacaggaatttgatatgacttcagccacgcacgtgctgggtagcagggacaagaacyctgcrgcccagcaggtctccccagagtggatttgggcatgtatccggaaacggagactggtagctccctgctaggtttgctgtcttccctctccctcaggccatactctcctttaccatactaytggactggactcaggctggaggcagatagacacagtatagggggaatgggcttgcttctcccaaacccaccagttctccactgtctcttctggaccaggaattagttgctgtgggtgccacagctgaagtcagtttgtcttgctggtttaaatagatctttcagagctgggtgctgggtttgccatctttttgttttctttgaaaagcagcttagttaccctttttataaataaaatatcttgcagttatctttgtcctttccccacctacacccccaataatttccctagagattaaggagtaaaggctgggctatggcagctctgtccacaaagccttctctcccatccttgcctgttcctttgtacttccaggctcattttaaagttgtatttaaaggactgccctcggaaatgcttctgtttagcggaacttgtattcagsctgacacgctttgccaggaacaaacctcatgtgaaagaaaacaaaatgaattttttt

SEQ ID NO: 5350 - DNA, 3052 bp, Homo sapiens
ccgtcgtgggctgcccgcggcctgtaatgagcaagttccgaggcctacggtgagcgccggagccggagaggcagctatatgtctttggctttcaagatcttctttccacaaaccctccgtgcactcagccgaaaagaactgtgcctattccgaaaacatcactggygtgatgtaagacaattcagccagtggtcagaaacagatctgcttcatggacatcccctcttcctgagaagaaagcctgttctatcattccagggaagccatctaagatcacgtgccacctaccttgttttcttgccagggttgcatgtgggactctgcagtggcccctgtgagatggctgagcaacggttctgtgtggactatgccaagygtggcacagctggctgcaaaaaatgcaaggaaaagattgtgaagggcgtatgccgaattggcaaagtggtgcccaatcccttctcagagtctgggggtgatatgaaagagtggtaccacattaaatgcatgtttgagaaactagagcgggcccgggccaccacaaaaaaaatcgaggacctcacagagctggaaggctgggaagagctggaagataatgagaaggaacagataacccagcacattgcagatctgtcttctaaggcagcaggtacaccaaagaagaaagctgttgtccaggctaagttgacaaccactggccaggtgacttctccagtgaaaggcgcctcatttgtcaccagtaccaatcccyggaaattttctggcttttcagccaagcccaacaactctggggaagccccctcgagccccacccctaagagaagtctgtcttcaagcaaatgtgaccccaggcataaggactgtctgctacgggagtttcgaaagttatgcgccatggtggccgataatcctagctacaacacgaagacccagatcatccaggacttccttcggaaaggctcagcaggagatggtttccacggtgatgtgtacctaacagtgaagctgctgctgccaggagtcattaagactgtttacaacttgaacgataagcagattgtgaagcttttcagtcgcatttttaactgcaacccagatgatatggcacgggacctagagcagggtgacgtgtcagagacaatcagagtcttctttgagcagagcaagtctttccccccagctgccaagagcctccttaccatccaggaagtggatgagttccttctgcggctgtccaagctcaccaaggaggatgagcagcaacaggccctacaggacattgcctccaggtgtacagccaatgaccttaaatgcatcatcaggttgatcaaacatgatctgaagatgaactcaggtgcaaaacatgtgttagacgcccttgaccccaatgcctatgaagccttcaaagcctcgcgcaacctgcaggatgtggtggagcgggtccttcacaacgcgcaggaggtggagaaggagccgggccagagacgagctctgagcgtccaggcctcgctgatgacacctgtgcagcccatgttggcggaggcctgcaagtccgttgagtatgcaatgaagaaatgtcccaatggcatgttctctgagatcaagtacgatggagagcgagtccaggtgcataagaatggagaccacttcagctacttcagccgcagtctcaagcccgtccttcctcacaaggtggcccactttaaggactacattccccaggcttttcctgggggccacagcatgatcttggattctgaagtgcttctgattgacaacaagacaggcaaaccactgccctttgggactctgggagtacacaagaaagcagccttccaggatgctaatgtctgcctgtttgtttttgattgtatctactttaatgatgtcagcttgatggacagacctctgtgtgagcggcggaagtttcttcatgacaacatggttgaaattccaaaccggatcatgttctcagaaatgaagcgagtcacayaagctttggacttggctgacatgataacccgggtgatccaggagggattggaggggctggtgctgaaggatgtgaagggtacatatgagcctgggaagcggcactggctgaaagtgaagaaagwctatttgaacgagggggccatggccgacacagctgacctggtggtccttggagccttctatgggcaagggagcaaaggcggcatgatgtcaatcttcctcatgggctgctacgaccctggcagccagaagtggtgcacagtcaccaagtgtgcaggaggccatgatgatgccacgcttgcccgcctgcagaatgaactagacatggtgaagatcagcaaggaccccagcaaaatacccagctggttgaaggtcaacaagatctactatcctgacttcatcgtcccagacccaaagaaagctgccgtgtgggagatcacaggggctgaattctccaaatcggaggctcatacagctgacgggatctccatccgattccctcgctgcacccgaatccgagaygataaggactggaaatctgccactaaccttccccarctcaaggaactgtaccagttgtcyaaggagaaggcagacttcactgtagtggctggagatgaggggagctccactacagggggtagcagtgaagagaataagggtccctcagggtctgctgtgtcccrcaaggcccccagcaagccctcagccagtaccaagaaagcagaagggaagctgagtaactycaacagcaaagatggcaacatgcagactgcaamgccttccgctatgaaggtgggggagaagctggccacaaagtcttctccagtgaaagtaggggagaagcggaaagctgctgatgagaygctgtgccaaacaaagaggcggccagccagtgagcagagaggaagaactgtgccagcaggcaggagatagaacagcccggcctagccaggagagactgcagggactcactcagctgctggccccaagtcaaaatttacattaaagggraaagmccagtctgggtgtgggaatgcagcattgagtttgtggtcag

SEQ ID NO: 5351 - DNA, 5016 bp, Homo sapiens
aatgcctctttatgccactcaccttatggggctgrtggagagtccacgtaaaggataaccgtttcctcaaaggatttatgctgtttcacctccatcaagaaaagggctttttaaagttaaggctttcagtccagtgtaaagctgttggagcgcgggagcaaaggtaaagaatgatgtaatgcgctggctgctccaaagcatcttttgttgtggaatggttattccagtcatctctttatgaatcaaatgtgaggggctgctttgtggacggagtcctttgcaagagcacatcaacgggaaagagaaagagacattcacttggagggctcttgctgaaaatgggtttaactctccttttgccagtcaccaccagcctgacctcatacacttttagtacaatggagtggctgagcctttgagcacaccaccattacatcatcgtggcaaattaaagaaggaggtgggaaaagaggacttattgttgtcatggcccatgagatgattggaactcaaattgttactgagaggttggtggctctgctggaaagtggaayggaaaaagtgctgctaattgatagccggccatttgtggaatacaatacatcccacattttggaagccattaatatcaactgctccaagcttatgaagcgaaggttgcaacaggacaaagtgttaattacagagctcatccagcattcagcgaaacataaggttgacattgattgcagtcagaaggttgtagtttacgatcaaagctcccaagatgttgcctctctctcttcagactgttttctcactgtacttctgggtaaactggagaagagcttcaactctgttcacctgcttgcagccttgcttacctgttgccaacattgggccaacccgaattcttcccaatctttatcttggctgccagcgagatgtcctcaacaaggagctgatgcagcagaatgggattggttatgtgttaaatgccagcaatacctgtccaaagcctgactttatccccgagtctcatttcctgcgtgtgcctgtgaatgacagcttttgtgagaaaattttgccgtggttggacaaatcagtagatttcattgagaaagcaaaagcctccaatggatgtgttctagtgcactgtttagctgggatctcccgctccgccaccatcgctatcgcctacatcatgaagaggatggacatgtctttagatgaagcttacagatttgtgaaagaaaaaagacctactatatctccaaacttcaattttctgggccaactcctggactatgagaagaagattaagaaccagactggagcatcagggccaaagagcaaactcaagctgctgcacctggagaagccaaatgaacctgtccctgctgtctcagagggtggacagaaaagcgagacgcccctcagtccaccctgtgccgactctgctacctcagaggcagcaggacaaaggcccgtgcatcccgccagcgtrcccagcgtrcccagcrtgcagccgtcgctgttagaggacagcccgctggtacaggcgctcagtgggctgcacctgtccgcagacaggctggaagacagcaataagctcaagcgttccttctctctggatatcaaatcagtttcatattcagccagcatggcagcatccttacatggcttctcctcatcagaagatgctttggaatactacaaaccttccactactctggatgggaccaacaagctatgccagttctcccctgttcaggaactatcggagcagactcccgaaaccagtcctgataaggaggaagccagcatccccaagaagctgcagacygccaggccttcagacagccagagcaagcgattgcattcggtcagaaccagcagcagtggcaccgcccagaggtcccttttatctccactgcatcgaagtgggagcgtggaggacaattaccacaccagcttccttttcggcctttccaccagccagcagcacctcacgaagtctgctggcctgggccttaagggctggcactcggatatcttggccccccagacctctaccccttccctgaccagcagctggtattttgccacagagtcctcacacttctactctgcctcagccatctacggaggcagtgccagttactctgcctacagctgcagccagctgcccacttgcggagaccaagtctattctgtgcgcaggcggcagaagccaagtgacagagctgactcgcggcggagctggcatgaagagagcccctttgaaaagcagtttaaacgcagaagctgccaaatggaatttggagagagcatcatgtcagagaacaggtcacgggaagagctggggaaagtgggcagtcagtctagcttttcgggcagcatggaaatcattgaggtctcctgagaagaaagacacttgtgacttctatagacaatttttttttcttgttcacaaaaaaattccctgtaaatctgaaatatatatatgtacatacatatatatttttggaaaatggagctatggtgtaaaagcaacaggtggatcaacccagttgttactctcttaacatctgcatttsagagatcagctaatacttctctcaacaaaaatggaagggcagatgctagratcccccctagacggaggaaaaccattttattcagtgaattacacatcctcttgttcttaaaaaagcaagtgtctttggtgttggaggacaaaatcccctaccattttcacgttgtgctactaagagatctcaaatattagtctttgtccggacccttccatagtacaccttagcgctgagactgagccagcttgggggtcaggtaggtagaccctgttagggacagagcctagtggtaaatccaagagaaatgatcctatccaaagctgattcacaaacccacgctcacctgacagccgagggacacgagcatcactctgctggacggaccattaggggccttgccaaggtctaccttagagcaaacccagtacctcagacaggaaagtcggggctttgaccactaccatatctggtagcccattttctaggcattgtgaataggtaggtagctagtcacacttttcagaccaattcaaactgtctatgcacaaaattcccgtgggcctagatggagataatttttttttcttctcagctttatgaagagaagggaaactgtctaggattcagctgaaccaccaggaacctggcaacatcacgatttaagctaaggttgggaggctaacgagtctacctccctctttgtaaatcaaagaattgtttaaaatgggattgtcaatcctttaaataaagatgaacttggtttcaagccaaatgtgaatttatttgggttggtagcagagcagcagcaccttcaaattctcagccaaagcagatgtttttgccctttctgcttcactgcatggatacagttggtaaaatgtaataatatggcagaattttataggaaacttcctagggaggtaaattatgggaagattaagaaaggtacaaattgctgaggagaagcaggaaacctgtttccttagtggcttttatcccctcggcatgcgatggggctgatgtttctatrattgcctcagactttcacatttactagtagggctgagagaggctttagtgaggaaggaatattcagaataaaacggttgagaaagctgagaagaccattgagttttgatcagttgtgaatagagtgcaaagccatggccaagctgtttttggaaacgctggccggcgtgtcttcagtggaaaaagcaaatcaaaatggagcgagagcaaaggggcgtcctcagtcctcaacctacaatcactgtatggaatcggtcctggcagctgaacataggaggtcactggaacaagtgatagtgcagattggctttcaaacatcctcctggcttgagttttatcagctacartgtgggtcctcttttgaagccttaattcacaacagcagctttttgggggtggggctgggcgggtgttgtcattgttctttcccttcctgtaagtgtcgctagttgctgcctcgtatctcaggtttttctctgtttttgagaaatggacagttttttgaccaggatgtgacttcatgtttcctatggtgacttctaaaaccagcacagaatgatatgactcaacacagaccgacttggttatggggatgatgagccgcacagacctcactagttgtgcacaaataatgtgctatgatggggtgtaaagtgaaggcagaagagggtcagccgcattgttatgatactgggaaagtgcyggtcaacgatttgagttagtttttagatatacattgaaatctttaatcagacattctcaagtttcacacagtagtttttgatgttatgtacacacacaccaaatgtgtaacagttcaccacttccagagtgtggtcatgcccaaaacatgtttaagaaaggaaagcagtagctccttgctaacgatgtttcaggaggtttggggsacttggttttaatgagcttctgtcatttagggcttctcttggccatggtccccttccttctggaactgtgatgtagtcacatcctacagcctttagtgctggttcactagtgtcagataatcagttcttggaatcgagactgccgtggcgaaggggtggcctcggaggcaggctctggagctgcttggatgtctttaggtggggtggtggctggctctcttcagcatgtaattggggaaaccctcgyktctactaggggtgatacagatggtgattttaaagagcaaaactagacttctatgtgagaagtgctggaaaatgatttaggacatgtgtaaagttagatggaaagactgtaaatgtttaatatgaatatagtgttcttttgaagtaaggccagctgttgaacggttaaactgtgcatttctcattttgatgtgtcatgtatgttaatgtatgaaatgattaaataaaatcaaaactggtacctgtttatacataaa

SEQ ID NO: 5352 - DNA, 5096 bp, Homo sapiens
aatgcctctttatgccactcaccttatggggctgrtggagagtccacgtaaaggataaccgtttcctcaaaggatttatgctgtttcacctccatcaagaaaagggctttttaaagttaaggctttcagtccagtgtaaagctgttggagcgcgggagcaaaggtaaagaatgatgtaatgcgctggctgctccaaagcatcttttgttgtggaatggttattccagtcatctctttatgaatcaaatgtgaggggctgctttgtggacggagtcctttgcaagagcacatcaacgggaaagagaaagagacattcacttggagggctcttgctgaaaatgggtttaactctccttttgccagtcaccaccagcctgacctcatacacttttagtacaatggagtggctgagcctttgagcacaccaccattacatcatcgtggcaaattaaagaaggaggtgggaaaagaggacttattgttgtcatggcccatgagatgattggaactcaaattgttactgagaggttggtggctctgctggaaagtggaayggaaaaagtgctgctaattgatagccggccatttgtggaatacaatacatcccacattttggaagccattaatatcaactgctccaagcttatgaagcgaaggttgcaacaggacaaagtgttaattacagagctcatccagcattcagcgaaacataaggttgacattgattgcagtcagaaggttgtagtttacgatcaaagctcccaagatgttgcctctctctcttcagactgttttctcactgtacttctgggtaaactggagaagagcttcaactctgttcacctgcttgcaggtgggtttgctgagttctctcgttgtttccctggcctctgtgaaggaaaatccactctagtccctacctgcatttctcagccttgcttacctgttgccaacattgggccaacccgaattcttcccaatctttatcttggctgccagcgagatgtcctcaacaaggagctgatgcagcagaatgggattggttatgtgttaaatgccagcaatacctgtccaaagcctgactttatccccgagtctcatttcctgcgtgtgcctgtgaatgacagcttttgtgagaaaattttgccgtggttggacaaatcagtagatttcattgagaaagcaaaagcctccaatggatgtgttctagtgcactgtttagctgggatctcccgctccgccaccatcgctatcgcctacatcatgaagaggatggacatgtctttagatgaagcttacagatttgtgaaagaaaaaagacctactatatctccaaacttcaattttctgggccaactcctggactatgagaagaagattaagaaccagactggagcatcagggccaaagagcaaactcaagctgctgcacctggagaagccaaatgaacctgtccctgctgtctcagagggtggacagaaaagcgagacgcccctcagtccaccctgtgccgactctgctacctcagaggcagcaggacaaaggcccgtgcatcccgccagcgtrcccagcgtrcccagcrtgcagccgtcgctgttagaggacagcccgctggtacaggcgctcagtgggctgcacctgtccgcagacaggctggaagacagcaataagctcaagcgttccttctctctggatatcaaatcagtttcatattcagccagcatggcagcatccttacatggcttctcctcatcagaagatgctttggaatactacaaaccttccactactctggatgggaccaacaagctatgccagttctcccctgttcaggaactatcggagcagactcccgaaaccagtcctgataaggaggaagccagcatccccaagaagctgcagacygccaggccttcagacagccagagcaagcgattgcattcggtcagaaccagcagcagtggcaccgcccagaggtcccttttatctccactgcatcgaagtgggagcgtggaggacaattaccacaccagcttccttttcggcctttccaccagccagcagcacctcacgaagtctgctggcctgggccttaagggctggcactcggatatcttggccccccagacctctaccccttccctgaccagcagctggtattttgccacagagtcctcacacttctactctgcctcagccatctacggaggcagtgccagttactctgcctacagctgcagccagctgcccacttgcggagaccaagtctattctgtgcgcaggcggcagaagccaagtgacagagctgactcgcggcggagctggcatgaagagagcccctttgaaaagcagtttaaacgcagaagctgccaaatggaatttggagagagcatcatgtcagagaacaggtcacgggaagagctggggaaagtgggcagtcagtctagcttttcgggcagcatggaaatcattgaggtctcctgagaagaaagacacttgtgacttctatagacaatttttttttcttgttcacaaaaaaattccctgtaaatctgaaatatatatatgtacatacatatatatttttggaaaatggagctatggtgtaaaagcaacaggtggatcaacccagttgttactctcttaacatctgcatttsagagatcagctaatacttctctcaacaaaaatggaagggcagatgctagratcccccctagacggaggaaaaccattttattcagtgaattacacatcctcttgttcttaaaaaagcaagtgtctttggtgttggaggacaaaatcccctaccattttcacgttgtgctactaagagatctcaaatattagtctttgtccggacccttccatagtacaccttagcgctgagactgagccagcttgggggtcaggtaggtagaccctgttagggacagagcctagtggtaaatccaagagaaatgatcctatccaaagctgattcacaaacccacgctcacctgacagccgagggacacgagcatcactctgctggacggaccattaggggccttgccaaggtctaccttagagcaaacccagtacctcagacaggaaagtcggggctttgaccactaccatatctggtagcccattttctaggcattgtgaataggtaggtagctagtcacacttttcagaccaattcaaactgtctatgcacaaaattcccgtgggcctagatggagataatttttttttcttctcagctttatgaagagaagggaaactgtctaggattcagctgaaccaccaggaacctggcaacatcacgatttaagctaaggttgggaggctaacgagtctacctccctctttgtaaatcaaagaattgtttaaaatgggattgtcaatcctttaaataaagatgaacttggtttcaagccaaatgtgaatttatttgggttggtagcagagcagcagcaccttcaaattctcagccaaagcagatgtttttgccctttctgcttcactgcatggatacagttggtaaaatgtaataatatggcagaattttataggaaacttcctagggaggtaaattatgggaagattaagaaaggtacaaattgctgaggagaagcaggaaacctgtttccttagtggcttttatcccctcggcatgcgatggggctgatgtttctatrattgcctcagactttcacatttactagtagggctgagagaggctttagtgaggaaggaatattcagaataaaacggttgagaaagctgagaagaccattgagttttgatcagttgtgaatagagtgcaaagccatggccaagctgtttttggaaacgctggccggcgtgtcttcagtggaaaaagcaaatcaaaatggagcgagagcaaaggggcgtcctcagtcctcaacctacaatcactgtatggaatcggtcctggcagctgaacataggaggtcactggaacaagtgatagtgcagattggctttcaaacatcctcctggcttgagttttatcagctacartgtgggtcctcttttgaagccttaattcacaacagcagctttttgggggtggggctgggcgggtgttgtcattgttctttcccttcctgtaagtgtcgctagttgctgcctcgtatctcaggtttttctctgtttttgagaaatggacagttttttgaccaggatgtgacttcatgtttcctatggtgacttctaaaaccagcacagaatgatatgactcaacacagaccgacttggttatggggatgatgagccgcacagacctcactagttgtgcacaaataatgtgctatgatggggtgtaaagtgaaggcagaagagggtcagccgcattgttatgatactgggaaagtgcyggtcaacgatttgagttagtttttagatatacattgaaatctttaatcagacattctcaagtttcacacagtagtttttgatgttatgtacacacacaccaaatgtgtaacagttcaccacttccagagtgtggtcatgcccaaaacatgtttaagaaaggaaagcagtagctccttgctaacgatgtttcaggaggtttggggsacttggttttaatgagcttctgtcatttagggcttctcttggccatggtccccttccttctggaactgtgatgtagtcacatcctacagcctttagtgctggttcactagtgtcagataatcagttcttggaatcgagactgccgtggcgaaggggtggcctcggaggcaggctctggagctgcttggatgtctttaggtggggtggtggctggctctcttcagcatgtaattggggaaaccctcgyktctactaggggtgatacagatggtgattttaaagagcaaaactagacttctatgtgagaagtgctggaaaatgatttaggacatgtgtaaagttagatggaaagactgtaaatgtttaatatgaatatagtgttcttttgaagtaaggccagctgttgaacggttaaactgtgcatttctcattttgatgtgtcatgtatgttaatgtatgaaatgattaaataaaatcaaaactggtacctgtttatacataaa

SEQ ID NO: 5353 - DNA, 915 bp, Homo sapiens
aatgcctctttatgccactcaccttatggggctgrtggagagtccacgtaaaggataaccgtttcctcaaaggatttatgctgtttcacctccatcaagaaaagggctttttaaagttaaggctttcagtccagtgtaaagctgttggagcgcgggagcaaaggtaaagaatgatgtaatgcgctggctgctccaaagcatcttttgttgtggaatggttattccagtcatctctttatgaatcaaatgtgaggggctgctttgtggacggagtcctttgcaagagcacatcaacgggaaagagaaagagacattcacttggagggctcttgctgaaaatgggtttaactctccttttgccagtcaccaccagcctgacctcatacacttttagtacaatggagtggctgagcctttgagcacaccaccattacatcatcgtggcaaattaaagaaggaggtgggaaaagaggacttattgttgtcatggcccatgagatgattggaactcaaattgttactgagaggttggtggctctgctggaaagtggaayggaaaaagtgctgctaattgatagccggccatttgtggaatacaatacatcccacattttggaagccattaatatcaactgctccaagcttatgaagcgaaggttgcaacaggacaaagtgttaattacagagctcatccagcattcagcgaaacataaggttgacattgattgcagtcagaaggttgtagtttacgatcaaagctcccaagatgttgcctctctctcttcagactgttttctcactgtacttctgggtaaactggagaagagcttcaactctgttcacctgcttgcaggagctgatgcagcagaatgggattggttatgtgttaaatgccagcaatacctgtccaaagcc

SEQ ID NO: 5354 - DNA, 1634 bp, Homo sapiens
agacccacttccggagacctcacacaagatggcggcacccgaggaacacgattctccgaccgaagcgtcccagccgattgtggaagaggaggaaactaaaacatttaaagacctgggtgtgacagatgtgttgtgtgaagcttgtgaccagttgggatggacaaaacccaccaagatycagattgaagctattcctttggccttacaagctgtgattgtaggtggaattgattcaatgtctcaatctttggcccttgcaaaaaaaccacatataataatagcaactcctggtcgactgattgaccacttggaaaatacgaaaggtttcaacttgagagctctcaaatacttggtcatggatgaagccgaccgaatactgaatatggattttgagacagaggttgacaagatcctcaaagtgattcctcgagatcggaaaacattcctcttctctgccaccatgaccaagaaggttcaaaaacttcagcgagcagctctgaagaatcctgtgaaatgtgccgtttcctctaaataccagacagttgaaaaattacagcaatattatatttttattccctctaaattcaaggatacctacctggtttatattctaaatgaattggctggaaactcctttatgatattctgcagcacctgtaataatacccagagaacagctttgctactgcgaaatcttggcttcactgccatccccctccatggacaaatgagtcagagtaagcgcctaggatcccttaataagtttaaggccaaggcccgttccattcttctagcaactgacgttgccagccgaggtttggacatacctcatgtagatgtggttgtcaactttgacattcctacccattccaaggattacatccatcgagtaggtcgaacagctagagctgggcgctccggaaaggctattacttttgtcacacagtatgatgtggaactcttccagcgcatagaacacttaattgggaagaaactaccaggttttccaacacaggatgatgaggttatgatgctgacagaacgcgtcgctgaagcccaaaggtttgcccgaatggagttaagggagcatggagaaaagaagaaacgctcgcgagaggatgctggagataatgatgacacagagggtgctattggtgtcaggaacaaggtggctggaggaaaaatgaagaagcggaaaggccgttaatcacttttatgaaggctcgagttctgctgttctgtaaaagagaattggagaatgaaacctgctccaacagagatcatgagactgaaattggtcagaattgtgtccagaatgtgctcagctaattcagtattcttccccattctgggttggagtttactgcagagtaattcttacagtgctgatgtcaagactgttactgttcttcgactttgattccttgctcatgacatgagtagggtgtgctcttctgtcacttcacacagaccttttgccttttttagctgcaagtcaaggactaggttgatgatgcccatgacctgtaattgtaaagaagcttggacatctgcaaatgatatttaaaccatcttggcttgtgctttattcaaactaatgtgaaacaataaatttaaatattatttttaaaaga

SEQ ID NO: 5355 - DNA, 1676 bp, Homo sapiens
agacccacttccggagacctcacacaagatggcggcacccgaggaacacgattctccgaccgaagcgtcccagccgattgtggaagaggaggaaactaaaacatttaaagacctgggtgtgacagatgtgttgtgtgaagcttgtgaccagttgggatggacaaaacccaccaagatycagattgaagctattcctttggccttacaaggtcgtgatatcattgggcttgcagaaactggctctggaaagacaggcgcctttgctttgcccattctaaacgcactgctggagaccccgcagcgtttgtttgccctagttcttaccccgactcgggagctggcctttcagatctcagagcagtttgaagccctggggtcctctattggagtgcagagtgctgtgattgtaggtggaattgattcaatgtctcaatctttggcccttgcaaaaaaaccacatataataatagcaactcctggtcgactgattgaccacttggaaaatacgaaaggtttcaacttgagagctctcaaatacttggtcatggatgaagccgaccgaatactgaatatggattttgagacagaggttgacaagatcctcaaagtgattcctcgagatcggaaaacattcctcttctctgccaccatgaccaagaaggttcaaaaacttcagcgagcagctctgaagaatcctgtgaaatgtgccgtttcctctaaataccagacagttgaaaaattacagcaatattatatttttattccctctaaattcaagagtaagcgcctaggatcccttaataagtttaaggccaaggcccgttccattcttctagcaactgacgttgccagccgaggtttggacatacctcatgtagatgtggttgtcaactttgacattcctacccattccaaggattacatccatcgagtaggtcgaacagctagagctgggcgctccggaaaggctattacttttgtcacacagtatgatgtggaactcttccagcgcatagaacacttaattgggaagaaactaccaggttttccaacacaggatgatgaggttatgatgctgacagaacgcgtcgctgaagcccaaaggtttgcccgaatggagttaagggagcatggagaaaagaagaaacgctcgcgagaggatgctggagataatgatgacacagagggtgctattggtgtcaggaacaaggtggctggaggaaaaatgaagaagcggaaaggccgttaatcacttttatgaaggctcgagttctgctgttctgtaaaagagaattggagaatgaaacctgctccaacagagatcatgagactgaaattggtcagaattgtgtccagaatgtgctcagctaattcagtattcttccccattctgggttggagtttactgcagagtaattcttacagtgctgatgtcaagactgttactgttcttcgactttgattccttgctcatgacatgagtagggtgtgctcttctgtcacttcacacagaccttttgccttttttagctgcaagtcaaggactaggttgatgatgcccatgacctgtaattgtaaagaagcttggacatctgcaaatgatatttaaaccatcttggcttgtgctttattcaaactaatgtgaaacaataaatttaaatattatttttaaaaga

SEQ ID NO: 5356 - DNA, 1823 bp, Homo sapiens
agacccacttccggagacctcacacaagatggcggcacccgaggaacacgattctccgaccgaagcgtcccagccgattgtggaagaggaggaaactaaaacatttaaagacctgggtgtgacagatgtgttgtgtgaagcttgtgaccagttgggatggacaaaacccaccaagatycagattgaagctattcctttggccttacaaggtcgtgatatcattgggcttgcagaaactggctctggaaagacaggcgcctttgctttgcccattctaaacgcactgctggagaccccgcagcgtttgtttgccctagttcttaccccgactcgggagctggcctttcagatctcagagcagtttgaagccctggggtcctctattggagtgcagagtgctgtgattgtaggtggaattgattcaatgtctcaatctttggcccttgcaaaaaaaccacatataataatagcaactcctggtcgactgattgaccacttggaaaatacgaaaggtttcaacttgagagctctcaaatacttggtcatggatgaagccgaccgaatactgaatatggattttgagacagaggttgacaagatcctcaaagtgattcctcgagatcggaaaacattcctcttctctgccaccatgaccaagaaggttcaaaaacttcagcgagcagctctgaagaatcctgtgaaatgtgccgtttcctctaaataccagacagttgaaaaattacagcaatattatatttttattccctctaaattcaaggatacctacctggtttatattctaaatgaattggctggaaactcctttatgatattctgcagcacctgtaataatacccagagaacagctttgctactgcgaaatcttggcttcactgccatccccctccatggacaaatgagtcagagtaagcgcctaggatcccttaataagtttaaggccaaggcccgttccattcttctagcaactgacgttgccagccgaggtttggacatacctcatgtagatgtggttgtcaactttgacattcctacccattccaaggattacatccatcgagtaggtcgaacagctagagctgggcgctccggaaaggctattacttttgtcacacagtatgatgtggaactcttccagcgcatagaacacttaattgggaagaaactaccaggttttccaacacaggatgatgaggttatgatgctgacagaacgcgtcgctgaagcccaaaggtttgcccgaatggagttaagggagcatggagaaaagaagaaacgctcgcgagaggatgctggagataatgatgacacagagggtgctattggtgtcaggaacaaggtggctggaggaaaaatgaagaagcggaaaggccgttaatcacttttatgaaggctcgagttctgctgttctgtaaaagagaattggagaatgaaacctgctccaacagagatcatgagactgaaattggtcagaattgtgtccagaatgtgctcagctaattcagtattcttccccattctgggttggagtttactgcagagtaattcttacagtgctgatgtcaagactgttactgttcttcgactttgattccttgctcatgacatgagtagggtgtgctcttctgtcacttcacacagaccttttgccttttttagctgcaagtcaaggactaggttgatgatgcccatgacctgtaattgtaaagaagcttggacatctgcaaatgatatttaaaccatcttggcttgtgctttattcaaactaatgtgaaacaataaatttaaatattatttttaaaaga

SEQ ID NO: 5357 - DNA, 4686 bp, Homo sapiens
tgctgtccggtggccgcgctgtggccgccggtggccgttaggctacctgaggccgttccttctggtctctctctcctgggccgcggagagaccgtctccctgccgttacagcaggccccatcccagcgcccagccgtacttggggaaaggccggttgcgattccggggctttcccgccagagctgggtsttctctggggagagctgttttcaccgggaagctcggctttctgtggtacyggcttcatctcccgccttccttgagacccgagtgatatttcttgactacttctgcgtctcacgtaaacatttctccaactctcctactctgtggtatctccctgagatgtgatatcgctagtgccaccatcagaaagaaacgtctggaccctcctgctcaggttatgaaaatccccttaactgccacaatttgcttacctggcwcatcgcctcctggactttgtatctttgctaaagtcagtgatgtgaaaagacttgaaatggatgatattgctgataggatgaggatggatgctggagaagtgactttagtgaaccacaactccgtattcaaaacccacctcctgccacaaacaggttttccagaggaccagctttcgctttctgaccagcagattttatcttccaggcaaggacatttggaccgatcttttacatgttccacaagaagtgcagcttataatccaagctattactcagataatccttcctcagacagttttcttggctcaggcgatttaagaacctttggccagagtgcaaatggccaatggagaaattctaccccatcgtcaagctcatctttacaaaaatcaagaaacagccgaagtctttacctcgaaacccgaaagacctcaagtggattatcaaacagttttgcgggaaagtcaaaccatcactgccatgtatctgcatatgaaaaatcttttcctattaaacctgttccaagtccatcttggagtggttcatgtcgtcgaagtctyttgagccccaagaaaactcagaggcgacatgttagtacagcagaagagacagttcaagaagaagaaagagagatttacagacagctgctacagatggtcacagggaaacagtttactatagccaaacccaccacacattttcctttacacctgtctcgatgtcttagttccagtaaaaatactttgaaagactcactgtttaaaaatggaaactcttgtgcatctcagatcattggctctgatacttcatcatctggatctgccagcattttaactaaccaggaacagctgtcccacagtgtatattccctatcttcttataccccagatgttrcatttggatccaaagattctggtactcttcatcatccccatcatcaccaytctgttccacatcagccagataacttagcagcttcaaatacacaatctgaaggatcagactctgtgattttactgaaagtgaaagattcccagactccaactcccagttctactttcttccaggcagagctgtggatcaaagaattaactagtgtttatgattctcgagcacgagaaagattgcgccagattgaagaacagaaggcattggccttacagcttcaaaaccagagattgcaggagcgggaacattcagtacatgattcagtagaactacatcttcgtgtacctcttgaaaaggagattcctgttactgttgtccaagaaacacaaaaaaaaggtcataaattaactgatagtgaagatgaatttcctgaaattacagaggaaatggagaaagaaataaagaatgtatttcgtaatgggaatcaggatgaagttctcagtgaagcatttcgcctgaccattacacgcaaagatattcaaactctaaaccatctgaattggctcaatgatgagatcatcaatttctacatgaatatgctgatggagcgaagtaaagaraagggcttgccaagtgtgcatgcatttaatacctttttcttcactaaattaaaaacggctggttatcaggcagtgaaacgttggacaaagaaagtagatgtattttctgttgacattcttttggtgcccattcacctgggagtacactggtgtctagctgttgtggactttagaaagaagaatattacctattaygactccatgggtgggataaacaatgaagcctgcagaatactcttgcaatacctaaagcaagaaagcattgacaagaaaaggaaagagtttgacaccaatggctggcagcttttcagcaagaaaagccagattcctcagcagatgaatggaagtgaytgtgggatgtttgcctgcaaatatgctgactgtattaccaaagacagaccaatcaacttcacacagcaacacatgccatacttccggaagcggatggtctgggagatcctccaccgaaaactcttgtgaagactgtctcacttagcagaccttgaccatgtgggggaccagctctttgttgtctacagccagagaccttggaaacagctgctcccagccctctgctgttgtaacacccttgatcctggaccaggccctggcgagatgcattcacaagcacatctgcctttccttttgtatctcagatactatttttgcaaagaaactttggtgctgtgaaaggggtgagggacatccctaagctgaagagagagactgcttttcacttcttcagttctgccatcttgttttcaaagggctccagcctcactcagtccctaattatgggactgagaaaagcttggaaagaatcttggtttcatataaattcttgttgttaggccttactaagaagtaggaaagggcatgggcaaaaggtagggataaaaaccaccagcatatacatggacatacacacacacccacacacacaaacacacacacacacacaattttcacgatgtatggtcaggaatgtgactgtaaactggactttggggcccaggcataagtcccttcctccaggacctttcctatttatatgtccctatacaaaatccatctgcttttatacgtagctgttttatcatctgtagcttcatcctatccggaggcacagcacatgagccctggacaggtcccaaagttccaagcagtcctttccgtgaaagcaggggtttgcatgtgctaccaacacatgatacggggaagacccacccagggagcggtttcagtggcgcaacaaagcaccacttttactgttgcctacttctgaccaagaagaaaaaggaccttagtatttagcataaaattccagcgctggatgaatgcagatctagtttggtctgtggctagtttaaatatgtttctaaccacagagaatttcatatatatatmcatatatatatacacatacatatatatatatatatatgtatgtataaaatttcacagggatatgcttttttttttaaagactgaatgtgttcaccatttagcctgtagatttatttccattttccaaattccagcacacagagatcccagcccctatgagtagggtgtttgtggactacctaatggaatatttttgaggcctggatgaactttgccatatgggtagaggttacagagggaggtgatattttcagctaaaaaaaaaaacgggtggagtttggactgatcaacttgagatttaaaaactgctattccttttgttctttctagcatctctccccaccctctgagagctcctcaggcttagatagtgaagtgatcaaatgccagtgtcattttgtacttaagttccaaagtaggaacattttatacttttttctgtattgtaataggtagttttgtatgaaatcttttctcctctcccgttgtaccgcattctttccagcattgtgctttttccctgggcttatttgaaaattttactgttttatacaagctcgtttagtacatttttctatgttttaccacaagttacaatttgaaaagaaaactattttttttaaatattccattgttaactgaatgttactgtttccactccagcaactacatgtcctcccttcaactgcctgccttttggggaaagaccaccttttgtgtgtttgttttttctctctctttctttccctttctctttctatctctctttatttttctttctttttctttgtttttgagttttctataggaaataaatagctttctatatatgagttgctggggaccttcacattctcttttagaaagctgtggcatgcagtctcattgcaggactcctggaatattgtctggttcttggtatttactgtatgtaagcaacaacttgaaaggtggcaatatggtgtcgatttggactatgaatcaaaagacctttttcaggttctttcactattgtctgggggactcagaacaagattgttctctgtatttattgtttgtccatttaggtaacatctgtcttaccttcctcacagactttgtacagaccaaagcaacaaatatttattgccatgtatagcagaaaatgaaacatgcaacaaaagcactttgaaaaatatataaggaattgttgagcctgtctgaatttgggccccctttctgactaatgcagttttgcacaaggtagaagttagtgaccctgagaccatcttaccaccctggacctggtccaaatacagacttacacagtggaccattctttcctgagc

SEQ ID NO: 5358 - DNA, 2633 bp, Homo sapiens
tgctgtccggtggccgcgctgtggccgccggtggccgttaggctacctgaggccgttccttctggtctctctctcctgggccgcggagagaccgtctccctgccgttacagcaggccccatcccagcgcccagccgtacttggggaaaggccggttgcgattccggggctttcccgccagagctgggtsttctctggggagagctgttttcaccgggaagctcggctttctgtggtacyggcttcatctcccgccttccttgagacccgagtgatatttcttgactacttctgcgtctcacgtaaacatttctccaactctcctactctgtggtatctccctgagatgtgatatcgctagtgccaccatcagaaagaaacgtctggaccctcctgctcaggttatgaaaatccccttaactgccacaatttgcttacctggcwcatcgcctcctggactttgtatctttgctaaagtcagtgatgtgaaaagacttgaaatggatgatattgctgataggatgaggatggatgctggagaagtgactttagtgaaccacaactccgtattcaaaacccacctcctgccacaaacaggttttccagaggaccagctttcgctttctgaccagcagattttatcttccaggcaaggacatttggaccgatcttttacatgttccacaagaagtgcagcttataatccaagctattactcagataatccttcctcagacagttttcttggctcaggcgatttaagaacctttggccagagtgcaaatggccaatggagaaattctaccccatcgtcaagctcatctttacaaaaatcaagaaacagccgaagtctttacctcgaaacccgaaagacctcaagtggattatcaaacagttttgcgggaaagtcaaaccatcactgccatgtatctgcatatgaaaaatcttttcctattaaacctgttccaagtccatcttggagtggttcatgtcgtcgaagtctyttgagccccaagaaaactcagaggcgacatgttagtacagcagaagagacagttcaagaagaagaaagagagatttacagacagctgctacagatggtcacagggaaacagtttactatagccaaacccaccacacattttcctttacacctgtctcgatgtcttagttccagtaaaaatactttgaaagactcactgtttaaaaatggaaactcttgtgcatctcagatcattggctctgatacttcatcatctggatctgccagcattttaactaaccaggaacagctgtcccacagtgtatattccctatcttcttataccccagatgttrcatttggatccaaagattctggtactcttcatcatccccatcatcaccaytctgttccacatcagccagataacttagcagcttcaaatacacaatctgaaggatcagactctgtgattttactgaaagtgaaagattcccagactccaactcccagttctactttcttccaggcagagctgtggatcaaagaattaactagtgtttatgattctcgagcacgagaaagattgcgccagattgaagaacagaaggcattggccttacagcttcaaaaccagagattgcaggagcgggaacattcagtacatgattcagtagaactacatcttcgtgtacctcttgaaaaggagattcctgttactgttgtccaagaaacacaaaaaaaaggtcataaattaactgatagtgaagatgaatttcctgaaattacagaggaaatggagaaagaaataaagaatgtatttcgtaatgggaatcaggatgaagttctcagtgaagcatttcgcctgaccattacacgcaaagatattcaaactctaaaccatctgaattggctcaatgatgagatcatcaatttctacatgaatatgctgatggagcgaagtaaagaraagggcttgccaagtgtgcatgcatttaatacctttttcttcactaaattaaaaacggctggttatcaggcagtgaaacgttggacaaagaaagtagatgtattttctgttgacattcttttggtgcccattcacctgggagtacactggtgtctagctgttgtggactttagaaagaagaatattacctattaygactccatgggtgggataaacaatgaagcctgcagaatactcttgcaatacctaaagcaagaaagcattgacaagaaaaggaaagagtttgacaccaatggctggcagcttttcagcaagaaaagccaggagattcctcagcagatgaatggaagtgaytgtgggatgtttgcctgcaaatatgctgactgtattaccaaagacagaccaatcaacttcacacagcaacacatgccatacttccggaagcggatggtctgggagatcctccaccgaaaactcttgtgaagactgtctcacttagcagaccttgaccatgtgggggaccagctctttgttgtctacagccagagaccttggaaacagctgctcccagccctctgctgttgtaacacccttgatcctggaccaggccctggcgagatgcattcacaagcacatctgcctttccttttgtatctcagatactatttttgcaaagaaactt

SEQ ID NO: 5359 - DNA, 4667 bp, Homo sapiens
ataatacctaccttgcaggaccacgacaggattaagtgaggaaaaacccccatgagagtgttttgccattgtcaagtgagcctgagggaggctgaggggggatcaggctgtatcatgcccccgaggacaaactttccagtttaccctgctccctctctctgtccctaggctgccccaggccctgtgcagacacaccaggccctcagccgcagcccatggacctgcgggtgggccagcggcccccagtggagcccccaccagagcccacattgctggccctgcagcgtccccagcgcctgcaccaccacctcttcctagcaggcctgcagcagcagcgctcggtggagcccatgaggctctccatggacacgccgatgcccgagttgcaggtgggaccccaggaacaagagctgcggcagcttctccacaaggacaagagcaagcgaagtgctgtagccagcagcgtggtcaagcagaagctagcggaggtgattctgaaaaaacagcaggcggccctagaaagaacagtccatcccaacagccccggcattccctacagaaccctggagcccctggagacggaaggagccacccgctccatgctcagcagctttttgcctcctgttcccagcctgcccagtgaccccccagagcacttccctctgcgcaagacagtctctgagcccaacctgaagctgcgctataagcccaagaagtccctggagcggaggaagaatccactgctccgaaaggagagtgcgccccccagcctccggcggcggcccgcagagaccctcggagactcctccccaagtagtagcagcacgcccgcatcaggrtgcagctcccccaatgacagcgagcacggccccaatcccatcctgggctcggaggcgctcttgggccagcggctgcggctgcaggagacttctgtggccccgttcgccttgccgacagtgtccttgctgcccgcaatcactctggggctgcccgcccctgccagggctgacagtgaccgcaggacccatccgactctgggccctcgggggccaatcctggggagcccccacactcccctcttcctgccccatggcttggagcccgaggctgggggcaccttgccctctcgcctgcagcccattctcctcctggacccctcaggctctcatgccccgctgctgactgtgcccgggcttgggcccttgcccttccactttgcccagtccttaatgaccaccgagcggctctctgggtcaggcctccactggccactgagccggactcgctcagagcccctgccccccagtgccaccgctcccccaccgccgggccccatgcagccccgcctggagcagctcaaaactcacgtccaggtgatcaagaggtcagccaagccgagtgagaagccccggctgcggcagataccctcggctgaagacctggagacagatggcgggggaccgggccaggtggtggacgatggcctggagcacagggagctgggccatgggcagcctgaggccagaggccccgctcctctccagcagcaccctcaggtgttgctctgggaacagcagcgactggctgggcggctcccccggggcagcaccggggacactgtgctgcttcctctggcccagggtgggcaccggcctctgtcccgggctcagtcttccccagccgcacctgcctcactgtcagccccagagcctgccagccaggcccgagtcctctccagctcagagacccctgccaggaccctgcccttcaccacagggctgatctatgactcggtcatgctgaagcaccagtgctcctgcggtgacaacagcaggcacccggagcacgccggccgcatccagagcatctggtcccggctgcaggagcgggggctccggagccagtgtgagtgtctccgaggccggaaggcctccctggaagagctgcagtcggtccactctgagcggcacgtgctcctctacggcaccaacccgctcagccgcctcaaactggacaacgggaagctggcagggctcctggcacagcggatgtttgtgatgctgccctgtggtggggttggggtggacactgacaccatctggaatgagcttcattcctccaatgcagcccgctgggccgctggcagtgtcactgacctcgccttcaaagtggcttctcgtgagctaaagaatggtttcgctgtggtgcggcccccaggacaccatgcagatcattcaacagccatgggcttctgcttcttcaactcagtggccatcgcctgccggcagctgcaacagcagagcaaggccagcaagatcctcattgtagactgggacgtgcaccatggcaacggcacccagcaaaccttctaccaagaccccagtgtgctctacatctccctgcatcgccatgacgacggcaacttcttcccggggagtggggctgtggatgaggtaggggctggcagcggtgagggcttcaatgtcaatgtggcctgggctggaggtctggacccccccatgggggatcctgagtacctggctgctttcaggatagtcgtgatgcccatcgcccgagagttctctccagacctagtcctggtgtctgctggatttgatgctgctgagggtcacccggccccactgggtggctaccatgtttctgccaaatgttttggatacatgacgcagcaactgatgaacctggcaggaggcgcagtggtgctggccttggagggtggccatgacctcacagccatctgtgacgcctctgaggcctgtgtggctgctcttctgggtaacagggtggatcccctttcagaagaaggctggaaacagaaacccaacctcaatgccatccgctctctggaggccgtgatccgggtgcacagtaaatactggggctgcatgcagcgcctggcctcctgtccagactcctgggtgcctagagtgccaggggctgacaaagaagaagtggaggcagtgaccgcactggcgtccctctctgtgggcatcctggctgaagataggccctcggagcagctggtggaggaggaagaacctatgaatctctaaggctctggaaccatctgcccgcccaccatgcccttgggacctggttctcttctaacccctggcaatagcccccattcctgggtctttagagatcctgtgggcaagtagttggaaccagagaacagcctgcctgctttgacagttatcccagggagcgtgagaaaatccctgggtctagaatgggaactggagaggaccctgagaggagacgggctgggcggcgacccccacagggctctcgagaacagattctcccctccagtatgggccctggctgtggcccccattcctcaggactgcacagaggaggactggctccggctccgtcgggctcacccttaaccactattcctggctctgcaaaccccagactttgcacacagccycaggctccacacagaaatgtgaacttggcctcagacaggctggcccttcctaggctctaggggctagsggggagtggggagccaagaggtcccatattcctgagtgcaggggtagtccctctcacctgcttcctcagacgactctggaagcttccctctaccacygggcactgagacgaagctccctgacagccgagactggcagccctccatctggtccgtaccctcgccagaggcccccctacatcaacctcctggcgatgccctggtggagcagatgggtgctctgggagtcctgtgcttcctgatccaatggtgccaaacccttcatctccccmagaagcgcagcatacccctgggacccctcggccactgcccactcggggagccttctctgtttctggggcctcccccaccatagctctgattcccaccccacataggartagcctgactgagggggaaggggtgggagagaagatacagacatggaggaggggaggctgctctggcaaagtcttcaaggcttttgggggtccaggcctggggtcaagaaggaaaatgtgtgtgagcatgtgtgtgagtgaggcgtgtgtgtgagcgtgtgtgtgagtgaggcgtgtgtgtgtgtctttcctaggacccaccataccctgtgtatgtatgcatgtttttgtaaaaaggaagaaaatggaaaaaaatctgaacaataaatgttttatttgctttaaaagtgcctctgaaagggccccccagaagtgagcagtgcgccgtcaagcgggtgtgcagggcacacagctgcacggcacagtgtgggtctgagtcactgccggaggagggaccagggtggtctgggccgcagcccctttaacaatctgcccttcctgccctgcaggaagaacccattctgaacacaccctggctgtccctggctgccccactttggggtgacaaagaggaggcagccctgggctgagtccacagagaccagccctgatatggcaggagtgggggtggggtgggggagtgggaatacaggagctcagccccagctcaccacggcatccccgaagagttgtgactcagacacacctgggtttaagtcccagctgggagctcaggtaagtcaaatcgtyttctggggcctctgtttatcagtagaaggctccagaagtatacactgttgatggctccttcccgctctgat

SEQ ID NO: 5360 - DNA, 5267 bp, Homo sapiens
gcgccccagccccccgccccgccatgagccccccgctctgagggccccggcccctggatgcacagccccggcgctggctgccccaggccctgtgcagacacaccaggccctcagccgcagcccatggacctgcgggtgggccagcggcccccagtggagcccccaccagagcccacattgctggccctgcagcgtccccagcgcctgcaccaccacctcttcctagcaggcctgcagcagcagcgctcggtggagcccatgaggctctccatggacacgccgatgcccgagttgcaggtgggaccccaggaacaagagctgcggcagcttctccacaaggacaagagcaagcgaagtgctgtagccagcagcgtggtcaagcagaagctagcggaggtgattctgaaaaaacagcaggcggccctagaaagaacagtccatcccaacagccccggcattccctacagaaccctggagcccctggagacggaaggagccacccgctccatgctcagcagctttttgcctcctgttcccagcctgcccagtgaccccccagagcacttccctctgcgcaagacagtctctgagcccaacctgaagctgcgctataagcccaagaagtccctggagcggaggaagaatccactgctccgaaaggagagtgcgccccccagcctccggcggcggcccgcagagaccctcggaggctgacagtgaccgcaggacccatccgactctgggccctcgggggccaatcctggggagcccccacactcccctcttcctgccccatggcttggagcccgaggctgggggcaccttgccctctcgcctgcagcccattctcctcctggacccctcaggctctcatgccccgctgctgactgtgcccgggcttgggcccttgcccttccactttgcccagtccttaatgaccaccgagcggctctctgggtcaggcctccactggccactgagccggactcgctcagagcccctgccccccagtgccaccgctcccccaccgccgggccccatgcagccccgcctggagcagctcaaaactcacgtccaggtgatcaagaggtcagccaagccgagtgagaagccccggctgcggcagataccctcggctgaagacctggagacagatggcgggggaccgggccaggtggtggacgatggcctggagcacagggagctgggccatgggcagcctgaggccagaggccccgctcctctccagggctgatctatgactcggtcatgctgaagcaccagtgctcctgcggtgacaacagcaggcacccggagcacgccggccgcatccagagcatctggtcccggctgcaggagcgggggctccggagccagtgtgagtgtctccgaggccggaaggcctccctggaagagctgcagtcggtccactctgagcggcacgtgctcctctacggcaccaacccgctcagccgcctcaaactggacaacgggaagctggcagggctcctggcacagcggatgtttgtgatgctgccctgtggtggggttggggtggacactgacaccatctggaatgagcttcattcctccaatgcagcccgctgggccgctggcagtgtcactgacctcgccttcaaagtggcttctcgtgagctaaagaatggtttcgctgtggtgcggcccccaggacaccatgcagatcattcaacagccatgggcttctgcttcttcaactcagtggccatcgcctgccggcagctgcaacagcagagcaaggccagcaagatcctcattgtagactgggacgtgcaccatggcaacggcacccagcaaaccttctaccaagaccccagtgtgctctacatctccctgcatcgccatgacgacggcaacttcttcccggggagtggggctgtggatgaggtaggggctggcagcggtgagggcttcaatgtcaatgtggcctgggctggaggtctggacccccccatgggggatcctgagtacctggctgctttcaggatagtcgtgatgcccatcgcccgagagttctctccagacctagtcctggtgtctgctggatttgatgctgctgagggtcacccggccccactgggtggctaccatgtttctgccaaatgttttggatacatgacgcagcaactgatgaacctggcaggaggcgcagtggtgctggccttggagggtggccatgacctcacagccatctgtgacgcctctgaggcctgtgtggctgctcttctgggtaacagggtggatcccctttcagaagaaggctggaaacagaaacccaacctcaatgccatccgctctctggaggccgtgatccgggtgcacagtaagtgtggagatgggacactcgctgagctcagactgaaggatcttggtggtaccctgccccaccgtggccagatcctagggcttccggtgccagccaggtgacctgctgttggtctggartaasattcctgtgagtgacccaggcagcaatggtgagcaccccccagtgargggttatcctctgagcccccccgatggagccagcagggcctaccagacagtggcccctcaaggtagggactggcctccatctctagckacagccctagaccagggccaggtcaagagcaacactcaggccttgtttgccaaaaggcctggttcccatccctcccctcagtcctggccacaggcgtctcaggagctctgctggcttgggggctrcgtcttgggataacccccacatttgtaaagtactttaaattttcaacttcaactcaacatctattgagcatcttatgtcaagacccataatctatactagggataaaaatgagtaaaatagattcccatatcaagggctgggtaggggagccgtgatgtctttacataatggtaaagacatggctgattcctcttacggtgggtgccctcacactgagccagattccaggacatggttcctcacagcagcaggcaggaggagcattctcctggcctgggcacccatgcagagcggccgtggtgatggtcagttctcccrtgttgtgttcgtcccacctcccaggccctcctttcctgagtgctgggctgagcactggtgggggctgtgtttaagtgggaggcccgagcttggggctctgggaggtcactgtgacacagaccctgtctgcaggcaagcaggctctcctgatgctctcaggagccccgcacctgtggggaatgagtcaaaggtggccttgcagccacaggggatgagagaaaggctgggcacctgctaggactccctcacagccatgttgaacccactctgtgtaccctgtcaggctgtgcgggagtgggagcgaagtgaggagaggggcaggtgggagagccgacccyaagtggaggacaggcccgctcctccggggccctgggcctgagacaccaacctcaatatccggtctaggacgcagtgtggaggggcttgctttctccaaccctttctgacctggcatcttaccccaggtaaatactggggctgcatgcagcgcctggcctcctgtccagactcctgggtgcctagagtgccaggggctgacaaagaagaagtggaggcagtgaccgcactggcgtccctctctgtgggcatcctggctgaagataggccctcggagcagctggtggaggaggaagaacctatgaatctctaaggctctggaaccatctgcccgcccaccatgcccttgggacctggttctcttctaacccctggcaatagcccccattcctgggtctttagagatcctgtgggcaagtagttggaaccagagaacagcctgcctgctttgacagttatcccagggagcgtgagaaaatccctgggtctagaatgggaactggagaggaccctgagaggagacgggctgggcggcgacccccacagggctctcgagaacagattctcccctccagtatgggccctggctgtggcccccattcctcaggactgcacagaggaggactggctccggctccgtcgggctcacccttaaccactattcctggctctgcaaaccccagactttgcacacagccycaggctccacacagaaatgtgaacttggcctcagacaggctggcccttcctaggctctaggggctagsggggagtggggagccaagaggtcccatattcctgagtgcaggggtagtccctctcacctgcttcctcagacgactctggaagcttccctctaccacygggcactgagacgaagctccctgacagccgagactggcagccctccatctggtccgtaccctcgccagaggcccccctacatcaacctcctggcgatgccctggtggagcagatgggtgctctgggagtcctgtgcttcctgatccaatggtgccaaacccttcatctccccmagaagcgcagcatacccctgggacccctcggccactgcccactcggggagccttctctgtttctggggcctcccccaccatagctctgattcccaccccacataggartagcctgactgagggggaaggggtgggagagaagatacagacatggaggaggggaggctgctctggcaaagtcttcaaggcttttgggggtccaggcctggggtcaagaaggaaaatgtgtgtgagcatgtgtgtgagtgaggcgtgtgtgtgagcgtgtgtgtgagtgaggcgtgtgtgtgtgtctttcctaggacccaccataccctgtgtatgtatgcatgtttttgtaaaaaggaagaaaatggaaaaaaatctgaacaataaatgttttatttgctttaaaagtgcctctgaaagggccccccagaagtgagcagtgcgccgtcaagcgggtgtgcagggcacacagctgcacggcacagtgtgggtctgagtcactgccggaggagggaccagggtggtctgggccgcagcccctttaacaatctgcccttcctgccctgcaggaagaacccattctgaacacaccctggctgtccctggctgccccactttggggtgacaaagaggaggcagccctgggctgagtccacagagaccagccctgatatggcaggagtgggggtggggtgggggagtgggaatacaggagctcagccccagctcaccacggcatccccgaagagttgtgactcagacacacctgggtttaagtcccagctgggagctcaggtaagtcaaatcgtyttctggggcctctgtttatcagtagaagg

SEQ ID NO: 5361 - DNA, 4032 bp, Homo sapiens
gcgccccagccccccgccccgccatgagccccccgctctgagggccccggcccctggatgcacagccccggcgctggctgccccaggccctgtgcagacacaccaggccctcagccgcagcccatggacctgcgggtgggccagcggcccccagtggagcccccaccagagcccacattgctggccctgcagcgtccccagcgcctgcaccaccacctcttcctagcaggcctgcagcagcagcgctcggtggagcccatgaggctctccatggacacgccgatgcccgagttgcaggtgggaccccaggaacaagagctgcggcagcttctccacaaggacaagagcaagcgaagtgctgtagccagcagcgtggtcaagcagaagctagcggaggtgattctgaaaaaacagcaggcggccctagaaagaacagtccatcccaacagccccggcattccctacagaaccctggagcccctggagacggaaggagccacccgctccatgctcagcagctttttgcctcctgttcccagcctgcccagtgaccccccagagcacttccctctgcgcaagacagtctctgagcccaacctgaagctgcgctataagcccaagaagtccctggagcggaggaagaatccactgctccgaaaggagagtgcgccccccagcctccggcggcggcccgcagagaccctcggagactcctccccaagtagtagcagcacgcccgcatcaggrtgcagctcccccaatgacagcgagcacggccccaatcccatcctgggctcggaggcgctcttgggccagcggctgcggctgcaggagacttctgtggccccgttcgccttgccgacagtgtccttgctgcccgcaatcactctggggctgcccgcccctgccagggctgacagtgaccgcaggacccatccgactctgggccctcgggggccaatcctggggagcccccacactcccctcttcctgccccatggcttggagcccgaggctgggggcaccttgccctctcgcctgcagcccattctcctcctggacccctcaggctctcatgccccgctgctgactgtgcccgggcttgggcccttgcccttccactttgcccagtccttaatgaccaccgagcggctctctgggtcaggcctccactggccactgagccggactcgctcagagcccctgccccccagtgccaccgctcccccaccgccgggccccatgcagccccgcctggagcagctcaaaactcacgtccaggtgatcaagaggtcagccaagccgagtgagaagccccggctgcggcagataccctcggctgaagacctggagacagatggcgggggaccgggccaggtggtggacgatggcctggagcacagggagctgggccatgggcagcctgaggccagaggccccgctcctctccagcagcaccctcaggtgttgctctgggaacagcagcgactggctgggcggctcccccggggcagcaccggggacactgtgctgcttcctctggcccagggtgggcaccggcctctgtcccgggctcagtcttccccagccgcacctgcctcactgtcagccccagagcctgccagccaggcccgagtcctctccagctcagagacccctgccaggaccctgcccttcaccacagggctgatctatgactcggtcatgctgaagcaccagtgctcctgcggtgacaacagcaggcacccggagcacgccggccgcatccagagcatctggtcccggctgcaggagcgggggctccggagccagtgtgagtgtctccgaggccggaaggcctccctggaagagctgcagtcggtccactctgagcggcacgtgctcctctacggcaccaacccgctcagccgcctcaaactggacaacgggaagctggcagggctcctggcacagcggatgtttgtgatgctgccctgtggtggggttggggtggacactgacaccatctggaatgagcttcattcctccaatgcagcccgctgggccgctggcagtgtcactgacctcgccttcaaagtggcttctcgtgagctaaagaatggtttcgctgtggtgcggcccccaggacaccatgcagatcattcaacagccatgggcttctgcttcttcaactcagtggccatcgcctgccggcagctgcaacagcagagcaaggccagcaagatcctcattgtagactgggacgtgcaccatggcaacggcacccagcaaaccttctaccaagaccccagtgtgctctacatctccctgcatcgccatgacgacggcaacttcttcccggggagtggggctgtggatgaggtaggggctggcagcggtgagggcttcaatgtcaatgtggcctgggctggaggtctggacccccccatgggggatcctgagtacctggctgctttcaggatagtcgtgatgcccatcgcccgagagttctctccagacctagtcctggtgtctgctggatttgatgctgctgagggtcacccggccccactgggtggctaccatgtttctgccaaatgttttggatacatgacgcagcaactgatgaacctggcaggaggcgcagtggtgctggccttggagggtggccatgacctcacagccatctgtgacgcctctgaggcctgtgtggctgctcttctgggtaacagggtggatcccctttcagaagaaggctggaaacagaaacccaacctcaatgccatccgctctctggaggccgtgatccgggtgcacagtaaatactggggctgcatgcagcgcctggcctcctgtccagactcctgggtgcctagagtgccaggggctgacaaagaagaagtggaggcagtgaccgcactggcgtccctctctgtgggcatcctggctgaagataggccctcggagcagctggtggaggaggaagaacctatgaatctctaaggctctggaaccatctgcccgcccaccatgcccttgggacctggttctcttctaacccctggcaatagcccccattcctgggtctttagagatcctgtgggcaagtagttggaaccagagaacagcctgcctgctttgacagttatcccagggagcgtgagaaaatccctgggtctagaatgggaactggagaggaccctgagaggagacgggctgggcggcgacccccacagggctctcgagaacagattctcccctccagtatgggccctggctgtggcccccattcctcaggactgcacagaggaggactggctccggctccgtcgggctcacccttaaccactattcctggctctgcaaaccccagactttgcacacagccycaggctccacacagaaatgtgaacttggcctcagacaggctggcccttcctaggctctaggggctagsggggagtggggagccaagaggtcccatattcctgagtgcaggggtagtccctctcacctgcttcctcagacgactctggaagcttccctctaccacygggcactgagacgaagctccctgacagccgagactggcagccctccatctggtccgtaccctcgccagaggcccccctacatcaacctcctggcgatgccctggtggagcagatgggtgctctgggagtcctgtgcttcctgatccaatggtgccaaacccttcatctccccmagaagcgcagcatacccctgggacccctcggccactgcccactcggggagccttctctgtttctggggcctcccccaccatagctctgattcccaccccacataggartagcctgactgagggggaaggggtgggagagaagatacagacatggaggaggggaggctgctctggcaaagtcttcaaggcttttgggggtccaggcctggggtcaagaaggaaaatgtgtgtgagcatgtgtgtgagtgaggcgtgtgtgtgagcgtgtgtgtgatgtgtgtctttcctaggacccaccataccctgtgtatgtatgcatgtttttg

SEQ ID NO: 5362 - DNA, 4548 bp, Homo sapiens
ataatacctaccttgcaggaccacgacaggattaagtgaggaaaaacccccatgagagtgttttgccattgtcaagtgagcctgagggaggctgaggggggatcaggctgtatcatgcccccgaggacaaactttccagtttaccctgctccctctctctgtccctaggctgccccaggccctgtgcagacacaccaggccctcagccgcagcccatggacctgcgggtgggccagcggcccccagtggagcccccaccagagcccacattgctggccctgcagcgtccccagcgcctgcaccaccacctcttcctagcaggcctgcagcagcagcgctcggtggagcccatgaggctctccatggacacgccgatgcccgagttgcaggtgggaccccaggaacaagagctgcggcagcttctccacaaggacaagagcaagcgaagtgctgtagccagcagcgtggtcaagcagaagctagcggaggtgattctgaaaaaacagcaggcggccctagaaagaacagtccatcccaacagccccggcattccctacagaaccctggagcccctggagacggaaggagccacccgctccatgctcagcagctttttgcctcctgttcccagcctgcccagtgaccccccagagcacttccctctgcgcaagacagtctctgagcccaacctgaagctgcgctataagcccaagaagtccctggagcggaggaagaatccactgctccgaaaggagagtgcgccccccagcctccggcggcggcccgcagagaccctcggagactcctccccaagtagtagcagcacgcccgcatcaggrtgcagctcccccaatgacagcgagcacggccccaatcccatcctgggctgacagtgaccgcaggacccatccgactctgggccctcgggggccaatcctggggagcccccacactcccctcttcctgccccatggcttggagcccgaggctgggggcaccttgccctctcgcctgcagcccattctcctcctggacccctcaggctctcatgccccgctgctgactgtgcccgggcttgggcccttgcccttccactttgcccagtccttaatgaccaccgagcggctctctgggtcaggcctccactggccactgagccggactcgctcagagcccctgccccccagtgccaccgctcccccaccgccgggccccatgcagccccgcctggagcagctcaaaactcacgtccaggtgatcaagaggtcagccaagccgagtgagaagccccggctgcggcagataccctcggctgaagacctggagacagatggcgggggaccgggccaggtggtggacgatggcctggagcacagggagctgggccatgggcagcctgaggccagaggccccgctcctctccagcagcaccctcaggtgttgctctgggaacagcagcgactggctgggcggctcccccggggcagcaccggggacactgtgctgcttcctctggcccagggtgggcaccggcctctgtcccgggctcagtcttccccagccgcacctgcctcactgtcagccccagagcctgccagccaggcccgagtcctctccagctcagagacccctgccaggaccctgcccttcaccacagggctgatctatgactcggtcatgctgaagcaccagtgctcctgcggtgacaacagcaggcacccggagcacgccggccgcatccagagcatctggtcccggctgcaggagcgggggctccggagccagtgtgagtgtctccgaggccggaaggcctccctggaagagctgcagtcggtccactctgagcggcacgtgctcctctacggcaccaacccgctcagccgcctcaaactggacaacgggaagctggcagggctcctggcacagcggatgtttgtgatgctgccctgtggtggggttggggtggacactgacaccatctggaatgagcttcattcctccaatgcagcccgctgggccgctggcagtgtcactgacctcgccttcaaagtggcttctcgtgagctaaagaatggtttcgctgtggtgcggcccccaggacaccatgcagatcattcaacagccatgggcttctgcttcttcaactcagtggccatcgcctgccggcagctgcaacagcagagcaaggccagcaagatcctcattgtagactgggacgtgcaccatggcaacggcacccagcaaaccttctaccaagaccccagtgtgctctacatctccctgcatcgccatgacgacggcaacttcttcccggggagtggggctgtggatgaggtaggggctggcagcggtgagggcttcaatgtcaatgtggcctgggctggaggtctggacccccccatgggggatcctgagtacctggctgctttcaggatagtcgtgatgcccatcgcccgagagttctctccagacctagtcctggtgtctgctggatttgatgctgctgagggtcacccggccccactgggtggctaccatgtttctgccaaatgttttggatacatgacgcagcaactgatgaacctggcaggaggcgcagtggtgctggccttggagggtggccatgacctcacagccatctgtgacgcctctgaggcctgtgtggctgctcttctgggtaacagggtggatcccctttcagaagaaggctggaaacagaaacccaacctcaatgccatccgctctctggaggccgtgatccgggtgcacagtaaatactggggctgcatgcagcgcctggcctcctgtccagactcctgggtgcctagagtgccaggggctgacaaagaagaagtggaggcagtgaccgcactggcgtccctctctgtgggcatcctggctgaagataggccctcggagcagctggtggaggaggaagaacctatgaatctctaaggctctggaaccatctgcccgcccaccatgcccttgggacctggttctcttctaacccctggcaatagcccccattcctgggtctttagagatcctgtgggcaagtagttggaaccagagaacagcctgcctgctttgacagttatcccagggagcgtgagaaaatccctgggtctagaatgggaactggagaggaccctgagaggagacgggctgggcggcgacccccacagggctctcgagaacagattctcccctccagtatgggccctggctgtggcccccattcctcaggactgcacagaggaggactggctccggctccgtcgggctcacccttaaccactattcctggctctgcaaaccccagactttgcacacagccycaggctccacacagaaatgtgaacttggcctcagacaggctggcccttcctaggctctaggggctagsggggagtggggagccaagaggtcccatattcctgagtgcaggggtagtccctctcacctgcttcctcagacgactctggaagcttccctctaccacygggcactgagacgaagctccctgacagccgagactggcagccctccatctggtccgtaccctcgccagaggcccccctacatcaacctcctggcgatgccctggtggagcagatgggtgctctgggagtcctgtgcttcctgatccaatggtgccaaacccttcatctccccmagaagcgcagcatacccctgggacccctcggccactgcccactcggggagccttctctgtttctggggcctcccccaccatagctctgattcccaccccacataggartagcctgactgagggggaaggggtgggagagaagatacagacatggaggaggggaggctgctctggcaaagtcttcaaggcttttgggggtccaggcctggggtcaagaaggaaaatgtgtgtgagcatgtgtgtgagtgaggcgtgtgtgtgagcgtgtgtgtgagtgaggcgtgtgtgtgtgtctttcctaggacccaccataccctgtgtatgtatgcatgtttttgtaaaaaggaagaaaatggaaaaaaatctgaacaataaatgttttatttgctttaaaagtgcctctgaaagggccccccagaagtgagcagtgcgccgtcaagcgggtgtgcagggcacacagctgcacggcacagtgtgggtctgagtcactgccggaggagggaccagggtggtctgggccgcagcccctttaacaatctgcccttcctgccctgcaggaagaacccattctgaacacaccctggctgtccctggctgccccactttggggtgacaaagaggaggcagccctgggctgagtccacagagaccagccctgatatggcaggagtgggggtggggtgggggagtgggaatacaggagctcagccccagctcaccacggcatccccgaagagttgtgactcagacacacctgggtttaagtcccagctgggagctcaggtaagtcaaatcgtyttctggggcctctgtttatcagtagaaggctccagaagtatacactgttgatggctccttcccgctctgat

SEQ ID NO: 5363 - DNA, 2505 bp, Homo sapiens
gggcaggatgaaatgcaggcctgtgtgggtgtgaggggtgtgtacccgcccggctccatgtgggtgcctgctgtggcggtgctggcgtgttctctgcagccaaggccatggggcgtgaggactccctgggtccccgctctgacccttgctcctgcagggctgatctatgactcggtcatgctgaagcaccagtgctcctgcggtgacaacagcaggcacccggagcacgccggccgcatccagagcatctggtcccggctgcaggagcgggggctccggagccagtgtgagtgtctccgaggccggaaggcctccctggaagagctgcagtcggtccactctgagcggcacgtgctcctctacggcaccaacccgctcagccgcctcaaactggacaacgggaagctggcagggctcctggcacagcggatgtttgtgatgctgccctgtggtggggttggggtggacactgacaccatctggaatgagcttcattcctccaatgcagcccgctgggccgctggcagtgtcactgacctcgccttcaaagtggcttctcgtgagctaaagaatggtttcgctgtggtgcggcccccaggacaccatgcagatcattcaacagccatgggcttctgcttcttcaactcagtggccatcgcctgccggcagctgcaacagcagagcaaggccagcaagatcctcattgtagactgggacgtgcaccatggcaacggcacccagcaaaccttctaccaagaccccagtgtgctctacatctccctgcatcgccatgacgacggcaacttcttcccggggagtggggctgtggatgaggtaggggctggcagcggtgagggcttcaatgtcaatgtggcctgggctggaggtctggacccccccatgggggatcctgagtacctggctgctttcaggatagtcgtgatgcccatcgcccgagagttctctccagacctagtcctggtgtctgctggatttgatgctgctgagggtcacccggccccactgggtggctaccatgtttctgccaaatgttttggatacatgacgcagcaactgatgaacctggcaggaggcgcagtggtgctggccttggagggtggccatgacctcacagccatctgtgacgcctctgaggcctgtgtggctgctcttctgggtaacagggtggatcccctttcagaagaaggctggaaacagaaacccaacctcaatgccatccgctctctggaggccgtgatccgggtgcacagtaaatactggggctgcatgcagcgcctggcctcctgtccagactcctgggtgcctagagtgccaggggctgacaaagaagaagtggaggcagtgaccgcactggcgtccctctctgtgggcatcctggctgaagataggccctcggagcagctggtggaggaggaagaacctatgaatctctaaggctctggaaccatctgcccgcccaccatgcccttgggacctggttctcttctaacccctggcaatagcccccattcctgggtctttagagatcctgtgggcaagtagttggaaccagagaacagcctgcctgctttgacagttatcccagggagcgtgagaaaatccctgggtctagaatgggaactggagaggaccctgagaggagacgggctgggcggcgacccccacagggctctcgagaacagattctcccctccagtatgggccctggctgtggcccccattcctcaggactgcacagaggaggactggctccggctccgtcgggctcacccttaaccactattcctggctctgcaaaccccagactttgcacacagccycaggctccacacagaaatgtgaacttggcctcagacaggctggcccttcctaggctctaggggctagsggggagtggggagccaagaggtcccatattcctgagtgcaggggtagtccctctcacctgcttcctcagacgactctggaagcttccctctaccacygggcactgagacgaagctccctgacagccgagactggcagccctccatctggtccgtaccctcgccagaggcccccctacatcaacctcctggcgatgccctggtggagcagatgggtgctctgggagtcctgtgcttcctgatccaatggtgccaaacccttcatctccccmagaagcgcagcatacccctgggacccctcggccactgcccactcggggagccttctctgtttctggggcctcccccaccatagctctgattcccaccccacataggartagcctgactgagggggaaggggtgggagagaagatacagacatggaggaggggaggctgctctggcaaagtcttcaaggcttttgggggtccaggcctggggtcaagaaggaaaatgtgtgtgagcatgtgtgtgagtgaggcgtgtgtgtgagcgtgtgtgtgatgtgtgtctttcctaggacccaccataccctgtgtatgtatgcatgtttttg

SEQ ID NO: 5364 - DNA, 4556 bp, Homo sapiens
ataatacctaccttgcaggaccacgacaggattaagtgaggaaaaacccccatgagagtgttttgccattgtcaagtgagcctgagggaggctgaggggggatcaggctgtatcatgcccccgaggacaaactttccagtttaccctgctccctctctctgtccctaggctgccccaggccctgtgcagacacaccaggccctcagccgcagcccatggacctgcgggtgggccagcggcccccagtggagcccccaccagagcccacattgctggccctgcagcgtccccagcgcctgcaccaccacctcttcctagcaggcctgcagcagcagcgctcggtggagcccatgaggctctccatggacacgccgatgcccgagttgcaggtgggaccccaggaacaagagctgcggcagcttctccacaaggacaagagcaagcgaagtgctgtagccagcagcgtggtcaagcagaagctagcggaggtgattctgaaaaaacagcaggcggccctagaaagaacagtccatcccaacagccccggcattccctacagaaccctggagcccctggagacggaaggagccacccgctccatgctcagcagctttttgcctcctgttcccagcctgcccagtgaccccccagagcacttccctctgcgcaagacagtctctgagcccaacctgaagctgcgctataagcccaagaagtccctggagcggaggaagaatccactgctccgaaaggagagtgcgccccccagcctccggcggcggcccgcagagaccctcggagactcctccccaagtagtagcagcacgcccgcatcaggrtgcagctcccccaatgacagcgagcacggccccaatcccatcctgggctcggaggctgacagtgaccgcaggacccatccgactctgggccctcgggggccaatcctggggagcccccacactcccctcttcctgccccatggcttggagcccgaggctgggggcaccttgccctctcgcctgcagcccattctcctcctggacccctcaggctctcatgccccgctgctgactgtgcccgggcttgggcccttgcccttccactttgcccagtccttaatgaccaccgagcggctctctgggtcaggcctccactggccactgagccggactcgctcagagcccctgccccccagtgccaccgctcccccaccgccgggccccatgcagccccgcctggagcagctcaaaactcacgtccaggtgatcaagaggtcagccaagccgagtgagaagccccggctgcggcagataccctcggctgaagacctggagacagatggcgggggaccgggccaggtggtggacgatggcctggagcacagggagctgggccatgggcagcctgaggccagaggccccgctcctctccagcagcaccctcaggtgttgctctgggaacagcagcgactggctgggcggctcccccggggcagcaccggggacactgtgctgcttcctctggcccagggtgggcaccggcctctgtcccgggctcagtcttccccagccgcacctgcctcactgtcagccccagagcctgccagccaggcccgagtcctctccagctcagagacccctgccaggaccctgcccttcaccacagggctgatctatgactcggtcatgctgaagcaccagtgctcctgcggtgacaacagcaggcacccggagcacgccggccgcatccagagcatctggtcccggctgcaggagcgggggctccggagccagtgtgagtgtctccgaggccggaaggcctccctggaagagctgcagtcggtccactctgagcggcacgtgctcctctacggcaccaacccgctcagccgcctcaaactggacaacgggaagctggcagggctcctggcacagcggatgtttgtgatgctgccctgtggtggggttggggtggacactgacaccatctggaatgagcttcattcctccaatgcagcccgctgggccgctggcagtgtcactgacctcgccttcaaagtggcttctcgtgagctaaagaatggtttcgctgtggtgcggcccccaggacaccatgcagatcattcaacagccatgggcttctgcttcttcaactcagtggccatcgcctgccggcagctgcaacagcagagcaaggccagcaagatcctcattgtagactgggacgtgcaccatggcaacggcacccagcaaaccttctaccaagaccccagtgtgctctacatctccctgcatcgccatgacgacggcaacttcttcccggggagtggggctgtggatgaggtaggggctggcagcggtgagggcttcaatgtcaatgtggcctgggctggaggtctggacccccccatgggggatcctgagtacctggctgctttcaggatagtcgtgatgcccatcgcccgagagttctctccagacctagtcctggtgtctgctggatttgatgctgctgagggtcacccggccccactgggtggctaccatgtttctgccaaatgttttggatacatgacgcagcaactgatgaacctggcaggaggcgcagtggtgctggccttggagggtggccatgacctcacagccatctgtgacgcctctgaggcctgtgtggctgctcttctgggtaacagggtggatcccctttcagaagaaggctggaaacagaaacccaacctcaatgccatccgctctctggaggccgtgatccgggtgcacagtaaatactggggctgcatgcagcgcctggcctcctgtccagactcctgggtgcctagagtgccaggggctgacaaagaagaagtggaggcagtgaccgcactggcgtccctctctgtgggcatcctggctgaagataggccctcggagcagctggtggaggaggaagaacctatgaatctctaaggctctggaaccatctgcccgcccaccatgcccttgggacctggttctcttctaacccctggcaatagcccccattcctgggtctttagagatcctgtgggcaagtagttggaaccagagaacagcctgcctgctttgacagttatcccagggagcgtgagaaaatccctgggtctagaatgggaactggagaggaccctgagaggagacgggctgggcggcgacccccacagggctctcgagaacagattctcccctccagtatgggccctggctgtggcccccattcctcaggactgcacagaggaggactggctccggctccgtcgggctcacccttaaccactattcctggctctgcaaaccccagactttgcacacagccycaggctccacacagaaatgtgaacttggcctcagacaggctggcccttcctaggctctaggggctagsggggagtggggagccaagaggtcccatattcctgagtgcaggggtagtccctctcacctgcttcctcagacgactctggaagcttccctctaccacygggcactgagacgaagctccctgacagccgagactggcagccctccatctggtccgtaccctcgccagaggcccccctacatcaacctcctggcgatgccctggtggagcagatgggtgctctgggagtcctgtgcttcctgatccaatggtgccaaacccttcatctccccmagaagcgcagcatacccctgggacccctcggccactgcccactcggggagccttctctgtttctggggcctcccccaccatagctctgattcccaccccacataggartagcctgactgagggggaaggggtgggagagaagatacagacatggaggaggggaggctgctctggcaaagtcttcaaggcttttgggggtccaggcctggggtcaagaaggaaaatgtgtgtgagcatgtgtgtgagtgaggcgtgtgtgtgagcgtgtgtgtgagtgaggcgtgtgtgtgtgtctttcctaggacccaccataccctgtgtatgtatgcatgtttttgtaaaaaggaagaaaatggaaaaaaatctgaacaataaatgttttatttgctttaaaagtgcctctgaaagggccccccagaagtgagcagtgcgccgtcaagcgggtgtgcagggcacacagctgcacggcacagtgtgggtctgagtcactgccggaggagggaccagggtggtctgggccgcagcccctttaacaatctgcccttcctgccctgcaggaagaacccattctgaacacaccctggctgtccctggctgccccactttggggtgacaaagaggaggcagccctgggctgagtccacagagaccagccctgatatggcaggagtgggggtggggtgggggagtgggaatacaggagctcagccccagctcaccacggcatccccgaagagttgtgactcagacacacctgggtttaagtcccagctgggagctcaggtaagtcaaatcgtyttctggggcctctgtttatcagtagaaggctccagaagtatacactgttgatggctccttcccgctctgat

SEQ ID NO: 5365 - DNA, 3043 bp, Homo sapiens
tgggggcgggccgggggcggagcgcggggcgccggctgctctggcggctcccgcggctccggctggcggcttcgggccctgcacctgtgactctcggccgcgctcgccctcggcccgcccggcgccgcagccccatggccccgtccaggctgcagctcggcctccgcgccgcctactccggcatcagctccgtggccggcttctccatcttcctcgtctggacggtggtctaccgacagccggggaccgcggccatgggagggctcgcaggggtgctggcactgtgggtcctggtgacgcacgtgatgtacatgcaagattattggaggacctggctcaaggggctgcgcggcttcttcttcgtgggcgtcctcttctcggccgtctccatcgctgccttctgcaccttcctcgtgctggccatcacccggcatcagagcctcacagaccccaccagctactacctctccagcgtctggagcttcatttccttcaagtgggccttcctgctcagcctctatgcccaccgctaccgggctgactttgctgacatcagcatcctcagcgatttctgacccagggggtgaggtctctgcaccctgggggggccttaggacctggactcagcctctgagatgttgggagaggctactcccaccccctggtgaccccagaactgtggcagaaaatacacagcaggacgagtgtggtctcccaggaagctgtcctgcccgtcccctttcgaggaaacctgagtgtggtagagaggggatcctgccatgttgctcctcatcagcctggccagagggcagctttagaccttttcaaatgaatctgttttcttttctttcttttttttttcttttttttttttttttgagatggagtcttactctgtcacccaggctggagtgcagtagtgcgatctcagctcactgcaacctccgcctcccaggttcaagcaattctcctgcyttggcctctcaagtagctgggattacaggcatctgccaccatgcccggcaaatttttgtgtttttagtagagacagggttttgccatgttggccaggctggtctcgaactcctgatctcaggtgattcacccgcctcagccttccaaagtgctgggattataggtgtgagccaccgygcccggcctggatctgttttcttagcacgcagtgaggaatctttgtacttaaggccagggcaacaaagtcaagaggtcaaggtgtagggccatgaggcctggacctatgctgcaggcaagggtttccatccccgctgccctaggcactctcttcccaaggccaggttgggcacctggggaggtcagttcagaaatatctagcagagacctcttaaacccccatcccagcaccccatcctgttgttcccagagctggtctcccatgagtgtgctagagccagatagccgtggccccccacccatctcactcacacacacaggcatccatacaccccagaagacttcccaaatgaggccagactcagggtcacggggaatgtgcttctgcccctgtaagggctttggggaagggggcaacatagtagaggctggaaagagcccccaaacctgtrcccatgcccctccagccctgcgtttccattctgccttctcagagtgcccttgctgcacccagaccaccggccaggagagaccttctctcccactccagcccctctcactgcccttcaactagagctttcacctttttacatttcccttctgaaggacacaaatctgcttttytgcccatacactggcccaagggctcacctaacttgggagggaaggggctgttggtacaaggatgattttctgttagactgccattttgcacggtctcccccttcccatctgatgtgtcctgcccytcagctctttgccttatctgtgtcactgtcactttagcaaaaatacagcggccatttgtatcagcctctggtggttgcttgtgaggtgggactcttgcgggaacaggtggactttgggaggagtgggcagggagggagtggtagtggcagttctcgagctatctgattaagccattccgctagttcagttgtgccctggagggcaggggacagrgtcagtatctctggggctgcaggccctcttgccttggccctcctggcatggggtaaccaccagctcagctctcctcctccagctttcctctctctagcacaccccagccagggcaaggatgcccacgggcatagctacagcaacccctgcgggatttggtgtccacacccgagaggccaggccagaygggaaagggattagcgcctcttccctcacactctgccaggctgccrggagcttgggccaggtctaaggtaatgaggtgctcctcttcctgctggaaaaaccggacagactcagaaccacaaaggcaggtgctgccagcctggcgccttcctctctgcttaggctgggtgagcttgtccaggcctgtgcctcaccccttctctcttctaggctcagtgtatgcttaatcaggcatggtgcatcagagcgggaaggagccatcaacagtgtatacttctggagccttctactgataaacagaggccccagaaracgatttgacttacctgagctcccagctgggacttaaacccaggtgtgtctgagtcacaactcttcggggatgccgtggtgagctggggctgagctcctgtattcccactcccccaccccacccccactcctgccatatcagggctggtctctgtggactcagcccagggctgcctcctctttgtcaccccaaagtggggcagccagggacagccagggtgtgttcagaatgggttcttcctgcagggcaggaagggcagattgttaaaggggctgcggcccagaccaccctggtccctcctccggcagtgactcagacccacactgtgccgtgcagctgtgtgccctgcacacccgcttgacggcgcactgctcacttctggggggccctttcagaggcacttttaaagcaaataaaacatttattgtt

SEQ ID NO: 5366 - DNA, 2747 bp, Homo sapiens
agtggatcatgacccatgaagagcaccatgcagccaaaaccctggggattggcaaagccattgctgtcttaacctctggtggagatgcccaaggtatgaatgctgctgtcagggctgtggttcgagttggtatcttcaccggtgcccgtgtcttctttgtccatgagggttatcaaggcctggtggatggtggagatcacatcaaggaagccacctgggagagcgtttcgatgatgcttcagctgggaggcacrgtgattggaagtgcccggtgcaaggactttcgggaaygagaaggacgactccragctgcctacaacctggtgaagcgtgggatcaccaatctctgtgtcattgggggtgatggcagcctcactggggctgacaccttccgttctgagtggagtgacttgttgagtgacctccagaaagcaggtaagatcacagatgaggaggctacgaagtccagctacctgaacattgtgggcctggttgggtcaattgacaatgacttctgtggcacygatatgaccattggcactgactctgccctgcatcggatcatggaaattgtagatgccatcactaccactgcccagagccaccagaggacatttgtgttagaagtaatgggccgccactgtggatacctggcccttgtcacctctctgtcctgtggggccgactgggtttttattcctgaatgtccaccagatgacgactgggaggaacacctttgtcgccgactcagcgagacaaggacccgtggttctcgtctcaacatcatcattgtggctgagggtgcaattgacaagaatggaaaaccaatcacctcagaagacatcaagaatctggtggttaagcgtctgggatatgacacccgggttactgtcttggggcatgtgcagaggggtgggacgccatcagcctttgacagaattctgggcagcaggatgggtgtggaagcagtgatggcacttttggaggggaccccagataccccagcctgtgtagtgagcctctctggtaaccaggctgtgcgcctgcccctcatggaatgtgtccaggtgaccaaagatgtgaccaaggccatggatgagaagaaatttgacgaagccctgaagctgagaggccrgagcttcatgaacaactgggaggtgtacaagcttctagctcatgtcagacccccggtatctaagagtggttcgcacacagtggctgtgatgaacgtgggggctccggctgcaggcatgaatgctgctgttcgctccactgtgaggattggccttatccagggcaaccgagtgctcgttgtccatgatggtttcgagggcctggccaaggggcagatagaggaagctggctggagctatgttgggggctggactggccaaggtggctctaaacttgggactaaaaggactctacccaagaagagctttgaacagatcagtgccaatataactaagtttaacattcagggccttgtcatcattgggggctttgaggcttacacagggggcctggaactgatggagggcaggaagcagtttgatgagctctgcatcccatttgtggtcattcctgctacagtctccaacaatgtccctggctcagacttcagcgttggggctgacacagcactcaatactatctgcacaacctgtgaccgcatcaagcagtcagcagctggcaccaagcgtcgggtgtttatcattgagactatgggtggctactgtggctacctggctaccatggctggactggcagctggggccgatgctgcctacatttttgaggagcccttcaccattcgagacctgcaggcaaatgttgaacatctggtgcaaaagatgaaaacaactgtgaaaaggggcttggtgttaaggaatgaaaagtgcaatgagaactataccactgacttcattttcaacctgtactctgaggaggggaagggcatcttcgacagcaggaagaatgtgcttggtcacatgcagcagggtgggagcccaaccccatttgataggaattttgccactaagatgggcgccaaggctatgaactggatgtctgggaaaatcaaagagagttaccrtaatgrgcggatctttgccaatactccagattcgggctgtgttctggggatgcgtaagagggctctggtcttccaaccagtggctgagctgaaggaccagacagattttgagcatcgaatccccaaggaacagtggtggctgaaactgaggcccatcctcaaaatcctagccaagtacgagattgacttggacacttcagaccatgcccacctggagcacatcacccggaagcggtccggggaagckgccgtctaaacctctctggagtgaggggaatagattacctgatcatggtcagctcacaccctaataagtccacatcttctcagtgttttagctgtttttttcattaggtttccttttattctgtaccttgcagccatgaccagttctggccaggagctggaggagcaggcagtgggtgggagcyccttttaggtagaatttaacatgacttctgccccagctttatctgtcacacaaggctgggcacctctagtgctactgmtagatatcacttactcagttagaattttyctaaaaataagctttatttatttctttgtgataacaaaragtcttggttcctctactacttttactacagtgacaaattgtaactacactaataaatgccaactggtcactgtg

SEQ ID NO: 5367 - DNA, 2834 bp, Homo sapiens
gagaaacgaggcatakatccagagatcacgttagggtacaccaagaaagagacggttcaagggaattaccaggaggcgatgwgccagagtggatcatgacccatgaagagcaccatgcagccaaaaccctggggattggcaaagccattgctgtcttaacctctggtggagatgcccaaggtatgaatgctgctgtcagggctgtggttcgagttggtatcttcaccggtgcccgtgtcttctttgtccatgagggttatcaaggcctggtggatggtggagatcacatcaaggaagccacctgggagagcgtttcgatgatgcttcagctgggaggcacrgtgattggaagtgcccggtgcaaggactttcgggaaygagaaggacgactccragctgcctacaacctggtgaagcgtgggatcaccaatctctgtgtcattgggggtgatggcagcctcactggggctgacaccttccgttctgagtggagtgacttgttgagtgacctccagaaagcaggtaagatcacagatgaggaggctacgaagtccagctacctgaacattgtgggcctggttgggtcaattgacaatgacttctgtggcacygatatgaccattggcactgactctgccctgcatcggatcatggaaattgtagatgccatcactaccactgcccagagccaccagaggacatttgtgttagaagtaatgggccgccactgtggatacctggcccttgtcacctctctgtcctgtggggccgactgggtttttattcctgaatgtccaccagatgacgactgggaggaacacctttgtcgccgactcagcgagacaaggacccgtggttctcgtctcaacatcatcattgtggctgagggtgcaattgacaagaatggaaaaccaatcacctcagaagacatcaagaatctggtggttaagcgtctgggatatgacacccgggttactgtcttggggcatgtgcagaggggtgggacgccatcagcctttgacagaattctgggcagcaggatgggtgtggaagcagtgatggcacttttggaggggaccccagataccccagcctgtgtagtgagcctctctggtaaccaggctgtgcgcctgcccctcatggaatgtgtccaggtgaccaaagatgtgaccaaggccatggatgagaagaaatttgacgaagccctgaagctgagaggccrgagcttcatgaacaactgggaggtgtacaagcttctagctcatgtcagacccccggtatctaagagtggttcgcacacagtggctgtgatgaacgtgggggctccggctgcaggcatgaatgctgctgttcgctccactgtgaggattggccttatccagggcaaccgagtgctcgttgtccatgatggtttcgagggcctggccaaggggcagatagaggaagctggctggagctatgttgggggctggactggccaaggtggctctaaacttgggactaaaaggactctacccaagaagagctttgaacagatcagtgccaatataactaagtttaacattcagggccttgtcatcattgggggctttgaggcttacacagggggcctggaactgatggagggcaggaagcagtttgatgagctctgcatcccatttgtggtcattcctgctacagtctccaacaatgtccctggctcagacttcagcgttggggctgacacagcactcaatactatctgcacaacctgtgaccgcatcaagcagtcagcagctggcaccaagcgtcgggtgtttatcattgagactatgggtggctactgtggctacctggctaccatggctggactggcagctggggccgatgctgcctacatttttgaggagcccttcaccattcgagacctgcaggcaaatgttgaacatctggtgcaaaagatgaaaacaactgtgaaaaggggcttggtgttaaggaatgaaaagtgcaatgagaactataccactgacttcattttcaacctgtactctgaggaggggaagggcatcttcgacagcaggaagaatgtgcttggtcacatgcagcagggtgggagcccaaccccatttgataggaattttgccactaagatgggcgccaaggctatgaactggatgtctgggaaaatcaaagagagttaccrtaatgrgcggatctttgccaatactccagattcgggctgtgttctggggatgcgtaagagggctctggtcttccaaccagtggctgagctgaaggaccagacagattttgagcatcgaatccccaaggaacagtggtggctgaaactgaggcccatcctcaaaatcctagccaagtacgagattgacttggacacttcagaccatgcccacctggagcacatcacccggaagcggtccggggaagckgccgtctaaacctctctggagtgaggggaatagattacctgatcatggtcagctcacaccctaataagtccacatcttctcagtgttttagctgtttttttcattaggtttccttttattctgtaccttgcagccatgaccagttctggccaggagctggaggagcaggcagtgggtgggagcyccttttaggtagaatttaacatgacttctgccccagctttatctgtcacacaaggctgggcacctctagtgctactgmtagatatcacttactcagttagaattttyctaaaaataagctttatttatttctttgtgataacaaaragtcttggttcctctactacttttactacagtgacaaattgtaactacactaataaatgccaactggtcactgtg

SEQ ID NO: 5368 - DNA, 2741 bp, Homo sapiens
gagaaacgaggcatakatccagagatcacgttagggtacaccaagaaagagacggttcaagggaattaccaggaggcgatgwgccagagtggatcatgacccatgaagagcaccatgcagccaaaaccctggggattggcaaagccattgctgtcttaacctctggtggagatgcccaaggtatgaatgctgctgtcagggctgtggttcgagttggtatcttcaccggtgcccgtgtcttctttgtccatgagggttatcaaggcctggtggatggtggagatcacatcaaggaagccacctgggagagcgtttcgatgatgcttcagctgggaggcacrgtgattggaagtgcccggtgcaaggactttcgggaaygagaaggacgactccragctgcctacaacctggtgaagcgtgggatcaccaatctctgtgtcattgggggtgatggcagcctcactggggctgacaccttccgttctgagtggagtgacttgttgagtgacctccagaaagcaggtaagatcacagatgaggaggctacgaagtccagctacctgaacattgtgggcctggttgggtcaattgacaatgacttctgtggcacygatatgaccattggcactgactctgccctgcatcggatcatggaaattgtagatgccatcactaccactgcccagagccaccagaggacatttgtgttagaagtaatgggccgccactgtggatacctggcccttgtcacctctctgtcctgtggggccgactgggtttttattcctgaatgtccaccagatgacgactgggaggaacacctttgtcgccgactcagcgagacaaggacccgtggttctcgtctcaacatcatcattgtggctgagggtgcaattgacaagaatggaaaaccaatcacctcagaagacatcaagaatggcagcaggatgggtgtggaagcagtgatggcacttttggaggggaccccagataccccagcctgtgtagtgagcctctctggtaaccaggctgtgcgcctgcccctcatggaatgtgtccaggtgaccaaagatgtgaccaaggccatggatgagaagaaatttgacgaagccctgaagctgagaggccrgagcttcatgaacaactgggaggtgtacaagcttctagctcatgtcagacccccggtatctaagagtggttcgcacacagtggctgtgatgaacgtgggggctccggctgcaggcatgaatgctgctgttcgctccactgtgaggattggccttatccagggcaaccgagtgctcgttgtccatgatggtttcgagggcctggccaaggggcagatagaggaagctggctggagctatgttgggggctggactggccaaggtggctctaaacttgggactaaaaggactctacccaagaagagctttgaacagatcagtgccaatataactaagtttaacattcagggccttgtcatcattgggggctttgaggcttacacagggggcctggaactgatggagggcaggaagcagtttgatgagctctgcatcccatttgtggtcattcctgctacagtctccaacaatgtccctggctcagacttcagcgttggggctgacacagcactcaatactatctgcacaacctgtgaccgcatcaagcagtcagcagctggcaccaagcgtcgggtgtttatcattgagactatgggtggctactgtggctacctggctaccatggctggactggcagctggggccgatgctgcctacatttttgaggagcccttcaccattcgagacctgcaggcaaatgttgaacatctggtgcaaaagatgaaaacaactgtgaaaaggggcttggtgttaaggaatgaaaagtgcaatgagaactataccactgacttcattttcaacctgtactctgaggaggggaagggcatcttcgacagcaggaagaatgtgcttggtcacatgcagcagggtgggagcccaaccccatttgataggaattttgccactaagatgggcgccaaggctatgaactggatgtctgggaaaatcaaagagagttaccrtaatgrgcggatctttgccaatactccagattcgggctgtgttctggggatgcgtaagagggctctggtcttccaaccagtggctgagctgaaggaccagacagattttgagcatcgaatccccaaggaacagtggtggctgaaactgaggcccatcctcaaaatcctagccaagtacgagattgacttggacacttcagaccatgcccacctggagcacatcacccggaagcggtccggggaagckgccgtctaaacctctctggagtgaggggaatagattacctgatcatggtcagctcacaccctaataagtccacatcttctcagtgttttagctgtttttttcattaggtttccttttattctgtaccttgcagccatgaccagttctggccaggagctggaggagcaggcagtgggtgggagcyccttttaggtagaatttaacatgacttctgccccagctttatctgtcacacaaggctgggcacctctagtgctactgmtagatatcacttactcagttagaattttyctaaaaataagctttatttatttctttgtgataacaaaragtcttggttcctctactacttttactacagtgacaaattgtaactacactaataaatgccaactggtcactgtg

SEQ ID NO: 5369 - DNA, 2880 bp, Homo sapiens
gggaagcctctcctccttccccctccctckttgcctccacctggctcctccccatgttcgtccatcacccctcccccctttcccaaggacaatctgcaagaaagcagcggcggaggagagctaagactaaaagagtggatcatgacccatgaagagcaccatgcagccaaaaccctggggattggcaaagccattgctgtcttaacctctggtggagatgcccaaggtatgaatgctgctgtcagggctgtggttcgagttggtatcttcaccggtgcccgtgtcttctttgtccatgagggttatcaaggcctggtggatggtggagatcacatcaaggaagccacctgggagagcgtttcgatgatgcttcagctgggaggcacrgtgattggaagtgcccggtgcaaggactttcgggaaygagaaggacgactccragctgcctacaacctggtgaagcgtgggatcaccaatctctgtgtcattgggggtgatggcagcctcactggggctgacaccttccgttctgagtggagtgacttgttgagtgacctccagaaagcaggtaagatcacagatgaggaggctacgaagtccagctacctgaacattgtgggcctggttgggtcaattgacaatgacttctgtggcacygatatgaccattggcactgactctgccctgcatcggatcatggaaattgtagatgccatcactaccactgcccagagccaccagaggacatttgtgttagaagtaatgggccgccactgtggatacctggcccttgtcacctctctgtcctgtggggccgactgggtttttattcctgaatgtccaccagatgacgactgggaggaacacctttgtcgccgactcagcgagacaaggacccgtggttctcgtctcaacatcatcattgtggctgagggtgcaattgacaagaatggaaaaccaatcacctcagaagacatcaagaatctggtggttaagcgtctgggatatgacacccgggttactgtcttggggcatgtgcagaggggtgggacgccatcagcctttgacagaattctgggcagcaggatgggtgtggaagcagtgatggcacttttggaggggaccccagataccccagcctgtgtagtgagcctctctggtaaccaggctgtgcgcctgcccctcatggaatgtgtccaggtgaccaaagatgtgaccaaggccatggatgagaagaaatttgacgaagccctgaagctgagaggccrgagcttcatgaacaactgggaggtgtacaagcttctagctcatgtcagacccccggtatctaagagtggttcgcacacagtggctgtgatgaacgtgggggctccggctgcaggcatgaatgctgctgttcgctccactgtgaggattggccttatccagggcaaccgagtgctcgttgtccatgatggtttcgagggcctggccaaggggcagatagaggaagctggctggagctatgttgggggctggactggccaaggtggctctaaacttgggactaaaaggactctacccaagaagagctttgaacagatcagtgccaatataactaagtttaacattcagggccttgtcatcattgggggctttgaggcttacacagggggcctggaactgatggagggcaggaagcagtttgatgagctctgcatcccatttgtggtcattcctgctacagtctccaacaatgtccctggctcagacttcagcgttggggctgacacagcactcaatactatctgcacaacctgtgaccgcatcaagcagtcagcagctggcaccaagcgtcgggtgtttatcattgagactatgggtggctactgtggctacctggctaccatggctggactggcagctggggccgatgctgcctacatttttgaggagcccttcaccattcgagacctgcaggcaaatgttgaacatctggtgcaaaagatgaaaacaactgtgaaaaggggcttggtgttaaggaatgaaaagtgcaatgagaactataccactgacttcattttcaacctgtactctgaggaggggaagggcatcttcgacagcaggaagaatgtgcttggtcacatgcagcagggtgggagcccaaccccatttgataggaattttgccactaagatgggcgccaaggctatgaactggatgtctgggaaaatcaaagagagttaccrtaatgrgcggatctttgccaatactccagattcgggctgtgttctggggatgcgtaagagggctctggtcttccaaccagtggctgagctgaaggaccagacagattttgagcatcgaatccccaaggaacagtggtggctgaaactgaggcccatcctcaaaatcctagccaagtacgagattgacttggacacttcagaccatgcccacctggagcacatcacccggaagcggtccggggaagckgccgtctaaacctctctggagtgaggggaatagattacctgatcatggtcagctcacaccctaataagtccacatcttctcagtgttttagctgtttttttcattaggtttccttttattctgtaccttgcagccatgaccagttctggccaggagctggaggagcaggcagtgggtgggagcyccttttaggtagaatttaacatgacttctgccccagctttatctgtcacacaaggctgggcacctctagtgctactgmtagatatcacttactcagttagaattttyctaaaaataagctttatttatttctttgtgataacaaaragtcttggttcctctactacttttactacagtgacaaattgtaactacactaataaatgccaactggtcactgtg

SEQ ID NO: 5370 - DNA, 2888 bp, Homo sapiens
cccagctctggcgggaaagccccggaatcgcaaccggcctttccccaagtacggctgggcgctgggatggggcctgctgtaacggcagggagacggtctctccgcggcccaggagagagagaccagaaggaacggcctcagagtggatcatgacccatgaagagcaccatgcagccaaaaccctggggattggcaaagccattgctgtcttaacctctggtggagatgcccaaggtatgaatgctgctgtcagggctgtggttcgagttggtatcttcaccggtgcccgtgtcttctttgtccatgagggttatcaaggcctggtggatggtggagatcacatcaaggaagccacctgggagagcgtttcgatgatgcttcagctgggaggcacrgtgattggaagtgcccggtgcaaggactttcgggaaygagaaggacgactccragctgcctacaacctggtgaagcgtgggatcaccaatctctgtgtcattgggggtgatggcagcctcactggggctgacaccttccgttctgagtggagtgacttgttgagtgacctccagaaagcaggtaagatcacagatgaggaggctacgaagtccagctacctgaacattgtgggcctggttgggtcaattgacaatgacttctgtggcacygatatgaccattggcactgactctgccctgcatcggatcatggaaattgtagatgccatcactaccactgcccagagccaccagaggacatttgtgttagaagtaatgggccgccactgtggatacctggcccttgtcacctctctgtcctgtggggccgactgggtttttattcctgaatgtccaccagatgacgactgggaggaacacctttgtcgccgactcagcgagacaaggacccgtggttctcgtctcaacatcatcattgtggctgagggtgcaattgacaagaatggaaaaccaatcacctcagaagacatcaagaatctggtggttaagcgtctgggatatgacacccgggttactgtcttggggcatgtgcagaggggtgggacgccatcagcctttgacagaattctgggcagcaggatgggtgtggaagcagtgatggcacttttggaggggaccccagataccccagcctgtgtagtgagcctctctggtaaccaggctgtgcgcctgcccctcatggaatgtgtccaggtgaccaaagatgtgaccaaggccatggatgagaagaaatttgacgaagccctgaagctgagaggccrgagcttcatgaacaactgggaggtgtacaagcttctagctcatgtcagacccccggtatctaagagtggttcgcacacagtggctgtgatgaacgtgggggctccggctgcaggcatgaatgctgctgttcgctccactgtgaggattggccttatccagggcaaccgagtgctcgttgtccatgatggtttcgagggcctggccaaggggcagatagaggaagctggctggagctatgttgggggctggactggccaaggtggctctaaacttgggactaaaaggactctacccaagaagagctttgaacagatcagtgccaatataactaagtttaacattcagggccttgtcatcattgggggctttgaggcttacacagggggcctggaactgatggagggcaggaagcagtttgatgagctctgcatcccatttgtggtcattcctgctacagtctccaacaatgtccctggctcagacttcagcgttggggctgacacagcactcaatactatctgcacaacctgtgaccgcatcaagcagtcagcagctggcaccaagcgtcgggtgtttatcattgagactatgggtggctactgtggctacctggctaccatggctggactggcagctggggccgatgctgcctacatttttgaggagcccttcaccattcgagacctgcaggcaaatgttgaacatctggtgcaaaagatgaaaacaactgtgaaaaggggcttggtgttaaggaatgaaaagtgcaatgagaactataccactgacttcattttcaacctgtactctgaggaggggaagggcatcttcgacagcaggaagaatgtgcttggtcacatgcagcagggtgggagcccaaccccatttgataggaattttgccactaagatgggcgccaaggctatgaactggatgtctgggaaaatcaaagagagttaccrtaatgrgcggatctttgccaatactccagattcgggctgtgttctggggatgcgtaagagggctctggtcttccaaccagtggctgagctgaaggaccagacagattttgagcatcgaatccccaaggaacagtggtggctgaaactgaggcccatcctcaaaatcctagccaagtacgagattgacttggacacttcagaccatgcccacctggagcacatcacccggaagcggtccggggaagckgccgtctaaacctctctggagtgaggggaatagattacctgatcatggtcagctcacaccctaataagtccacatcttctcagtgttttagctgtttttttcattaggtttccttttattctgtaccttgcagccatgaccagttctggccaggagctggaggagcaggcagtgggtgggagcyccttttaggtagaatttaacatgacttctgccccagctttatctgtcacacaaggctgggcacctctagtgctactgmtagatatcacttactcagttagaattttyctaaaaataagctttatttatttctttgtgataacaaaragtcttggttcctctactacttttactacagtgacaaattgtaactacactaataaatgccaactggtcactgtg

SEQ ID NO: 5371 - DNA, 2006 bp, Homo sapiens
ttgtcccatcagggcccatagtggatggctgtatgggggccatgtgactgaactcctgatcctcgtttcagcccactcatgtgacatgcatggagctcttcagcagggacttactgaccaggacaagagcttgagactttgaggggatctgattgtcactgcacaatcaaggacagtattcccaagagtggatgttgctcaagatagtccaaggaattctatgaagaaaaggactccacagacaataaattttggacaccctgtttcaacacagttaagcggctttttataattacaggacttttcagaacatttaatatgctaatgtgcattctaaatctccaagaaagaatgatgcatatttatcttttcttccaggtgcatcttagagactggtgtttgcaagtatatggagcaggaaacttcatcccgaagatggagaccccggggctgtcagcaggcgctttataagtcagtggagcctgcggaagtggccagaatccagcactccaagcactgctgtcttctcacagagtcttgaagccagagcagyrccaggatgtcacgggagctggccccactgctgcttctcctcctctccatccacagygccctggccatgaggatctgctccttcaacgtcaggtcctttggggaaagcaagcaggaagacaagaatgccatggatgtcattgtgaaggtcatcaaacgctgtgacatcatactcgtgatggaaatcaaggacagcaacaacaggatctgccccatactgatggagaagctgaacagaaattcaaggagaggcataacrtacaactatgtgattagctctcgscttggaagaaacacatataaagaacaatatgcctttctctacaaggaaaagctggtgtctgtgaagaggagttatcactaccatgactatcaggatggagacgcagatgtgttttccagggagccctttgtggtctggttccaatctccccacactgctgtcaaagacttcgtgattatccccctgcacaccaccccagagacatccgttaaggagatcgatgagttggttgaggtctacacggacgtgaaacaccrctggaaggcrgagaatttcattttcatgggtgacttcaatgccggctgcagctacgtccccaagaaggcctggaagaacatcygcttgaggactgaccccaggtttgtttggctgatcggggaccaagaggacaccacggtgaagaagagcaccaactgtgcatatgacaggattgtgcttagaggacaagaaatcgtcagttctgttgttcccaagtcaaacagtgtttttgacttccagaaagcttacaagctgactgaagaggaggccctggatgtcagcgaccactttccagttgaatttaaactacagtcttcaagggccttcaccaacagcaaaaaatctgtcactctaaggaagaaaacaaagagcaaacgctcctagacccaagggtctcatcttattaaccatttcttgcctctaaataaaatgtctctaacagatatgaactgctccctgtacttaggaaacaagagtgatccaactgctttcattttttgacctgaatttattctgacttgagccaaattggaaggagaatcttttgtatctctcttggtctcatacctcccctgaattgtctaaaagggaaccaggggcatttgtagaccaaaatgatgatcttcatgccctgagccagagccccatccactgtcactggccctgctcaaccctgtcatgcgagaggctgcagggggaggaagagcgtcagctttcagtcctcatgaggggtcctgttccacacgcaatgaccagaaacaccaaggccccagctgcccctgtgatttgggcaattaactgttttaagagtctgccccctcctctctgaggtcaggccaccatcacgtctcacagtgttgagggataaaggccactcccacctggtttctctgccttcgaattgtcctccaac

SEQ ID NO: 5372 - DNA, 1544 bp, Homo sapiens
gctttataagtcagtggagcctgcggaagtggccagaatccagcactccaagcactgctgtcttctcacagagtcttgaagccagagcagyrccaggatgtcacgggagctggccccactgctgcttctcctcctctccatccacagygccctggccatgaggatctgctccttcaacgtcaggtcctttggggaaagcaagcaggaagacaagaatgccatggatgtcattgtgaaggtcatcaaacgctgtgacatcatactcgtgatggaaatcaaggacagcaacaacaggatctgccccatactgatggagaagctgaacagaaattcaaggagaggcataacrtacaactatgtgattagctctcgscttggaagaaacacatataaagaacaatatgcctttctctacaaggaaaagctggtgtctgtgaagaggagttatcactaccatgactatcaggatggagacgcagatgtgttttccagggagccctttgtggtctggttccaatctccccacactgctgtcaaagacttcgtgattatccccctgcacaccaccccagagacatccgttaaggagatcgatgagttggttgaggtctacacggacgtgaaacaccrctggaaggcrgagaatttcattttcatgggtgacttcaatgccggctgcagctacgtccccaagaaggcctggaagaacatcygcttgaggactgaccccaggtttgtttggctgatcggggaccaagaggacaccacggtgaagaagagcaccaactgtgcatatgacaggattgtgcttagaggacaagaaatcgtcagttctgttgttcccaagtcaaacagtgtttttgacttccagaaagcttacaagctgactgaagaggaggccctggatgtcagcgaccactttccagttgaatttaaactacagtcttcaagggccttcaccaacagcaaaaaatctgtcactctaaggaagaaaacaaagagcaaacgctcctagacccaagggtctcatcttattaaccatttcttgcctctaaataaaatgtctctaacagatatgaactgctccctgtacttaggaaacaagagtgatccaactgctttcattttttgacctgaatttattctgacttgagccaaattggaaggagaatcttttgtatctctcttggtctcatacctcccctgaattgtctaaaagggaaccaggggcatttgtagaccaaaatgatgatcttcatgccctgagccagagccccatccactgtcactggccctgctcaaccctgtcatgcgagaggctgcagggggaggaagagcgtcagctttcagtcctcatgaggggtcctgttccacacgcaatgaccagaaacaccaaggccccagctgcccctgtgatttgggcaattaactgttttaagagtctgccccctcctctctgaggtcaggccaccatcacgtctcacagtgttgagggataaaggccactcccacctggtttctctgccttcgaattgtcctccaac

SEQ ID NO: 5373 - DNA, 1766 bp, Homo sapiens
ctagatgtcagagctggctcccggttgggatatgagtgactttgtggaggatggcgcctaaatgaggcatgccaatttcygcaccagggtgacgaacataagggctcctwaaaggctagcccaatgtatctgtatttccttggggattaaaacccatgatcttcagttcctcagagaactgaaagttgcaaggagaaatccagtaattcctgttatctgcaggctttataagtcagtggagcctgcggaagtggccagaatccagcactccaagcactgctgtcttctcacagagtcttgaagccagagcagyrccaggatgtcacgggagctggccccactgctgcttctcctcctctccatccacagygccctggccatgaggatctgctccttcaacgtcaggtcctttggggaaagcaagcaggaagacaagaatgccatggatgtcattgtgaaggtcatcaaacgctgtgacatcatactcgtgatggaaatcaaggacagcaacaacaggatctgccccatactgatggagaagctgaacagaaattcaaggagaggcataacrtacaactatgtgattagctctcgscttggaagaaacacatataaagaacaatatgcctttctctacaaggaaaagctggtgtctgtgaagaggagttatcactaccatgactatcaggatggagacgcagatgtgttttccagggagccctttgtggtctggttccaatctccccacactgctgtcaaagacttcgtgattatccccctgcacaccaccccagagacatccgttaaggagatcgatgagttggttgaggtctacacggacgtgaaacaccrctggaaggcrgagaatttcattttcatgggtgacttcaatgccggctgcagctacgtccccaagaaggcctggaagaacatcygcttgaggactgaccccaggtttgtttggctgatcggggaccaagaggacaccacggtgaagaagagcaccaactgtgcatatgacaggattgtgcttagaggacaagaaatcgtcagttctgttgttcccaagtcaaacagtgtttttgacttccagaaagcttacaagctgactgaagaggaggccctggatgtcagcgaccactttccagttgaatttaaactacagtcttcaagggccttcaccaacagcaaaaaatctgtcactctaaggaagaaaacaaagagcaaacgctcctagacccaagggtctcatcttattaaccatttcttgcctctaaataaaatgtctctaacagatatgaactgctccctgtacttaggaaacaagagtgatccaactgctttcattttttgacctgaatttattctgacttgagccaaattggaaggagaatcttttgtatctctcttggtctcatacctcccctgaattgtctaaaagggaaccaggggcatttgtagaccaaaatgatgatcttcatgccctgagccagagccccatccactgtcactggccctgctcaaccctgtcatgcgagaggctgcagggggaggaagagcgtcagctttcagtcctcatgaggggtcctgttccacacgcaatgaccagaaacaccaaggccccagctgcccctgtgatttgggcaattaactgttttaagagtctgccccctcctctctgaggtcaggccaccatcacgtctcacagtgttgagggataaaggccactcccacctggtttctctgccttcgaattgtcctccaac

SEQ ID NO: 5374 - DNA, 2003 bp, Homo sapiens
cagcctatgacacttttgctcctcctgaaatctccatatcttgcytttctcaaattccaaggtagcctttgcgcaacatatcactctccactgactcttgtcccatcagggcccatagtggatggctgtatgggggccatgtgactgaactcctgatcctcgtttcagcccactcatgtgacatgcatggagctcttcagcagggacttactgaccaggacaagagcttgagactttgaggggatctgattgtcactgcacaatcaaggacagtattcccaagagtggatgttgctcaagatagtccaaggaattctatgaagaaaaggactccacagacaataaattttggacaccctgtttcaacacagtgcatcttagagactggtgtttgcaagtatatggagcaggaaacttcatcccgaagatggagaccccggggctgtcagcaggcgttaggctttataagtcagtggagcctgcggaagtggccagaatccagcactccaagcactgctgtcttctcacagagtcttgaagccagagcagyrccaggatgtcacgggagctggccccactgctgcttctcctcctctccatccacagygccctggccatgaggatctgctccttcaacgtcaggtcctttggggaaagcaagcaggaagacaagaatgccatggatgtcattgtgaaggtcatcaaacgctgtgacatcatactcgtgatggaaatcaaggacagcaacaacaggatctgccccatactgatggagaagctgaacagaaattcaaggagaggcataacrtacaactatgtgattagctctcgscttggaagaaacacatataaagaacaatatgcctttctctacaaggaaaagctggtgtctgtgaagaggagttatcactaccatgactatcaggatggagacgcagatgtgttttccagggagccctttgtggtctggttccaatctccccacactgctgtcaaagacttcgtgattatccccctgcacaccaccccagagacatccgttaaggagatcgatgagttggttgaggtctacacggacgtgaaacaccrctggaaggcrgagaatttcattttcatgggtgacttcaatgccggctgcagctacgtccccaagaaggcctggaagaacatcygcttgaggactgaccccaggtttgtttggctgatcggggaccaagaggacaccacggtgaagaagagcaccaactgtgcatatgacaggattgtgcttagaggacaagaaatcgtcagttctgttgttcccaagtcaaacagtgtttttgacttccagaaagcttacaagctgactgaagaggaggccctggatgtcagcgaccactttccagttgaatttaaactacagtcttcaagggccttcaccaacagcaaaaaatctgtcactctaaggaagaaaacaaagagcaaacgctcctagacccaagggtctcatcttattaaccatttcttgcctctaaataaaatgtctctaacagatatgaactgctccctgtacttaggaaacaagagtgatccaactgctttcattttttgacctgaatttattctgacttgagccaaattggaaggagaatcttttgtatctctcttggtctcatacctcccctgaattgtctaaaagggaaccaggggcatttgtagaccaaaatgatgatcttcatgccctgagccagagccccatccactgtcactggccctgctcaaccctgtcatgcgagaggctgcagggggaggaagagcgtcagctttcagtcctcatgaggggtcctgttccacacgcaatgaccagaaacaccaaggccccagctgcccctgtgatttgggcaattaactgttttaagagtctgccccctcctctctgaggtcaggccaccatcacgtctcacagtgttgagggataaaggccactcccacctggtttctctgccttcgaattgtcctccaac

SEQ ID NO: 5375 - DNA, 1712 bp, Homo sapiens
tttggcagcggatagaggacacgaccaagatggcggcggtgtctggcttggtgcggagaccccttcgggaggtgacagttcgtgatgctataaatcagggtatggatgaggagctggaaagagatgagaaggtatttctgcttggagaagaagttgcccagtatgatggggcatacaaggttagtcgagggctgtggaagaaatatggagacaagaggattattgacactcccatatcagagatgggctttgctggaattgctgtaggtgcagctatggctgggttgcggcccatttgtgaatttatgaccttcaatttctccatgcaagccattgaccaggttataaactcagctgccaagacctactacatgtctggtggccttcagcctgtgcctatagtcttcaggggrcccaatggtgcctcagcaggtgtagctgcccagcactcacagtgctttgctgcctggtatgggcactgcccaggcttaaaggtggtcagtccctggaattcagaggatgctaaaggacttattaaatcagccattcgggataacaatccagtggyggtgctagagaatgaattgatgtatggggttccttttgaatttcctccggaagctcagtcaaaagattttctgattcctattggaaaagccaaaatagaaaggcaaggaacacatataactgtggtttcccattcaagacctgtgggccactgcttagaagctgcagcagtgctatctaaagaaggagttgaatgtgaggtgataaatatgcgtaccattagaccaatggacatggaaaccatagaagccagtgtcatgaagacaaatcatcttgtaactgtggaaggaggctggccamagtttggagtaggagctgaaatctgtgccaggatcatggaaggtcctgcgttcaatttcctggatgctcctgctgttcgtgtcactggtgctgatgtccctatgccttatgcaaagattctagaggacaactctatacctcaggtcaaagacatcatatttgcaataaagaaaacattaaatatttagtttggacttgaatatcaagtcgttgaaatttatttgaaatacttgctggcactgcacctggatttgtactgcaagacctgactattcataamggaaaaygatttctaaagcaacagcaggtatttttgtacagggaagtttaaatgtgtttgtgtatggaaaactctccactctcctcccctagatgccatgcttccttttgtstgttacggttgccatgttctttgaataacaaattatatmacattttatcctctctcaccacaaggacaaagtatggatgtggcagagtcctsatgaaagatgtatccaaacaagataacttatatgtataaaattaaagcatataatayacrtttactgttagtttgttttgataaggaataaaggaatttctaacatgactaattttttttttttttgagacaatgtttggctctgttccccaagctggagtgtgatggcacaatcttggctcactgcagcctccacctcccaggttcaagtgattctcctgcctcagcctcagtaggaaattagccaccacatccggctaattttggtgtttttagtagaggtggggtttcaccatgttggccaggctggtcttgaacacctgacctcaggtgatccacctgccttggccctcccaaactg

SEQ ID NO: 5376 - DNA, 1794 bp, Homo sapiens
ctcacgtctgccggcccctctgttgtcgtttggcagcggatagaggacacgaccaagatggcggcggtgtctggcttggtgcggagaccccttcgggaggtctccgggctgctgaagaggcgctttcactggaccgcgccggctgcgctgcaggtgacagttcgtgatgctataaatcagggtatggatgaggagctggaaagagatgagaaggtatttctgcttggagaagaagttgcccagtatgatggggcatacaaggttagtcgagggctgtggaagaaatatggagacaagaggattattgacactcccatatcagagatgggctttgctggaattgctgtaggtgcagctatggctgggttgcggcccatttgtgaatttatgaccttcaatttctccatgcaagccattgaccaggttataaactcagctgccaagacctactacatgtctggtggccttcagcctgtgcctatagtcttcaggggrcccaatggtgcctcagcaggtgtagctgcccagcactcacagtgctttgctgcctggtatgggcactgcccaggcttaaaggtggtcagtccctggaattcagaggatgctaaaggacttattaaatcagccattcgggataacaatccagtggyggtgctagagaatgaattgatgtatggggttccttttgaatttcctccggaagctcagtcaaaagattttctgattcctattggaaaagccaaaatagaaaggcaaggaacacatataactgtggtttcccattcaagacctgtgggccactgcttagaagctgcagcagtgctatctaaagaaggagttgaatgtgaggtgataaatatgcgtaccattagaccaatggacatggaaaccatagaagccagtgtcatgaagacaaatcatcttgtaactgtggaaggaggctggccamagtttggagtaggagctgaaatctgtgccaggatcatggaaggtcctgcgttcaatttcctggatgctcctgctgttcgtgtcactggtgctgatgtccctatgccttatgcaaagattctagaggacaactctatacctcaggtcaaagacatcatatttgcaataaagaaaacattaaatatttagtttggacttgaatatcaagtcgttgaaatttatttgaaatacttgctggcactgcacctggatttgtactgcaagacctgactattcataamggaaaaygatttctaaagcaacagcaggtatttttgtacagggaagtttaaatgtgtttgtgtatggaaaactctccactctcctcccctagatgccatgcttccttttgtstgttacggttgccatgttctttgaataacaaattatatmacattttatcctctctcaccacaaggacaaagtatggatgtggcagagtcctsatgaaagatgtatccaaacaagataacttatatgtataaaattaaagcatataatayacrtttactgttagtttgttttgataaggaataaaggaatttctaacatgactaattttttttttttttgagacaatgtttggctctgttccccaagctggagtgtgatggcacaatcttggctcactgcagcctccacctcccaggttcaagtgattctcctgcctcagcctcagtaggaaattagccaccacatccggctaattttggtgtttttagtagaggtggggtttcaccatgttggccaggctggtcttgaacacctgacctcaggtgatccacctgccttggccctcccaaactg

SEQ ID NO: 5377 - DNA, 2141 bp, Homo sapiens
tgagcctcggactgatctgcctgcctgtccctcctctgcctgtcacttctctagagaatcagaatctcattttcagcttctgccagagccagtagcagttgggaaagaaggctgtgctctttgaagagagtcagccagcctgaaagagcaggatggatcttgatgtggttaacatgtttgtgattgcgggcggcacgctggccatcccaatcctggcatttgtggcttcatttcttctgtggccttcagcactgataagaatctattattggtactggcggaggacattgggcatgcaagtccgctatgttcaccatgaagactatcagttctgttattccttccggggcaggcctgggcacaaaccctccatcctcatgctccacggattctctgcccacaaggatatgtggctcagtgtggtcaagttccttccaaagaacctgcacttggtctgcgtggacatgccaggacatgagggcaccacccgctcctccctggatgacctgtccatagatgggcaagttaagaggatacaccagtttgtagaatgcctgaagctgaacaaaaaacctttccacctggtaggcacctccatgggtggccaggtggctggggtgtatgctgcttactacccatcggatgtctccagcctgtgtctcgtgtgtcctgctggcctgcagtactcaactgacaatcaatttgtacaayggctcaaagaactgcagggctctgccgccgtggagaagattcccttgatcccgtctaccccagaagagatgagtgaaatgcttcagctctgctcctatgtccgcttcaaggtgccccagcagatcctgcaaggccttgtcgatgtccgcatccctcataacaacttctaccgaaagttgtttttggaaatcgtcagtgagaagtccagatactctctccatcagaacatggacaagatcaaggttccgacgcagatcatctgggggaaacaagaccaggtgctggatgtgtctggggcagacatgttggccaagtcaattgccaactgccaggtggagcttctggaaaactgtgggcactcagtagtgatggaaagacccaggaagacagccaagctcataatcgactttttagcttctgtgcacaacacagacaacaacaagaagctggactgaggccccgactgcagcctgcattctgcacacagcatctgctcccatcccccaagtctgacgcagccaccactctcagggatcctgccccaaatgcggtcggagcgccagtgaccctgaggaagcccgtcccttatccctggtatccacggttccccagagctttggggaccacgcgaaaayctccaagatatttttcacaaaatagaaactcatatggaacaaaataagaaaccccagccatgaaatctaccatgaagtcttcaagttcatgtcactgasaagcttgtgcaaagcagccaccttggaccataattaaatcaaggacattttctttgagacattccttatagttggagactcaagatatttttgttgcatcaggtgtattcccttgcatgggcagtggcttttataggagcattagtcctcattcgctgaaccctgttgtttaggtctaatttaagttttacatagagacccatgtatgactgcagcccattggctgcaagaccagggaggaaagtggcaagctgtagaaaatgtttacacgcatggaggggcattgctcyagccctcagagcgtccggagcagcaggrtacatgggtgggaggttcattcagcacccaccagtcaggtatgttctgagtgaacccacagcagtcgcagaatgagcacctggcagggtgggtttcctaggaataatttattatttttaaaaataggcctaataaagcaataatgttctagacatctgtctaagtaatcagactcaggttccacacacaagcaacaactcgtgggcctyttttctatttcartgtgctactaagaacccttggatgtaacatactagttagttaatgaattctgtgaattctgtgaagagtaatgtgattgaaaataagtctaaacrgctgtaaaagtgaccacaatgacatgaaataaatttaataagtctagatcagcaacatgca

SEQ ID NO: 5378 - DNA, 1079 bp, Homo sapiens
gcgcgggtaggagcccggcggcaggtcccagcccggggctagagaccgagggccggggtccgggcccggcggcgggacccaggcggttgaggctggagtcagccagcctgaaagagcaggatggatcttgatgtggttaacatgtttgtgattgcgggcggcacgctggccatcccaatcctggcatttgtggcttcatttcttctgtggccttcagcactgataagaatctattattggtactggcggaggacattgggcatgcaagtccgctatgttcaccatgaagactatcagttctgttattccttccggggcaggcctgggcacaaaccctccatcctcatgctccacggattctctgcccacaaggatatgtggctcagtgtggtcaagttccttccaaagaacctgcacttggtctgcgtggacatgccaggacatgagggcaccacccgctcctccctggatgacctgtccatagatgggcaagttaagaggatacaccagtttgtagaatgcctgaagctgaacaaaaaacctttccacctggtaggcacctccatgggtggccaggtggctggggtgtatgctgcttactacccatcggatgtctccagcctgtgtctcgtgtgtcctgctggcctgcagtactcaactgacaatcaatttgtacaayggctcaaagaactgcagggctctgccgccgtggagaagattcccttgatcccgtctaccccagaagagatgagtgaaatgcttcagctctgctcctatgtccgcttcaaggtgccccagcagatcctgcaaggccttgtcgatgtccgcatccctcataacaacttctaccgaaagttgtttttggaaatcgtcagtgagaagtccagatactctctccatcagaacatggacaagatcaaggttccgacgcagatcatctgggggaaacaagaccaggtatgtaacacatccccgcggcaacatgttggccaagtcaattgccaactgccaggtggagcttctggaaaactgtgggcactcagtagtgatggaaagacccaggaagacagccaagctca

SEQ ID NO: 5379 - DNA, 2440 bp, Homo sapiens
gccgtggctttcgggtgctaggagacagttgccggcgttgggttgtgcgagacgctaactgtaccctccgggtttaacgctgtgaggcagcgcgcggaggaactggggataagcgccccggagcccccaaacagagcgcggccgctgggggacagcgcgcggcgccgggtcggggcggggcggcttttctgtcggaggacgcgaaccggcacgctgcgcctttaaggagtccrgctgggctgggcgccggagctgggagcggcgcgggtaggagcccggcggcaggtcccagcccggggctagagaccgagggccggggtccgggcccggcggcgggacccaggcggttgaggctggtcagaatctcattttcagcttctgccagagccagtagcagttgggaaagaaggctgtgctctttgaagagagtcagccagcctgaaagagcaggatggatcttgatgtggttaacatgtttgtgattgcgggcggcacgctggccatcccaatcctggcatttgtggcttcatttcttctgtggccttcagcactgataagaatctattattggtactggcggaggacattgggcatgcaagtccgctatgttcaccatgaagactatcagttctgttattccttccggggcaggcctgggcacaaaccctccatcctcatgctccacggattctctgcccacaaggatatgtggctcagtgtggtcaagttccttccaaagaacctgcacttggtctgcgtggacatgccaggacatgagggcaccacccgctcctccctggatgacctgtccatagatgggcaagttaagaggatacaccagtttgtagaatgcctgaagctgaacaaaaaacctttccacctggtaggcacctccatgggtggccaggtggctggggtgtatgctgcttactacccatcggatgtctccagcctgtgtctcgtgtgtcctgctggcctgcagtactcaactgacaatcaatttgtacaayggctcaaagaactgcagggctctgccgccgtggagaagattcccttgatcccgtctaccccagaagagatgagtgaaatgcttcagctctgctcctatgtccgcttcaaggtgccccagcagatcctgcaaggccttgtcgatgtccgcatccctcataacaacttctaccgaaagttgtttttggaaatcgtcagtgagaagtccagatactctctccatcagaacatggacaagatcaaggttccgacgcagatcatctgggggaaacaagaccaggtgctggatgtgtctggggcagacatgttggccaagtcaattgccaactgccaggtggagcttctggaaaactgtgggcactcagtagtgatggaaagacccaggaagacagccaagctcataatcgactttttagcttctgtgcacaacacagacaacaacaagaagctggactgaggccccgactgcagcctgcattctgcacacagcatctgctcccatcccccaagtctgacgcagccaccactctcagggatcctgccccaaatgcggtcggagcgccagtgaccctgaggaagcccgtcccttatccctggtatccacggttccccagagctttggggaccacgcgaaaayctccaagatatttttcacaaaatagaaactcatatggaacaaaataagaaaccccagccatgaaatctaccatgaagtcttcaagttcatgtcactgasaagcttgtgcaaagcagccaccttggaccataattaaatcaaggacattttctttgagacattccttatagttggagactcaagatatttttgttgcatcaggtgtattcccttgcatgggcagtggcttttataggagcattagtcctcattcgctgaaccctgttgtttaggtctaatttaagttttacatagagacccatgtatgactgcagcccattggctgcaagaccagggaggaaagtggcaagctgtagaaaatgtttacacgcatggaggggcattgctcyagccctcagagcgtccggagcagcaggrtacatgggtgggaggttcattcagcacccaccagtcaggtatgttctgagtgaacccacagcagtcgcagaatgagcacctggcagggtgggtttcctaggaataatttattatttttaaaaataggcctaataaagcaataatgttctagacatctgtctaagtaatcagactcaggttccacacacaagcaacaactcgtgggcctyttttctatttcartgtgctactaagaacccttggatgtaacatactagttagttaatgaattctgtgaattctgtgaagagtaatgtgattgaaaataagtctaaacrgctgtaaaagtgaccacaatgacatgaaataaatttaataagtctagatcagcaacatgca

SEQ ID NO: 5380 - DNA, 2109 bp, Homo sapiens
gcgcgggtaggagcccggcggcaggtcccagcccggggctagagaccgagggccggggtccgggcccggcggcgggacccaggcggttgaggctggagtcagccagcctgaaagagcaggatggatcttgatgtggttaacatgtttgtgattgcgggcggcacgctggccatcccaatcctggcatttgtggcttcatttcttctgtggccttcagcactgataagaatctattattggtactggcggaggacattgggcatgcaagtccgctatgttcaccatgaagactatcagttctgttattccttccggggcaggcctgggcacaaaccctccatcctcatgctccacggattctctgcccacaaggatatgtggctcagtgtggtcaagttccttccaaagaacctgcacttggtctgcgtggacatgccaggacatgagggcaccacccgctcctccctggatgacctgtccatagatgggcaagttaagaggatacaccagtttgtagaatgcctgaagctgaacaaaaaacctttccacctggtaggcacctccatgggtggccaggtggctggggtgtatgctgcttactacccatcggatgtctccagcctgtgtctcgtgtgtcctgctggcctgcagtactcaactgacaatcaatttgtacaayggctcaaagaactgcagggctctgccgccgtggagaagattcccttgatcccgtctaccccagaagagatgagtgaaatgcttcagctctgctcctatgtccgcttcaaggtgccccagcagatcctgcaaggccttgtcgatgtccgcatccctcataacaacttctaccgaaagttgtttttggaaatcgtcagtgagaagtccagatactctctccatcagaacatggacaagatcaaggttccgacgcagatcatctgggggaaacaagaccaggtgctggatgtgtctggggcagacatgttggccaagtcaattgccaactgccaggtggagcttctggaaaactgtgggcactcagtagtgatggaaagacccaggaagacagccaagctcataatcgactttttagcttctgtgcacaacacagacaacaacaagaagctggactgaggccccgactgcagcctgcattctgcacacagcatctgctcccatcccccaagtctgacgcagccaccactctcagggatcctgccccaaatgcggtcggagcgccagtgaccctgaggaagcccgtcccttatccctggtatccacggttccccagagctttggggaccacgcgaaaayctccaagatatttttcacaaaatagaaactcatatggaacaaaataagaaaccccagccatgaaatctaccatgaagtcttcaagttcatgtcactgasaagcttgtgcaaagcagccaccttggaccataattaaatcaaggacattttctttgagacattccttatagttggagactcaagatatttttgttgcatcaggtgtattcccttgcatgggcagtggcttttataggagcattagtcctcattcgctgaaccctgttgtttaggtctaatttaagttttacatagagacccatgtatgactgcagcccattggctgcaagaccagggaggaaagtggcaagctgtagaaaatgtttacacgcatggaggggcattgctcyagccctcagagcgtccggagcagcaggrtacatgggtgggaggttcattcagcacccaccagtcaggtatgttctgagtgaacccacagcagtcgcagaatgagcacctggcagggtgggtttcctaggaataatttattatttttaaaaataggcctaataaagcaataatgttctagacatctgtctaagtaatcagactcaggttccacacacaagcaacaactcgtgggcctyttttctatttcartgtgctactaagaacccttggatgtaacatactagttagttaatgaattctgtgaattctgtgaagagtaatgtgattgaaaataagtctaaacrgctgtaaaagtgaccacaatgacatgaaataaatttaataagtctagatcagcaacatgca

SEQ ID NO: 5381 - DNA, 2208 bp, Homo sapiens
aaggagtccrgctgggctgggcgccggagctgggagcggcgcgggtaggagcccggcggcaggtcccagcccggggctagagaccgagggccggggtccgggcccggcggcgggacccaggcggttgaggctggtcaggagtcagccagcctgaaagagcaggatggatcttgatgtggttaacatgtttgtgattgcgggcggcacgctggccatcccaatcctggcatttgtggcttcatttcttctgtggccttcagcactgataagaatctattattgttccttccaaagaacctgcacttggtctgcgtggacatgccaggacatgagggcaccacccgctcctccctggatgacctgtccatagatgggcaagttaagaggatacaccagtttgtagaatgcctgaagctgaacaaaaaacctttccacctggtaggcacctccatgggtggccaggtggctggggtgtatgctgcttactacccatcggatgtctccagcctgtgtctcgtgtgtcctgctggcctgcagtactcaactgacaatcaatttgtacaayggctcaaagaactgcagggctctgccgccgtggagaagattcccttgatcccgtctaccccagaagagatgagtgaaatgcttcagctctgctcctatgtccgcttcaaggtgccccagcagatcctgcaaggccttgtcgatgtccgcatccctcataacaacttctaccgaaagtgtaagtagccctactttcagcttggagcttgttacaagtgaagctctgtggatggatggcttttatttcttaaatctctgacacttygaatgtctcyttgggcccctgaagagaggaagtggtggcctggatctggtgactatcccttgattctgcggtggtgccacaggcacagtccagcacatactcactttgttttccttttctgacaagtgtttttggaaatcgtcagtgagaagtccagatactctctccatcagaacatggacaagatcaaggttccgacgcagatcatctgggggaaacaagaccaggtgctggatgtgtctggggcagacatgttggccaagtcaattgccaactgccaggtggagcttctggaaaactgtgggcactcagtagtgatggaaagacccaggaagacagccaagctcataatcgactttttagcttctgtgcacaacacagacaacaacaagaagctggactgaggccccgactgcagcctgcattctgcacacagcatctgctcccatcccccaagtctgacgcagccaccactctcagggatcctgccccaaatgcggtcggagcgccagtgaccctgaggaagcccgtcccttatccctggtatccacggttccccagagctttggggaccacgcgaaaayctccaagatatttttcacaaaatagaaactcatatggaacaaaataagaaaccccagccatgaaatctaccatgaagtcttcaagttcatgtcactgasaagcttgtgcaaagcagccaccttggaccataattaaatcaaggacattttctttgagacattccttatagttggagactcaagatatttttgttgcatcaggtgtattcccttgcatgggcagtggcttttataggagcattagtcctcattcgctgaaccctgttgtttaggtctaatttaagttttacatagagacccatgtatgactgcagcccattggctgcaagaccagggaggaaagtggcaagctgtagaaaatgtttacacgcatggaggggcattgctcyagccctcagagcgtccggagcagcaggrtacatgggtgggaggttcattcagcacccaccagtcaggtatgttctgagtgaacccacagcagtcgcagaatgagcacctggcagggtgggtttcctaggaataatttattatttttaaaaataggcctaataaagcaataatgttctagacatctgtctaagtaatcagactcaggttccacacacaagcaacaactcgtgggcctyttttctatttcartgtgctactaagaacccttggatgtaacatactagttagttaatgaattctgtgaattctgtgaagagtaatgtgattgaaaataagtctaaacrgctgtaaaagtgaccacaatgacatgaaataaatttaataagtctagatcagcaacatgca

SEQ ID NO: 5382 - DNA, 2152 bp, Homo sapiens
aaggagtccrgctgggctgggcgccggagctgggagcggcgcgggtaggagcccggcggcaggtcccagcccggggctagagaccgagggccggggtccgggcccggcggcgggacccaggcggttgaggctggtcaggagtcagccagcctgaaagagcaggatggatcttgatgtggttaacatgtttgtgattgcgggcggcacgctggccatcccaatcctggcatttgtggcttcatttcttctgtggccttcagcactgataagaatctattattggtactggcggaggacattgggcatgcaagtccgctatgttcaccatgaagactatcagttctgttattccttccggggcaggcctgggcacaaaccctccatcctcatgctccacggattctctgcccacaaggatatgtggctcagtgtggtcaagttccttccaaagaacctgcacttggtctgcgtggacatgccaggacatgagggcaccacccgctcctccctggatgacctgtccatagatgggcaagttaagaggatacaccagtttgtagaatgcctgaagctgaacaaaaaacctttccacctggtaggcacctccatgggtggccaggtggctggggtgtatgctgcttactacccatcggatgtctccagcctgtgtctcgtgtgtcctgctggcctgcagtactcaactgacaatcaatttgtacaayggctcaaagaactgcagggctctgccgccgtggagaagattcccttgatcccgtctaccccagaagagatgagtgaaatgcttcagctctgctcctatgtccgcttcaaggtgccccagcagatcctgcaaggccttgtcgatgtccgcatccctcataacaacttctaccgaaagttgtttttggaaatcgtcagtgagaagtccagatactctctccatcagaacatggacaagatcaaggttccgacgcagatcatctgggggaaacaagaccaggtgctggatgtgtctggggcagacatgttggccaagtcaattgccaactgccaggtggagcttctggaaaactgtgggcactcagtagtgatggaaagacccaggaagacagccaagctcataatcgactttttagcttctgtgcacaacacagacaacaacaagaagctggactgaggccccgactgcagcctgcattctgcacacagcatctgctcccatcccccaagtctgacgcagccaccactctcagggatcctgccccaaatgcggtcggagcgccagtgaccctgaggaagcccgtcccttatccctggtatccacggttccccagagctttggggaccacgcgaaaayctccaagatatttttcacaaaatagaaactcatatggaacaaaataagaaaccccagccatgaaatctaccatgaagtcttcaagttcatgtcactgasaagcttgtgcaaagcagccaccttggaccataattaaatcaaggacattttctttgagacattccttatagttggagactcaagatatttttgttgcatcaggtgtattcccttgcatgggcagtggcttttataggagcattagtcctcattcgctgaaccctgttgtttaggtctaatttaagttttacatagagacccatgtatgactgcagcccattggctgcaagaccagggaggaaagtggcaagctgtagaaaatgtttacacgcatggaggggcattgctcyagccctcagagcgtccggagcagcaggrtacatgggtgggaggttcattcagcacccaccagtcaggtatgttctgagtgaacccacagcagtcgcagaatgagcacctggcagggtgggtttcctaggaataatttattatttttaaaaataggcctaataaagcaataatgttctagacatctgtctaagtaatcagactcaggttccacacacaagcaacaactcgtgggcctyttttctatttcartgtgctactaagaacccttggatgtaacatactagttagttaatgaattctgtgaattctgtgaagagtaatgtgattgaaaataagtctaaacrgctgtaaaagtgaccacaatgacatgaaataaatttaataagtctagatcagcaacatgca

SEQ ID NO: 5383 - DNA, 5070 bp, Homo sapiens
ccctcccatcgcgccgcagaggcgcgcaggtgcgtgaggcggcgcccgcccgggaccctgcagacgtgggccagccatggagcacatccgcacgcccaaggttgaaaatgtccgcttggtagatcgagtgtctcctaaaaaagcagctctaggtactttgtatttgacggctacccatgtcatattcgtggaaaattcacctgacscaagaaaagaaacatggattcttcacagtcagatttccaccattgagaaacaggcaacaaccgctaccggatgccctctgctgattcgctgcaagaactttcagataatacagctcatcatacctcaggaaagagattgccacgacgtgtacatctccctgatacgccttgcaaggccagtgaaatatgaggagttatactgcttttcattcaaccccatgctggataaagaagaaagagagcaaggctgggtgctgatcgatcttagtgaagaatacacgcggatgggcctccctaatcattactggcagctcagcgatgtgaatagagactayagagtytgtgactcttatcctactgaactgtacgttcccaaatcggccacggcacacatcatagtggggagttccaaattccggagtagacggcgatttcctgtcctttcttactattataaagataaccacgcctccatctgccggagcagccagcccctgtccggcttcagtgcccggtgcctrgaggacgagcagatgctccaggccattaggaaagccaatccaggaagtgacttcgtttatgtcgttgacacccggcctaaacttaatgcaatggcaaatcgtgctgcagggaaaggctatgagaatgaagacaattattccaatatcaagtttcagtttatcgggatagagaacatccatgtcatgaggaacagtctgcagaaaatgctggaagtgtgtgaacttaaatctccctccatgagtgatttcctgtggggtctggagaactctggctggttaaggcacattaaagccataatggatgcaggaatcttcattgcaaaggcagtgtcagaggaaggggcaagtgtgcttgttcactgttctgatggctgggacaggaccgctcaggtgtgctcggtggcaagcctgctgctggaccctcactaccggactctgaagggcttcatggtattaattgaaaaggactggatttcctttggtcataagtttaatcaccgatatggcaatctagatggtgacccaaaagaaatctctccagttattgaccagttcattgagtgtgtttggcagttaatggaacaatttccctgtgcctttgagttcaatgagaggtttttgattcacattcaacatcacatttattcctgccagtttggaaacttcctatgtaacagccaaaaggagagacgagaactcaagattcaagaaagaacatactcattatgggctcacctgtggaagaatcgggccgactacctgaatcctctgtttagagctgatcacagccagactcagggaacccttcatctccctacaacaccatgtaacttcatgtacaagttttggagtggaatgtataaccgctttgaaaaggggatgcagccccgacagtcagttacagattacctaatggcagtgaaggaagaaactcagcagctagaggaagaactagaggccctggaagaagtaagacatacttgctttgttaatctattttctgtgcttatttcttgaagagctggaaaaaattcaaaaggtccagttaaattgcactaaggtgaagagtaagcamagtgagcccagcaagcactcagggttttctacctcagacaacagcatagccaacactccccaggattacagtgggaatatgaaatcatttccatcccggagcccttcacaaggcgatgaagattctgctctgattctaacccaagacaatctgaaaagttcagatccagatctgtcagccaacagtgaccaagagtccggggtggaggatttgagctgtcggtctccaagtggtggtgagcatgcaccgagtgaagatagtggcaaggaccgggattctgatgaagccgtgtttctcactgcctgaagtttccctttggagttccaaagtaaaggacacataagcaacacttccaaaaacaagggaacaaggtggtttattgtaaaaacaggaaatggtgcatgtcattgagaactattttaatgcagctatgaaaagggaaaaaagtgcccagttcttgatttcttagatactgaagaggacgtagtcatttcatttatcaaatataaggaaaattattcaccattttgaagctcaccctagactatgaaaattatattcactgcagagcaattacttctgtcattacctgaagtgatcagtatctatcttccttgtcatagcatgcatctctcaaaaagcctccactcctttccctcacatctgtgatcatcatgattcttttagttcacttctagatgcatattttgtgttttctaaagcatctgacattatcctcctttccgaccctcttatacatatttctaaaaacaggcacattggtgagatgcaccctttttagttaatagatgcattcctaaggagcttttaattgcttatctttcaggcataatcatcactttaacttttccttggagcatatattttgaattgtgagaataattttgttgcttttctctgagatctatagtctgtttctcctcattatttaaaaatgctaaaccttgtatctcactttttctctaacactgatttaatagctaacgaggtagaagcaacattcattctcctggtcttacatatgaatttaagtatcagctttcttgtaataaccttttattactgttctagagactacactaccgacagtgtgggccagccaccagcctgatctcaaagtatcacattataaagttagtagataaaacatctgtgagtgaaaatccagtttcaagaaccagagaattgggttgtcatgtctgtttaatgaagggaataggttttgtaatctatcattttagaaattatgtaactggctaatatggtttaattaaccttagtaacatctcatgaccactgactgctgaaagttctgaaaagaatttttgttttgttacactgcacatttaagggagagyccctsccctatcttatgagttaaaaaagacttcactaggtgacctaaattaaacttagtggggaaaagtggccatgtttggacataaataaatggtattcacactgtatggttttaatatattagtacattctagaatgtaaaaggattaaactttacaatttagatcaatattttgaatatgtgaaaggattaatttaaactttacaatttacatcaatattttgaatatctgattttttttaatgggagaattattacatttcgctgaaatgaggacgagggcaagaaagcaacattgctgatctctctagtatgaaagatttggagggagtgttgcaatatatataaatgaaaacatttaattgtgttcatcatatttaaaaatatagaatatattagagaactgtgatttaaaagtactgttaatgtaaaaaataaagcaagtgtaattaattctttcagaatataaaatttgggcattctcygctgagcagttcccaaattaagtacaaggaatgtttattcattttctgcaatatactatatgtaatagggaataccttgctaaaataaaacttaggatatagtggtaatggctttcacatttttataacataacataactcacttcacaaccttcttggagctgtccactcttagaaactctgttgcctaatattgaggatgtggctttaatttcttccgtttgacagtgtatgtctataaaaacaataaacattttttaaaaaatgacaaagtatctatgccaaacagcactatgcttttatttgaaaagcaaatagtataaatatttgatgttttaaaatgtagttttttaatatgacaacttccatatcagagtcrtaaacttttagtcccctcaacttttttacaagacagacattataatttatgtaacatgttcgtctgcttattagaagttaacctagcactgagatttatataaaaggttacatttattgcttattaaaactttactgtactttcacagattcttcagagcatggctaacccaacaagactaaaatatccccaacaagactaaaatatctaataatcaaacattaatcaggaagtgttttattgagagcagtggtttaaagcatagggaataatccagtataaaactgatttgaggcatattacttcccaattagtaatatrtagaatgcaagtaatttattttttaaagttgatatgaaataaataggtaagaattttgaccatgacccagcaaatcagtaactgagctttttatagaatggaaggtgatgatcagagacagaaaccatagaataaawttttattctttaagagcacattagtttactttcttctcctaaaaatgaatctgagctgtccttcaatttaagcatatatatgtgtcaagcaccctctattctgatataaatttcctagtctcaatttatgcctagaaatttctttcaactttgaagtgggtctgtttagtttatatctcactgattgattgatttagaattttcttctattttaagatattaacctttaaatctctacctatgacaaattcgtacactgattagcctagtaactcctaagtattcctctttaattctgatttctatctcatcktgtaaaatcagaatacaaactttcacatgcatttcatttttcctgtggcactgcttctccgatgtgaccaatttttatgaagaaaatatatagccataaaattagaaaaaatggtcacttaatctctgttgcaaaaacagaacccacattcatacgggcatattcaaatgcagattcttttcatcgtgggtgacatacataacctttatgtaaactgatttgtctatttgttaaatgcagataactgatcac

SEQ ID NO: 5384 - DNA, 4649 bp, Homo sapiens
gagagcgcccccgggggcggggcacgcaagtgacggcggcgcgggtggtggagcgctgggcggccaggctccctggctggccggtttgggcgtctgggccgtgaaggtgggacctcctgttccgggccgcaagtttccctctccagccgcccgccgttcgtagcatgtcccccagaactcggggagcgcaggcaggacaggcttagagaagacgcggtccccagcgcttgggccacggacgtcccaccccgctcctctgtcgctggagaaccgccgggccgagccactgggagaagcaggccagagccttccagggcctccggcccgtggacccgaggaggatgagctggctttttcccctgaccaagagcgcctcctcctccgcggctgggtcccccggtggcctcaccagcctccagcagcagaagcagcgcctgatcgagtccctccggaactcacactccagtatagccgaaatacagaaagatgtggaatacagattgccattcaccataaacaacctgacaattaacattaatatattgcttcctccacagtttcctcaggaaaaaccagtgatcagtgtttatccaccaatacgacatcacttaatggataaacaaggagtgtatgttacctctccattagtaaacaattttacaatgcactcagatcttggaaaaattattcagagtctgttggatgagttttggaagaatcctccagttttagctcctacttcaacagcatttccttatctatacagtaacccaagtgggatgtctccttatgcttctcagggttttccatttcttcctccatatcctccacaagaagcaaacaggagtatcacttctttatctgttgctgacactgtttcttcttcaacaacaagtcataccacagccaagcctgccgctccttcatttggtgtcctttcaaatctgccattacccattcccacagtggatgcttcaataccgacaagccaaaatggttttgggtacaagatgccagatgtccctgatgcatttccagaactctcagaactaagtgtgtcacaactcacagatatgaatgaacaagaggaggtattactagaacagtttctgactttgcctcaactaaaacaaattattaccgacaaagatgacttagtaaaaagtattgaggaactagcaagaaaaaatctccttttggagcccagcttggaagccaaaagacaaactgttttagataagtatgaattacttacacagatgaagtccactttcgaaaagaagatgcaaaggcagcatgaacttagtgagagctgtagtgcaagtgcccttcaggcaagattgaaagtagctgcacatgaagctgaggaagaatctgataatattgcagaagayttcttggagggaaagatggaaatagatgattttctcagtagcttcatggaaaagagaacaatttgccactgtagaagagccaaggaagagaaacttcagcaggcgatagcaatgcacagccaatttcatgctccactatagattttcctggaaacatgaactgccaagagaggaatgggacacaaaaccaaacactgttttatatttatggtttgcaaactggcatttcatcagtggctaaattcacagatatcctatatagattgtatacagaactgagactgattttgtaccgattagaatgattgctatgatctttgagaaatttttctgcactatttgcactgaaatgtttatttattgttgataaattgtatcatatttaagttccactgctgttcctcttaccttgattaaatgcctatgcatgtacttttagctagtttttaatattttataaaacttcatttaaatttgtatttttaacttgaagttccatttckttatcaaggatggtatttagatttttttcctcttaaccttttttcaaaaactattttcaactgtgaggaaacccttatttttctttctttgtggataaaactttcaaaagcaatttaagatattcatagtgttaggaaacaccaaacctgcctatgtgccatctcacaaaagaaacttttaatacctacaataaatcaaaagaataaaccagctgttcttatatattgtttcatttttaaaactaaagatgcatttaagaagcaatacaagtaaatattttacctaataggaaaaaaaaaagttgcctttcatttaaaccattccaacagaaattcttatgctaatttaaaacatatatatatctggtaggtttgtggttggataggttttctaaattcctaatgttaaaaacaatctttatgttaatatacactaaatctatacacaaaaaaagtcaatgaacttttctgacctttactgtgagttaccttttcctaagaggaaagctatagtaataagtaaaatttaatttttaggcaatcctgatttttaatgaatttaattgagtgttcttgtatactacattgagcagtttgcttctataccgtgtcacaaaattcatgtatttcttgagaagccctaaaagctcataaaggaaaatgccgtgaactatgtagctcaggcttggtaaggtgccatctaaattacaaaacaaactaatgcataattttgcttaaatttcatcccagtatgattgtcttcccaacaccagcatatagtatagattgtctgtcttttttatattttttagttcttcctgtacatgtttttggcaataaagttataggaagaacaaaattattttgttagaattaaaacatgcttaatatttagtctgtttgtggagggcaggtattcacgtggactgagatacaatgttggatacagaaaataactttcattgtcttcctgacactgtgctaaggacatgctgttaaagcttcaaagtgaccagatgaggaaggaataattaattattactcctgatttgtagataactgagacatacactgtcaaacggaagaaattaaagccacatcctcaatattaggcaacagagtttctaagagtggacagctccaagaaggttgtgaagtgagttatgttatgttataaaaatgtgaaagccattaccactatatcctaagttttattttagcaaggtattccctattacatatagtatattgcagaaaatgaataaacattccttgtacttaatttgggaactgctcagcrgagaatgcccaaattttatattctgaaagaattaattacacttgctttattttttacattaacagtacttttaaatcacagttctctaatatattctatatttttaaatatgatgaacacaattaaatgttttcatttatatatattgcaacactccctccaaatctttcatactagagagatcagcaatgttgctttcttgccctcgtcctcatttcagcgaaatgtaataattctcccattaaaaaaaatcagatattcaaaatattgatgtaaattgtaaagtttaaattaatcctttcacatattcaaaatattgatctaaattgtaaagtttaatccttttacattctagaatgtactaatatattaaaaccatacagtgtgaataccatttatttatgtccaaacatggccacttttccccactaagtttaatttaggtcacctagtgaagtcttttttaactcataagatagggsagggrctctcccttaaatgtgcagtgtaacaaaacaaaaattcttttcagaactttcagcagtcagtggtcatgagatgttactaaggttaattaaaccatattagccagttacataatttctaaaatgatagattacaaaacctattcccttcattaaacagacatgacaacccaattctctggttcttgaaactggattttcactcacagatgttttatctactaactttataatgtgatactttgagatcaggctggtggctggcccacactgtcggtagtgtagtctctagaacagtaataaaaggttattacaagaaagctgatacttaaattcatatgtaagaccaggagaatgaatgttgcttctacctcgttagctattaaatcagtgttagagaaaaagtgagatacaaggtttagcatttttaaataatgaggagaaacagactatagatctcagagaaaagcaacaaaattattctcacaattcaaaatatatgctccaaggaaaagttaaagtgatgattatgcctgaaagataagcaattaaaagctccttaggaatgcatctattaactaaaaagggtgcatctcaccaatgtgcctgtttttagaaatatgtataagagggtcggaaaggaggataatgtcagatgctttagaaaacacaaaatatgcatctagaagtgaactaaaagaatcatgatgatcacagatgtgagggaaaggagtggaggctttttgagagatgcatgctatgacaaggaagatagatactgatcacttcaggtaatgacagaagtaattgctctgcagtgaatataattttcatagtctagggtgagcttcaaaatggtgaataattttccttatatttgataaatgaaatgactacgtcctcttcagtatctaagaaatcaagaactgggcacttttttcccttttcatagctgcattaaaatagt

SEQ ID NO: 5385 - DNA, 2646 bp, Homo sapiens
ggtgctgagcccctgcgcggtttctggtgcgtagagactgtaaatcgctgcgcttctcagtcatcatcatcccagcttttcccggctcgaattcagcctccaactcaagctcgcgggaaagactacctgagaggagaaaagctkctgtccctggaccttcttctgagggtrgagtcggaggctccctgctytccagccgcccagtgacccaagcttaatcttcagcaccacttggggcgaccttttcggtgcaaacctacgattctgtttctcaggattcctccccatcycgcttcgccccggaaaagctgacaagaacttcaggtgtaagccctgagtagtgaggmtctgcggtctccrtggagagctgtgcctggaagagaaggacgctggtgggggctgagatcagagctgtcttctggcccagtwrcccccatgcttctgtcatggctaacagttctaggggctggaatggtcgtcctgcacttcktgcagaaactcctgttcccttacttttgggatgacttctggttcgtgttgaaggtggtgctcattataattcggctgaagaagtaygaaaagagaggggagctggtgactgtgctggataaattcttgagtcatgccaaaagacaacctcggaaacctttcatcatctatgagggagacatctacacctatcaggatgtagacaaaaggagcagcagagtggcccatgtcttcctgaaccattcctctctgaaaaagggggacacggtggctctgctgatgagcaatgagccggacttcgttcacgtgtggttcggcctcgccaagctgggctgcgtggtggcctttctcaacaccaacattcgctccaactccctcctgaattgcatccgcgcctgtgggcccagagccctagtggtgggcgcagatttgcttggaacggtagaagaaatccttccaagcctctcagaaaatatcagtgtttgggggatgaaagattctgttccacaaggtgtaatttcactcaaagaaaaactgagcacctcacctgatgagcccgtgccacgcagccaccatgttgtctcactcctcaagtctacttgtctttacatttttacctctggaacaacaggtctaccaaaagcagctgtgattagtcagctgcaggttttaaggggttctgctgtcctgtgggcttttggttgtactgctcatgacattgtttatataacccttcctctgtatcatagttcagcagctatcctgggaatttctggatgtgttgagttgggtgccacttgtgtgttaaagaagaaattttcagcragccagttttggagtgactgcargaagtatgatgtgactgtgtttcagtatattggagaactttgtcgctacctttgcaaacaatctaagagagaaggagaaaaggatcataaggtgcgtttggcaattggaaatggcatacggagtgatgtatggagagaatttttagacagatttggaaatataaaggtgtgtgaactttatgcagctaccgaatcaagcatatctttcatgaactacactgggagaattggagcaattgggagaacaaatttgttttacaaacttctttccacttttgacttaataaagtatgactttcagaaagatgaacccatgagaaatgagcagggttggtgtattcatgtgaaaaaaggagarcctggacttctcatttctcgagtgaatgcaaaamatcccttctttggctatgctgggccttataagcacacaaaagacaaattgctttgtgatgtttttaagaagggagatgtttaccttaatactggagacttaatagtccaggatcaggacaatttcctttatttttgggaccgtactggagacactttcagatggaaaggagaaaatgtcgcaaccactgaggttgctgatgttattggaatgttggatttcatacaggaagcaaacgtctatggtgtggctatatcaggttatgaaggaagagcaggaatggcttctattattttaaaaccaaatacatctttagatttggaaaaagtttatgaacaagttgtaacatttctaccagcttatgcttgtccackatttttaagaattcaggaaaaaatggaagcaacaggaacattcaaactattgaagcatcagttggtggaagatggatttaatccactgaaaatttctgaaccactttacttcatggataacttgaaaaagtcttatgttctactgaccagggaactttatgatcaaataatgttaggggaaataaaactttaagatttttatatctagaactttcatatgctttcttaggaagagtgagaggggggtatatgattctttatgaaatggggaaagggagctaacattaattatgcatgtactatatttccttaatatgagagataattttttaattgcataagaattttaatttcttttaattgatataaacaktagttgattattctttttatctatttggagattcagtgcataactaagtattttccttaatactaaagattttaaataataaatagtggctagcggtttggacaatcactaaaaatgtactttctaataagtaaaatttctaattttgaataaaagattaaattttactga

SEQ ID NO: 5386 - DNA, 2475 bp, Homo sapiens
gagtcggaggctccctgctytccagccgcccagtgacccaagcttaatcttcagcaccacttggggcgaccttttcggtgcaaacctacgattctgtttctcaggattcctccccatcycgcttcgccccggaaaagctgacaagaacttcaggtgtaagccctgagtagtgaggmtctgcggtctccrtggagagctgtgcctggaagagaaggacgctggtgggggctgagatcagagctgtcttctggcccagtwrcccccatgcttctgtcatggctaacagttctaggggctggaatggtcgtcctgcacttcktgcagaaactcctgttcccttacttttgggatgacttctggttcgtgttgaaggtggtgctcattataattcggctgaagaagtaygaaaagagaggggagctggtgactgtgctggataaattcttgagtcatgccaaaagacaacctcggaaacctttcatcatctatgagggagacatctacacctatcaggatgtagacaaaaggagcagcagagtggcccatgtcttcctgaaccattcctctctgaaaaagggggacacggtggctctgctgatgagcaatgagccggacttcgttcacgtgtggttcggcctcgccaagctgggctgcgtggtggcctttctcaacaccaacattcgctccaactccctcctgaattgcatccgcgcctgtgggcccagagccctagtggtgggcgcagatttgcttggaacggtagaagaaatccttccaagcctctcagaaaatatcagtgtttgggggatgaaagattctgttccacaaggtgtaatttcactcaaagaaaaactgagcacctcacctgatgagcccgtgccacgcagccaccatgttgtctcactcctcaagtctacttgtctttacatttttacctctggaacaacaggtctaccaaaagcagctgtgattagtcagctgcaggttttaaggggttctgctgtcctgtgggcttttggttgtactgctcatgacattgtttatataacccttcctctgtatcatagttcagcagctatcctgggaatttctggatgtgttgagttgggtgccacttgtgtgttaaagaagaaattttcagcragccagttttggagtgactgcargaagtatgatgtgactgtgtttcagtatattggagaactttgtcgctacctttgcaaacaatctaagagagaaggagaaaaggatcataaggtgcgtttggcaattggaaatggcatacggagtgatgtatggagagaatttttagacagatttggaaatataaaggtgtgtgaactttatgcagctaccgaatcaagcatatctttcatgaactacactgggagaattggagcaattgggagaacaaatttgttttacaaacttctttccacttttgacttaataaagtatgactttcagaaagatgaacccatgagaaatgagcagggttggtgtattcatgtgaaaaaaggagarcctggacttctcatttctcgagtgaatgcaaaamatcccttctttggctatgctgggccttataagcacacaaaagacaaattgctttgtgatgtttttaagaagggagatgtttaccttaatactggagacttaatagtccaggatcaggacaatttcctttatttttgggaccgtactggagacactttcagatggaaaggagaaaatgtcgcaaccactgaggttgctgatgttattggaatgttggatttcatacaggaagcaaacgtctatggtgtggctatatcaggttatgaaggaagagcaggaatggcttctattattttaaaaccaaatacatctttagatttggaaaaagtttatgaacaagttgtaacatttctaccagcttatgcttgtccackatttttaagaattcaggaaaaaatggaagcaacaggaacattcaaactattgaagcatcagttggtggaagatggatttaatccactgaaaatttctgaaccactttacttcatggataacttgaaaaagtcttatgttctactgaccagggaactttatgatcaaataatgttaggggaaataaaactttaagatttttatatctagaactttcatatgctttcttaggaagagtgagaggggggtatatgattctttatgaaatggggaaagggagctaacattaattatgcatgtactatatttccttaatatgagagataattttttaattgcataagaattttaatttcttttaattgatataaacaktagttgattattctttttatctatttggagattcagtgcataactaagtattttccttaatactaaagattttaaataataaatagtggctagcggtttggacaatcactaaaaatgtactttctaataagtaaaatttctaattttgaataaaagattaaattttactga

SEQ ID NO: 5387 - DNA, 2011 bp, Homo sapiens
cgcccacccactgtgccaacatggcggcrcccaggtcctaattcgggaaacgtgcaccttgactaattcggttttctgtggctacgagagcaggcttggcgggcggaggcgccagcggatgtctcatgcaaggatcgtctctgtggctaagcctcactttccgctccgcccgggtgctctctagagcccggtttttcgagtggcagtctccagggctgccgaatacagcagcgatggagaacggcaccgggccctacggagaagaacgtccacgtgaagtccaggagacgacagtcaccgagggggctgccaaaatcgcctttcccagtgccaacgaggtcttttataacccggtgcaggaattcaatcgggacctgacgaaggcctgcatgtgctggaaggcctggcagcttcaggcctacgttccattcgatttgccctagaggtgcctgggctcagatctgtggttgcaaacgatgcctccacccgggctgtggatctcatacgccggaatgtccagctcaatgacgtggcccacctggtacagccgagccaagcagatgcccggatgctgatgtaccagcaccagagggtgtcggagaggtttgacgtcatcgatctggacccctatggcagcccagccaccttcctggatgcagctgtgcaggctggttgctgtgtgtgacctgcacagacatggcggtgttggcggggaacagcggggagacgtgctacagcaagtacggggccatggccctcaagagccgggcctgccacgagatggccctgagaatcgtcctgcacagcctggacctccgcgccaactgctaccagcgcttcgtggtgccgctgctcagcatcagcgctgacttctacgtgcgtgtttttgtccgtgtcttcaccggccaggccaaggtcaaggcctcagccagcaagcaggcgctggtgttccagtgtgtgggctgcggggccttccaccttcagcgtctcggcaaagcgtcaggagtccccagcggccgggccaagttctctgcagcctgtggtccccctgtgacccccgagtgtgaacactgtgggcaacgacaccagcttggtggccccatgtgggcagagcccatccatgacctggattttgtgggccgtgtcctggaggctgtgagcgctaaccccggccgcttccacacctcggagcggatccgaggggtcctgagcgtcatcactgaggagctcccggacgtgcctctgtactacaccctggaccagctgagcagcaccatccactgcaacacaccaagcctcctgcagttgcggtcggccctcctccacgctgacttccgggtctcactctcccacgcctgtaagaacgctgtgaagacggatgcccctgcctctgccctctgggacatcatgcgttgctgggaraaggaatgtccggtgaaacgggagcgactatcagagactagcccagcgttccgcattctcagtgtggagcccaggctgcaggccaacttcaccatccgggaagatgccaaccccagctcccgacagcgaggactcaagcgcttccaggctaacccggaggccaactggggtccccggcctcgtgcccggccagggtgagtggtggtaaggtgggggtggggctcakccagggaaagaaggggtaaagggcagatggggtcccacctactcctcccctcgcacaggggcaaggcggccgacgaagctatggaggagagacgcaggctgcttcagaacaagcggaaggagccgccggaagatgtkgcccakcgggctgcccggctcaagacatttccttgcaagakgtttaaggagggcacctgtcaacgcggggaccagtgctgctactcccacagccccccgacacccagggtttctgctgatgctgcccctgactgtccagagacctccaaccagaccccccctggacctggggctgccgctgggccaggcatagactgaaccaataaagagatgtcacgtcaccttc

SEQ ID NO: 5388 - DNA, 1258 bp, Homo sapiens
rcccaggtcctaattcgggaaacgtgcaccttgactaattcggttttctgtggctacgagagcaggaattcaatcgggacctgacgtgagcaggggtcagacgttagcctggcatcgrctagtgggtcagtgtggatggcggggkcggggtatgagctagtcctctgtctcccaccagatgtgctgtgatcaccgagtttgctcgcattcagcttggggccaaaggaatccagatcaaggttccaggagagaaggacacgcaaaaagtggtcgtggacttgtcagagcaagaggaggaaaaggttgaactgaaagagagtgaaaacctggcctcaggagaccaacctcgcacagcggccgtgggggagatctgtgaggaaggcctgcatgtgctggaaggcctggcagcttcaggcctacgttccattcgatttgccctagaggtgcctgggctcagatctgtggttgcaaacgatgcctccacccgggctgtggatctcatacgccggaatgtccagctcaatgacgtggcccacctggtacagccgagccaagcagatgcccggatgctgatgtaccagcaccagagggtgtcggagaggtttgacgtcatcgatctggacccctatggcagcccagccaccttcctggatgcagctgtgcaggctgtgagtgaaggagggttgctgtgtgtgacctgcacagacatggcggtgttggcggggaacagcggggagacgtgctacagcaagtacggggccatggccctcaagagccgggcctgccacgagatggccctgagaatcgtcctgcacagcctggacctccgcgccaactgctaccagcgcttcgtggtgccgctgctcagcatcagcgctgacttctacgtgcgtgtttttgtccgtgtcttcaccggccaggccaaggtcaaggcctcagccaggtcagcccgggggcagagagcggtggtggattgagagaggagacaggaccttgccctgggggatctggggcttcttaagggacagagccagtctaagggaggagttggggtgtcgtggtcacgctgggaactcgtggccactggtaccccccacagcaagcaggcgctggtgttccagtgtgtgggctgcggggccttccaccttcagcgtctcggcaaagcgtcaggagtccccagcggccggtgagcagggaggaaggagaagaagsggagtcccagggttttcctccctcccyaccaaccacccctctctgt

SEQ ID NO: 5389 - DNA, 2141 bp, Homo sapiens
cgcccacccactgtgccaacatggcggcrcccaggtcctaattcgggaaacgtgcaccttgactaattcggttttctgtggctacgagagcaggcttggcgggcggaggcgccagcggatgtctcatgcaaggatcgtctctgtggctaagcctcactttccgctccgcccgggtgctctctagagcccggtttttcgagtggcagtctccagggctgccgaatacagcagcgatggagaacggcaccgggccctacggagaagaacgtccacgtgaagtccaggagacgacagtcaccgagggggctgccaaaatcgcctttcccagtgccaacgaggtcttttataacccggtgcaggaattcaatcgggacctgacatgtgctgtgatcaccgagtttgctcgcattcagcttggggccaaaggaatccagatcaaggttccaggagagaaggacacgcaaaaagtggtcgtggacttgtcagagcaagaggaggaaaaggttgaactgaaagagagtgaaaacctggcctcaggagaccaacctcgcacagcggccgtgggggagatctgtgaggaaggcctgcatgtgctggaaggcctggcagcttcaggcctacgttccattcgatttgccctagaggtgcctgggctcagatctgtggttgcaaacgatgcctccacccgggctgtggatctcatacgccggaatgtccagctcaatgacgtggcccacctggtacagccgagccaagcagatgcccggatgctgatgtaccagcaccagagggtgtcggagaggtttgacgtcatcgatctggacccctatggcagcccagccaccttcctggatgcagctgtgcaggctgtgagtgaaggagggttgctgtgtgtgacctgcacagacatggcggtgttggcggggaacagcggggagacgtgctacagcaagtacggggccatggccctcaagagccgggcctgccacgagatggccctgagaatcgtcctgcacagcctggacctccgcgccaactgctaccagcgcttcgtggtgccgctgctcagcatcagcgctgacttctacgtgcgtgtttttgtccgtgtcttcaccggccaggccaaggtcaaggcctcagccagcaagcaggcgctggtgttccagtgtgtgggctgcggggccttccaccttcagcgtctcggcaaagcgtcaggagtccccagcggccgggccaagttctctgcagcctgtggtccccctgtgacccccgagtgtgaacactgtgggcaacgacaccagcttggtggccccatgtgggcagagcccatccatgacctggattttgtgggccgtgtcctggaggctgtgagcgctaaccccggccgcttccacacctcggagcggatccgaggggtcctgagcgtcatcactgaggagctcccggacgtgcctctgtactacaccctggaccagctgagcagcaccatccactgcaacacaccaagcctcctgcagttgcggtcggccctcctccacgctgacttccgggtctcactctcccacgcctgtaagaacgctgtgaagacggatgcccctgcctctgccctctgggacatcatgcgttgctgggaraaggaatgtccggtgaaacgggagcgactatcagagactagcccagcgttccgcattctcagtgtggagcccaggctgcaggccaacttcaccatccgggaagatgccaaccccagctcccgacagcgaggactcaagcgcttccaggctaacccggaggccaactggggtccccggcctcgtgcccggccagggggcaaggcggccgacgaagctatggaggagagacgcaggctgcttcagaacaagcggaaggagccgccggaagatgtkgcccakcgggctgcccggctcaagacatttccttgcaagakgtttaaggagggcacctgtcaacgcggggaccagtgctgctactcccacagccccccgacacccagggtttctgctgatgctgcccctgactgtccagagacctccaaccagaccccccctggacctggggctgccgctgggccaggcatagactgaaccaataaagagatgtcacgtcaccttctcccgatt

SEQ ID NO: 5390 - DNA, 2054 bp, Homo sapiens
cgcccacccactgtgccaacatggcggcrcccaggtcctaattcgggaaacgtgcaccttgactaattcggttttctgtggctacgagagcaggcttggcgggcggaggcgccagcggatgtctcatgcaaggatcgtctctgtggctaagcctcactttccgctccgcccgggtgctctctagagcccggtttttcgagtggcagtctccagggctgccgaatacagcagcgatggagaacggcaccgggccctacggagaagaacgtccacgtgaagtccaggagacgacagtcaccgagggggctgccaaaatcgcctttcccagtgccaacgaggtcttttataacccggtgcaggaattcaatcgggacctgacatgtgctgtgatcaccgagtttgctcgcattcagcttggggccaaaggaatccagatcaaggttccaggagagaaggacacgcaaaaagtggtcgtggacttgtcagagcaagaggaggaaaaggttgaactgaaagagagtgaaaacctggcctcaggagaccaacctcgcacagcggccgtgggggagatctgtgaggaaggcctgcatgtgctggaaggcctggcagcttcaggcctacgttccattcgatttgccctagaggtgcctgggctcagatctgtggttgcaaacgatgcctccacccgggctgtggatctcatacgccggaatgtccagctcaatgacgtggcccacctggtacagccgagccaagcagatgcccggatgctgatgtaccagcaccagagggtgtcggagaggtttgacgtcatcgatctggacccctatggcagcccagccaccttcctggatgcagctgtgcaggctgtgagtgaaggagggttgctgtgtgtgacctgcacagacatggcggtgttggcggggaacagcggggagacgtgctacagcaagtacggggccatggccctcaagagccgggcctgccacgagatggccctgagaatcgtcctgcacagcctggacctccgcgccaactgctaccagcgcttcgtggtgccgctgctcagcatcagcgctgacttctacgtgcgtgtttttgtccgtgtcttcaccggccaggccaaggtcaaggcctcagccagggccaagttctctgcagcctgtggtccccctgtgacccccgagtgtgaacactgtgggcaacgacaccagcttggtggccccatgtgggcagagcccatccatgacctggattttgtgggccgtgtcctggaggctgtgagcgctaaccccggccgcttccacacctcggagcggatccgaggggtcctgagcgtcatcactgaggagctcccggacgtgcctctgtactacaccctggaccagctgagcagcaccatccactgcaacacaccaagcctcctgcagttgcggtcggccctcctccacgctgacttccgggtctcactctcccacgcctgtaagaacgctgtgaagacggatgcccctgcctctgccctctgggacatcatgcgttgctgggaraaggaatgtccggtgaaacgggagcgactatcagagactagcccagcgttccgcattctcagtgtggagcccaggctgcaggccaacttcaccatccgggaagatgccaaccccagctcccgacagcgaggactcaagcgcttccaggctaacccggaggccaactggggtccccggcctcgtgcccggccagggggcaaggcggccgacgaagctatggaggagagacgcaggctgcttcagaacaagcggaaggagccgccggaagatgtkgcccakcgggctgcccggctcaagacatttccttgcaagakgtttaaggagggcacctgtcaacgcggggaccagtgctgctactcccacagccccccgacacccagggtttctgctgatgctgcccctgactgtccagagacctccaaccagaccccccctggacctggggctgccgctgggccaggcatagactgaaccaataaagagatgtcacgtcaccttctcccgatt

SEQ ID NO: 5391 - DNA, 2147 bp, Homo sapiens
cgcccacccactgtgccaacatggcggcrcccaggtcctaattcgggaaacgtgcaccttgactaattcggttttctgtggctacgagagcaggcttggcgggcggaggcgccagcggatgtctcatgcaaggatcgtctctgtggctaagcctcactttccgctccgcccgggtgctctctagagcccggtttttcgagtggcagtctccagggctgccgaatacagcagcgatggagaacggcaccgggccctacggagaagaacgtccacgtgaagtccaggagacgacagtcaccgagggggctgccaaaatcgcctttcccagtgccaacgaggtcttttataacccggtgcaggaattcaatcgggacctgacatgtgctgtgatcaccgagtttgctcgcattcagcttggggccaaaggaatccagatcaaggttccaggagagaaggacacgcaaaaagtggtcgtggacttgtcagagcaagaggaggaaaaggttgaactgaaagagagtgaaaacctggcctcaggagaccaacctcgcacagcggccgtgggggagatctgtgaggaaggcctgcatgtgctggaaggcctggcagcttcaggcctacgttccattcgatttgccctagaggtgcctgggctcagatctgtggttgcaaacgatgcctccacccgggctgtggatctcatacgccggaatgtccagctcaatgacgtggcccacctggtacagccgagccaagcagatgcccggatgctgatgtaccagcaccagagggtgtcggagaggtttgacgtcatcgatctggacccctatggcagcccagccaccttcctggatgcagctgtgcaggctgtgagtgaaggagggttgctgtgtgtgacctgcacagacatggcggtgttggcggggaacagcggggagacgtgctacagcaagtacggggccatggccctcaagagccgggcctgccacgagatggccctgagaatcgtcctgcacagcctggacctccgcgccaactgctaccagcgcttcgtggtgccgctgctcagcatcagcgctgacttctacgtgcgtgtttttgtccgtgtcttcaccggccaggccaaggtcaaggcctcagccagcaagcaggcgctggtgttccagtgtgtgggctgcggggccttccaccttcagcgtctcggcaaagcgtcaggagtccccagcggccgggccaagttctctgcagcctgtggtccccctgtgacccccgagtgtgaacactgtgggcaacgacaccagcttggtggccccatgtgggcagagcccatccatgacctggattttgtgggccgtgtcctggaggctgtgagcgctaaccccggccgcttccacacctcggagcggatccgaggggtcctgagcgtcatcactgaggagctcccggacgtgcctctgtactacaccctggaccagctgagcagcaccatccactgcaacacaccaagcctcctgcagttgcggtcggccctcctccacgctgacttccgggtctcactctcccacgcctgtaagaacgctgtgaagacggatgcccctgcctctgccctctgggacatcatgcgttgctgggtgagggaraaggaatgtccggtgaaacgggagcgactatcagagactagcccagcgttccgcattctcagtgtggagcccaggctgcaggccaacttcaccatccgggaagatgccaaccccagctcccgacagcgaggactcaagcgcttccaggctaacccggaggccaactggggtccccggcctcgtgcccggccagggggcaaggcggccgacgaagctatggaggagagacgcaggctgcttcagaacaagcggaaggagccgccggaagatgtkgcccakcgggctgcccggctcaagacatttccttgcaagakgtttaaggagggcacctgtcaacgcggggaccagtgctgctactcccacagccccccgacacccagggtttctgctgatgctgcccctgactgtccagagacctccaaccagaccccccctggacctggggctgccgctgggccaggcatagactgaaccaataaagagatgtcacgtcaccttctcccgatt

SEQ ID NO: 5392 - DNA, 561 bp, Homo sapiens
tggtcatctcagttcttttctcaccttgactgcaagatgaaactccttgtgctagctgtgctgctcacagtggccgccgccgmcagcggcatcagccctcgggccgtgtggcagttccgcaaaatgatcaagtgcgtgatcccggggagtgaccccttyttggaatacaacaactacggctgctactgtggcttgggggrctcaggcacccccgtggatgaactggacaagtgctgccagacacatgacaactgctaygaccaggccaagaagctggacagctgtaaatttctgctggacammccgtacacccacacctattcatactcrtgctctggctcggcaatcacctgtagcagcaaaaacaaagagtgtgaggccttcatttgcaactgcgaccgcaacgctgccatctgcttttcaaaagctccatataacaaggcacacaagaacctggacaccaagaagtattgtcagagttgaatatcacctctcaaaagcatcacctctatctgcctcatctcacactgtactctccaataaagcaccytgttgaaagac

SEQ ID NO: 5393 - DNA, 1516 bp, Homo sapiens
ggscgttgtcactcgactaccaagatggcggcccccgggagctgtgcyctatggagctattgcggccgtgggtggtcgcgggcgatgcggggctgccagctcctcgggcttcgtagctcttggcccggggacctactaagtgctcggctcttgtcccaagagaagcgggcagcggaaacgcactttgggtttgagactgtgtcggaagaggagaaggggggcaaagtctatcaggtgtttgaaagtgtggctaagaagtatgatgtgatgaatgatatgatgagtcttggtatccatcgtgtttggaaggatttgctgctctggaagatgcacccrcttcctgggacccagctgcttgatgttgctggaggcacaggtgacattgcattccggttccttaattatgttcagtcccagcatcagagaaaacagaagaggcagttaagggcccaacaaaatttatcctgggaagaaattrccaaagagtaccagaatgaagaagattccttgggcgggtctcgtgtcgtggtgtgtgacatcaacaaggagatgctaaaggttggaaagcagaaagccttggctcaaggatacagagctggacttgcatgggtattaggagatgctgaagaactgccctttgatgatgacaagtttgatatttacaccattgcctttgggatccggaatgtcacacacattgatcaggcactccaggaagctcatcgggtgctgaaaccaggaggacggtttctctgtctggaatttagccaagtgaacaatcccctcatatccaggctttatgatctatatagcttccaggtcatccctgtcctgggagaggtcatcgctggagactggaagtcctatcagtaccttgtagagagtatccgaaggtttccgtctcaggaagagttcaaggacatgatagaagatgcaggctttcacaaggtgacttacgaaagtctaacatcaggcattgtggccattcattctggcttcaaactttaattcctttcctatcatggagcatgaaccagtcatatcctgttgaaagcctggaactgaaggataatctggcaaatgagacagcagcagagcatctcctcttaaggatacgtgccttggactcatgtttgaatcgaacagtctcraagtggaagaacaaattcttgtcacttttttacagctttctttggagctgcttcagtccatctcccagaggcatttggtctgtatctttgctcaactgctaatttctcttggctgtagggtgtgtggttaaggtacaaccacccctaaagctcagttttgaagtgagtgtatttatagcttctctgctggtgctgccttctagagggatgatagatcatttgaacccartgacaatttttaacyagaaaatttaattgtacctgaatcaacctttcagcctaggacgaagtytaggcccaagtcagagtattaatgatcatgagaattgtgtgctgaaccagtaaacgagtttaccttttgatgg

SEQ ID NO: 5394 - DNA, 711 bp, Homo sapiens
gtgcagacatggccaagtctaagaaccacaccacacacagccagtcccgaaatggcacagaaatggtatcaagaaaccccgatcacaaagatatgaatcctatttttttggagtggaccccaagttcctgaggaacatgcgctttgccaagaagcacaacaagaaaggcctaaaaaagatgcaggccaacagtgccagggccacgagtgcacgtgcygacgctatcaaggcccttgtaaagcccaaggaggttaagcccgagatcccaaagggtgtcagccgcaagctcgatccacttgcctacattgcccacccccaggcttgggaaatgtgctcattcctgcattgccaaggggctcaagctatgtcggtcaaaggccaaggccaaagatcaaaccaaggcccaggctgcagctccagcttaggctcccaaaggtgcccggacacctacgaaggyttcagagtagatatctctgtctgccaatgtgaggacagaaggactgcactattgtgtgtgtttctcccatgtcagtctatcaggtgtttgaaagtgtggctaagaagtatgatgtgatgaatgatatgatgagtcttggtatccatcgtgtttggaaggatttgctgctctggaagatgcacccrcttcctgggacccagctgcttgatgttgctggaggcacaggtaatgtcgagtttggtatccttcactac

SEQ ID NO: 5395 - DNA, 1998 bp, Homo sapiens
gtctgccaaggaccatgggtgccgckctggggacaggcacgcggctggctccctggccgggccgggcctgcggcgccctcccgcgctggacacccaccgcgcccgcccaaggctgccactccaagcctggcccggcgcgccctgtgcccctgaagaagcgcggatacgatgtcaccaggaaccctcatctcaacaaggggatggcctttacccttgaagaaaggctgcagcttggaatccacggcctaatcccgccctgctttctgagccaggacgtccagctcctccgaatcatgagatattacgagcggcagcagagtgacctggacaagtacatcattctcatgacactccaagaccgkaacgagaagctcttctaccgagtgctgacttcggaygtggagaagttcatgccaatcgtgtacacgcctaccgtggggctrgcctgtcagcactatggcctgactttccgcaggccccgtggactgttcatcaccattcatgacaaaggtcatcttgcaacaatgctgaattcttggccagaagacaatattaaggccgtggtggtgactgatggggagcgcatcctgggcctgggagacctgggctgctayggcatgggcatccctgtgggcaagctggccctgtacacggcatgcggaggggtgaacccgcagcagtgcctccctgtgctgctggacgtcggcaccaacaatgaggagctgctcagagaccctctgtacatcggcctgaaacaccagcgcgtgcacgggaaggcatacgatgacttgctggatgagttcatgcaggctgtgacagacaagtttggaataaattgcctcatccaatttgaagacttcgccaatgccaatgccttccgcctgctcaacaaataccgtaacaagtactgcatgttcaatgatgacatccaaggcacagcctccgttgctgtggcagggatcttggctgctctgcgaatcaccaasaacaagctttccaatcacgtgtttgttttccaaggtgcaggcgaggcagctatgggcattgcccacctccttgtcatggccctagagaaagaaggtgtaccgaaggcagaggccacaagaaagatctggatggtggactctaaagggctcattgtcaaggggaggagccacctgaaccatgaaaaggagatgtttgcccaagaccatcctgaagtcaactccctggaggaggtrgtgaggctggtgaagcccacagccatcataggtgttgctgccatcgcaggagccttcacggagcagattctgagggacatggcctccttccacgagckccctatcatctttgccctgagcaaccccaccagcaaggccgartgcacggctgagaagtgctaccgggtcaccgagggccgagggatttttgccagtggaagtccttttaagagtgtgactctggaagatggcaagaccttcattcctgggcagggaaacaatgcttacgtgttccccggggtggcactgggagtcatcgccggcgggatccggcacatcccagatgagatcttcctcctgacagcagagcaaattgcccaggaagtctctgagcagcatctgtcccaggggagactctayccaccactcagcaccatccgagacgtgtctttgagaattgccatcaaagttctcgactacgcgtacaaacacaacctggcttcctactacccagagcctaaggacaaggaggcttttgtaagatccctggtctacactccagactatgactcctttacactggacagctacacttggcccaaggaagccatgaatgttcagacggtctgaggcagtctcagaggctagtatggggctagatgaagcccagagtaacacccacaatataaatgggttccaaaatggcccaagtgaatccttgtcgctgtgttttttcttttaaactttctggtgtgagargagatgccaaggcatacagtgaataaaagccttgtctctg

SEQ ID NO: 5396 - DNA, 2214 bp, Homo sapiens
gtgcatttagtcttgccaagatggagagtctcaggcgggcattctgagctgcttcttgtcactggggaaaaccacgtgcacgcagtgctgaggcgccccacgcgcgtcctcaggggaagccaggcactgagaacaaaggttgtgggaccgctctttgaggaactcaccagctccgcgagctcgcggccgccagcgcggtccacccattggcgggagaggactcacagaccgcagctcctcaccccgcctgctccgcagcgggaccgcgtagacctcagctccccgagcagcgcaggtgggccagggaaggagaggaccgaggcaagccaccacgcgggattaggggtctgccaaggaccatgggtgccgckctggggacaggcacgcggctggctccctggccgggccgggcctgcggcgccctcccgcgctggacacccaccgcgcccgcccaaggctgccactccaagcctggcccggcgcgccctgtgcccctgaagaagcgcggatacgatgtcaccaggaaccctcatctcaacaagtcccaggggatggcctttacccttgaagaaaggctgcagcttggaatccacggcctaatcccgccctgctttctgagccaggacgtccagctcctccgaatcatgagatattacgagcggcagcagagtgacctggacaagtacatcattctcatgacactccaagaccgkaacgagaagctcttctaccgagtgctgacttcggaygtggagaagttcatgccaatcgtgtacacgcctaccgtggggctrgcctgtcagcactatggcctgactttccgcaggccccgtggactgttcatcaccattcatgacaaaggtcatcttgcaacaatgctgaattcttggccagaagacaatattaaggccgtggtggtgactgatggggagcgcatcctgggcctgggagacctgggctgctayggcatgggcatccctgtgggcaagctggccctgtacacggcatgcggaggggtgaacccgcagcagtgcctccctgtgctgctggacgtcggcaccaacaatgaggagctgctcagagaccctctgtacatcggcctgaaacaccagcgcgtgcacgggaaggcatacgatgacttgctggatgagttcatgcaggctgtgacagacaagtttggaataaattgcctcatccaatttgaagacttcgccaatgccaatgccttccgcctgctcaacaaataccgtaacaagtactgcatgttcaatgatgacatccaaggttactggggtttaaaatggccttcaggaagactctattatttttccactttggcccctccctctgccaaaagcaccttgtgaaaagtgagttcctcaaataagaagatgaagaaactatgacacagagaggcgaagtaacttgataagatcaaaacagtaagtaaatggtatagccaaattttgaacacaagctacctgactctagaggccataaccttatccactacactataatgcaattttgtggttctctgtgcatcactgaagaaaaaacagatgctcacataattttttcttattttgtttctttggaaaaataaagccaattggctaatgctattgagatctaagaaaacttctgttcttgcttagaaatgttagttcttttatccattaaacacacacaaaaaaagctgaatttagtgatgtctcatattatctcatacatatctgtccaccacaggctctaaatggaaaaggagaaatagcaggtcatgaaactgttttaatgaatgtttaagtcagaaaatgtatataaatgacttttattccatatttaaacttaaatttttatataggttttaagtgttatctcttttccacaaattatttattacaaaaagctcaagttgtgtttaacaaaatggacttataacaaatgtcttttaaaagattctaaatttgttaattcttaagctacaaccataaggacttcctgtgtcagcttcatttgtgatttccagatccttagttaactttaaggatatgaatattcttttgtaagtaaccttggaaaactggacaattttatgacatatgtgctttaataactggtgtagctgttagctaccaggttaaaaaggatgtatagatggctttatgttgatgtgaatacttgttttgaagatattttttaaatgtggatagg

SEQ ID NO: 5397 - DNA, 948 bp, Homo sapiens
aggttgtgggaccgctctttgaggaactcaccagctccgcgagctcgcggccgccagcgcggtccacccattggcgggagaggactcacagaccgcagctcctcaccccgcctgctccgcagcgggaccgcgtagacctcagctccccgagcagcgcaggtctgccaaggaccatgggtgccgckctggggacaggcacgcggctggctccctggccgggccgggcctgcggcgccctcccgcgctggacacccaccgcgcccgcccaaggctgccactccaagcctggcccggcgcgccctgtgcccctgaagaagcgcggatacgatgtcaccaggaaccctcatctcaacaaggggatggcctttacccttgaagaaaggctgcagcttggaatccacggcctaatcccgccctgctttctgagccaggacgtccagctcctccgaatcatgagatattacgagcggcagcagagtgacctggacaagtacatcattctcatgacactccaagaccgkaacgagaagctcttctaccgagtgctgacttcggaygtggagaagttcatgccaatcgtgtacacgcctaccgtggggctrgcctgtcagcactatggcctgactttccgcaggccccggtgagcccccgtggagtgagggctctgggaggggctgcctcatagaggggaataaattctttccgcccttcatgcatattgggactctggaggctaactctgattgggtcagtggtccaacaaaaagacatttgatttcaagcacttgctcagaaaaatgaccccgtaagcagagaaatgagtgaaaagagtagctagcaagggtttattgactcttcttcacctccaaataataaatgcccagcatgctcagagttggcctgagagagagttcaggttgtatttctctcattatctacctgtcactt

SEQ ID NO: 5398 - DNA, 2349 bp, Homo sapiens
gtgcatttagtcttgccaagatggagagtctcaggcgggcattctgagctgcttcttgtcactggggaaaaccacgtgcacgcagtgctgaggcgccccacgcgcgtcctcaggggaagccaggcactgagaacaaaggttgtgggaccgctctttgaggaactcaccagctccgcgagctcgcggccgccagcgcggtccacccattggcgggagaggactcacagaccgcagctcctcaccccgcctgctccgcagcgggaccgcgtagacctcagctccccgagcagcgcaggtgggccagggaaggagaggaccgaggcaagccaccacgcgggattaggggtctgccaaggaccatgggtgccgckctggggacaggcacgcggctggctccctggccgggccgggcctgcggcgccctcccgcgctggacacccaccgcgcccgcccaaggctgccactccaagcctggcccggcgcgccctgtgcccctgaagaagcgcggatacgatgtcaccaggaaccctcatctcaacaagtcccaggggatggcctttacccttgaagaaaggctgcagcttggaatccacggcctaatcccgccctgctttctgagccaggacgtccagctcctccgaatcatgagatattacgagcggcagcagagtgacctggacaagtacatcattctcatgacactccaagaccgkaacgagaagctcttctaccgagtgctgacttcggaygtggagaagttcatgccaatcgtgtacacgcctaccgtggggctrgcctgtcagcactatggcctgactttccgcaggccccgtggactgttcatcaccattcatgacaaaggtcatcttgcaacaatgctgaattcttggccagaagacaatattaaggccgtggtggtgactgatggggagcgcatcctgggcctgggagacctgggctgctayggcatgggcatccctgtgggcaagctggccctgtacacggcatgcggaggggtgaacccgcagcagtgcctccctgtgctgctggacgtcggcaccaacaatgaggagctgctcagagaccctctgtacatcggcctgaaacaccagcgcgtgcacgggaaggcatacgatgacttgctggatgagttcatgcaggctgtgacagacaagtttggaataaattgcctcatccaatttgaagacttcgccaatgccaatgccttccgcctgctcaacaaataccgtaacaagtactgcatgttcaatgatgacatccaaggcacagcctccgttgctgtggcagggatcttggctgctctgcgaatcaccaasaacaagctttccaatcacgtgtttgttttccaaggtgcaggcgaggcagctatgggcattgcccacctccttgtcatggccctagagaaagaaggtgtaccgaaggcagaggccacaagaaagatctggatggtggactctaaagggctcattgtcaaggggaggagccacctgaaccatgaaaaggagatgtttgcccaagaccatcctgaagtcaactccctggaggaggtrgtgaggctggtgaagcccacagccatcataggtgttgctgccatcgcaggagccttcacggagcagattctgagggacatggcctccttccacgagckccctatcatctttgccctgagcaaccccaccagcaaggccgartgcacggctgagaagtgctaccgggtcaccgagggccgagggatttttgccagtggaagtccttttaagagtgtgactctggaagatggcaagaccttcattcctgggcagggaaacaatgcttacgtgttccccggggtggcactgggagtcatcgccggcgggatccggcacatcccagatgagatcttcctcctgacagcagagcaaattgcccaggaagtctctgagcagcatctgtcccaggggagactctayccaccactcagcaccatccgagacgtgtctttgagaattgccatcaaagttctcgactacgcgtacaaacacaacctggcttcctactacccagagcctaaggacaaggaggcttttgtaagatccctggtctacactccagactatgactcctttacactggacagctacacttggcccaaggaagccatgaatgttcagacggtctgaggcagtctcagaggctagtatggggctagatgaagcccagagtaacacccacaatataaatgggttccaaaatggcccaagtgaatccttgtcgctgtgttttttcttttaaactttctggtgtgagargagatgccaaggcatacagtgaataaaagccttgtctctg

SEQ ID NO: 5399 - DNA, 2701 bp, Homo sapiens
gtgcatttagtcttgccaagatggagagtctcaggcgggcattctgagctgcttcttgtcactggggaaaaccacgtgcacgcagtgctgaggcgccccacgcgcgtcctcaggggaagccaggcactgagaacaaaggttgtgggaccgctctttgaggaactcaccagctccgcgagctcgcggccgccagcgcggtccacccattggcgggagaggactcacagaccgcagctcctcaccccgcctgctccgcagcgggaccgcgtagacctcagctccccgagcagcgcaggtgggccagggaaggagaggaccgaggcaagccaccacgcgggattaggggtctgccaaggaccatgggtgccgckctggggacaggcacgcggctggctccctggccgggccgggcctgcggcgccctcccgcgctggacacccaccgcgcccgcccaaggctgccactccaagcctggcccggcgcgccctgtgcccctgaagaagcgcggatacgatgtcaccaggaaccctcatctcaacaagtcccaggggatggcctttacccttgaagaaaggctgcagcttggaatccacggcctaatcccgccctgctttctgagccaggacgtccagctcctccgaatcatgagatattacgagcggcagcagagtgacctggacaagtacatcattctcatgacactccaagaccgkaacgagaagctcttctaccgagtgctgacttcggaygtggagaagttcatgccaatcgtgtacacgcctaccgtggggctrgcctgtcagcactatggcctgactttccgcaggccccgtggactgttcatcaccattcatgacaaaggtcatcttgcaacaatgctgaattcttggccagaagacaatattaaggaggatctgggcagcacatcatcgtatccacctcatgcggtatgatgccaagtgctctacatagattaactcattggattttcatggcaaccctgtaagaggccgtggtggtgactgatggggagcgcatcctgggcctgggagacctgggctgctayggcatgggcatccctgtgggcaagctggccctgtacacggcatgcggaggggtgaacccgcagcagtgcctccctgtgctgctggacgtcggcaccaacaatgaggagctgctcagagaccctctgtacatcggcctgaaacaccagcgcgtgcacgggaaggcatacgatgacttgctggatgagttcatgcaggctgtgacagacaagtttggaataaattgcctcatccaatttgaagacttcgccaatgccaatgccttccgcctgctcaacaaataccgtaacaagtactgcatgttcaatgatgacatccaaggaacaacctgccacactttcagctgcccatggcatttatgggcacaagtcatgttccagcacatccctggacccatgggcttctcagagtggttacctcgaaacagctaagtagcttcctttccagttttaaacccctagtgcatagcccaagagcaccccaaaaatgcaggttaatgatggagataactttatttgccaaattttgtaatttggagcttaagaaccactgtttttcctcttgagttctggcctgtaccaagtgcagaaatagcttcccaaaggaaaaaaatgggcaacagtaccaaatgctgctgagaggtcaagaaagaagaaggctgagaactgattactgaatttggccacctggaggtacttggggaccctgacaagaggcacagcctccgttgctgtggcagggatcttggctgctctgcgaatcaccaasaacaagctttccaatcacgtgtttgttttccaaggtgcaggcgaggcagctatgggcattgcccacctccttgtcatggccctagagaaagaaggtgtaccgaaggcagaggccacaagaaagatctggatggtggactctaaagggctcattgtcaaggggaggagccacctgaaccatgaaaaggagatgtttgcccaagaccatcctgaagtcaactccctggaggaggtrgtgaggctggtgaagcccacagccatcatagggccgagggatttttgccagtggaagtccttttaagagtgtgactctggaagatggcaagaccttcattcctgggcagggaaacaatgcttacgtgttccccggggtggcactgggagtcatcgccggcgggatccggcacatcccagatgagatcttcctcctgacagcagagcaaattgcccaggaagtctctgagcagcatctgtcccaggggagactctayccaccactcagcaccatccgagacgtgtctttgagaattgccatcaaagttctcgactacgcgtacaaacacaacctggcttcctactacccagagcctaaggacaaggaggcttttgtaagatccctggtctacactccagactatgactcctttacactggacagctacacttggcccaaggaagccatgaatgttcagacggtctgaggcagtctcagaggctagtatggggctagatgaagcccagagtaacacccacaatataaatgggttccaaaatggcccaagtgaatccttgtcgctgtgttttttcttttaaactttctggtgtgagargagatgccaaggcatacagtgaataaaagccttgtctctg

SEQ ID NO: 5400 - DNA, 2343 bp, Homo sapiens
gtgcatttagtcttgccaagatggagagtctcaggcgggcattctgagctgcttcttgtcactggggaaaaccacgtgcacgcagtgctgaggcgccccacgcgcgtcctcaggggaagccaggcactgagaacaaaggttgtgggaccgctctttgaggaactcaccagctccgcgagctcgcggccgccagcgcggtccacccattggcgggagaggactcacagaccgcagctcctcaccccgcctgctccgcagcgggaccgcgtagacctcagctccccgagcagcgcaggtgggccagggaaggagaggaccgaggcaagccaccacgcgggattaggggtctgccaaggaccatgggtgccgckctggggacaggcacgcggctggctccctggccgggccgggcctgcggcgccctcccgcgctggacacccaccgcgcccgcccaaggctgccactccaagcctggcccggcgcgccctgtgcccctgaagaagcgcggatacgatgtcaccaggaaccctcatctcaacaaggggatggcctttacccttgaagaaaggctgcagcttggaatccacggcctaatcccgccctgctttctgagccaggacgtccagctcctccgaatcatgagatattacgagcggcagcagagtgacctggacaagtacatcattctcatgacactccaagaccgkaacgagaagctcttctaccgagtgctgacttcggaygtggagaagttcatgccaatcgtgtacacgcctaccgtggggctrgcctgtcagcactatggcctgactttccgcaggccccgtggactgttcatcaccattcatgacaaaggtcatcttgcaacaatgctgaattcttggccagaagacaatattaaggccgtggtggtgactgatggggagcgcatcctgggcctgggagacctgggctgctayggcatgggcatccctgtgggcaagctggccctgtacacggcatgcggaggggtgaacccgcagcagtgcctccctgtgctgctggacgtcggcaccaacaatgaggagctgctcagagaccctctgtacatcggcctgaaacaccagcgcgtgcacgggaaggcatacgatgacttgctggatgagttcatgcaggctgtgacagacaagtttggaataaattgcctcatccaatttgaagacttcgccaatgccaatgccttccgcctgctcaacaaataccgtaacaagtactgcatgttcaatgatgacatccaaggcacagcctccgttgctgtggcagggatcttggctgctctgcgaatcaccaasaacaagctttccaatcacgtgtttgttttccaaggtgcaggcgaggcagctatgggcattgcccacctccttgtcatggccctagagaaagaaggtgtaccgaaggcagaggccacaagaaagatctggatggtggactctaaagggctcattgtcaaggggaggagccacctgaaccatgaaaaggagatgtttgcccaagaccatcctgaagtcaactccctggaggaggtrgtgaggctggtgaagcccacagccatcataggtgttgctgccatcgcaggagccttcacggagcagattctgagggacatggcctccttccacgagckccctatcatctttgccctgagcaaccccaccagcaaggccgartgcacggctgagaagtgctaccgggtcaccgagggccgagggatttttgccagtggaagtccttttaagagtgtgactctggaagatggcaagaccttcattcctgggcagggaaacaatgcttacgtgttccccggggtggcactgggagtcatcgccggcgggatccggcacatcccagatgagatcttcctcctgacagcagagcaaattgcccaggaagtctctgagcagcatctgtcccaggggagactctayccaccactcagcaccatccgagacgtgtctttgagaattgccatcaaagttctcgactacgcgtacaaacacaacctggcttcctactacccagagcctaaggacaaggaggcttttgtaagatccctggtctacactccagactatgactcctttacactggacagctacacttggcccaaggaagccatgaatgttcagacggtctgaggcagtctcagaggctagtatggggctagatgaagcccagagtaacacccacaatataaatgggttccaaaatggcccaagtgaatccttgtcgctgtgttttttcttttaaactttctggtgtgagargagatgccaaggcatacagtgaataaaagccttgtctctg

SEQ ID NO: 5401 - DNA, 4103 bp, Homo sapiens
cacagtggcttccgggcccggacgccatttccagcggttgctggttctgacgggttgtagtctgccaggacaatgagttatgactaccatcagaactggggccgtgatgggggtccccgcagctccggtgggggctatggaggggggccagcagggggtcatggaggtaaccgaggctccggaggaggcggcggcggcggagggggtggtcgaggcggcaggggccggcatcccgggcacctgaaaggccgcgaaatcggcatgtggtacgcgaaaaaacaggggcagaagaacaaggaagcggagaggcaagagagagctgtagtacacatggatgaacgacgagaagaacaaattgtacagttactgaattctgttcaagcgaagaatgataaagagtcagaagcacagatatcctggtttgctcctgaggatcatggatacggtactgaagtttctactaagaacacaccatgctcagagaacaaacttgacatccaggaaaagaagttgataaatcaaraaaaaaaaatgtttagaatcaggaacagatcatatattgaccgagattctgagtatctcttgcaagaaaatgaaccagatggaactttagaccaaaaattattggaagatttacaaaagaaaaaaaatgaccttcggtatattgaaatgcagcatttcagagaaaagctgccttcgtatggaatgcaaaaggaattggtaaatttaattgataaccatcaggtaacagtaataagtggtgaaactggttgtggcaaaaccactcaagttactcagttcattttggataactacattgaaagaggaaaaggatctgcttgcagaatagtttgtactcagccaagaagaattagtgccatttcagttgcrgaaagagtagctgcagaaagggcagaatcttgtggcagtggtaatagtactggatatcaaattcgtctccagagtcggttgccaaggaaacagggttctatcttatactgtacaacaggaatcatccttcagtggctccagtcagacccgtatttgtccagtgttagtcatatcgtacttgatgaaatccatgaaagaaatctgcagtcagatgttttaatgactgttgttaaagaccttmtcaattttcgatctgacttgaaagtaatattgatgagtgcaacattgaatgcagaaaagttttcagaatattttggtaactgtccaatgatacatatacctggttttacctttccggttgtggaatatcttttggaagatgtaattgaaaaaataaggtatgttccagaacaaaaagaacacagatsccagtttaagaggggtttcatgcaagggcatgtaaatagacaagaaaaagaagaaaaagaagcaatatataaagaacgttggccagattatgtaagggaactgcgaagaaggtattctgcaagtactgtagatgttatagaaatgatggaggatgataaagttgatctgaatttgattgttgccctcatccgatacattgttttggaagaagaggatggtgcgatactggtctttctgccaggctgggacaatatcagcactttacatgatctcttgatgtcacaagtaatgtttaaatcagataaatttttaattatacctttacattcactgatgcctacagttaaccagacacaggtgtttaaaagaacccctcctggtgttcggaaaatagtaattgctaccaacattgcggagactagcattaccatagatgatgtcgtttatgtgatagatggaggaaaaataaaagagacgcattttgatactcagaacaatatcagtacaatgtccgctgagtgggttagtaaagctaatgccaaacagagaaaaggtcgagctggaagagttcaacctggtcattgctatcatctgtataatggtcttagagcaagtcttctagatgactatcaactgccagaaattttgagaactcctttggaagaactttgtttacaaataaagattttaaggctargkggaattgcttattttctgagtagattaatggacccaccatcaaatgaggcagtgttactctccataagacacctgatggagctgaacgctttggataaacaagaagaattgacacctcttggagtccacttggcacgattacccgttgagccacatattggaaaaatgattctttttggagcactgttctgctgcttagacccagtactcactattgctgctagtctcagtttcaaagatccatttgtcattccactgggaaaagaaaagattgcagatgcaagaagaaaggaattggcaaaggatactagaagtgatcacttaacagttgtgaatgcgtttgagggctgggaagaggctaggcgacgtggtttcagatacgaaaaggactattgctgggaatattttctgtcttcaaacacactgcagatgctgcataacatgaaaggacagtttgctgagcatcttcttggagctggatttgtaagcagtagaaatcctaaagatccagaatctaatataaattcagataatgagaagataattaaagctgtcatctgtgctggtttatatcccaaagttgctaaaattcgactaaatttgggtaaaaaaagaaaaatggtaaaagtttacacaaaaaccgatggcctggttgctgttcatcctaaatctgttaatgtggagcaaacagactttcactacaactggcttatctatcacctaaagatgagaacaagcagtatatacttgtatgactgcacagaggtttccccatactgtctcttgttttttggaggtgacatttccatccagaaggataacgatcaggaaactattgctgtagatgagtggattgtatttcagtctccagcaagaattgcccatcttgttaaggaattaagaaaggaactagatattcttctgcaagagaagattgaaagtcctcatcctgtagactggaatgacactaaatccagagactgtgcagtactgtcagctattatagacttgatcaaaacacaggaaaaggcaactcccaggaactttccgccacgattccaggatggatattacagctgacagcttttcaggggtggtctgaaaagccagtttgacagccattcttcatcattgtttaaattttggctggatgccaaaccctgggacatgaacaattttcatgtgtaaggtagaagccttcagtaggtagtaaagacttaatgtgcatgacttgatgttatatgtagagatatatatatatatatatatataccataaaagcaatatgttctctgatcatatactctgctgtggtcatgcccactctttgggagtatattccctttatatatattgagtattgtaccacttgagaaattcctttgttctgttatacaaaattaatctttctgctcataatgattgatgataccaccagtaaaaataggatgtttaccccaaaacaagtgtcaattaagaatttgaacacaaccacattttttaaaatgaaacttctatcggaagtaaattaatttgttgtaataaagtccagtatttaataaaatgtacaatgttaaatctcagccaacctcttggattggtttctacattttcacctatggcttggttcatttgatatttttactatttttaaaacacgtgccctttttatatcaccctgtgcctcataatacagcaattgagagcacggtctggagcctgattacctcagttccagtctcagctctgtcagttagtcagtgtcttggcttctctctctttttccttatcttgtaagatacagttggcccttcatatccatgcattccacatctgtggattcaaacaactgtggatagaagatatttggggaaaaaaaggatggttgtgtctatactgaacatgtgcagacttttttccttgtcattccctaaacaatacagtttaacagctatttatatagtatttacattgtattaggtattataaataatctagagatgacttaaagaatatgggaggttgtgcctaggtaacatgcaaatactacgccattttattataaaagacttgagcatccatgg

SEQ ID NO: 5402 - DNA, 3609 bp, Homo sapiens
ctcccgccggtcacgtgacccgcctctgcgcgcccccgggcacgaccccggagtctccgcgggcggccagggcgcgcgtgcgcggaggttctcctcgtccgcccgttgttcagcgagsgaggctctgcgcgtgccgcagctgacggggaaactgaggcacggagcgggcctgtaggagctgtccaggccatctccaaccatgggagtgaggcacccgccctgctcccaccggctcctggccgtctgcgccctcgtgtccttggcarccgctgcactcctggggcacatcctactccatgatttcctgctggttcccygagagctgagtggctcctccccagtcctggaggagactcacccagctcaccagyagggagccagcagaccagggccccgggatgcccaggcacaccccggccgtcccagagcagtgcccacacagtgcgacgtcccccscaacagccgcttcrattgcgcccctgacaaggccatcacccaggaacagtgcgaggcccgcggctgytgctacatccctgcaaagcaggggctgcagggagcccagatggggcagccctggtgcttcttcccacccagctaccccagctacaagctggagaacctgagctcctctgaaatgggctacacrgccaccctgacccgtaccacccccaccttcttccccaaggacatcctgaccctgcggctggacgtgatgatggagactgagaaccgcctccacttcacgatcaaagatccagctaacaggcgctacgaggtgcccttggagaccccgcrtgtccacagccgggcaccgtccccactctacagcgtggagttctcygaggagcccttcggggtgatcgtgcrccggcagctggacggccgcgtgctgctgaacacgacrgtggcgcccctgttctttgcggaccagttccttcagctgtccacctcgctgccctcgcagtatatcacaggcctcgccragcacctcagtcccctgatgctcagcaccagctggaccaggatcaccctgtggaaccgggaccttgcgcccacgcccggtgcgaacctctacgggtctcaccctttctacctggcgctggaggacggcgggtcggcwcacggggtgttcctgctaaacagcaatgccayggatgtggtcctgcagccgagccctgcccttagctggaggtcgacaggtgggatcctggatgtctacatcttcctgggcccagagcccaagagcgtggtgcagcagtacctggacgttgtgggatacccgttcatgccgccatactggggcctgggcttccacctgtgccgctggggctactcctccaccgctatcacccgccaggtggtggagaacatgaccagggcccacttccccctggacgtccaryggaacgacctggactacatggactcccggagggacttcacgttcaacaaggatggcttccgggacttcccggccatggtgcaggagctgcaccagggcggccggcgctacatgatgatcgtggatcctgccatcagcagctcgggccctgccgggagctacaggccctaygacgagggtctgcggaggggggttttcatcaccaacgagaccggccagccgctgattrggaaggtayggcccgggtccactgccttccccgacttcaccaaccccacagccctggcctggtgrgaggacatggtggctgagttccatgaccaggtgcccttcgacggcatgtggattgacrygaacragccttccaacttcatcagrggctctgaggacggctgccccaacaatgagctggagaacccaccctacgtgcytggggtggttggggggaccctccaggcggccaccatctgtgcctccagccacyagtttctcyccacacactacaacctgcacaacctctacrgcctgaccgaagccatcgcctcccacagggcgctggtgaaggctcgggggacacgcccatttgtgatctccyrctcgacctttgctggccacggccgatacgcyggccactggacgggggacgtgtggagctcctgggagcagctcgcctcctccgtgccagaaatcctgcagtttaacctgctgggggtrcctctggtcrgggccvamgtctgsrgcttcctgggcaacacctcagaggagctgtgtgtgcgctggacccagctgggggccttctaccccttcatgcggaaccacaacagcctgctcagtctgccccaggagccgtacagcttcagcragccggcccagcaggccatgaggaaggccctcaccctgcgctacgcactcctcccccacctctacacrctgttccaccaggcccacgtygcgggggagaccgtggccyggcccctcttcctggagttccccaaggactctagcacctggactgtggaccaccagctcctgtrsggggaggccctgctcatcaccccagtgctccaggccgggaaggccgaagtgactggctacttccccttgggcacatggtacgacctgcagacggtgccartagaggcccttggcagcctcccacccccacctgcagctccccgtgagccagccatccacagcgaggggcagtgggtgacgctgccggcccccctggacaccatcaacrtccacctcygggctgggtacatcatccccctgcagggccctggcctcacaaccacagagtcccgccagcagcccatggccctggctgtggccctgaccaagggtggrgaggccygaggggagctgttctgggaygatggagagagcctggaagtgctggagcgaggggcctacacacaggtcatcttcctggccaggaataacacgatcgtgaatgagctggtacgtgtgaccagtgagggagctggcctgcagctgcagaaggtgactgtcctgggcgtggccacggcgccccagcaggtcctctccaacggtgtccctgtctccaacttcayctacagccccgacaccaaggtcctggacatctgtgtctcgctgttgatgggagagcagtttctcgwcagctggtgttagccrggcggagtgtgttagtctctccagagggaggctggttccccagggaagcagagcctgtgtgcgggcagcagctgtgtgcgggcctggrggttgcatgtgtcacctggagctgggcactaaccattccaagccgccgcatcgcttgtttccacctcctgggccggggctctggcccccaacgtgtctaggagagctttctccctagatcgcactgtgggcyggggccctggagggctgctctgtgttaataagattgtaaggtttgccctcctcacctgttgccggcatgcgggtagtattagccmcccccctccatctgttcccagcaccggagaagggggtgctcaggtggaggtgtggggtaygcacctgagctcctgcttcgcgcctgctgctctgccccaacgcgaccgctkcccggctgcccagagggctggatgcctgccggtccccgagcaagcctgggaacycaggaaaattcmcaggacttgggagattytaaatcttaagtgcaattatttttaataaaaggggcatttggaatcagc

SEQ ID NO: 5403 - DNA, 3850 bp, Homo sapiens
gcgcctgcgcgggaggccgcgtcacgtgacccaccgcggccccgccccgcgacgagctcccgccggtcacgtgacccgcctctgcgcgcccccgggcacgaccccggagtctccgcgggcggccagggcgcgcgtgcgcggaggtgagccgggccggggctgcggggcttccctgagcgcsggccgggtcggtggggcggtcggctgcccgcgcggcctctcagttgggaaagctgaggttgtcgccggggccgcgggtggaggtcggggatgaggcagcaggtaggacagtgacctcggtgacgcgaaggaccccggccacctctaggttctcctcgtccgcccgttgttcagcgagsgaggctctgcgcgtgccgcagctgacggggaaactgaggcacggagcgggcctgtaggagctgtccaggccatctccaaccatgggagtgaggcacccgccctgctcccaccggctcctggccgtctgcgccctcgtgtccttggcarccgctgcactcctggggcacatcctactccatgatttcctgctggttcccygagagctgagtggctcctccccagtcctggaggagactcacccagctcaccagyagggagccagcagaccagggccccgggatgcccaggcacaccccggccgtcccagagcagtgcccacacagtgcgacgtcccccscaacagccgcttcrattgcgcccctgacaaggccatcacccaggaacagtgcgaggcccgcggctgytgctacatccctgcaaagcaggggctgcagggagcccagatggggcagccctggtgcttcttcccacccagctaccccagctacaagctggagaacctgagctcctctgaaatgggctacacrgccaccctgacccgtaccacccccaccttcttccccaaggacatcctgaccctgcggctggacgtgatgatggagactgagaaccgcctccacttcacgatcaaagatccagctaacaggcgctacgaggtgcccttggagaccccgcrtgtccacagccgggcaccgtccccactctacagcgtggagttctcygaggagcccttcggggtgatcgtgcrccggcagctggacggccgcgtgctgctgaacacgacrgtggcgcccctgttctttgcggaccagttccttcagctgtccacctcgctgccctcgcagtatatcacaggcctcgccragcacctcagtcccctgatgctcagcaccagctggaccaggatcaccctgtggaaccgggaccttgcgcccacgcccggtgcgaacctctacgggtctcaccctttctacctggcgctggaggacggcgggtcggcwcacggggtgttcctgctaaacagcaatgccayggatgtggtcctgcagccgagccctgcccttagctggaggtcgacaggtgggatcctggatgtctacatcttcctgggcccagagcccaagagcgtggtgcagcagtacctggacgttgtgggatacccgttcatgccgccatactggggcctgggcttccacctgtgccgctggggctactcctccaccgctatcacccgccaggtggtggagaacatgaccagggcccacttccccctggacgtccaryggaacgacctggactacatggactcccggagggacttcacgttcaacaaggatggcttccgggacttcccggccatggtgcaggagctgcaccagggcggccggcgctacatgatgatcgtggatcctgccatcagcagctcgggccctgccgggagctacaggccctaygacgagggtctgcggaggggggttttcatcaccaacgagaccggccagccgctgattrggaaggtayggcccgggtccactgccttccccgacttcaccaaccccacagccctggcctggtgrgaggacatggtggctgagttccatgaccaggtgcccttcgacggcatgtggattgacrygaacragccttccaacttcatcagrggctctgaggacggctgccccaacaatgagctggagaacccaccctacgtgcytggggtggttggggggaccctccaggcggccaccatctgtgcctccagccacyagtttctcyccacacactacaacctgcacaacctctacrgcctgaccgaagccatcgcctcccacagggcgctggtgaaggctcgggggacacgcccatttgtgatctccyrctcgacctttgctggccacggccgatacgcyggccactggacgggggacgtgtggagctcctgggagcagctcgcctcctccgtgccagaaatcctgcagtttaacctgctgggggtrcctctggtcrgggccvamgtctgsrgcttcctgggcaacacctcagaggagctgtgtgtgcgctggacccagctgggggccttctaccccttcatgcggaaccacaacagcctgctcagtctgccccaggagccgtacagcttcagcragccggcccagcaggccatgaggaaggccctcaccctgcgctacgcactcctcccccacctctacacrctgttccaccaggcccacgtygcgggggagaccgtggccyggcccctcttcctggagttccccaaggactctagcacctggactgtggaccaccagctcctgtrsggggaggccctgctcatcaccccagtgctccaggccgggaaggccgaagtgactggctacttccccttgggcacatggtacgacctgcagacggtgccartagaggcccttggcagcctcccacccccacctgcagctccccgtgagccagccatccacagcgaggggcagtgggtgacgctgccggcccccctggacaccatcaacrtccacctcygggctgggtacatcatccccctgcagggccctggcctcacaaccacagagtcccgccagcagcccatggccctggctgtggccctgaccaagggtggrgaggccygaggggagctgttctgggaygatggagagagcctggaagtgctggagcgaggggcctacacacaggtcatcttcctggccaggaataacacgatcgtgaatgagctggtacgtgtgaccagtgagggagctggcctgcagctgcagaaggtgactgtcctgggcgtggccacggcgccccagcaggtcctctccaacggtgtccctgtctccaacttcayctacagccccgacaccaaggtcctggacatctgtgtctcgctgttgatgggagagcagtttctcgwcagctggtgttagccrggcggagtgtgttagtctctccagagggaggctggttccccagggaagcagagcctgtgtgcgggcagcagctgtgtgcgggcctggrggttgcatgtgtcacctggagctgggcactaaccattccaagccgccgcatcgcttgtttccacctcctgggccggggctctggcccccaacgtgtctaggagagctttctccctagatcgcactgtgggcyggggccctggagggctgctctgtgttaataagattgtaaggtttgccctcctcacctgttgccggcatgcgggtagtattagccmcccccctccatctgttcccagcaccggagaagggggtgctcaggtggaggtgtggggtaygcacctgagctcctgcttcgcgcctgctgctctgccccaacgcgaccgctkcccggctgcccagagggctggatgcctgccggtccccgagcaagcctgggaacycaggaaaattcmcaggacttgggagattytaaatcttaagtgcaattatttttaataaaaggggcatttggaatcagc

SEQ ID NO: 5404 - DNA, 5712 bp, Homo sapiens
tgcggcgcgtcttccggcgcccgcggaggaggcgagggtgggacgctgggcggagcccgagtttaggaagaggaggggacggctgtcatcaatgaagtcatattcataatctagtcctctctccctctgtttctgtactctgggtgactcagagagggaagagattcagccagcacactcctcgcgagcaagcattactctactgactggcagagacaggagargtagatgtccacgcccacagaccctggtgcgatgccccacccagggccttcgccggggcctgggccttcccctgggccaattcttgggcctagtccaggaccaggaccatccccaggttccgtccacagcatgatggggccaagtcctggacctccaagtgtctcccatcctatgccracratggggtccacagacttcccacaggaaggcatgcatcaaatgcataagcccatcgatggtatacatgacaaggggattgtagaagacatccattgtggatccatgaagggcactggtatgcgaccacctcacccaggcatgggccctccccagagtccaatggatcaacacagccaaggttatatgtcaccacacccatctccattaggagccccagagcacgtctccagccctatgtctggaggaggcccaactccacctcagatgccaccaagccagccgggrgccctcatcccaggtgatccgcaggccatgagccagcccaacagaggtccctcacctttcagtcctgtccagctgcatcagcttcgagctcagattttagcttataaaatgctggcccgaggccagcccctccccgaaacgctgcagcttgcagtccaggggaaaaggacgttgcctggcttgcagcaacaacagcagcagcarcarcagcagcagcagcmgcagcagcagcagcarcagcagcaacagcagccgcagcagcagccgccgcaaccacagacgcagcarcaacagcagccggcccttgttaactacaacagaccatctggcccggggccggagctgagcggcccgagcaccccgcagaagctgccggtgcccgcgcccggcggccggccctcgcccgcgccccccgcagccgcgcagccgcccgcggccgcagtgcccgggccctcagtgccgcagccggccccggggcagccctcgcccgtcctccagctgcagcagaagcagagccgcatcagccccatccagaaaccgcaaggcctggaccccgtggaaattctgcaagagcgggaatacagacttcaggcccgcatagctcataggatacaagaactggaaaatctgcctggctctttgccaccagatttaagaaccaaagcaaccgtggaactaaaagcacttcggttactcaatttccagcgtcagctgagacaggaggtggtggcctgcatgcgcagggacacgaccctggagacggctctcaactccaaagcatacaaacggagcaagcgccagactctgagagaagctcgcatgaccgagaagctggagaagcagcagaagattgagcaggagaggaaacgccgtcagaaacaccaggaatacctgaacagtattttgcaacatgcaaaagattttaaggaatatcatcggtctgtggccggaaagatccagaagctctccaaagcagtggcaacttggcatgccaacactgaaagagagcagaagaaggagacagagcggattgaaaaggagagaatgcggcgactgatggctgaagatgaggagggttatagaaaactgattgatcaaaagaaagacaggcgtttagcttaccttttgcagcagaccgatgagtatgtagccaatctgaccaatctggtttgggagcacaagcaagcccaggcagccaaagagaagaagaagaggaggaggaggaagaagaaggctgaggagaatgcagagggtggggagtctgccctgggaccggatggagagcccatagatgagagcagccagatgagtgacctccctgtcaaagtgactcacacagaaaccggcaaggttctgttcggaccrgaagcacccaaagcaagtcagctggacgcctggctggaaatgaatcctggttatgaagttgcccctagatctgacagtgaagagagtgattctgattatgaggaagaggatgaggaagaagagtccagtaggcaggaaaccgaagagaaaatactcctggatccaaatagcgaagaagtttctgagaaggatgctaagcagatcattgagacagctaagcaagacgtggatgatgaatacagcatgcagtacagtgccaggggctcccagtcctactacaccgtggctcatgccatctcggagagggtggagaaacagtctgccctcctaattaatgggaccctaaagcattaccagctccagggcctggaatggatggtttccctgtataataacaacttgaacggaatcttagccgatgaaatggggcttggaaagaccatacagaccattgcactcatcacttatctgatggagcacaaaagactcaatggcccctatctcatcattgttcccctttcgactctatctaactggacatatgaatttgacaaatgggctccttctgtggtgaagatttcttacaagggtactcctgccatgcgtcgctcccttgtcccccagctacggagtggcaaattcaatgtcctcttgactacttatgagtatattataaaagacaagcacattcttgcaaagattcggtggaaatacatgatagtggacgaaggccaccgaatgaagaatcaccactgcaagctgactcaggtcttgaacactcactatgtggcccccagaaggatcctcttgactgggaccccgctgcagaataagctccctgaactctgggccctcctcaacttcctcctcccaacaatttttaagagctgcagcacatttgaacaatggttcaatgctccatttgccatgactggtgaaagggtggacttaaatgaagaagaaactatattgatcatcaggcgtctacataaggtgttaagaccatttttactaaggagactgaagaaagaagttgaatcccagcttcccgaaaaagtggaatatgtgatcaagtgtgacatgtcagctctgcagaagattctgtatcgccatatgcaagccaaggggatccttctcacagatggttctgagaaagataagaaggggaaaggaggtgctaagacacttatgaacactattatgcagttgagaaaaatctgcaaccacccatatatgtttcagcacattgaggaatcctttgctgaacacctaggctattcaaatggggtcatcaatggggctgaactgtatcgggcctcagggaagtttgagctgcttgatcgtattctgccaaaattgagagcgactaatcaccgagtgctgcttttctgccagatgacatctctcatgaccatcatggaggattattttgcttttcggaacttcctttacctacgccttgatggcaccaccaagtctgaagatcgtgctgctttgctgaagaaattcaatgaacctggatcccagtatttcattttcttgctgagcacaagagctggtggcctgggcttaaatcttcaggcagctgatacagtggtcatctttgacagcgactggaatcctcatcaggatctgcaggcccaagaccgagctcaccgcatcgggcagcagaacgaggtccgggtactgaggctctgtaccgtgaacagcgtggaggaaaagatcctcgcggccgcaaaatacaagctgaacgtggatcagaaagtgatccaggcgggcatgtttgaccaaaagtcttcaagccacgagcggagggcattcctgcaggccatcttgkagcatgargaggaaaatgaggaagaagatgaagtaccggacgatgagactctgaaccaaatgattgctcgacgagaagaagaatttgacctttttatgcggatggacatggaccggcggagggaagatgcccggaacccgaaacggaagccccgtttaatggaggaggatgagctgccytcctggatcattaaggatgacgctgaagtagaaaggctcacctgtgaagaagaggaggagaaaatatttgggagggggtcccgccagcgccgtgacgtggactacagtgacgccctcacggagaagcagtggctaagggccatcgaagacggcaatttggaggaaatggaagaggaagtacggcttaagaagcgaaaaagacgaagaaatgtggataaagatcctgcaaaagaagatgtggaaaamgctaagaagagaagaggccgccctcccgctgagaaactgtcaccaaatccccccaaactgacaaagcagatgaacgctatcatcgatactgtgataaactacaaagatagttcagggcgacagctcagtgaagtcttcattcagttaccttcaaggaaagaattaccagaatactatgaattaattaggaagccagtggatttcaaaaaaataaaggaaaggattcgtaatcataagtaccggagcctaggcgacctggagaaggatgtmatgcttctctgtcacaacgctcagacgttcaacctggagggatcccagatctatgaagactccatcgtcttacagtcagtgtttaagagtgcccggcagaaaattgccaaagaggaagagagtgaggatgaaagcaatgaagaggaggaagaggaagatgaagaagagtcagagtccgaggcaaaatcagtcaaggtgaaaattaagctcaataaaaaagatgasaaaggccgggacaaagggaaaggcaagaaaaggccaaatcgaggaaaagccaaacctgtagtgagcgattttgacagcratgaggagcaggatgaacgtgaacagtcagaaggaagtgggacggatgatgagtgatcagtatggacctttttccttggtagaactgaattccttcctcccctgtctcatttctacccagtgagttcatttgtcatataggcactgggttgtttctatatcatcatcgtctataaactagctttaggatagtgycagacaaacatatgatatcatggtgtaaaaaacacacacatacacaaatatttgtaacatattgtgaccaaatgggcctcaaagattcagattgaaacaaacaaaaagcttttgatggaaaatatgtgggtggatagtatatttctatgggtgggtctaatttggtaacggtttgattgtgcctggttttatcacctgttcagatgagaagatttttgtcttttgtagcactgataaccaggagaagccattaaaagccactggttattttatttttcatcaggcaattttcgaggtttttatttgttcggtattgtttttttacactgtggtacatataagcaactttaataggtgataaatgtacagtagttagatttcacctgcatatacatttttccattttatgctctatgatctgaacaaaagctttttgaattgtataagatttatgtctactgtaaacattgcttaatttttttgctcttgatttaaaaaaaagcttcttttgtcaccctgatctcctrtgttaccaatgtgtatcgtctccttctccctaaagtgtacttaatctttgctttctttgcacaatgtctttggttgcaagtcataagcctgaggcaaata

SEQ ID NO: 5405 - DNA, 5827 bp, Homo sapiens
tgcggcgcgtcttccggcgcccgcggaggaggcgagggtgggacgctgggcggagcccgagtttaggaagaggaggggacggctgtcatcaatgaagtcatattcataatctagtcctctctccctctgtttctgtactctgggtgactcagagagggaagagattcagccagcacactcctcgcgagcaagcattactctactgactggcagagacaggagargtagatgtccacgcccacagaccctggtgcgatgccccacccagggccttcgccggggcctgggccttcccctgggccaattcttgggcctagtccaggaccaggaccatccccaggttccgtccacagcatgatggggccaagtcctggacctccaagtgtctcccatcctatgccracratggggtccacagacttcccacaggaaggcatgcatcaaatgcataagcccatcgatggtatacatgacaaggggattgtagaagacatccattgtggatccatgaagggcactggtatgcgaccacctcacccaggcatgggccctccccagagtccaatggatcaacacagccaaggttatatgtcaccacacccatctccattaggagccccagagcacgtctccagccctatgtctggaggaggcccaactccacctcagatgccaccaagccagccgggrgccctcatcccaggtgatccgcaggccatgagccagcccaacagaggtccctcacctttcagtcctgtccagctgcatcagcttcgagctcagattttagcttataaaatgctggcccgaggccagcccctccccgaaacgctgcagcttgcagtccaggggaaaaggacgttgcctggcttgcagcaacaacagcagcagcarcarcagcagcagcagcmgcagcagcagcagcarcagcagcaacagcagccgcagcagcagccgccgcaaccacagacgcagcarcaacagcagccggcccttgttaactacaacagaccatctggcccggggccggagctgagcggcccgagcaccccgcagaagctgccggtgcccgcgcccggcggccggccctcgcccgcgccccccgcagccgcgcagccgcccgcggccgcagtgcccgggccctcagtgccgcagccggccccggggcagccctcgcccgtcctccagctgcagcagaagcagagccgcatcagccccatccagaaaccgcaaggcctggaccccgtggaaattctgcaagagcgggaatacagacttcaggcccgcatagctcataggatacaagaactggaaaatctgcctggctctttgccaccagatttaagaaccaaagcaaccgtggaactaaaagcacttcggttactcaatttccagcgtcagctgagacaggaggtggtggcctgcatgcgcagggacacgaccctggagacggctctcaactccaaagcatacaaacggagcaagcgccagactctgagagaagctcgcatgaccgagaagctggagaagcagcagaagattgagcaggagaggaaacgccgtcagaaacaccaggaatacctgaacagtattttgcaacatgcaaaagattttaaggaatatcatcggtctgtggccggaaagatccagaagctctccaaagcagtggcaacttggcatgccaacactgaaagagagcagaagaaggagacagagcggattgaaaaggagagaatgcggcgactgatggctgaagatgaggagggttatagaaaactgattgatcaaaagaaagacaggcgtttagcttaccttttgcagcagaccgatgagtatgtagccaatctgaccaatctggtttgggagcacaagcaagcccaggcagccaaagagaagaagaagaggaggaggaggaagaagaaggctgaggagaatgcagagggtggggagtctgccctgggaccggatggagagcccatagatgagagcagccagatgagtgacctccctgtcaaagtgactcacacagaaaccggcaaggttctgttcggaccrgaagcacccaaagcaagtcagctggacgcctggctggaaatgaatcctggttatgaagttgcccctagatctgacagtgaagagagtgattctgattatgaggaagaggatgaggaagaagagtccagtaggcaggaaaccgaagagaaaatactcctggatccaaatagcgaagaagtttctgagaaggatgctaagcagatcattgagacagctaagcaagacgtggatgatgaatacagcatgcagtacagtgccaggggctcccagtcctactacaccgtggctcatgccatctcggagagggtggagaaacagtctgccctcctaattaatgggaccctaaagcattaccagctccagggcctggaatggatggtttccctgtataataacaacttgaacggaatcttagccgatgaaatggggcttggaaagaccatacagaccattgcactcatcacttatctgatggagcacaaaagactcaatggcccctatctcatcattgttcccctttcgactctatctaactggacatatgaatttgacaaatgggctccttctgtggtgaagatttcttacaagggtactcctgccatgcgtcgctcccttgtcccccagctacggagtggcaaattcaatgtcctcttgactacttatgagtatattataaaagacaagcacattcttgcaaagattcggtggaaatacatgatagtggacgaaggccaccgaatgaagaatcaccactgcaagctgactcaggtcttgaacactcactatgtggcccccagaaggatcctcttgactgggaccccgctgcagaataagctccctgaactctgggccctcctcaacttcctcctcccaacaatttttaagagctgcagcacatttgaacaatggttcaatgctccatttgccatgactggtgaaagggtggacttaaatgaagaagaaactatattgatcatcaggcgtctacataaggtgttaagaccatttttactaaggagactgaagaaagaagttgaatcccagcttcccgaaaaagtggaatatgtgatcaagtgtgacatgtcagctctgcagaagattctgtatcgccatatgcaagccaaggggatccttctcacagatggttctgagaaagataagaaggggaaaggaggtgctaagacacttatgaacactattatgcagttgagaaaaatctgcaaccacccatatatgtttcagcacattgaggaatcctttgctgaacacctaggctattcaaatggggtcatcaatggggctgaactgtatcgggcctcagggaagtttgagctgcttgatcgtattctgccaaaattgagagcgactaatcaccgagtgctgcttttctgccagatgacatctctcatgaccatcatggaggattattttgcttttcggaacttcctttacctacgccttgatggcaccaccaagtctgaagatcgtgctgctttgctgaagaaattcaatgaacctggatcccagtatttcattttcttgctgagcacaagagctggtggcctgggcttaaatcttcaggcagctgatacagtggtcatctttgacagcgactggaatcctcatcaggatctgcaggcccaagaccgagctcaccgcatcgggcagcagaacgaggtccgggtactgaggctctgtaccgtgaacagcgtggaggaaaagatcctcgcggccgcaaaatacaagctgaacgtggatcagaaagtgatccaggcgggcatgtttgaccaaaagtcttcaagccacgagcggagggcattcctgcaggccatcttgkagcatgargaggaaaatgaggaagaagatgaagtaccggacgatgagactctgaaccaaatgattgctcgacgagaagaagaatttgacctttttatgcggatggacatggaccggcggagggaagatgcccggaacccgaaacggaagccccgtttaatggaggaggatgagctgccytcctggatcattaaggatgacgctgaagtagaaaggctcacctgtgaagaagaggaggagaaaatatttgggagggggtcccgccagcgccgtgacgtggactacagtgacgccctcacggagaagcagtggctaagggccatcgaagacggcaatttggaggaaatggaagaggaagtacggcttaagaagcgaaaaagacgaagaaatgtggataaagatcctgcaaaagaagatgtggaaaamgctaagaagagaagaggccgccctcccgctgagaaactgtcaccaaatccccccaaactgacaaagcagatgaacgctatcatcgatactgtgataaactacaaagatagttcagggcgacagctcagtgaagtcttcattcagttaccttcaaggaaagaattaccagaatactatgaattaattaggaagccagtggatttcaaaaaaataaaggaaaggattcgtaatcataagtaccggagcctaggcgacctggagaaggatgtmatgcttctctgtcacaacgctcagacgttcaacctggagggatcccagatctatgaagactccatcgtcttacagtcagtgtttaagagtgcccggcagaaaattgccaaagaggaagagagtgaggatgaaagcaatgaagaggaggaagaggaagatgaagaagagtcagagtccgaggcaaaatcagtcaaggtgaaaattaagctcaataaaaaagatgasaaaggccgggacaaagggaaaggcaagaaaaggccaaatcgaggaaaagccaaacctgtagtgagcgattttgacagcratgaggagcaggatgaacgtgaacagtcagaaggaagtgggacggatgatgagtgatcagtatggacctttttccttggtagaactgaattccttcctcccctgtctcatttctacccagtgagttcatttgtcatataggcactgggttgtttctatatcatcatcgtctataaactagctttaggatagtgycagacaaacatatgatatcatggtgtaaaaaacacacacatacacaaatatttgtaacatattgtgaccaaatgggcctcaaagattcagattgaaacaaacaaaaagcttttgatggaaaatatgtgggtggatagtatatttctatgggtgggtctaatttggtaacggtttgattgtgcctggttttatcacctgttcagatgagaagatttttgtcttttgtagcactgataaccaggagaagccattaaaagccactggttattttatttttcatcaggcaattttcgaggtttttatttgttcggtattgtttttttacactgtggtacatataagcaactttaataggtgataaatgtacagtagttagatttcacctgcatatacatttttccattttatgctctatgatctgaacaaaagctttttgaattgtataagatttatgtctactgtaaacattgcttaatttttttgctcttgatttaaaaaaaagttttgttgaaagcgctattgaatattgcaatctatatagtgtattggatggcttcttttgtcaccctgatctcctrtgttaccaatgtgtatcgtctccttctccctaaagtgtacttaatctttgctttctttgcacaatgtctttggttgcaagtcataagcctgaggcaaataaaattccagtaatttcgaagaatgtggtgttggtgctttcctaataaagaaataatttagcttg

SEQ ID NO: 5406 - DNA, 5768 bp, Homo sapiens
agcggcgggggccgggccgcgggctgtggcgcgggcctagagccgcggctcggagaccggttcccgtccgccggccgcgccgccaccccaagctccgcgaaccccgcgcccctttttgttccgcgtcctccagcattactctactgactggcagagacaggagargtagatgtccacgcccacagaccctggtgcgatgccccacccagggccttcgccggggcctgggccttcccctgggccaattcttgggcctagtccaggaccaggaccatccccaggttccgtccacagcatgatggggccaagtcctggacctccaagtgtctcccatcctatgccracratggggtccacagacttcccacaggaaggcatgcatcaaatgcataagcccatcgatggtatacatgacaaggggattgtagaagacatccattgtggatccatgaagggcactggtatgcgaccacctcacccaggcatgggccctccccagagtccaatggatcaacacagccaaggttatatgtcaccacacccatctccattaggagccccagagcacgtctccagccctatgtctggaggaggcccaactccacctcagatgccaccaagccagccgggrgccctcatcccaggtgatccgcaggccatgagccagcccaacagaggtccctcacctttcagtcctgtccagctgcatcagcttcgagctcagattttagcttataaaatgctggcccgaggccagcccctccccgaaacgctgcagcttgcagtccaggggaaaaggacgttgcctggcttgcagcaacaacagcagcagcarcarcagcagcagcagcmgcagcagcagcagcarcagcagcaacagcagccgcagcagcagccgccgcaaccacagacgcagcarcaacagcagccggcccttgttaactacaacagaccatctggcccggggccggagctgagcggcccgagcaccccgcagaagctgccggtgcccgcgcccggcggccggccctcgcccgcgccccccgcagccgcgcagccgcccgcggccgcagtgcccgggccctcagtgccgcagccggccccggggcagccctcgcccgtcctccagctgcagcagaagcagagccgcatcagccccatccagaaaccgcaaggcctggaccccgtggaaattctgcaagagcgggaatacagacttcaggcccgcatagctcataggatacaagaactggaaaatctgcctggctctttgccaccagatttaagaaccaaagcaaccgtggaactaaaagcacttcggttactcaatttccagcgtcagctgagacaggaggtggtggcctgcatgcgcagggacacgaccctggagacggctctcaactccaaagcatacaaacggagcaagcgccagactctgagagaagctcgcatgaccgagaagctggagaagcagcagaagattgagcaggagaggaaacgccgtcagaaacaccaggaatacctgaacagtattttgcaacatgcaaaagattttaaggaatatcatcggtctgtggccggaaagatccagaagctctccaaagcagtggcaacttggcatgccaacactgaaagagagcagaagaaggagacagagcggattgaaaaggagagaatgcggcgactgatggctgaagatgaggagggttatagaaaactgattgatcaaaagaaagacaggcgtttagcttaccttttgcagcagaccgatgagtatgtagccaatctgaccaatctggtttgggagcacaagcaagcccaggcagccaaagagaagaagaagaggaggaggaggaagaagaaggctgaggagaatgcagagggtggggagtctgccctgggaccggatggagagcccatagatgagagcagccagatgagtgacctccctgtcaaagtgactcacacagaaaccggcaaggttctgttcggaccrgaagcacccaaagcaagtcagctggacgcctggctggaaatgaatcctggttatgaagttgcccctagatctgacagtgaagagagtgattctgattatgaggaagaggatgaggaagaagagtccagtaggcaggaaaccgaagagaaaatactcctggatccaaatagcgaagaagtttctgagaaggatgctaagcagatcattgagacagctaagcaagacgtggatgatgaatacagcatgcagtacagtgccaggggctcccagtcctactacaccgtggctcatgccatctcggagagggtggagaaacagtctgccctcctaattaatgggaccctaaagcattaccagctccagggcctggaatggatggtttccctgtataataacaacttgaacggaatcttagccgatgaaatggggcttggaaagaccatacagaccattgcactcatcacttatctgatggagcacaaaagactcaatggcccctatctcatcattgttcccctttcgactctatctaactggacatatgaatttgacaaatgggctccttctgtggtgaagatttcttacaagggtactcctgccatgcgtcgctcccttgtcccccagctacggagtggcaaattcaatgtcctcttgactacttatgagtatattataaaagacaagcacattcttgcaaagattcggtggaaatacatgatagtggacgaaggccaccgaatgaagaatcaccactgcaagctgactcaggtcttgaacactcactatgtggcccccagaaggatcctcttgactgggaccccgctgcagaataagctccctgaactctgggccctcctcaacttcctcctcccaacaatttttaagagctgcagcacatttgaacaatggttcaatgctccatttgccatgactggtgaaagggtggacttaaatgaagaagaaactatattgatcatcaggcgtctacataaggtgttaagaccatttttactaaggagactgaagaaagaagttgaatcccagcttcccgaaaaagtggaatatgtgatcaagtgtgacatgtcagctctgcagaagattctgtatcgccatatgcaagccaaggggatccttctcacagatggttctgagaaagataagaaggggaaaggaggtgctaagacacttatgaacactattatgcagttgagaaaaatctgcaaccacccatatatgtttcagcacattgaggaatcctttgctgaacacctaggctattcaaatggggtcatcaatggggctgaactgtatcgggcctcagggaagtttgagctgcttgatcgtattctgccaaaattgagagcgactaatcaccgagtgctgcttttctgccagatgacatctctcatgaccatcatggaggattattttgcttttcggaacttcctttacctacgccttgatggcaccaccaagtctgaagatcgtgctgctttgctgaagaaattcaatgaacctggatcccagtatttcattttcttgctgagcacaagagctggtggcctgggcttaaatcttcaggcagctgatacagtggtcatctttgacagcgactggaatcctcatcaggatctgcaggcccaagaccgagctcaccgcatcgggcagcagaacgaggtccgggtactgaggctctgtaccgtgaacagcgtggaggaaaagatcctcgcggccgcaaaatacaagctgaacgtggatcagaaagtgatccaggcgggcatgtttgaccaaaagtcttcaagccacgagcggagggcattcctgcaggccatcttgkagcatgargaggaaaatgaggaagaagatgaagtaccggacgatgagactctgaaccaaatgattgctcgacgagaagaagaatttgacctttttatgcggatggacatggaccggcggagggaagatgcccggaacccgaaacggaagccccgtttaatggaggaggatgagctgccytcctggatcattaaggatgacgctgaagtagaaaggctcacctgtgaagaagaggaggagaaaatatttgggagggggtcccgccagcgccgtgacgtggactacagtgacgccctcacggagaagcagtggctaagggccatcgaagacggcaatttggaggaaatggaagaggaagtacggcttaagaagcgaaaaagacgaagaaatgtggataaagatcctgcaaaagaagatgtggaaaamgctaagaagagaagaggccgccctcccgctgagaaactgtcaccaaatccccccaaactgacaaagcagatgaacgctatcatcgatactgtgataaactacaaagatagttcagggcgacagctcagtgaagtcttcattcagttaccttcaaggaaagaattaccagaatactatgaattaattaggaagccagtggatttcaaaaaaataaaggaaaggattcgtaatcataagtaccggagcctaggcgacctggagaaggatgtmatgcttctctgtcacaacgctcagacgttcaacctggagggatcccagatctatgaagactccatcgtcttacagtcagtgtttaagagtgcccggcagaaaattgccaaagaggaagagagtgaggatgaaagcaatgaagaggaggaagaggaagatgaagaagagtcagagtccgaggcaaaatcagtcaaggtgaaaattaagctcaataaaaaagatgasaaaggccgggacaaagggaaaggcaagaaaaggccaaatcgaggaaaagccaaacctgtagtgagcgattttgacagcratgaggagcaggatgaacgtgaacagtcagaaggaagtgggacggatgatgagtgatcagtatggacctttttccttggtagaactgaattccttcctcccctgtctcatttctacccagtgagttcatttgtcatataggcactgggttgtttctatatcatcatcgtctataaactagctttaggatagtgycagacaaacatatgatatcatggtgtaaaaaacacacacatacacaaatatttgtaacatattgtgaccaaatgggcctcaaagattcagattgaaacaaacaaaaagcttttgatggaaaatatgtgggtggatagtatatttctatgggtgggtctaatttggtaacggtttgattgtgcctggttttatcacctgttcagatgagaagatttttgtcttttgtagcactgataaccaggagaagccattaaaagccactggttattttatttttcatcaggcaattttcgaggtttttatttgttcggtattgtttttttacactgtggtacatataagcaactttaataggtgataaatgtacagtagttagatttcacctgcatatacatttttccattttatgctctatgatctgaacaaaagctttttgaattgtataagatttatgtctactgtaaacattgcttaatttttttgctcttgatttaaaaaaaagttttgttgaaagcgctattgaatattgcaatctatatagtgtattggatggcttcttttgtcaccctgatctcctrtgttaccaatgtgtatcgtctccttctccctaaagtgtacttaatctttgctttctttgcacaatgtctttggttgcaagtcataagcctgaggcaaataaaattccagtaatttcgaagaatgtggtgttggtgctttcctaataaagaaataatttagcttg

SEQ ID NO: 5407 - DNA, 1779 bp, Homo sapiens
tagaggcagttgagcatgggagccgtctgtatgttgaattagggctcgcactcttgcgcaacacgtcaccagtcggaaactgggggtttgcttctgtgatttatttcattattgtgctggtaaaagctgatgaagagactagcagctcgctgctttgctggcttgttaattttatccccactaactgtgatttctgatagccggcctgctgatagtggtaaggccatcgaagacggcaatttggaggaaatggaagaggaagtacggcttaagaagcgaaaaagacgaagaaatgtggataaagatcctgcaaaagaagatgtggaaaamgctaagaagagaagaggccgccctcccgctgagaaactgtcaccaaatccccccaaactgacaaagcagatgaacgctatcatcgatactgtgataaactacaaagataggtgtaacgtggagaaggtgcccagtaattctcagttggaaatagaagsaaacagttcagggcgacagctcagtgaagtcttcattcagttaccttcaaggaaagaattaccagaatactatgaattaattaggaagccagtggatttcaaaaaaataaaggaaaggattcgtaatcataagtaccggagcctaggcgacctggagaaggatgtmatgcttctctgtcacaacgctcagacgttcaacctggagggatcccagatctatgaagactccatcgtcttacagtcagtgtttaagagtgcccggcagaaaattgccaaagaggaagagagtgaggatgaaagcaatgaagaggaggaagaggaagatgaagaagagtcagagtccgaggcaaaatcagtcaaggtgaaaattaagctcaataaaaaagatgasaaaggccgggacaaagggaaaggcaagaaaaggccaaatcgaggaaaagccaaacctgtagtgagcgattttgacagcratgaggagcaggatgaacgtgaacagtcagaaggaagtgggacggatgatgagtgatcagtatggacctttttccttggtagaactgaattccttcctcccctgtctcatttctacccagtgagttcatttgtcatataggcactgggttgtttctatatcatcatcgtctataaactagctttaggatagtgycagacaaacatatgatatcatggtgtaaaaaacacacacatacacaaatatttgtaacatattgtgaccaaatgggcctcaaagattcagattgaaacaaacaaaaagcttttgatggaaaatatgtgggtggatagtatatttctatgggtgggtctaatttggtaacggtttgattgtgcctggttttatcacctgttcagatgagaagatttttgtcttttgtagcactgataaccaggagaagccattaaaagccactggttattttatttttcatcaggcaattttcgaggtttttatttgttcggtattgtttttttacactgtggtacatataagcaactttaataggtgataaatgtacagtagttagatttcacctgcatatacatttttccattttatgctctatgatctgaacaaaagctttttgaattgtataagatttatgtctactgtaaacattgcttaatttttttgctcttgatttaaaaaaaagcttcttttgtcaccctgatctcctrtgttaccaatgtgtatcgtctccttctccctaaagtgtacttaatctttgctttctttgcacaatgtctttggttgcaagtcataagcctgaggcaaata

SEQ ID NO: 5408 - DNA, 5766 bp, Homo sapiens
tgcggcgcgtcttccggcgcccgcggaggaggcgagggtgggacgctgggcggagcccgagtttaggaagaggaggggacggctgtcatcaatgaagtcatattcataatctagtcctctctccctctgtttctgtactctgggtgactcagagagggaagagattcagccagcacactcctcgcgagcaagcattactctactgactggcagagacaggagargtagatgtccacgcccacagaccctggtgcgatgccccacccagggccttcgccggggcctgggccttcccctgggccaattcttgggcctagtccaggaccaggaccatccccaggttccgtccacagcatgatggggccaagtcctggacctccaagtgtctcccatcctatgccracratggggtccacagacttcccacaggaaggcatgcatcaaatgcataagcccatcgatggtatacatgacaaggggattgtagaagacatccattgtggatccatgaagggcactggtatgcgaccacctcacccaggcatgggccctccccagagtccaatggatcaacacagccaaggttatatgtcaccacacccatctccattaggagccccagagcacgtctccagccctatgtctggaggaggcccaactccacctcagatgccaccaagccagccgggrgccctcatcccaggtgatccgcaggccatgagccagcccaacagaggtccctcacctttcagtcctgtccagctgcatcagcttcgagctcagattttagcttataaaatgctggcccgaggccagcccctccccgaaacgctgcagcttgcagtccaggggaaaaggacgttgcctggcttgcagcaacaacagcagcagcarcarcagcagcagcagcmgcagcagcagcagcarcagcagcaacagcagccgcagcagcagccgccgcaaccacagacgcagcarcaacagcagccggcccttgttaactacaacagaccatctggcccggggccggagctgagcggcccgagcaccccgcagaagctgccggtgcccgcgcccggcggccggccctcgcccgcgccccccgcagccgcgcagccgcccgcggccgcagtgcccgggccctcagtgccgcagccggccccggggcagccctcgcccgtcctccagctgcagcagaagcagagccgcatcagccccatccagaaaccgcaaggcctggaccccgtggaaattctgcaagagcgggaatacagacttcaggcccgcatagctcataggatacaagaactggaaaatctgcctggctctttgccaccagatttaagaaccaaagcaaccgtggaactaaaagcacttcggttactcaatttccagcgtcagctgagacaggaggtggtggcctgcatgcgcagggacacgaccctggagacggctctcaactccaaagcatacaaacggagcaagcgccagactctgagagaagctcgcatgaccgagaagctggagaagcagcagaagattgagcaggagaggaaacgccgtcagaaacaccaggaatacctgaacagtattttgcaacatgcaaaagattttaaggaatatcatcggtctgtggccggaaagatccagaagctctccaaagcagtggcaacttggcatgccaacactgaaagagagcagaagaaggagacagagcggattgaaaaggagagaatgcggcgactgatggctgaagatgaggagggttatagaaaactgattgatcaaaagaaagacaggcgtttagcttaccttttgcagcagaccgatgagtatgtagccaatctgaccaatctggtttgggagcacaagcaagcccaggcagccaaagagaagaagaagaggaggaggaggaagaagaaggctgaggagaatgcagagggtggggagtctgccctgggaccggatggagagcccatagatgagagcagccagatgagtgacctccctgtcaaagtgactcacacagaaaccggcaaggttctgttcggaccrgaagcacccaaagcaagtcagctggacgcctggctggaaatgaatcctggttatgaagttgcccctagatctgacagtgaagagagtgattctgattatgaggaagaggatgaggaagaagagtccagtaggcaggaaaccgaagagaaaatactcctggatccaaatagcgaagaagtttctgagaaggatgctaagcagatcattgagacagctaagcaagacgtggatgatgaatacagcatgcagtacagtgccaggggctcccagtcctactacaccgtggctcatgccatctcggagagggtggagaaacagtctgccctcctaattaatgggaccctaaagcattaccagctccagggcctggaatggatggtttccctgtataataacaacttgaacggaatcttagccgatgaaatggggcttggaaagaccatacagaccattgcactcatcacttatctgatggagcacaaaagactcaatggcccctatctcatcattgttcccctttcgactctatctaactggacatatgaatttgacaaatgggctccttctgtggtgaagatttcttacaagggtactcctgccatgcgtcgctcccttgtcccccagctacggagtggcaaattcaatgtcctcttgactacttatgagtatattataaaagacaagcacattcttgcaaagattcggtggaaatacatgatagtggacgaaggccaccgaatgaagaatcaccactgcaagctgactcaggtcttgaacactcactatgtggcccccagaaggatcctcttgactgggaccccgctgcagaataagctccctgaactctgggccctcctcaacttcctcctcccaacaatttttaagagctgcagcacatttgaacaatggttcaatgctccatttgccatgactggtgaaagggtggacttaaatgaagaagaaactatattgatcatcaggcgtctacataaggtgttaagaccatttttactaaggagactgaagaaagaagttgaatcccagcttcccgaaaaagtggaatatgtgatcaagtgtgacatgtcagctctgcagaagattctgtatcgccatatgcaagccaaggggatccttctcacagatggttctgagaaagataagaaggggaaaggaggtgctaagacacttatgaacactattatgcagttgagaaaaatctgcaaccacccatatatgtttcagcacattgaggaatcctttgctgaacacctaggctattcaaatggggtcatcaatggggctgaactgtatcgggcctcagggaagtttgagctgcttgatcgtattctgccaaaattgagagcgactaatcaccgagtgctgcttttctgccagatgacatctctcatgaccatcatggaggattattttgcttttcggaacttcctttacctacgccttgatggcaccaccaagtctgaagatcgtgctgctttgctgaagaaattcaatgaacctggatcccagtatttcattttcttgctgagcacaagagctggtggcctgggcttaaatcttcaggcagctgatacagtggtcatctttgacagcgactggaatcctcatcaggatctgcaggcccaagaccgagctcaccgcatcgggcagcagaacgaggtccgggtactgaggctctgtaccgtgaacagcgtggaggaaaagatcctcgcggccgcaaaatacaagctgaacgtggatcagaaagtgatccaggcgggcatgtttgaccaaaagtcttcaagccacgagcggagggcattcctgcaggccatcttgkagcatgargaggaaaatgaggaagaagatgaagtaccggacgatgagactctgaaccaaatgattgctcgacgagaagaagaatttgacctttttatgcggatggacatggaccggcggagggaagatgcccggaacccgaaacggaagccccgtttaatggaggaggatgagctgccytcctggatcattaaggatgacgctgaagtagaaaggctcacctgtgaagaagaggaggagaaaatatttgggagggggtcccgccagcgccgtgacgtggactacagtgacgccctcacggagaagcagtggctaagggccatcgaagacggcaatttggaggaaatggaagaggaagtacggcttaagaagcgaaaaagacgaagaaatgtggataaagatcctgcaaaagaagatgtggaaaamgctaagaagagaagaggccgccctcccgctgagaaactgtcaccaaatccccccaaactgacaaagcagatgaacgctatcatcgatactgtgataaactacaaagataggtgtaacgtggagaaggtgcccagtaattctcagttggaaatagaagsaaacagttcagggcgacagctcagtgaagtcttcattcagttaccttcaaggaaagaattaccagaatactatgaattaattaggaagccagtggatttcaaaaaaataaaggaaaggattcgtaatcataagtaccggagcctaggcgacctggagaaggatgtmatgcttctctgtcacaacgctcagacgttcaacctggagggatcccagatctatgaagactccatcgtcttacagtcagtgtttaagagtgcccggcagaaaattgccaaagaggaagagagtgaggatgaaagcaatgaagaggaggaagaggaagatgaagaagagtcagagtccgaggcaaaatcagtcaaggtgaaaattaagctcaataaaaaagatgasaaaggccgggacaaagggaaaggcaagaaaaggccaaatcgaggaaaagccaaacctgtagtgagcgattttgacagcratgaggagcaggatgaacgtgaacagtcagaaggaagtgggacggatgatgagtgatcagtatggacctttttccttggtagaactgaattccttcctcccctgtctcatttctacccagtgagttcatttgtcatataggcactgggttgtttctatatcatcatcgtctataaactagctttaggatagtgycagacaaacatatgatatcatggtgtaaaaaacacacacatacacaaatatttgtaacatattgtgaccaaatgggcctcaaagattcagattgaaacaaacaaaaagcttttgatggaaaatatgtgggtggatagtatatttctatgggtgggtctaatttggtaacggtttgattgtgcctggttttatcacctgttcagatgagaagatttttgtcttttgtagcactgataaccaggagaagccattaaaagccactggttattttatttttcatcaggcaattttcgaggtttttatttgttcggtattgtttttttacactgtggtacatataagcaactttaataggtgataaatgtacagtagttagatttcacctgcatatacatttttccattttatgctctatgatctgaacaaaagctttttgaattgtataagatttatgtctactgtaaacattgcttaatttttttgctcttgatttaaaaaaaagcttcttttgtcaccctgatctcctrtgttaccaatgtgtatcgtctccttctccctaaagtgtacttaatctttgctttctttgcacaatgtctttggttgcaagtcataagcctgaggcaaata

SEQ ID NO: 5409 - DNA, 5635 bp, Homo sapiens
cattactctactgactggcagagacaggagargtagatgtccacgcccacagaccctggtgcgatgccccacccagggccttcgccggggcctgggccttcccctgggccaattcttgggcctagtccaggaccaggaccatccccaggttccgtccacagcatgatggggccaagtcctggacctccaagtgtctcccatcctatgccracratggggtccacagacttcccacaggaaggcatgcatcaaatgcataagcccatcgatggtatacatgacaaggggattgtagaagacatccattgtggatccatgaagggcactggtatgcgaccacctcacccaggcatgggccctccccagagtccaatggatcaacacagccaaggttatatgtcaccacacccatctccattaggagccccagagcacgtctccagccctatgtctggaggaggcccaactccacctcagatgccaccaagccagccgggrgccctcatcccaggtgatccgcaggccatgagccagcccaacagaggtccctcacctttcagtcctgtccagctgcatcagcttcgagctcagattttagcttataaaatgctggcccgaggccagcccctccccgaaacgctgcagcttgcagtccaggggaaaaggacgttgcctggcttgcagcaacaacagcagcagcarcarcagcagcagcagcmgcagcagcagcagcarcagcagcaacagcagccgcagcagcagccgccgcaaccacagacgcagcarcaacagcagccggcccttgttaactacaacagaccatctggcccggggccggagctgagcggcccgagcaccccgcagaagctgccggtgcccgcgcccggcggccggccctcgcccgcgccccccgcagccgcgcagccgcccgcggccgcagtgcccgggccctcagtgccgcagccggccccggggcagccctcgcccgtcctccagctgcagcagaagcagagccgcatcagccccatccagaaaccgcaaggcctggaccccgtggaaattctgcaagagcgggaatacagacttcaggcccgcatagctcataggatacaagaactggaaaatctgcctggctctttgccaccagatttaagaaccaaagcaaccgtggaactaaaagcacttcggttactcaatttccagcgtcagctgagacaggaggtggtggcctgcatgcgcagggacacgaccctggagacggctctcaactccaaagcatacaaacggagcaagcgccagactctgagagaagctcgcatgaccgagaagctggagaagcagcagaagattgagcaggagaggaaacgccgtcagaaacaccaggaatacctgaacagtattttgcaacatgcaaaagattttaaggaatatcatcggtctgtggccggaaagatccagaagctctccaaagcagtggcaacttggcatgccaacactgaaagagagcagaagaaggagacagagcggattgaaaaggagagaatgcggcgactgatggctgaagatgaggagggttatagaaaactgattgatcaaaagaaagacaggcgtttagcttaccttttgcagcagaccgatgagtatgtagccaatctgaccaatctggtttgggagcacaagcaagcccaggcagccaaagagaagaagaagaggaggaggaggaagaagaaggctgaggagaatgcagagggtggggagtctgccctgggaccggatggagagcccatagatgagagcagccagatgagtgacctccctgtcaaagtgactcacacagaaaccggcaaggttctgttcggaccrgaagcacccaaagcaagtcagctggacgcctggctggaaatgaatcctggttatgaagttgcccctagatctgacagtgaagagagtgattctgattatgaggaagaggatgaggaagaagagtccagtaggcaggaaaccgaagagaaaatactcctggatccaaatagcgaagaagtttctgagaaggatgctaagcagatcattgagacagctaagcaagacgtggatgatgaatacagcatgcagtacagtgccaggggctcccagtcctactacaccgtggctcatgccatctcggagagggtggagaaacagtctgccctcctaattaatgggaccctaaagcattaccagctccagggcctggaatggatggtttccctgtataataacaacttgaacggaatcttagccgatgaaatggggcttggaaagaccatacagaccattgcactcatcacttatctgatggagcacaaaagactcaatggcccctatctcatcattgttcccctttcgactctatctaactggacatatgaatttgacaaatgggctccttctgtggtgaagatttcttacaagggtactcctgccatgcgtcgctcccttgtcccccagctacggagtggcaaattcaatgtcctcttgactacttatgagtatattataaaagacaagcacattcttgcaaagattcggtggaaatacatgatagtggacgaaggccaccgaatgaagaatcaccactgcaagctgactcaggtcttgaacactcactatgtggcccccagaaggatcctcttgactgggaccccgctgcagaataagctccctgaactctgggccctcctcaacttcctcctcccaacaatttttaagagctgcagcacatttgaacaatggttcaatgctccatttgccatgactggtgaaagggtggacttaaatgaagaagaaactatattgatcatcaggcgtctacataaggtgttaagaccatttttactaaggagactgaagaaagaagttgaatcccagcttcccgaaaaagtggaatatgtgatcaagtgtgacatgtcagctctgcagaagattctgtatcgccatatgcaagccaaggggatccttctcacagatggttctgagaaagataagaaggggaaaggaggtgctaagacacttatgaacactattatgcagttgagaaaaatctgcaaccacccatatatgtttcagcacattgaggaatcctttgctgaacacctaggctattcaaatggggtcatcaatggggctgaactgtatcgggcctcagggaagtttgagctgcttgatcgtattctgccaaaattgagagcgactaatcaccgagtgctgcttttctgccagatgacatctctcatgaccatcatggaggattattttgcttttcggaacttcctttacctacgccttgatggcaccaccaagtctgaagatcgtgctgctttgctgaagaaattcaatgaacctggatcccagtatttcattttcttgctgagcacaagagctggtggcctgggcttaaatcttcaggcagctgatacagtggtcatctttgacagcgactggaatcctcatcaggatctgcaggcccaagaccgagctcaccgcatcgggcagcagaacgaggtccgggtactgaggctctgtaccgtgaacagcgtggaggaaaagatcctcgcggccgcaaaatacaagctgaacgtggatcagaaagtgatccaggcgggcatgtttgaccaaaagtcttcaagccacgagcggagggcattcctgcaggccatcttgkagcatgargaggaaaatgaggaagaagatgaagtaccggacgatgagactctgaaccaaatgattgctcgacgagaagaagaatttgacctttttatgcggatggacatggaccggcggagggaagatgcccggaacccgaaacggaagccccgtttaatggaggaggatgagctgccytcctggatcattaaggatgacgctgaagtagaaaggctcacctgtgaagaagaggaggagaaaatatttgggagggggtcccgccagcgccgtgacgtggactacagtgacgccctcacggagaagcagtggctaagggccatcgaagacggcaatttggaggaaatggaagaggaagtacggcttaagaagcgaaaaagacgaagaaatgtggataaagatcctgcaaaagaagatgtggaaaamgctaagaagagaagaggccgccctcccgctgagaaactgtcaccaaatccccccaaactgacaaagcagatgaacgctatcatcgatactgtgataaactacaaagatagttcagggcgacagctcagtgaagtcttcattcagttaccttcaaggaaagaattaccagaatactatgaattaattaggaagccagtggatttcaaaaaaataaaggaaaggattcgtaatcataagtaccggagcctaggcgacctggagaaggatgtmatgcttctctgtcacaacgctcagacgttcaacctggagggatcccagatctatgaagactccatcgtcttacagtcagtgtttaagagtgcccggcagaaaattgccaaagaggaagagagtgaggatgaaagcaatgaagaggaggaagaggaagatgaagaagagtcagagtccgaggcaaaatcagtcaaggtgaaaattaagctcaataaaaaagatgasaaaggccgggacaaagggaaaggcaagaaaaggccaaatcgaggaaaagccaaacctgtagtgagcgattttgacagcratgaggagcaggatgaacgtgaacagtcagaaggaagtgggacggatgatgagtgatcagtatggacctttttccttggtagaactgaattccttcctcccctgtctcatttctacccagtgagttcatttgtcatataggcactgggttgtttctatatcatcatcgtctataaactagctttaggatagtgycagacaaacatatgatatcatggtgtaaaaaacacacacatacacaaatatttgtaacatattgtgaccaaatgggcctcaaagattcagattgaaacaaacaaaaagcttttgatggaaaatatgtgggtggatagtatatttctatgggtgggtctaatttggtaacggtttgattgtgcctggttttatcacctgttcagatgagaagatttttgtcttttgtagcactgataaccaggagaagccattaaaagccactggttattttatttttcatcaggcaattttcgaggtttttatttgttcggtattgtttttttacactgtggtacatataagcaactttaataggtgataaatgtacagtagttagatttcacctgcatatacatttttccattttatgctctatgatctgaacaaaagctttttgaattgtataagatttatgtctactgtaaacattgcttaatttttttgctcttgatttaaaaaaaagttttgttgaaagcgctattgaatattgcaatctatatagtgtattggatggcttcttttgtcaccctgatctcctrtgttaccaatgtgtatcgtctccttctccctaaagtgtacttaatctttgctttctttgcacaatgtctttggttgcaagtcataagcctgaggcaaataaaattccagtaatttcgaagaatgtggtgttggtgctttcctaataaagaaataatttagcttg

SEQ ID NO: 5410 - DNA, 5811 bp, Homo sapiens
gtttccggtacacgcggggaaatcgcctcctgccagtgtctgatcgctcgcctccgcctccgcctctgccgcctggattgcattattatttttatccgggttgccgtttgctgcggatggtgcattactctactgactggcagagacaggagargtagatgtccacgcccacagaccctggtgcgatgccccacccagggccttcgccggggcctgggccttcccctgggccaattcttgggcctagtccaggaccaggaccatccccaggttccgtccacagcatgatggggccaagtcctggacctccaagtgtctcccatcctatgccracratggggtccacagacttcccacaggaaggcatgcatcaaatgcataagcccatcgatggtatacatgacaaggggattgtagaagacatccattgtggatccatgaagggcactggtatgcgaccacctcacccaggcatgggccctccccagagtccaatggatcaacacagccaaggttatatgtcaccacacccatctccattaggagccccagagcacgtctccagccctatgtctggaggaggcccaactccacctcagatgccaccaagccagccgggrgccctcatcccaggtgatccgcaggccatgagccagcccaacagaggtccctcacctttcagtcctgtccagctgcatcagcttcgagctcagattttagcttataaaatgctggcccgaggccagcccctccccgaaacgctgcagcttgcagtccaggggaaaaggacgttgcctggcttgcagcaacaacagcagcagcarcarcagcagcagcagcmgcagcagcagcagcarcagcagcaacagcagccgcagcagcagccgccgcaaccacagacgcagcarcaacagcagccggcccttgttaactacaacagaccatctggcccggggccggagctgagcggcccgagcaccccgcagaagctgccggtgcccgcgcccggcggccggccctcgcccgcgccccccgcagccgcgcagccgcccgcggccgcagtgcccgggccctcagtgccgcagccggccccggggcagccctcgcccgtcctccagctgcagcagaagcagagccgcatcagccccatccagaaaccgcaaggcctggaccccgtggaaattctgcaagagcgggaatacagacttcaggcccgcatagctcataggatacaagaactggaaaatctgcctggctctttgccaccagatttaagaaccaaagcaaccgtggaactaaaagcacttcggttactcaatttccagcgtcagctgagacaggaggtggtggcctgcatgcgcagggacacgaccctggagacggctctcaactccaaagcatacaaacggagcaagcgccagactctgagagaagctcgcatgaccgagaagctggagaagcagcagaagattgagcaggagaggaaacgccgtcagaaacaccaggaatacctgaacagtattttgcaacatgcaaaagattttaaggaatatcatcggtctgtggccggaaagatccagaagctctccaaagcagtggcaacttggcatgccaacactgaaagagagcagaagaaggagacagagcggattgaaaaggagagaatgcggcgactgatggctgaagatgaggagggttatagaaaactgattgatcaaaagaaagacaggcgtttagcttaccttttgcagcagaccgatgagtatgtagccaatctgaccaatctggtttgggagcacaagcaagcccaggcagccaaagagaagaagaagaggaggaggaggaagaagaaggctgaggagaatgcagagggtggggagtctgccctgggaccggatggagagcccatagatgagagcagccagatgagtgacctccctgtcaaagtgactcacacagaaaccggcaaggttctgttcggaccrgaagcacccaaagcaagtcagctggacgcctggctggaaatgaatcctggttatgaagttgcccctagatctgacagtgaagagagtgattctgattatgaggaagaggatgaggaagaagagtccagtaggcaggaaaccgaagagaaaatactcctggatccaaatagcgaagaagtttctgagaaggatgctaagcagatcattgagacagctaagcaagacgtggatgatgaatacagcatgcagtacagtgccaggggctcccagtcctactacaccgtggctcatgccatctcggagagggtggagaaacagtctgccctcctaattaatgggaccctaaagcattaccagctccagggcctggaatggatggtttccctgtataataacaacttgaacggaatcttagccgatgaaatggggcttggaaagaccatacagaccattgcactcatcacttatctgatggagcacaaaagactcaatggcccctatctcatcattgttcccctttcgactctatctaactggacatatgaatttgacaaatgggctccttctgtggtgaagatttcttacaagggtactcctgccatgcgtcgctcccttgtcccccagctacggagtggcaaattcaatgtcctcttgactacttatgagtatattataaaagacaagcacattcttgcaaagattcggtggaaatacatgatagtggacgaaggccaccgaatgaagaatcaccactgcaagctgactcaggtcttgaacactcactatgtggcccccagaaggatcctcttgactgggaccccgctgcagaataagctccctgaactctgggccctcctcaacttcctcctcccaacaatttttaagagctgcagcacatttgaacaatggttcaatgctccatttgccatgactggtgaaagggtggacttaaatgaagaagaaactatattgatcatcaggcgtctacataaggtgttaagaccatttttactaaggagactgaagaaagaagttgaatcccagcttcccgaaaaagtggaatatgtgatcaagtgtgacatgtcagctctgcagaagattctgtatcgccatatgcaagccaaggggatccttctcacagatggttctgagaaagataagaaggggaaaggaggtgctaagacacttatgaacactattatgcagttgagaaaaatctgcaaccacccatatatgtttcagcacattgaggaatcctttgctgaacacctaggctattcaaatggggtcatcaatggggctgaactgtatcgggcctcagggaagtttgagctgcttgatcgtattctgccaaaattgagagcgactaatcaccgagtgctgcttttctgccagatgacatctctcatgaccatcatggaggattattttgcttttcggaacttcctttacctacgccttgatggcaccaccaagtctgaagatcgtgctgctttgctgaagaaattcaatgaacctggatcccagtatttcattttcttgctgagcacaagagctggtggcctgggcttaaatcttcaggcagctgatacagtggtcatctttgacagcgactggaatcctcatcaggatctgcaggcccaagaccgagctcaccgcatcgggcagcagaacgaggtccgggtactgaggctctgtaccgtgaacagcgtggaggaaaagatcctcgcggccgcaaaatacaagctgaacgtggatcagaaagtgatccaggcgggcatgtttgaccaaaagtcttcaagccacgagcggagggcattcctgcaggccatcttgkagcatgargaggaaaatgaggaagaagatgaagtaccggacgatgagactctgaaccaaatgattgctcgacgagaagaagaatttgacctttttatgcggatggacatggaccggcggagggaagatgcccggaacccgaaacggaagccccgtttaatggaggaggatgagctgccytcctggatcattaaggatgacgctgaagtagaaaggctcacctgtgaagaagaggaggagaaaatatttgggagggggtcccgccagcgccgtgacgtggactacagtgacgccctcacggagaagcagtggctaagggccatcgaagacggcaatttggaggaaatggaagaggaagtacggcttaagaagcgaaaaagacgaagaaatgtggataaagatcctgcaaaagaagatgtggaaaamgctaagaagagaagaggccgccctcccgctgagaaactgtcaccaaatccccccaaactgacaaagcagatgaacgctatcatcgatactgtgataaactacaaagataggtgtaacgtggagaaggtgcccagtaattctcagttggaaatagaagsaaacagttcagggcgacagctcagtgaagtcttcattcagttaccttcaaggaaagaattaccagaatactatgaattaattaggaagccagtggatttcaaaaaaataaaggaaaggattcgtaatcataagtaccggagcctaggcgacctggagaaggatgtmatgcttctctgtcacaacgctcagacgttcaacctggagggatcccagatctatgaagactccatcgtcttacagtcagtgtttaagagtgcccggcagaaaattgccaaagaggaagagagtgaggatgaaagcaatgaagaggaggaagaggaagatgaagaagagtcagagtccgaggcaaaatcagtcaaggtgaaaattaagctcaataaaaaagatgasaaaggccgggacaaagggaaaggcaagaaaaggccaaatcgaggaaaagccaaacctgtagtgagcgattttgacagcratgaggagcaggatgaacgtgaacagtcagaaggaagtgggacggatgatgagtgatcagtatggacctttttccttggtagaactgaattccttcctcccctgtctcatttctacccagtgagttcatttgtcatataggcactgggttgtttctatatcatcatcgtctataaactagctttaggatagtgycagacaaacatatgatatcatggtgtaaaaaacacacacatacacaaatatttgtaacatattgtgaccaaatgggcctcaaagattcagattgaaacaaacaaaaagcttttgatggaaaatatgtgggtggatagtatatttctatgggtgggtctaatttggtaacggtttgattgtgcctggttttatcacctgttcagatgagaagatttttgtcttttgtagcactgataaccaggagaagccattaaaagccactggttattttatttttcatcaggcaattttcgaggtttttatttgttcggtattgtttttttacactgtggtacatataagcaactttaataggtgataaatgtacagtagttagatttcacctgcatatacatttttccattttatgctctatgatctgaacaaaagctttttgaattgtataagatttatgtctactgtaaacattgcttaatttttttgctcttgatttaaaaaaaagttttgttgaaagcgctattgaatattgcaatctatatagtgtattggatggcttcttttgtcaccctgatctcctrtgttaccaatgtgtatcgtctccttctccctaaagtgtacttaatctttgctttctttgcacaatgtctttggttgcaagtcataagcctgaggcaaataaaattccagtaatttcgaagaatgtggtgttggtgctttcctaataaagaaataatttagcttg

SEQ ID NO: 5411 - DNA, 532 bp, Homo sapiens
tttgcagttgaaagatgcatgagtgtgatgcagtccgggacacagatgatcaagctgaaacgtggaaccaaagggcttgtccgcctcttttacctggatgagcaccggacacgcctccgatggcgaccctctaggaagagygagaaggcaaaaatacttattgattccatttacaaagtgactgagggccggcagtctgaaatattccacagacaagctgaggggaacttcgaccccagctgctgcttcaccatctaccatggcaaccacatggagtccctggacctcatcacctccaaccccgaggaggcccgcacctggatcacaggcctcaagtacctgatggctggcatcagtgatgaagactcccttgccaaaaggcagaggacccatgaccaatgggtgaagcagacctttgaggaagctgataagaatggtgacggcttgctgaatattgaagagatacatcagctgatgcataaactgaatgttaatctgccccgaagaaaagtcagacaaatgtttcaggtaa

SEQ ID NO: 5412 - DNA, 5962 bp, Homo sapiens
tttgcagttgaaagatgcatgagtgtgatgcagtccgggacacagatgatcaagctgaaacgtggaaccaaagggcttgtccgcctcttttacctggatgagcaccggacacgcctccgatggcgaccctctaggaagagygagaaggcaaaaatacttattgattccatttacaaagtgactgagggccggcagtctgaaatattccacagacaagctgaggggaacttcgaccccagctgctgcttcaccatctaccatggcaaccacatggagtccctggacctcatcacctccaaccccgaggaggcccgcacctggatcacaggcctcaagtacctggatgagaatcagggaactttgacatttgaagagttctgtgttttttacaaaatgatgtctttgagacgagacctttatttgttacttttgagctacagtgacaagaaagatcacctaactgtggaagaactggctcagtttttgaaggtggagcaaaagatgaataatgtgacaacggactattgtcttgacatcataaagaagtttgaagtttcagaagaaaataaggtgaaaaatgttcttggcatagaaggcttcacgaacttcatgcgtagtcctgcctgtgacatatttaacccattgcaccatgaagtgtaccaagacatggatcagcccctctgcaactactacattgcttcctctcacaatacatacctgactggagaccagctcctttctcagtccaaagtggatatgtatgcacgggtgctgcaagagggctgtcgctgtgtggaagttgactgttgggatggcccagatggagagccagtagtacatcatggttacactctcacttcaaaaattctcttcagagatgttgtggagaccatcaacaagcatgcctttgtgaagaatgagtttcctgttatattgtctatcgagaatcactgcagtatccagcagcaaaggaagattgctcagtacctgaaaggaatattcggagacaaactggacctgtcatctgttgatacaggggagtgcaagcagcttccaagccctcaaagtttgaaaggcaaaattctagtgaagggtaagaagttgccttatcaccttggggatgatgcagaggaaggggaagtttcygatgaggacagtgcagatgaaattgaagacgagtgcaaattcaagctccattatagtaatgggaccactgagcatcaggtggaatctttcataaggaaaaaactggagtcactgttaaaagaatctcaaattcgagataaagaagatcctgatagtttcacagtgcgggcactactgaaggccacgcatgaaggcttaaatgcacacctgaagcagagtccagatgtaaaggaaagtggaaagaaatcacatggacgatccctcatgaccaactttggaaaacataagaaaactacaaaatcacggtctaaatcttacagtactgatgatgaggaagacacacagcagagtactggcaaggagggtggccagctgtacagattgggtcgccgaaggaaaaccatgaagctctgccgagaactctctgatttggttgtgtacacaaactccgtggccgctcaggacattgtggatgacggaaccacaggaaatgtgttatcattcagtgaaacaagagcacatcaggttgttcagcaaaaatcagagcagttcatgatttataatcaaaagcaactcacgaggatttacccctctgcctaccgcattgattccagtaacttcaaccctctcccctactggaacgcaggctgccagctagtggcactgaattatcaatctgaaggacgaatgatgcagttaaaccgagccaaattcaaggcaaatggcaattgtggctatgtcctcaaaccccagcaaatgtgcaaaggtactttcaaccctttctctggtgaccctcttcctgccaaccccaaaaagcagctcatcctgaaagttatcagtggacagcaactccccaaacctccagactccatgtttggagatcgaggcgagatcattgacccttttgttgaagttgaaattattggattgccagtagattgttgtaaagatcaaacccgtgtggtagatgacaatggatttaaccctgtgtgggaagaaacactgacatttacagtacacatgccagaaatagctttggttcggttccttgtgtgggatcacgatcccattggacgagactttgttggacaaagaactgtgaccttcagcagcttagtgcctggctaccggcatgtctatttggaaggactgacagaagcatccatatttgtacacataaccatcaatgaaatctatggaaagtggagccctttaatactcaaccccagttatactatattgcactttctaggagctacaaagaacagacaactccagggtctgaagggactgttcaataagaatcctaggcacagttcttcagaaaacaattcccattatgtacggaagcgatccattggagatagaattctgcgacgcacagctagcgccccagccaaaggcaggaaaaagagcaaaatgggcttccaagaaatggtggagataaaggattctgtgtccgaggccacaagagatcaagatggcgtgctgaggaggaccacacgcagtttgcaagcacgccctgtctctatgcctgttgacagaaaccttctgggagctttgtcgctgcctgtatctgaaacagcaaaagacattgaaggaaaagaaaactctctagtacaaatctgaataggaaacaacttaagcagaagataaagatggcagaagaaaagggaaagcaagtataaaagatccacattttctaaatttcaacaaaaagttatcatcctcctccagtgctctgctccacaaagataccagccaaggggacaccattgtatctactgcccacatgtcagtcacaggagaacagctgggcatgtcaagtcctaggggtgggagaaccacatcaaatgccacaagcaattgccaggaaaacccctgtcccagcaagtctctctccccaaagcagcatttggctcchgatcctgtagttaaccccacacaagatctgcatggtgtgaaaatcaaggaaaagggtaatcctgaggactttgtggaagggaaaagcatcttgtcaggaagcgtcctttctcatagcaacctagaaattaagaacctggaaggtaataggggtaagggccgagctgcaacatccttttctttgtcagacgtctccatgctctgttctgacatacctgacctacattcaactgcaattctgcaggagagtgtaatttcccatcttattgacaatgtcactttaacaaatgagaatgagccgggcagttccatctcagccctgattggccagtttgatgagaccaacaatcaggctctcacagttgtttctcatcttcataataccagtgtgatgtcaggccattgtcccttgcctagcctgggcctaaaaatgcccatcaagcatggtttttgcaagggaaaatccaagtcttccttcctgtgctcatctccggagctgatagcactctcgagttctgagaccaccaaacatgcaacgaacacagtttatgaaactacctgcactcccatctctaaaaccaaaccagatgatgacctttctagtaaggccaagacagcggccttagaaagcaacctgcctggatcccctaatacttctcgtggctggttaccaaaaagtcctaccaagggagaagactgggaaacactgaagagctgcagccctgcctcttcccctgatttgaccctggaggatgtaatagctgatcccactctctgtttcaattctggggagagcagccttgtggaaattgatggagaatcagaaaatctttctctaacaacctgtgaatataggagagagggcacaagtcaacttgcttctcctttaaaactcaagtacaatcagggtgtggtagaacactttcaaagaggtttgagaaacggctactgtaaagagaccctccgcccttctgtccctgaaatattcaacaatattcaagatgtcaaaactcaaagtatttcttatctagcctatcagggtgctggctttgtgcataatcatttctcagattcagatgcaaaaatgttccagacctgtgtgccccagcaatctagtgctcaagatatgcatgtccctgtacccaagcagttggcacatcttcctttgcctgctctgaaactgcctagtccttgcaaatccaaaagtctgggggacttaacatcagaggacattgcctgcaattttgagagcaagtaccagtgtattagtaagagttttgttacaactggcattagagacaagaagggcgtgactgtgaagacaaagtcgttagagcctatagatgccctgaccgagcagcttcggaagcttgtgtcctttgaccaggaagacaactgccaagtgctatattcaaagcaggatgccaatcagctcccccgggcactggtcaggaagttgtcatccagaagtcagagcagagtgcgcaatattgctagtcgtgccaaggagaaacaggaagccaacaagcagaaagttccaaaccccagcaatggggcaggagtggttcttagaaacaaaccctcagcacccacccctgcagtgaatcgccactccaccggctcctacatcgcaggctacctgaagaacacgaaagggggtggccttgaaggccggggcatcccagagggggcatgcacggctcttcactatggccacgttgaccagttttgttcagataattctgttttgcagactgagccaagcagtgatgataaaccagaaatttattttcttttgagactgtgaattatttaaaactgcattcttaaggttttcaaggtattctgtagaatgtcagagttttcagtaaataagttccttggctttggaatgattttcaaatgtatttttaaacttgtatttgggtctccctttgacttcatgtgttctccctgttaatgcgtttgtatatagatttggtgacatttcccatgtacctattatgatctttctcccttgagttgttgtaaactgtatcagtatgaaatatgtgcatgccctagatgtgaaactcctcagcagctcgggttataatgtgtgtgtgtttcaccaagatgtcctttactgtgtcctcagattgcagtcacaaatgtagtcatttttactctctaactgttgagttgattaagagactttgcaaacgacaaagggatgaattccttactttaatctgttatcatttttcctatgtttccctctttgttcagaagcccagatgcatttttataactcagttttaaaaactttaaaatagttaccttgccttttaggatgttcttatcccacccataatgagagttgaaaggggatggatagctgctccccatgcccttcccactttttggaataggccgtgagggtgtgasgaagaaggctgtcttttgtacataaggacaaaattgtttgttttacataaattttgttacatatttttgctaatggctttgtatgtaacaagaagcgagttgccaaactacctgttgtacttttgaattttctgattgaattacagactgcgaacaacggctttcagaatgagggacttccatcagactctaatgataatagtagcacaaattgaaaacttccccaaagctttcacagaatattttctcataataaaatccaagtgaacagataattagaagaaacccttttccttcagggaaccaagcaactctattttagtactgacatgcattattttcactgtgaattcacttttttattgcatgttcagatgtccctctttgttttttttttttgtaacattaactgcaatgatgttcttcctggaattcatgaaaatataattaaaacacatttttaaac

SEQ ID NO: 5413 - DNA, 2930 bp, Homo sapiens
atgatgtctttgagacgagacctttatttgttacttttgagctacagtgacaagaaagatcacctaactgtggaagaactggctcagtttttgaaggtggagcaaaagatgaataatgtgacaacggactattgtcttgacatcataaagaagtttgaagtttcagaagaaaataaggtgaaaaatgttcttggcatagaaggcttcacgaacttcatgcgtagtcctgcctgtgacatatttaacccattgcaccatgaagtgtaccaagacatggatcagcccctctgcaactactacattgcttcctctcacaatacatacctgactggagaccagctcctttctcagtccaaagtggatatgtatgcacgggtgctgcaagagggctgtcgctgtgtggaagttgactgttgggatggcccagatggagagccagtagtacatcatggttacactctcacttcaaaaattctcttcagagatgttgtggagaccatcaacaagcatgcctttgtgaagaatgagtttcctgttatattgtctatcgagaatcactgcagtatccagcagcaaaggaagattgctcagtacctgaaaggaatattcggagacaaactggacctgtcatctgttgatacaggggagtgcaagcagcttccaagccctcaaagtttgaaaggcaaaattctagtgaagggtaagaagttgccttatcaccttggggatgatgcagaggaaggggaagtttcygatgaggacagtgcagatgaaattgaagacgagtgcaaattcaagctccattatagtaatgggaccactgagcatcaggtggaatctttcataaggaaaaaactggagtcactgttaaaagaatctcaaattcgagataaagaagatcctgatagtttcacagtgcgggcactactgaaggccacgcatgaaggcttaaatgcacacctgaagcagagtccagatgtaaaggaaagtggaaagaaatcacatggacgatccctcatgaccaactttggaaaacataagaaaactacaaaatcacggtctaaatcttacagtactgatgatgaggaagacacacagcagagtactggcaaggagggtggccagctgtacagattgggtcgccgaaggaaaaccatgaagctctgccgagaactctctgatttggttgtgtacacaaactccgtggccgctcaggacattgtggatgacggaaccacaggaaatgtgttatcattcagtgaaacaagagcacatcaggttgttcagcaaaaatcagagcagttcatgatttataatcaaaagcaactcacgaggatttacccctctgcctaccgcattgattccagtaacttcaaccctctcccctactggaacgcaggctgccagctagtggcactgaattatcaatctgaaggacgaatgatgcagttaaaccgagccaaattcaaggcaaatggcaattgtggctatgtcctcaaaccccagcaaatgtgcaaaggtactttcaaccctttctctggtgaccctcttcctgccaaccccaaaaagcagctcatcctgaaagttatcagtggacagcaactccccaaacctccagactccatgtttggagatcgaggcgagatcattgacccttttgttgaagttgaaattattggattgccagtagattgttgtaaagatcaaacccgtgtggtagatgacaatggatttaaccctgtgtgggaagaaacactgacatttacagtacacatgccagaaatagctttggttcggttccttgtgtgggatcacgatcccattggacgagactttgttggacaaagaactgtgaccttcagcagcttagtgcctggctaccggcatgtctatttggaaggactgacagaagcatccatatttgtacacataaccatcaatgaaatctatggaaagaacagacaactccagggtctgaagggactgttcaataagaatcctaggcacagttcttcagaaaacaattcccattatgtacggaagcgatccattggagatagaattctgcgacgcacagctagcgccccagccaaaggcaggaaaaagagcaaaatgggcttccaagaaatggtggagataaaggattctgtgtccgaggccacaagagatcaagatggcgtgctgaggaggaccacacgcagtttgcaagcacgccctgtctctatgcctgttgacagaaaccttctgggagctttgtcgctgcctgtatctgaaacagcaaaagacattgaaggaaaagaaaactctctagcagaagataaagatggcagaagaaaagggaaagcaagtataaaagatccacattttctaaatttcaacaaaaagttatcatcctcctccagtgctctgctccacaaagataccagccaaggggacaccattgtatctactgcccacatgtcagtcacaggagaacagctgggcatgtcaagtcctaggggtgggagaaccacatcaaatgccacaagcaattgccaggaaaacccctgtcccagcaagtctctctccccaaagcagcatttggctcchgatcctgtagttaaccccacacaagatctgcatggtgtgaaaatcaaggaaaagggtaatcctgaggactttgtggaagggaaaagcatcttgtcaggaagcgtcctttctcatagcaacctagaaattaagaacctggaaggtaataggggtaagggccgagctgcaacatccttttctttgtcagacgtctccatgctctgttctgacatacctgacctacattcaactgcaattctgcaggagagtgtaatttcccatcttattgacaatgtcactttaacaaatgagaatgagccgggcagttccatctcagccctgattggccagtttgatgagac

SEQ ID NO: 5414 - DNA, 5569 bp, Homo sapiens
atgatgtctttgagacgagacctttatttgttacttttgagctacagtgacaagaaagatcacctaactgtggaagaactggctcagtttttgaaggtggagcaaaagatgaataatgtgacaacggactattgtcttgacatcataaagaagtttgaagtttcagaagaaaataaggtgaaaaatgttcttggcatagaaggcttcacgaacttcatgcgtagtcctgcctgtgacatatttaacccattgcaccatgaagtgtaccaagacatggatcagcccctctgcaactactacattgcttcctctcacaatacatacctgactggagaccagctcctttctcagtccaaagtggatatgtatgcacgggtgctgcaagagggctgtcgctgtgtggaagttgactgttgggatggcccagatggagagccagtagtacatcatggttacactctcacttcaaaaattctcttcagagatgttgtggagaccatcaacaagcatgcctttgtgaagaatgagtttcctgttatattgtctatcgagaatcactgcagtatccagcagcaaaggaagattgctcagtacctgaaaggaatattcggagacaaactggacctgtcatctgttgatacaggggagtgcaagcagcttccaagccctcaaagtttgaaaggcaaaattctagtgaagggtaagaagttgccttatcaccttggggatgatgcagaggaaggggaagtttcygatgaggacagtgcagatgaaattgaagacgagtgcaaattcaagctccattatagtaatgggaccactgagcatcaggtggaatctttcataaggaaaaaactggagtcactgttaaaagaatctcaaattcgagataaagaagatcctgatagtttcacagtgcgggcactactgaaggccacgcatgaaggcttaaatgcacacctgaagcagagtccagatgtaaaggaaagtggaaagaaatcacatggacgatccctcatgaccaactttggaaaacataagaaaactacaaaatcacggtctaaatcttacagtactgatgatgaggaagacacacagcagagtactggcaaggagggtggccagctgtacagattgggtcgccgaaggaaaaccatgaagctctgccgagaactctctgatttggttgtgtacacaaactccgtggccgctcaggacattgtggatgacggaaccacaggaaatgtgttatcattcagtgaaacaagagcacatcaggttgttcagcaaaaatcagagcagttcatgatttataatcaaaagcaactcacgaggatttacccctctgcctaccgcattgattccagtaacttcaaccctctcccctactggaacgcaggctgccagctagtggcactgaattatcaatctgaaggacgaatgatgcagttaaaccgagccaaattcaaggcaaatggcaattgtggctatgtcctcaaaccccagcaaatgtgcaaaggtactttcaaccctttctctggtgaccctcttcctgccaaccccaaaaagcagctcatcctgaaagttatcagtggacagcaactccccaaacctccagactccatgtttggagatcgaggcgagatcattgacccttttgttgaagttgaaattattggattgccagtagattgttgtaaagatcaaacccgtgtggtagatgacaatggatttaaccctgtgtgggaagaaacactgacatttacagtacacatgccagaaatagctttggttcggttccttgtgtgggatcacgatcccattggacgagactttgttggacaaagaactgtgaccttcagcagcttagtgcctggctaccggcatgtctatttggaaggactgacagaagcatccatatttgtacacataaccatcaatgaaatctatggaaagtggagccctttaatactcaaccccagttatactatattgcactttctaggagctacaaagaacagacaactccagggtctgaagggactgttcaataagaatcctaggcacagttcttcagaaaacaattcccattatgtacggaagcgatccattggagatagaattctgcgacgcacagctagcgccccagccaaaggcaggaaaaagagcaaaatgggcttccaagaaatggtggagataaaggattctgtgtccgaggccacaagagatcaagatggcgtgctgaggaggaccacacgcagtttgcaagcacgccctgtctctatgcctgttgacagaaaccttctgggagctttgtcgctgcctgtatctgaaacagcaaaagacattgaaggaaaagaaaactctctagtacaaatctgaataggaaacaacttaagcagaagataaagatggcagaagaaaagggaaagcaagtataaaagatccacattttctaaatttcaacaaaaagttatcatcctcctccagtgctctgctccacaaagataccagccaaggggacaccattgtatctactgcccacatgtcagtcacaggagaacagctgggcatgtcaagtcctaggggtgggagaaccacatcaaatgccacaagcaattgccaggaaaacccctgtcccagcaagtctctctccccaaagcagcatttggctcchgatcctgtagttaaccccacacaagatctgcatggtgtgaaaatcaaggaaaagggtaatcctgaggactttgtggaagggaaaagcatcttgtcaggaagcgtcctttctcatagcaacctagaaattaagaacctggaaggtaataggggtaagggccgagctgcaacatccttttctttgtcagacgtctccatgctctgttctgacatacctgacctacattcaactgcaattctgcaggagagtgtaatttcccatcttattgacaatgtcactttaacaaatgagaatgagccgggcagttccatctcagccctgattggccagtttgatgagaccaacaatcaggctctcacagttgtttctcatcttcataataccagtgtgatgtcaggccattgtcccttgcctagcctgggcctaaaaatgcccatcaagcatggtttttgcaagggaaaatccaagtcttccttcctgtgctcatctccggagctgatagcactctcgagttctgagaccaccaaacatgcaacgaacacagtttatgaaactacctgcactcccatctctaaaaccaaaccagatgatgacctttctagtaaggccaagacagcggccttagaaagcaacctgcctggatcccctaatacttctcgtggctggttaccaaaaagtcctaccaagggagaagactgggaaacactgaagagctgcagccctgcctcttcccctgatttgaccctggaggatgtaatagctgatcccactctctgtttcaattctggggagagcagccttgtggaaattgatggagaatcagaaaatctttctctaacaacctgtgaatataggagagagggcacaagtcaacttgcttctcctttaaaactcaagtacaatcagggtgtggtagaacactttcaaagaggtttgagaaacggctactgtaaagagaccctccgcccttctgtccctgaaatattcaacaatattcaagatgtcaaaactcaaagtatttcttatctagcctatcagggtgctggctttgtgcataatcatttctcagattcagatgcaaaaatgttccagacctgtgtgccccagcaatctagtgctcaagatatgcatgtccctgtacccaagcagttggcacatcttcctttgcctgctctgaaactgcctagtccttgcaaatccaaaagtctgggggacttaacatcagaggacattgcctgcaattttgagagcaagtaccagtgtattagtaagagttttgttacaactggcattagagacaagaagggcgtgactgtgaagacaaagtcgttagagcctatagatgccctgaccgagcagcttcggaagcttgtgtcctttgaccaggaagacaactgccaagtgctatattcaaagcaggatgccaatcagctcccccgggcactggtcaggaagttgtcatccagaagtcagagcagagtgcgcaatattgctagtcgtgccaaggagaaacaggaagccaacaagcagaaagttccaaaccccagcaatggggcaggagtggttcttagaaacaaaccctcagcacccacccctgcagtgaatcgccactccaccggctcctacatcgcaggctacctgaagaacacgaaagggggtggccttgaaggccggggcatcccagagggggcatgcacggctcttcactatggccacgttgaccagttttgttcagataattctgttttgcagactgagccaagcagtgatgataaaccagaaatttattttcttttgagactgtgaattatttaaaactgcattcttaaggttttcaaggtattctgtagaatgtcagagttttcagtaaataagttccttggctttggaatgattttcaaatgtatttttaaacttgtatttgggtctccctttgacttcatgtgttctccctgttaatgcgtttgtatatagatttggtgacatttcccatgtacctattatgatctttctcccttgagttgttgtaaactgtatcagtatgaaatatgtgcatgccctagatgtgaaactcctcagcagctcgggttataatgtgtgtgtgtttcaccaagatgtcctttactgtgtcctcagattgcagtcacaaatgtagtcatttttactctctaactgttgagttgattaagagactttgcaaacgacaaagggatgaattccttactttaatctgttatcatttttcctatgtttccctctttgttcagaagcccagatgcatttttataactcagttttaaaaactttaaaatagttaccttgccttttaggatgttcttatcccacccataatgagagttgaaaggggatggatagctgctccccatgcccttcccactttttggaataggccgtgagggtgtgasgaagaaggctgtcttttgtacataaggacaaaattgtttgttttacataaattttgttacatatttttgctaatggctttgtatgtaacaagaagcgagttgccaaactacctgttgtacttttgaattttctgattgaattacagactgcgaacaacggctttcagaatgagggacttccatcagactctaatgataatagtagcacaaattgaaaacttccccaaagctttcacagaatattttctcataataaaatccaagtgaacagataattagaagaaacccttttccttcagggaaccaagcaactctattttagtactgacatgcattattttcactgtgaattcacttttttattgcatgttcagatgtccctctttgttttttttttttgtaacattaactgcaatgatgttcttcctggaattcatgaaaatataattaaaacacatttttaaac

SEQ ID NO: 5415 - DNA, 1380 bp, Homo sapiens
ctcatcccactgtctccccagtttgggatcgtgtttgatgcgggctcctcccacaygtccctcttcctgtatcagtggcyggcgaacaaggagaatggcacgggtgtggtcagccaggccctggcctgccaggtggaagggcctggaatctcctcctacacttctaatgctgcacaggctggtgagagcctgcagggctgcttggaggaggcgctggtgctgatcccagaggcccagcatcggaaaacrcmcacgttcctgggggccacggctggcatgaggttgctcagccggaagaacagctctcaggccagggacatctttgcagcagtcacccaggtcctgggccggtctcccgtggacttttggggtgccgagctcctggccgggcaggccgaaggtgcctttggttggatcactgtcaactacggcttggggacgctggtcaagtactccttcactggagaatggatccagcctccggaggagatgctggtgggtgccctggacatgggaggggcctccacccagatcacgttcgtgcctgggggccccatcttggacaagagcacccaggccgattttcgcctctacggctccgactacagcgtctacactcacagctacctgtgctttggacgggaccagatgctgagcaggctcctcgtggggctggtgcagagccgcccggctgccctgctccgtcacccgtgctacctcagcggctaccagaccacactggccctgggcccgctgtatgagtcaccctgtgtccacgccacgcccccgctgagcctcccccagaacctcacagttgaagggacaggcaaccctggagcctgcgtctcagccatccgggaacttttcaacttctccagctgccagggccaggaggactgcgcctttgacggggtctaccagcccccgctgcggggccagttctatgccttctccaacttctactacaccttccacttcctgaacctcacctccaggcagcccctgagcacggtcaacgccaccatctgggagttttgccagaggccctggaaactggtggaggccagctaccctgggcaggaccgctggctgcgggactactgtgcctcaggcctgtacatcctcaccctcctgcacgagggctacgggttcagcgaggagacctggcccagcctcgagttccgaaagcaggcgggcggtgtggacattggctggacactgggctacatgctgaacctgaccgggatgatcccggccgatgcgccggctcagtggcgggcagagagctacggcgtctgggtggccaaagtggtgttcatggtgctggccctggtggcggtggtgggggctgccttggtccagctcttctggttgcaggac

SEQ ID NO: 5416 - DNA, 2874 bp, Homo sapiens
accccagccatgcccgccctcagtcgctgggccagcctgcccrgccccagcatgcgggaggcagccttcatgtacagcacagcagtggccatcttcctggtcatcctggtggccgcactgcagggctcggctccccgtgagagccccctcccctatcacatccccctggacccggaggggtccctggagctctcatggaatgtcagctacacccaggaggccatccatttccagctcctggtgcggaggctcaaggctggcgtcctgtttgsgatgtccgaccgtggcgagcttgagaacgcagatctcgtggtgctctggaccgmtggggacactgcctattttgcggamgcctggagtgaccagaaggggcagatccacctggatccccagcaggactaccagctgctgcaggtgcagaggaccccagaaggcctgaccctgcttttcaagaggccctttggcacctgcgaccccaaggattacctcattgargacggcactgtccacttggtctacgggatcctggaggagccgttccggtcactgsaggccatcaacggctcgggcctgcagatggggctgcagagggtgcagctcctgaagcccaatatccccgaaccggagttgccctcagacrcgtgcaccatggaggtccaagctcccaatatccagatccccagccaggagaccacgtactggtgctacattaaggagcttccaaasggcttctctcggcaccayattatcaagtaysagcccatcgtcaccaagggcaatgaggcccttgtccaccacatggaagtcttccagtgcgcccccgagatggacagcgtcccccacttcagcgggccctgcgactccaagatgaaacccraccgcctcaactactgccgccacgtgctggccgcctgggccctgggtgccaaggcattttactayccagaggaagccggccytkccttcgggggtccagggtcctccagatatctccgcctggaagttcactaccacaacccactggtgatagaaggacgaaacgactcctcaggcatccgcttgtactacacagccaagctgcggcgcttcaacgcggggatcatggagctgggactggtgtacacgccagtgatggccattccaccacgggagaccgccttcatcctcactggctactgcacggacaagtgcacccagctggcactgcctccctccgggatccacatcttcgcctctcagctccacacacacctgactgggagaaaggtggtcacagtgctggtccgggacggccgggagtgggagatcgtgaaccaggacaatcactacagccctcacttccaggagatccgcatgttgaagaaggtcgtgtcggtccatccgggagatgtgctcatcacctcctgcacgtacaacacrgaagaccgggagctggccacagtggggggcttcgggatcctggaggagatgtgtgtcaactacgtgcactactacccccagacgcagctggagctctgcaagagcgctgtggacgccggcttcctgcagaagtacttccacctcatcaacaggttcaacaacgaggatgtctgcacctgccctcaggcgtccgtgtctcagcagttcacctctgttccctsgaactccttcaacygcgacgtactgaaggccctgtacagcttcgcgcccatctccatgcactgcaacaagtcctcagccgtccgcttccagggtgaatggaayytgcagcccctgcccaaggtcatctccacactggaagagcccaccccacagtgycccaccagccagggccgaagccctgctggccccaccgttgtcagcattggtgggggcaaaggctgaggggggacctactcctccccctcctccatgctgtccctgtgggctcacaccggcactgtgcactctactctgcgacgatccccatggaacagcmctgcaygcccaggatgaaggggccagaccacgcccctgcctgagaccacggtccaatccagccttcttcccccagggtcccctgcatggctgagagggtgtgggtgccctgttgacctaccctggaccgagtggaccacgacctcgtccatttaaacccggctgactcagtgcagggacagccygcacagtggtccagggtccagccctccgccagccctgttccgcctcactgggtgtggcctggcttctgggacaggcaccatgctgggccggggtgtggaatcaccgggaacgcccccgcccccgccccgctgctcccggtgtgcagcgggtgcgggtgccgcttaaacatttccctgctgagtggctcgtgtttcacagtgggcggcttccctgcgacggaggcaggaccaggcatttagctagttagagactcgcctgggaaattgctccattcctgagtaaacagatattttcgcccacctaaagggaagccctgacaacaactatcaccaaaagacgaggcggcaaagatccagcggggcttctgggcgccggttccacgtggggtggaattattagcaccagcttgcttctctgccggtggggccagcgctgaacagaccggggtggagtcagggctgtgctttccgcgtggttctgccacttagggagtgtgccttgggcgggccatttcacattcctgaccctcacttttctcatctgtaaaaccaggctgatgccgtgcgggctaatgagccaataaagctcacacttgggctggcacccactggaggtgggtatgtttgcactccgggccgtcgctccaggagagagaascttgctcctgagcctcctccctgtgccaggcgtggtaccaagtgcttccccctgagcgtcctgaagctgcctcag

SEQ ID NO: 5417 - DNA, 3788 bp, Homo sapiens
aaaggggcggggccgccgccagccgctgcgggcaaggctgaacaggcggaggtgggcagccggccagggaagcacggtccaggcggctacattcggcccggccatggcagcggcgcccctgaaagtgtgcatcgtgggctcggggaactggttgccatgtcaaatcttagcgaggctgtgcaggatgcagacctgctggtgtttgtcattccccaccagttcattcacagaatctgtgatgagatcactgggagagtgcccaagaaagcgctgggaatcaccctcatcaagggcatagacgagggccccgaggggctgaarctcatttctgayatcatccgtgagaagatgggtattgacatcagtgtgctgatgggagccaacattgccaatgaggtggctgcagagaagttctgtgagaccaccatcggcagcaaagtaatggagaacggccttytcttcaaagaacttctgcagactccaaattttcgaattaccgtggttgatgatgcagacactgttgaactctgtggtgcgcttaagaacatcgtagctgtgggagctgggttctgcgacggcctccgctgtggagacaacaccaaagcggccgtcatccgcctgggactcatggaaatgattgcttttgccaggatcttctgcaaaggccaagtgtctacagccaccttcctagagagctgcggggtggccgacctgatcaccacctgttacggagggcgkaaccgcagggtggccgaggccttcgccagaactgggaagaccattgaagagttggagaaggagatgctgaatgggcaaaagctccaaggaccgcagacttctgctgaagtgtaccgcatcctcaaacagaagggactactggacaagtttccattgtttactgcagtgtatcagatctgctacgaaagcagaccagttcaagagatgttgtcttgtcttcagagccatccagagcatacataaagtgaatcatgcaacgtkttgggggaagttctgcctttctgatcaatcttttgggttcacgtggaaaccaggacttggcaacatgatgtttgactgtaatctcatcacggatatgtatgaatttttacaggttcgtttttgaattgtgagaggcagttcattagcaaagatgtactgggcagtaactaaacacacatgcaaacrtgtgaatggtggtttattcctcattctgtggatgtttctatgagccaaaatttgatgtctttttttcaaaattgcttatgaaatttccacacaatcgtagcttataagattggaacgatctcagctaaattttttaggtgtaattcatatgtatttgagtggaggattttttttctcatttttctagtgttaaattttaaccagcattaacatggtagagtggaggagtgagtgtgttcaaagatcaacatatttaacttttaaacactatctcaaagccagcataattaactactttgattgtgggctgacctttgtttttttaacaatcaggcatttttaattagataatccactcatgtatttccccctcactgcagttgtctgcatttttagcctcttttctcttcgttagttgtcagaatatgccttcgtcaaggctcagaggtaacaagacagaaaattcatctgggattttcctgctgtggctggcacattcttctgattaacagacacttgtatgatgctttaggctagttagtgcattttttagcaaacatttatcttaaacatcacagatccactggggggtgcaaggggctactgttagtcctcttgttagatgcagtcactcctcctggtcacctagtgagcagggacagagccaggagtcaagtgcagtgccaaggtgcatgaccctctgagaagtcactgggctgatttgacctccgactcattggttgtgcaaatgccatgtgcagcctttcctgaggccataggagggcttcctgcagctgagatctatgcaggccatcctctcaacargtgccactccaagggcggtcctcggtgcagcagcakcagcttcacttgtgggggggtgggggaaggggcggtctcagaaatgcaggttcccaggtcccaccctggacttctgaaggggtgtggcatctgtgtttctgatgcttactacaatatgtgaaccactactttagaaaatctgctttaacttggyattcctctaattgtgttccctaggaaatgactgtcccaagagccagtgattattccaggtgttccctggaaaggtcaagtgagtctgggaaacactatgtctgtacacctcttgaaggtgtcgaatgtatgtttatacatcagtggaacccatttttctagcctagcaagtcccaaacacattacactgaagagattttggtgaggaaacttgctggagttttcagggaacactgttctaggcttaggtgacygtaggatcactcaagtagacccttcactccctgcgagaaattaggatgaataactacctgtggcattgttggttctgaacttttacagttcaggcctgctgtgaatctttgatgaagctttaaggtgacactgttgtacaagatgtcagctttgctgaaacgcacattacctggaataagtgctttaattgtagaattagaatgggatttactgtactgttttaaatgagattggcttcagaatccattacagttaccttacatagcacttgatacgtgttaaatgaacatatgaatgtaatttatatattcctagaatttaagttactttgtgagatttgggcctgtccctcaacgccagtttaggatttctttttttctataccttgaaatgattataaaatagattttcatgggaattttaaaaactctatccaaaacatttttggagcattttaaagccccatacacagaagtatacgaaagcacacaaaacactccaagtttcagcagttttagcgccaccattaacccactttgcttgtctcatgaaaaatctttgttaaagtttgtacacaggtaacaaaaagttactttaaaagatatataaagggctgtaagctaattgtggtgtctagtaagtagcataatgagatgtgaggagttggaactttgcgtgttttgcgtattttcatctgcattcagcttcttactctgggtttgtactcgagtgttatttctttacaaatgcccttgtaattaccactctgaagtctgctgactgtgtctcttgaacatacttaggatattctgcacattatggaaaaaggtaaattttagaagtttctgctctactaactgtagatatttatgacyctgcgagttatctatttttataaccacctgtggtccattgttcattttaattcacatttcttatgaagtatggtaacagggagggagacacctagattagcagctcaatttgtactacttcagccaatctgtgaatgtaaaaactacactgttgccttgctaggatccaccctcctrtaatatggaacaaatatctgaatgaaatccaccctaggagacggagtcaaactaaacttgtggtttttcatttaacttttgactacagcatggccccatggcatccacaccaagagggtgttgtgatgaggtgccggtgtgcaaagggaactttagtttttccactggttcttatctgctagccttttacatacatgtgtactatatttgtttatagactgtaggtggatatataatttaaaagcttgatttaataaacatttaaccccctaaacttgcacc

SEQ ID NO: 5418 - DNA, 4044 bp, Homo sapiens
cgaagcgggtcctgccccgctgtcagctgcggcccccggcgccgggcgggggtggccgcgacyattggcggagaggcgaaaggggcggggccgccgccagccgctgcgggcaaggctgaacaggcggaggtgggcagccggccagggaagcacggtccaggcggctacattcggcccggccatggcagcggcgcccctgaaagtgtgcatcgtgggctcggggaactggggttcagctgttgcaaaaataattggtaataaygtcaagaaacttcagaaatttgcctccacagtcaagatgtgggtctttgaagaaacagtgaatggcagaaaactgacagacatcataaataatgaccatgaaaatgtaaaatatcttcctggacacaagctgccagaaaatgtggttgccatgtcaaatcttagcgaggctgtgcaggatgcagacctgctggtgtttgtcattccccaccagttcattcacagaatctgtgatgagatcactgggagagtgcccaagaaagcgctgggaatcaccctcatcaagggcatagacgagggccccgaggggctgaarctcatttctgayatcatccgtgagaagatgggtattgacatcagtgtgctgatgggagccaacattgccaatgaggtggctgcagagaagttctgtgagaccaccatcggcagcaaagtaatggagaacggccttytcttcaaagaacttctgcagactccaaattttcgaattaccgtggttgatgatgcagacactgttgaactctgtggtgcgcttaagaacatcgtagctgtgggagctgggttctgcgacggcctccgctgtggagacaacaccaaagcggccgtcatccgcctgggactcatggaaatgattgcttttgccaggatcttctgcaaaggccaagtgtctacagccaccttcctagagagctgcggggtggccgacctgatcaccacctgttacggagggcgkaaccgcagggtggccgaggccttcgccagaactgggaagaccattgaagagttggagaaggagatgctgaatgggcaaaagctccaaggaccgcagacttctgctgaagtgtaccgcatcctcaaacagaagggactactggacaagtttccattgtttactgcagtgtatcagatctgctacgaaagcagaccagttcaagagatgttgtcttgtcttcagagccatccagagcatacataaagtgaatcatgcaacgtkttgggggaagttctgcctttctgatcaatcttttgggttcacgtggaaaccaggacttggcaacatgatgtttgactgtaatctcatcacggatatgtatgaatttttacaggttcgtttttgaattgtgagaggcagttcattagcaaagatgtactgggcagtaactaaacacacatgcaaacrtgtgaatggtggtttattcctcattctgtggatgtttctatgagccaaaatttgatgtctttttttcaaaattgcttatgaaatttccacacaatcgtagcttataagattggaacgatctcagctaaattttttaggtgtaattcatatgtatttgagtggaggattttttttctcatttttctagtgttaaattttaaccagcattaacatggtagagtggaggagtgagtgtgttcaaagatcaacatatttaacttttaaacactatctcaaagccagcataattaactactttgattgtgggctgacctttgtttttttaacaatcaggcatttttaattagataatccactcatgtatttccccctcactgcagttgtctgcatttttagcctcttttctcttcgttagttgtcagaatatgccttcgtcaaggctcagaggtaacaagacagaaaattcatctgggattttcctgctgtggctggcacattcttctgattaacagacacttgtatgatgctttaggctagttagtgcattttttagcaaacatttatcttaaacatcacagatccactggggggtgcaaggggctactgttagtcctcttgttagatgcagtcactcctcctggtcacctagtgagcagggacagagccaggagtcaagtgcagtgccaaggtgcatgaccctctgagaagtcactgggctgatttgacctccgactcattggttgtgcaaatgccatgtgcagcctttcctgaggccataggagggcttcctgcagctgagatctatgcaggccatcctctcaacargtgccactccaagggcggtcctcggtgcagcagcakcagcttcacttgtgggggggtgggggaaggggcggtctcagaaatgcaggttcccaggtcccaccctggacttctgaaggggtgtggcatctgtgtttctgatgcttactacaatatgtgaaccactactttagaaaatctgctttaacttggyattcctctaattgtgttccctaggaaatgactgtcccaagagccagtgattattccaggtgttccctggaaaggtcaagtgagtctgggaaacactatgtctgtacacctcttgaaggtgtcgaatgtatgtttatacatcagtggaacccatttttctagcctagcaagtcccaaacacattacactgaagagattttggtgaggaaacttgctggagttttcagggaacactgttctaggcttaggtgacygtaggatcactcaagtagacccttcactccctgcgagaaattaggatgaataactacctgtggcattgttggttctgaacttttacagttcaggcctgctgtgaatctttgatgaagctttaaggtgacactgttgtacaagatgtcagctttgctgaaacgcacattacctggaataagtgctttaattgtagaattagaatgggatttactgtactgttttaaatgagattggcttcagaatccattacagttaccttacatagcacttgatacgtgttaaatgaacatatgaatgtaatttatatattcctagaatttaagttactttgtgagatttgggcctgtccctcaacgccagtttaggatttctttttttctataccttgaaatgattataaaatagattttcatgggaattttaaaaactctatccaaaacatttttggagcattttaaagccccatacacagaagtatacgaaagcacacaaaacactccaagtttcagcagttttagcgccaccattaacccactttgcttgtctcatgaaaaatctttgttaaagtttgtacacaggtaacaaaaagttactttaaaagatatataaagggctgtaagctaattgtggtgtctagtaagtagcataatgagatgtgaggagttggaactttgcgtgttttgcgtattttcatctgcattcagcttcttactctgggtttgtactcgagtgttatttctttacaaatgcccttgtaattaccactctgaagtctgctgactgtgtctcttgaacatacttaggatattctgcacattatggaaaaaggtaaattttagaagtttctgctctactaactgtagatatttatgacyctgcgagttatctatttttataaccacctgtggtccattgttcattttaattcacatttcttatgaagtatggtaacagggagggagacacctagattagcagctcaatttgtactacttcagccaatctgtgaatgtaaaaactacactgttgccttgctaggatccaccctcctrtaatatggaacaaatatctgaatgaaatccaccctaggagacggagtcaaactaaacttgtggtttttcatttaacttttgactacagcatggccccatggcatccacaccaagagggtgttgtgatgaggtgccggtgtgcaaagggaactttagtttttccactggttcttatctgctagccttttacatacatgtgtactatatttgtttatagactgtaggtggatatataatttaaaagcttgatttaataaacatttaaccccctaaacttgcacc

SEQ ID NO: 5419 - DNA, 4242 bp, Homo sapiens
gcggccgctgctgaggcggagactccccgccgccgcttcctccaccccsagtccgccggcctcgcggcgctgagggcgggagcgcgcagagctcttccctcctcctttttcttcctcctcctcctcctcctccgggtccccgcccagcacccctcgcaccaggcggcggcggcggaggaggagagctagacccgccgccggggcacaacatggcggagccctcggccccggagagcaagcacaagtcgtccctcaactcgtccccgtggagtggcctcatggccctgggaaacagccggcacggccaccacgggcccggggcccagtgcgcgcacaaggcggcgggcggcgcggcgccgccgaagccggccccggcggggctgtccggggggctgtcgcagccggctgggtggcagtcgcttctctccttcaccatcctcttcctggcctggcttgccggcttcagctcgcgcctcttcgccgtcatccgcttcgaaagcatcatccacgagttcgacccgtggtttaactatagatcaacacatcatcttgcatctcatgggttctatgaatttttaaattggtttgatgaaagagcatggtatccactaggaagaatagtaggtggtactgtttacccagggttgatgataaccgctggccttattcattggattttaaatacattgaacataactgttcacataagagacgtatgtgtgttccttgcaccaacttttagcggccttacatctatatctactttcctgcttacaagagaactttggaaccaaggagcaggacttttagctgcttgttttattgctattgtaccaggctacatatctcggtcagtagctggatcctttgataatgaaggcattgctatttttgcacttcagttcacatactatttatgggtaaaatctgtaaaaactgggtcagttttttggacaatgtgctgctgcttatcctatttctatatggtctctgcttggggtggttatgtatttatcatcaatcttattccactgcatgtatttgtgttgttactgatgcagagatacagcaaaagagtctacatagcatatagcactttctacattgtgggtttaatattatcaatgcagataccttttgtgggattccagccaatcagaacaagtgaacacatggcagctgcaggtgtctttgcattgctgcaagcttatgctttcttgcagtatctgagagaccgattaacaaaacaagagttccagacccttttctttttgggtgtatcactagctgcaggtgctgtgttccttagtgtcatctatttgacttatacaggttacattgcaccatggagtggcaggttttattcattgtgggatactgggtatgcaaaaatacacattccaattattgcatcagtgtctgagcatcaacctacgacttgggtgtctttcttctttgatctacatattcttgtatgtaccttcccagcaggcctttggttctgcatcaaaaatatcaacgatgaaagagtatttgttgctctatatgcaatcagtgctgtctactttgctggagtgatggtgcgactgatgttgactttgactccagtcgtgtgtatgctgtctgcaattgccttttcaaatgtttttgagcactatttgggggatgacatgaaaagggaaaatccacctgtggaggacagcagtgatgaggatgacaaaagaaaccaaggaaatttgtatgataaggcaggtaaagtgaggaaacatgcaactgaacaggaaaaaactgaagagggattaggccctaatataaaaagcattgtcaccatgttgatgctgatgctattgatgatgtttgctgtccactgtacctgggtcacaagcaatgcctactctagtccaagtgtagtcctggcctcatacaatcatgatggcaccaggaatatcttagatgattttagagaagcttayttttggctaaggcaaaatacagatgaacatgcacgagtaatgtcttggtgggattatggctatcagatagctggaatggctaatagaactacgttggtggataataacacctggaataacagccacatagcactggtgggaaaagctatgtcttctaatgaaacagcagcctataaaatcatgaggactctagatgtagattatgttttggttatttttggaggggttattggctattctggtgatgatatcaacaaatttctctggatggttaggatagctgaaggagaacatcccaaagacattcgggaaagtgactattttaccccacagggagaattccgtgtagacaaagcaggatcccctactttgttgaattgccttatgtataaaatgtcatactacagatttggagaaatgcagctggattttcgtacacccccaggttttgaccgaacacgtaatgctgagattggaaataaggacattaaattcaaacatttggaagaagcctttacatcagaacactggcttgttaggatatataaagtaaaagcacctgataacagggagacattagatcacaaacctcgagtcaccaacattttcccaaaacagaagtatttgtcaaagaagactaccaaaaggaagcgtggctacattaaaaataagctggtttttaagaaaggcaagaaaatatctaagaagactgtttaaatgcactgttctggttcctaacttgaagcagttgtccttgtgagaaccggtctttgcctttagctcatgtcgtgtttcacagcaaagagggtacagaaccatcactggtccaggttaatgtacaaaattttctggcaatgcctgattaaaaaaataaaattggcttgttgagaacagctgttttcgatttctaatgtgaagcaagacagagcactgctgtaaatgtctagcagcagattttttttttattggtacatattatccttcaaatctgagaatttggactaactgcaccaaagaaccctctaatttggtccctggcacatgcatacttgtcaatgtttttattcttttacaagacctgcattttatttgaattacccgaatagcaatatgtaaaatacaagtgacaaaatgtgatgagagcttcttgaaccggtaaactagtacaggtctgagaaagacatattagaagaatcattatacttccttgaattatatttattttcatgtttctctaatgcaaagaatgtttcatcaaatgtatattttctgttgcttactgtttgctctgagaagaagctgctgtttcaaagatggacctctgagtagctaattgattcaagtagtttttttatgttgacacattattactgctgttagcagtcgttttcaccaggtacttacagagcagatttcatacatcattcattcaagggctaaatttatattttttggaaatcatggcaactacacaggatgttgcttaccaggacggagttttggtatcttagtactgaagttagcactatgtttacatgcaaaagattaaggaaaaaacccttaaagtggacaggtatccaaagttcattttctgtgactcatcaaagtgacaaaagacttgtaacaactttgcctggacttttttcattttacaacagttcatccattcacartgattttgttctctgctccatattttttaatcccttaagcatttgatgaaacactctttagtgctatatgcattttcttacttttgttaaaaatgtgacarttgtcaaaaaatgcactaaaatgtaaatggagattgaacaagttcactttccagcttataggcaactttatacagacttgaacattttctccagttgtttagtaaaagtgaaagagaaagggtttttcctgccacaggatataacttttttttatataacaagcataacacaccactgcttttggtggaaaagtgcagaatagtatgtaccytttatgaagaaaaatgtaatttacaatattcagtgagaatgttactgctgattttcttttccaaggtgtagaatattctttgatttatagaattcatttttgacccagatgatggttcctttacagaacaataaaatggctgaacattttcacaaatagagtgtaacgaagtctggatttctgataccttgtcatttgggggattttattttactttgttgctttaaaattcaatgcagagaagttgttgactgtaggggaaataaagttaattcaaattttg

SEQ ID NO: 5420 - DNA, 3904 bp, Homo sapiens
ggccgaagtcgggcgagcgcgccgtgcggcggctgggagtgggctgcatgtgccgcgcggggagcccgcccgacttcggggaggcagcggggcgccgtggccccgcggctcagctccctgccgggtcgggtgtcccagccctgcgacttccggggcccggcggctcctcggggagctcgtccacaggcagcctccggggcgagagagcgcgcggcgcgggcgccgggacggtccgcggcacgcgggtggagccgccggcgctcgggctcccgcaggggcggcgggcggggcggggtgaggcgggccggccgccctcccctctcctccctcccgcagcccgccctcccttcctccggtcccgcagccaattaggcggccccctcgggcgggaggcgtggggcgctgcataaagcggcggggagctgccaccccgggagcgggctgcgcagtgtccgggccgagccggtgcgccgcagactagggcgcctcgggccagggagcgcggaggagccatggccaccgctaacggggccgtggaaaacgggcagccggacrggaagccgccggccctgccgcgccccatccgcaacctggaggtcaagttcaccaagatatttatcaacaatgaatggcasgaatccaagagtgggaaaaagtttgctacatgtaacccttcaactcgggagcaaatatgtgaagtggaagaaggagataagcccgacgtggacaaggctgtggaggctgcacaggttgccttccagaggggctcgccatggcgccggctggatgccctgagtcgtgggcggctgctgcaccagctggctgacctggtggagagggaccgcgccaccttggccgccctggagacgatggatacagggaagccatttcttcatgcttttttcatcgacctggagggctgtattagaaccctcagatactttgcagggtgggcagacaaaatccagggcaagaccatccccacagatgacaacgtcgtgtgcttcaccaggcatgagcccattggtgtctgtggggccatcactccatggaacttccccctgctgatgctggtgtggaagctggcacccgccctctgctgtgggaacaccatggtcctgaagcctgcggagcagacacctctcaccgccctttatctcggctctctgatcaaagaggccgggttccctccaggagtggtgaacattgtgccaggattcgggcccacagtgggagcagcaatttcttctcaccctcagatcaacaagatcgccttcaccggctccacagaggttggaaaactggttaaagaagctgcgtcccggagcaatctgaagcgggtgacgctggagctgggggggaagaacccctgcatcgtgtgtgcggacgctgacttggacttggcagtggagtgtgcccatcagggagtgttcttcaaccaaggccagtgttgcacggcagcctccagggtgttcgtggaggagcaggtctactctgagtttgtcaggcggagcgtggagtatgccaagaaacggcccgtgggagaccccttcgatgtcaaaacagaacaggggcctcagattgatcaaaagcagttcgacaaaatcttagagctgatmgagagtgggaagaaggaaggggccaagctggaatgcgggggctcagccrtggaagacaaggggctcttcatcaaacccactgtcttctcagaagtcacagacaacatgcggattgccaaagaggagattttcgggccagtgcaaccaatactgaagttcaaaagtatcgaagaagtgataaaaagagcgaatagcaccgactatggactcacagcagccgtgttcacaaaaaatctcgacaaagccctgaagttggcttctgccttagagtctggaacggtctggatcaactgctacaacgccctctatgcacaggctccatttggtggctttaaaatgtcaggaaatggcagagaactaggtgaatacgctttggccgaatacacagaagtgaaaactgtcaccatcaaacttggcgacaagaacccctgaagraaaggcggggctccttcctcaaacatcsgackgcggaatgtggcagatgaaatgtgctggaggaaaaaaatgacatttctgaccttcccgggacacattcttctggaggctttacatctactggagttgaatgattgctgttttcctctcactctcctgtttattcaccaractggggatgcctatrggttgtctgtgaaatcgyagtcctgcctggggagggagctgttggccatttctgtgtttccctttaaaccagatcctggagacagtgagatactcagggcgttgttaacagggagtggtatttgaagtgtccagcagttgcttgaaatgctttgccgaatctgactccagtaagaatgtgggaaaaccccctgtgtgttctgcaagcagggctcttgcaccagcggtctcctcagggtggacctgcttacagagcaagccaygcctctttccgaggtgaaggtgggaccattccttgggaaaggattcacagtaaggttttttggtttttgttttttgtttttttgtttttaaaaaaaggatttcacagtgagaaagttttggttagtgcataccgtggaagggcgccagggtctttgtggattgcatgttgacattgaccgtgagattcggcttcaaaccaatactgcctttggaatatgacagaatcaatagcccagagagcttagtcaaagacgatatcacggtctaccttaaccaaggcactttcttaagcagaaaatattgttgaggttacctttgctgctaaagatccaatcttctaacgccacaacagcatagcaaatcctaggataattcacctcctcatttgacaaatcagagctgtaattcrctttaacaaattacgcatttctatcacgttcactaacagcttatgataagtctgtgtagtcttccttttctccagttctgttacccaatttagattagtaaagcgtacacaactggaaagactgctgtaataacacagccttgttatttttaagtcctattttgatattaatttctgattagttagtaaawaacacctggattctatggaggacctcggtcttcatccaagtggcctgagtatttcactggcaggttgtgaatttttcttttcctctttggggatccaaatgatgatgtgcaatttcatgttttaacttgggaaactgaaagtgttcccatatagcttcaaaaacaaaaacmaatgtgttatccgacggatacttttatggttactaactagtactttcctaattgggaaagtagtgcttaagtttgcaaattaagttggggagggcaataataaaatgagggcccrtaacagaaccagtgtgtgtataacgaaaaccatgtataaaatgggcctatcacccttgtcagagatataaattaccacatttgccttcccttcatcagctaacacttatcacttatactaccaataacttgttaaatcaggatttggcttcatacactgaattttcagtattttatctcaagtagatatagacactaaccttgatagtgatacgttagagggttcctattcttccattgtacgataatgtctttaatatgaaatgctacattatttataattggtagagttattgtatctttttatagttgtaagtacacagaggtggtatatttaaacttctgtaatayactgtatttagaaatggaaatatatatagtgttaggtttcacttcttttaaggtttacccctgtggtgtggtttaaaaatctataggcctgggaattccgatcctagctgcagatyrcatcccmcaatgcgagaatgataaaataaaattggatatttgagaaa

SEQ ID NO: 5421 - DNA, 3283 bp, Homo sapiens
ggccgaagtcgggcgagcgcgccgtgcggcggctgggagtgggctgcatgtgccgcgcggggagcccgcccgacttcggggaggcagcggggcgccgtggccccgcggctcagctccctgccgggtcgggtgtcccagccctgcgacttccggggcccggcggctcctcggggagctcgtccacaggcagcctccggggcgagagagcgcgcggcgcgggcgccgggacggtccgcggcacgcgggtggagccgccggcgctcgggctcccgcaggggcggcgggcggggcggggtgaggcgggccggccgccctcccctctcctccctcccgcagcccgccctcccttcctccggtcccgcagccaattaggcggccccctcgggcgggaggcgtggggcgctgcataaagcggcggggagctgccaccccgggagcgggctgcgcagtgtccgggccgagccggtgcgccgcagactagggcgcctcgggccagggagcgcggaggagccatggccaccgctaacggggccgtggaaaacgggcagccggacrggaagccgccggccctgccgcgccccatccgcaacctggaggtcaagttcaccaagatatttatcaacaatgaatggcasgaatccaagagtgggaaaaagtttgctacatgtaacccttcaactcgggagcaaatatgtgaagtggaagaaggagataagcccgacgtggacaaggctgtggaggctgcacaggttgccttccagaggggctcgccatggcgccggctggatgccctgagtcgtgggcggctgctgcaccagctggctgacctggtggagagggaccgcgccaccttggccgccctggagacgatggatacagggaagccatttcttcatgcttttttcatcgacctggagggctgtattagaaccctcagatactttgcagggtgggcagacaaaatccagggcaagaccatccccacagatgacaacgtcgtgtgcttcaccaggcatgagcccattggtgtctgtggggccatcactccatggaacttccccctgctgatgctggtgtggaagctggcacccgccctctgctgtgggaacaccatggtcctgaagcctgcggagcagacacctctcaccgccctttatctcggctctctgatcaaagaggccgggttccctccaggagtggtgaacattgtgccaggattcgggcccacagtgggagcagcaatttcttctcaccctcagatcaacaagatcgccttcaccggctccacagaggttggaaaactggttaaagaagctgcgtcccggagcaatctgaagcgggtgacgctggagctgggggggaagaacccctgcatcgtgtgtgcggacgctgacttggacttggcagtggagtgtgcccatcagggagtgttcttcaaccaaggccagtgttgcacggcagcctccagggtgttcgtggaggagcaggtctactctgagtttgtcaggcggagcgtggagtatgccaagaaacggcccgtgggagaccccttcgatgtcaaaacagaacaggggcctcagattgatcaaaagcagttcgacaaaatcttagagctgatmgagagtgggaagaaggaaggggccaagctggaatgcgggggctcagccrtggaagacaaggggctcttcatcaaacccactgtcttctcagaagtcacagacaacatgcggattgccaaagaggagattttcgggccagtgcaaccaatactgaagttcaaaagtatcgaagaagtgataaaaagagcgaatagcaccgactatggactcacagcagccgtgttcacaaaaaatctcgacaaagccctgaagttggcttctgccttagagtctggaacggtctggatcaactgctacaacgccctctatgcacaggctccatttggtggctttaaaatgtcaggaaatggcagagaactaggtgaatacgctttggccgaatacacagaagtgaaaactgtcaccatcaaacttggcgacaagaacccctgaagraaaggcggggctccttcctcaaacatcsgackgcggaatgtggcagatgaaatgtgctggaggctttacatctactggagttgaatgattgctgttttcctctcactctcctgtttattcaccaractggggatgcctatrggttgtctgtgaaatcgyagtcctgcctggggagggagctgttggccatttctgtgtttccctttaaaccagatcctggagacagtgagatactcagggcgttgttaacagggagtggtatttgaagtgtccagcagttgcttgaaatgctttgccgaatctgactccagtaagaatgtgggaaaaccccctgtgtgttctgcaagcagggctcttgcaccagcggtctcctcagggtggacctgcttacagagcaagccaygcctctttccgaggtgaaggtgggaccattccttgggaaaggattcacagtaaggttttttggtttttgttttttgtttttttgtttttaaaaaaaggatttcacagtgagaaagttttggttagtgcataccgtggaagggcgccagggtctttgtggattgcatgttgacattgaccgtgagattcggcttcaaaccaatactgcctttggaatatgacagaatcaatagcccagagagcttagtcaaagacgatatcacggtctaccttaaccaaggcactttcttaagcagaaaatattgttgaggttacctttgctgctaaagatccaatcttctaacgccacaacagcatagcaaatcctaggataattcacctcctcatttgacaaatcagagctgtaattcrctttaacaaattacgcatttctatcacgttcactaacagcttatgataagtctgtgtagtcttccttttctccagttctgttacccaatttagattagtaaagcgtacacaactggaaagactgctgtaataacacagccttgttatttttaagtcctattttgatattaatttctgattagttagtaaawaacacctggattctatggaggacctcggtcttcatccaagtggcctgagtatttcactggcaggttgtgaatttttcttttcctctttggggatccaaatgatgatgtgcaatttcatgttttaacttgggaaactgaaagtgttcccatatagcttcaaaaacaaaaacmaatgtgttatccgacggatacttttatggttactaactagtactttcctaattg

SEQ ID NO: 5422 - DNA, 3711 bp, Homo sapiens
acaaaggcaaggaggactgtctgggagccacgcgggcgatacagtttccgaggcacgccgcgtcccgcctagcctgttgaacaggtagacatgagcgacccaagctgcggatttgcgaggcgcgccctggagctgctagagatccggaagcacagccccgaggtgtgcgaagccaccaaacatcccagttaccagtgtccttgaattgatagtggcttctktttgtcagtctcatataagaactacagctcatcaggaggagatyrcagcagggtaagagacaccaacaccatgttctgcacgaagctcaaggatctcaagatcacaggagagtgtcctttctccttactggcaccaggtcaarttcctaacgagtcttcagaggaggcagcaggaagctcagagagctgcaaagcaaccgtgcccatctgtcaagacattcctgagaagaacatacaagmaagtcttcctcaaagaaaaaccagtcggagccgagtctatcttcacactttggcagagagtatttgcaaactgattttcccagagtttgaacggctgaatgttgcacttcagagaacattggcaaagcacaaaataaaagaaagcaggaaatctttggaaagagaagactttgaaaaaacaattgcagagcaagcagttgcagcaggagttccagtggaggttatcaaagaatctcttggtgaagaggtttttaaaatatgttacgaggaagatgaaaacatccttggggtggttggaggcacccttaaagattttttaaacagcttcagtacccttctgaaacagagcagccaytgccaagaagcaggaaaaaggggcaggcttgaggacgcctccattctatgcctggataaggaggatgattttctacatgtttactacttcttccctaagagaaccacctccctgattcttcccggcatcataaaggcagctgctcacgtattatatgaaacggaagtggaagtgtcgttaatgcctccctgcttccataatgattgcagcgagtttgtgaatcagccctacttgttgtactccgttcacatgaaaagcaccaagccatccctgtcccccagcaaaccccagtcctcgctggtgattcccacatcgctattctgcaagacatttccattccatttcatgtttgacaaagatatgacaattctgcaatttggcaatggcatcagaaggctgatgaacaggagagactttcaaggaaagcctaattttgaagaatactttgaaattctgactccaaaaatcaaccagacstttagcgggatcatgactatgttgaatatgcagtttgttgtacgagtgaggagatgggacaactctgtgaaaaaatcttcaagggttatggacctcaaaggccaaatgatctacattgttgaatccagtgcaatcttgtttttggggtcaccctgtgtggacagattagaagattttacaggacgagggctctacctctcagacatcccaattcacaatgcactgagggatgtggtcttaataggggaacaagcccgagctcaagatggcctgaagaagaggctggggaagctgaaggctacccttgagcaagcccaccaagccctggaggaggagaagaaaaagacagtagaccttctgtgctccatatttccctgtgaggttgctcagcagctgtggcaagggcaagttgtgcaagccaagaagttcagtaatgtcaccatgctcttctcagacatcgttgggttcactgccatctgctcccagtgctcaccgctgcaggtcatcaccatgctcaatgcactgtacactcgcttcgaccagcagtgtggagagctggatgtctacaaggtggagaccattggcgatgcctattgtgtrgctgggggattacacaaagagagtgatactcatgctgttcagatagcrctgatggccctgaagatgatggagctctctgatgaagttatgtctccccatggagaacctatcaagatgcgaattggactgcactctggatcagtttttgctggcgtcgttggagttaaaatgccccgttactgtctttttggaaacaatgtcactctggctaacaaatttgagtcctgcagtgtaccacgaaaaatcaatgtcagcccaacaacttacagattactcaaagactgtcctggtttcgtgtttacccctcgatcaagggaggaacttccaccaaacttccctagtgaaatccccggaatctgccattttctggatgcttaccaacaaggaacaaactcaaaaccatgcttccaaaagaaagatgtggaagatggcaatgccaattttttaggcaaagcatcaggaatagattagcaacctatatacctatttataagtctttggggtttgactcattgaagatgtgtagagcctctgaaagcactttagggattgtagatggctaacaagcagtattaaaatttcaggagccaagtcacaatctttctcctgtttaacatgacaaaatgtatgtactcacttcagtacttcagctcttcaagaaaaaaaaaaaaaaccttaaaaagctacttttgtgggagtatttctattatataaccagcacttactacctgtactcaaaattcagcaccttgtacatatatcagataattgtagtcaattgtacaaactgatggagtcacctgcaatctcatatcctggtggaatgccatggttattaaagtgtgtttgtgatagtgtcgtcaaaaaaaaggtttttgaatagaaattacattctttgacaccctcagttctttcamactttcaactctgcattttattgcattttctcatttaacygttagtatatgtttgaatataggctgactttttttctctattgcactttcttctttttttctttttagaaaataagcaattaggggttagatgcaatatgaatataaaatagttctgtaaataccaaatattatttttagttctggaagttaaaaatactctccatagtaaygtgtgttataataataaatatttcttttgtttgacttttttaaaattctacaatggtaaaagctattttaatccatgttagcaatttaattcctattaattcattttactatcataatagcaaagtattcagaataaaagaggtttatatcttctattaaaatgcagtaatactattcaaatctaatttagctggaagcaacatgggagtaaagtaatcatccaggggacccaccataaaggacattggtaaaacatttacacacgtaaacacacgtgcaggcacacttggaacaatatggacccacttcagcagacatcttctattgccatgctgagctgtttaaagttttaagaagaaaatctaagtatggaagtagaaaataagacttgttcttttggtggatatctcatttttcttgagtatttgtgctgaacattttggtgtatgtctrtgaactaagaatcaagtttttgtctcattaaatatacatatatgaagtgtttttattctacttgaaatatcttgacttaaaaaaaacgactgttagtattgatgaagcaaatgaggcagtgactacattatggaaatgtctaagtattttttccggaacttcaactttttctttttgttttacataaacatttaagcagctaggaacttttagttttarttaggtcagttgaagt

SEQ ID NO: 5423 - DNA, 3943 bp, Homo sapiens
ctgttatggcgattgggcggctgcagagaccaggactcagttcccctgccctagtctgagcctagtgggtgggactcagctcagagtcagttttccagaagcaggtttcagtgcagagttttcctacacttttcctgcgctagagcagcgagcagcctggaacagacccaggcggaggacacctgtgggggagggagcgcctggaggagcttagagaccccagccgggcgtgatctcaccatgtgcggatttgcgaggcgcgccctggagctgctagagatccggaagcacagccccgaggtgtgcgaagccaccaagactgcggctcttggagaaagcgtgagcagggggccaccgcggtctccgcgcctgtctgcaccctgtcgcctgagctgcctgacagtgacaatgacatcccagttaccagtgtccttgaattgatagtggcttctktttgtcagtctcatataagaactacagctcatcaggaggagatyrcagcagggtaagagacaccaacaccatgttctgcacgaagctcaaggatctcaagatcacaggagagtgtcctttctccttactggcaccaggtcaarttcctaacgagtcttcagaggaggcagcaggaagctcagagagctgcaaagcaaccgtgcccatctgtcaagacattcctgagaagaacatacaagmaagtcttcctcaaagaaaaaccagtcggagccgagtctatcttcacactttggcagagagtatttgcaaactgattttcccagagtttgaacggctgaatgttgcacttcagagaacattggcaaagcacaaaataaaagaaagcaggaaatctttggaaagagaagactttgaaaaaacaattgcagagcaagcagttgcagcaggagttccagtggaggttatcaaagaatctcttggtgaagaggtttttaaaatatgttacgaggaagatgaaaacatccttggggtggttggaggcacccttaaagattttttaaacagcttcagtacccttctgaaacagagcagccaytgccaagaagcaggaaaaaggggcaggcttgaggacgcctccattctatgcctggataaggaggatgattttctacatgtttactacttcttccctaagagaaccacctccctgattcttcccggcatcataaaggcagctgctcacgtattatatgaaacggaagtggaagtgtcgttaatgcctccctgcttccataatgattgcagcgagtttgtgaatcagccctacttgttgtactccgttcacatgaaaagcaccaagccatccctgtcccccagcaaaccccagtcctcgctggtgattcccacatcgctattctgcaagacatttccattccatttcatgtttgacaaagatatgacaattctgcaatttggcaatggcatcagaaggctgatgaacaggagagactttcaaggaaagcctaattttgaagaatactttgaaattctgactccaaaaatcaaccagacstttagcgggatcatgactatgttgaatatgcagtttgttgtacgagtgaggagatgggacaactctgtgaaaaaatcttcaagggttatggacctcaaaggccaaatgatctacattgttgaatccagtgcaatcttgtttttggggtcaccctgtgtggacagattagaagattttacaggacgagggctctacctctcagacatcccaattcacaatgcactgagggatgtggtcttaataggggaacaagcccgagctcaagatggcctgaagaagaggctggggaagctgaaggctacccttgagcaagcccaccaagccctggaggaggagaagaaaaagacagtagaccttctgtgctccatatttccctgtgaggttgctcagcagctgtggcaagggcaagttgtgcaagccaagaagttcagtaatgtcaccatgctcttctcagacatcgttgggttcactgccatctgctcccagtgctcaccgctgcaggtcatcaccatgctcaatgcactgtacactcgcttcgaccagcagtgtggagagctggatgtctacaaggtggagaccattggcgatgcctattgtgtrgctgggggattacacaaagagagtgatactcatgctgttcagatagcrctgatggccctgaagatgatggagctctctgatgaagttatgtctccccatggagaacctatcaagatgcgaattggactgcactctggatcagtttttgctggcgtcgttggagttaaaatgccccgttactgtctttttggaaacaatgtcactctggctaacaaatttgagtcctgcagtgtaccacgaaaaatcaatgtcagcccaacaacttacagattactcaaagactgtcctggtttcgtgtttacccctcgatcaagggaggaacttccaccaaacttccctagtgaaatccccggaatctgccattttctggatgcttaccaacaaggaacaaactcaaaaccatgcttccaaaagaaagatgtggaagatggcaatgccaattttttaggcaaagcatcaggaatagattagcaacctatatacctatttataagtctttggggtttgactcattgaagatgtgtagagcctctgaaagcactttagggattgtagatggctaacaagcagtattaaaatttcaggagccaagtcacaatctttctcctgtttaacatgacaaaatgtatgtactcacttcagtacttcagctcttcaagaaaaaaaaaaaaaaccttaaaaagctacttttgtgggagtatttctattatataaccagcacttactacctgtactcaaaattcagcaccttgtacatatatcagataattgtagtcaattgtacaaactgatggagtcacctgcaatctcatatcctggtggaatgccatggttattaaagtgtgtttgtgatagtgtcgtcaaaaaaaaggtttttgaatagaaattacattctttgacaccctcagttctttcamactttcaactctgcattttattgcattttctcatttaacygttagtatatgtttgaatataggctgactttttttctctattgcactttcttctttttttctttttagaaaataagcaattaggggttagatgcaatatgaatataaaatagttctgtaaataccaaatattatttttagttctggaagttaaaaatactctccatagtaaygtgtgttataataataaatatttcttttgtttgacttttttaaaattctacaatggtaaaagctattttaatccatgttagcaatttaattcctattaattcattttactatcataatagcaaagtattcagaataaaagaggtttatatcttctattaaaatgcagtaatactattcaaatctaatttagctggaagcaacatgggagtaaagtaatcatccaggggacccaccataaaggacattggtaaaacatttacacacgtaaacacacgtgcaggcacacttggaacaatatggacccacttcagcagacatcttctattgccatgctgagctgtttaaagttttaagaagaaaatctaagtatggaagtagaaaataagacttgttcttttggtggatatctcatttttcttgagtatttgtgctgaacattttggtgtatgtctrtgaactaagaatcaagtttttgtctcattaaatatacatatatgaagtgtttttattctacttgaaatatcttgacttaaaaaaaacgactgttagtattgatgaagcaaatgaggcagtgactacattatggaaatgtctaagtattttttccggaacttcaactttttctttttgttttacataaacatttaagcagctaggaacttttagttttarttaggtcagttgaagt

SEQ ID NO: 5424 - DNA, 3230 bp, Homo sapiens
cgggccaaggcggcwgttctcgctccagctcgatgctgcctccccggcccggttgcgctgtagccgctgccgcctctgcctgggtcccttcggccgtacctctgcgtgggggctgcctccccggctcccggtgcagacaccatgtacggatttgtgaatcacgccctggagttgctggtgatccgcaattacggccccgaggtgtgggaagacatcaaaaaagaggcacagttagatgaagaaggacagtttcttgtcagaataatatatgatgactccaaaacttatgatttggttgctgctgcaagcaaagtcctcaatctcaatgctggagaaatcctccaaatgtttgggaagatgtttttcgtcttttgccaagaatctggttatgatacaatcttgcgtgtcctgggctctaatgtcagagaatttctacagaaccttgatgctctgcacgaccaccttgctaccatctacccaggaatgcgtgcaccttcctttaggtgcactgatgcagaaaagggcaaaggactcattttgcactactactcagagagagaaggacttcaggatattgtcattggaatcatcaaaacagtggcacaacaaatccatggcactgaaatagacatgaaggttattcagcaaagaaatgaagaatgtgatcatactcaatttttaattgaagaaaaagagtcaaaagaagaggatttttatgaagatcttgacagatttgaagaaaatggtacccaggaatcacgcatcagcccatatacattctgcaaagcttttccttttcatataatatttgaccgggacctagtggtcactcagtgtggcaatgctatatacagagttctcccccagctccagcctgggaattgcagccttctgtctgtcttctcgctggttcgtcctcatattgatattagtttccatgggatcctttctcacatcaatactgtttttgtattgagaagcaaggaaggattgttggatgtggagaaattagaatgtgaggatgaactgactgggactgagatcagctgcttacgtctcaagggtcaaatgatctacttacctgaagcagatagcatactttttctatgttcaccaagtgtcatgaacctggacgatttgacaaggagagggctgtatctaagtgacatccctctgcatgatgccacgcgcgatctygttcttttgggagaacaatttagagaggaatacaaactcacccaagaactggaaatcctcactgacaggctacagctcacgttaagagccytggaagatgaaaagaaaaagacagacacattgctgtattctgtccttcctccgtctgttgccaatgagctgcggcacaagcgtccagtgcctgccaaaagatatgacaatgtgaccatcctctttagtggcattgtgggcttcaatgctttctgtagcaagcatgcatctggagaaggagccatgaagatcgtcaacctcctcaacgacctctacaccagatttgacacactgactgattcccggaaaaacccatttgtttataaggtggagactgttggtgacaagtatatgacagtgagtggtttaccagagccatgcattcaccatgcacgatccatctgccacctggccttggacatgatggaaattgctggccaggttcaagtagatggtgaatctgttcagataacaatagggatacacactggagaggtagttacaggtgtcataggacagcggatgcctcgatactgtctttttgggaatactgtcaacctcacaagccgaacagaaaccacaggagaaaagggaaaaataaatgtgtctgaatatacatacagatgtcttatgtctccagaaaattcagatccacaattccacttggagcacagaggcccagtgtccatgaagggcaaaaaagaaccaatgcaagtttggtttctatccagaaaaaatacaggaacagaggaaacaaagcaggatgatgactgaatcttggattatggggtgaagaggagtacagactaggttccagttttctcctaacacgtgccaagcccaggagcagttcttccctatggatacagattttcttttgtccttgtccattaccccaagmctttcttctagatatatctctcactatccgttattcaaccttagctctgctttctaktactttttaggctttagtatattatctaaagtttggcttttgatgtggatgatgtgagcttcatgtgtcttaaaatctactacaagcattacctaacatggtgatctgcaagtagtaggcacccaataaatatttgttgaatttagttaaatgaaactgaacagtgtttggccatgtgtatatttatatcatgtttaccaaatctgtttagtgttccacatatatgtatatgtatattttaatgactataatgtaataaagtttatatcatgttggtgtatatcattatagaaatcattttctaaaggagtgaattctaagttttaggggaaaaaatgcaatttattttcagactcccaaagtaagaattaacatatcatgctaagaaaatagtgactattttgaagtatgctacttccctttcagaaatatagaatacacgtttctgttattaaagtatttgattactaattcaaatcatatggcaattataattcttctaaaatgctatcatttgtaactgtatcccctgtattaaatctcattaaccacaggcagctgttacagaaagctgcattgtttcacattgagctgttacattagttcaggctaaatgttgggmgctccaaccacatccaagaataaatctggaaacacactgctgggayactgctgttagagcccttcttggccttgtaktcccagaaatgagctccctttccttagcttagaagaatgtgattatatccaggacatcatgttcagaaaacttagtttactttcagcatagaatgcattactgttggaataattggcctctagctcttaaatgtctctgataacttattaatatctatctttataaaatagagtgcaactacttttgtgtaaaaatgtttgcctttaaatttagtatttcatatcagcacatcgatatatgtataaatgttccatgttaatgtgtaaaagagtctgtaataaattatttttttcacgtgtctctatacagtttttatttcaataaaaatattaacattatttttca

SEQ ID NO: 5425 - DNA, 3230 bp, Homo sapiens
cgggccaaggcggcwgttctcgctccagctcgatgctgcctccccggcccggttgcgctgtagccgctgccgcctctgcctgggtcccttcggccgtacctctgcgtgggggctgcctccccggctcccggtgcagacaccatgtacggatttgtgaatcacgccctggagttgctggtgatccgcaattacggccccgaggtgtgggaagacatcaaaaaagaggcacagttagatgaagaaggacagtttcttgtcagaataatatatgatgactccaaaacttatgatttggttgctgctgcaagcaaagtcctcaatctcaatgctggagaaatcctccaaatgtttgggaagatgtttttcgtcttttgccaagaatctggttatgatacaatcttgcgtgtcctgggctctaatgtcagagaatttctacagaaccttgatgctctgcacgaccaccttgctaccatctacccaggaatgcgtgcaccttcctttaggtgcactgatgcagaaaagggcaaaggactcattttgcactactactcagagagagaaggacttcaggatattgtcattggaatcatcaaaacagtggcacaacaaatccatggcactgaaatagacatgaaggttattcagcaaagaaatgaagaatgtgatcatactcaatttttaattgaagaaaaagagtcaaaagaagaggatttttatgaagatcttgacagatttgaagaaaatggtacccaggaatcacgcatcagcccatatacattctgcaaagcttttccttttcatataatatttgaccgggacctagtggtcactcagtgtggcaatgctatatacagagttctcccccagctccagcctgggaattgcagccttctgtctgtcttctcgctggttcgtcctcatattgatattagtttccatgggatcctttctcacatcaatactgtttttgtattgagaagcaaggaaggattgttggatgtggagaaattagaatgtgaggatgaactgactgggactgagatcagctgcttacgtctcaagggtcaaatgatctacttacctgaagcagatagcatactttttctatgttcaccaagtgtcatgaacctggacgatttgacaaggagagggctgtatctaagtgacatccctctgcatgatgccacgcgcgatctygttcttttgggagaacaatttagagaggaatacaaactcacccaagaactggaaatcctcactgacaggctacagctcacgttaagagccytggaagatgaaaagaaaaagacagacacattgctgtattctgtccttcctccgtctgttgccaatgagctgcggcacaagcgtccagtgcctgccaaaagatatgacaatgtgaccatcctctttagtggcattgtgggcttcaatgctttctgtagcaagcatgcatctggagaaggagccatgaagatcgtcaacctcctcaacgacctctacaccagatttgacacactgactgattcccggaaaaacccatttgtttataaggcaagtactgttggtgacaagtatatgacagtgagtggtttaccagagccatgcattcaccatgcacgatccatctgccacctggccttggacatgatggaaattgctggccaggttcaagtagatggtgaatctgttcagataacaatagggatacacactggagaggtagttacaggtgtcataggacagcggatgcctcgatactgtctttttgggaatactgtcaacctcacaagccgaacagaaaccacaggagaaaagggaaaaataaatgtgtctgaatatacatacagatgtcttatgtctccagaaaattcagatccacaattccacttggagcacagaggcccagtgtccatgaagggcaaaaaagaaccaatgcaagtttggtttctatccagaaaaaatacaggaacagaggaaacaaagcaggatgatgactgaatcttggattatggggtgaagaggagtacagactaggttccagttttctcctaacacgtgccaagcccaggagcagttcttccctatggatacagattttcttttgtccttgtccattaccccaagmctttcttctagatatatctctcactatccgttattcaaccttagctctgctttctaktactttttaggctttagtatattatctaaagtttggcttttgatgtggatgatgtgagcttcatgtgtcttaaaatctactacaagcattacctaacatggtgatctgcaagtagtaggcacccaataaatatttgttgaatttagttaaatgaaactgaacagtgtttggccatgtgtatatttatatcatgtttaccaaatctgtttagtgttccacatatatgtatatgtatattttaatgactataatgtaataaagtttatatcatgttggtgtatatcattatagaaatcattttctaaaggagtgaattctaagttttaggggaaaaaatgcaatttattttcagactcccaaagtaagaattaacatatcatgctaagaaaatagtgactattttgaagtatgctacttccctttcagaaatatagaatacacgtttctgttattaaagtatttgattactaattcaaatcatatggcaattataattcttctaaaatgctatcatttgtaactgtatcccctgtattaaatctcattaaccacaggcagctgttacagaaagctgcattgtttcacattgagctgttacattagttcaggctaaatgttgggmgctccaaccacatccaagaataaatctggaaacacactgctgggayactgctgttagagcccttcttggccttgtaktcccagaaatgagctccctttccttagcttagaagaatgtgattatatccaggacatcatgttcagaaaacttagtttactttcagcatagaatgcattactgttggaataattggcctctagctcttaaatgtctctgataacttattaatatctatctttataaaatagagtgcaactacttttgtgtaaaaatgtttgcctttaaatttagtatttcatatcagcacatcgatatatgtataaatgttccatgttaatgtgtaaaagagtctgtaataaattatttttttcacgtgtctctatacagtttttatttcaataaaaatattaacattatttttca

SEQ ID NO: 5426 - DNA, 4142 bp, Homo sapiens
cgcggagccctgctctcgcaactcaagatggcggacgagagtgagacagcagtgaagccgccggcacctccgctgccgcagatgatggaagggaacgggaacggccatgagcactgcagcgattgcgagaatgaggaggacaacagctacaaccgggggtattggcatcggtccctaaacccacggaagytgattgaagtgaagttctcccacctgagcagaaatatgaccatgcagcgcaccatgaagctctaccgactgccagagactcccaagacagctgggctgcgaccaatggaaacaaaggmcattccagtagtgcaccagctcctcaccaggtacttgaagcaatttcaccttacgcccgtcatgagccaggaggaggtggagcactggttctacccccaggagaatatcatcgacactttcgtggtggagaacgcaaacggagaggtgacagatttcctgagcttttatacgctgccctccaccatcatgaaccatccaacccacaagagtctcaaagctgcttattctttctacaacgttcacacccagacccctcttctagacctcatgagcgacgcccttgtcctcgccaaaatgaaagggtttgatgtgttcaatgcactggatctcatggagaacaaaaccttcctggagaagctcaagtttggcataggggacggcaacctgcagtattacctttacaattggaaatgccccagcatgggggcagagaaggttggactggtgctacaataaccagtcaccagtgcgattctrgataaagccactgaaaattcgaaccaggaaatggaaccccaccactgttggtccaattttcacacacgtgagaatccctrgcaaagggagcagaactgaaccggctttaccaaaccgccagcgaacttgacaattgtattgcgatggcgtgggctgcgtgacgtcacctccggtcgtgtctctggtctccgtgttttccagttaattacatcctcatgcagccgtgatcaagggaatgtaactgctgaaaactagctcgtgattggcatataatggagttaacgggtgaataataaaagtatatatatatattatatatatataaatattttaaatatctttcatgttccaaatgtacaaggatgtttggtctttaatgaaaagctgaatccagatcattcctcagaatgaggacccgaggacagtggcagacagacgcgttggcacagttcatggtttcctccagaggagacattggcttatcatggggaaaaagaggatctggagaacctcatccagctccccttctgaatcagctgggatgactggctttgagaaggaagggaagatggaacaggctcagatctcatgggatagcacgtggagctcttggctggggctgaccctgggcagggactttcctgcagggccagacctgcctgcattctgagacaaagcaatggacggtccgcagaagcagacytcattgattgagtcctttcttccatccccttggcctgctccctgtaggaagtcatcctgccaactgatttaaaagggctctttagccagttgttgccaaccttatagggatgagtcccctgtgagattttgcttttccactgcctgggatgatgcagtttgaagaggcccttggacctccttgtaacatcagggacctttggagaccattatcagtgtaagccctgcttagctcatcttagagcaaagagccagcaccctgatgtccctggggtggctaggcaggagtggcgtggggccaatacccagaccccttcagccaccagcccctggcctgtgccttccaacccattagccatttcttgttgtgcccctttccaagatacagcctgcaagtggtagcaagaagtgattagaggcagatctggacttggcaacagaagtggtttcccatctccattgtctgagtctgattttcgctgatgctgttttgtggatttttgtggtagtgatggttgtcagtgctgccagtttcccaaaacgtaatcaagcctctggtcacatggctgtcgatgtaggcattctggagtggtgttcagccaagtgaccgggcaaaattgggctgtgaaattgtacttccargcttggatgtaatttttgctctagagagaagcaagtggtgggaaggaggtagcatgacgtgtggtgtgcgggtttccttgctgccgtcacctctccgctcatacaggaatgaagccttagccaggaggccaggctcagccctgtgccactcaccgaagccactttctacaggccagcaggggcttgttgcaggctgtgggttttggtgtggtttgtcagaggctaattctgcagagtttccaaaaccagaagacatcgtatgcttgggatgggggccgtgccacccgtgggaatgctgcccgctctgcagactgctgctagagccagcaactccactaaggtggattttcatcaggggcctgcagggccctcccttttcccattgttcctgcgctgcaaattgcaggccccagcaatcgtgactgacgtttgctccttgactccaagaaactgagaccaaagaagctgctgttcttagcaagatgcgcactgcattccacaggtgggaggagtcggagaggcaggggcttgctttgcagccccacagacaacagttgcacagtgcctcaagccccagagtggctcaccctgtccagacctttgaggatatcaaaggacaaagtgcccaagtctttcctaccttgggggaamctggaacttggaaaggctccctgtcctagtcttgatctgttctgggccaggtcccagcttgagctgcctctgagatttgggctgtgcggatctctggagtgagctctgtttcggttgacccaggtcatggaatggaaacggtgaggccccagtggctgttctggaagaaacagatctcctggcaaaggccccagcatctccctcactgaaaccaggtgsccggctcctcggactctgctttatgttgcggtgagaactctgcccaggtgtgcagggtttggcttgtgggctgcttgctgctcatctgatttttgtcccagtagtccctgcgttcttcattcaaccccttctgggacttcagctcagagagcaccatcccgggggtcagggcctccccacaggagccctgcagtgtggtagcgccatggctgtctcaaaccaagcaaaggaaggaccctgaggccttcasgctaaccstcctcgagcaactgctgttggaaggcctccctgggcctggcccccaccctctgccacccagtcctcccagctgccatgtttcaaagacgacctttacctcctgcctttggattgactctgcatttgaccacggactccagtctgtgtgtagggagagagctgagtaggaggcctccactccggatcgaggcctgtatagggctcgtttccccacacatgcctatttctgaagaggcttctgtcttatttgaaggccagcccacacccagctactttaacaccaggtttatggaaaatgtcaggccttccccacaactccygtctaactgctgtcgcccccctacttgctggctctcagaagcctaggggagtccctgtggtcctgaattctttccccaaagacgaccagcatttaaccaacctaagggcccaaaggccttggacaactgcatggagctgcactctaggagaaggaggggaaccagatgttagatcaggggagggagcaggagtgtccctcccgtcagtgcctacccacctgtgaggcagccttytgatggcctggcccaccttccccagaaccaggggaggcctgaggcttcagttttactctgctgcaaaatgaaggcgggcctgcaagccgactacacctacggaggctgttgaggacaatttcattccattaaattaaaaaatactgactggctggcaggcaggtgccatgtctgggaacagggacgggggagcttcacctttttgtcttggcttttctttgggctgtgggggggcatccatttccagggtcggggaggaaataccaaatgcattgttgttctgctcaatacatctcacttgtttctaataaagaaagcagctgaacaaaa

SEQ ID NO: 5427 - DNA, 2709 bp, Homo sapiens
ggcgcggagccctgctctcgcaactcaagatggcggacgagagtgagacagcagtgaagccgccggcacctccgctgccgcagatgatggaagggaacgggaacggccatgagcactgcagcgattgcgagaatgaggaggacaacagctacaaccggggtggtttgagtccagccaatgacactggagccaaaaagaagaaaaagaaamaaaaaaagaagaaagaaaaaggcagtgagacagattcagcccaggatcagcctgtgaagatgaactctttgccagcagagaggatccaggaaatacagaaggccattgagctgttctcagtgggtcagggacctgccaaaaccatggaggaggctagcaagcgaagctaccagttctgggatacgcagcccgtccccaagctgggcgaagtggtgaacacccatggccccgtggagcctgacaaggacaatatccgccaggagccctacaccctgccccagggcttcacctgggatgctttggacytgggcgatcgtggtgtgctaaaagaactgtacaccctcctgaatgagaactatgtggaagatgatgacaacatgttccgatttgattattccccggagtttcttttgtgggctctccggccacccggctggctcccccagtggcactgtggggttcgagtggtctcaagtcggaaattggttgggttcattagcgccatcccagcaaacatccatatctatgacacagagaagaagatggtagagatcaacttcctgtgtgtctagtgcaccagctcctcaccaggtacttgaagcaatttcaccttacgcccgtcatgagccaggaggaggtggagcactggttctacccccaggagaatatcatcgacactttcgtggtggagaacgcaaacggagaggtgacagatttcctgagcttttatacgctgccctccaccatcatgaaccatccaacccacaagagtctcaaagctgcttattctttctacaacgttcacacccagacccctcttctagacctcatgagcgacgcccttgtcctcgccaaaatgaaagggtttgatgtgttcaatgcactggatctcatggagaacaaaaccttcctggagaagctcaagtttggcataggggacggcaacctgcagtattacctttacaattggaaatgccccagcatgggggcagagaaggttggactggtgctacaataaccagtcaccagtgcgattctrgataaagccactgaaaattcgaaccaggaaatggaaccccaccactgttggtccaattttcacacacgtgagaatccctrgcaaagggagcagaactgaaccggctttaccaaaccgccagcgaacttgacaattgtattgcgatggcgtgggctgcgtgacgtcacctccggtcgtgtctctggtctccgtgttttccagttaattacatcctcatgcagccgtgatcaagggaatgtaactgctgaaaactagctcgtgattggcatataatggagttaacgggtcatggaatggaaacggtgaggccccagtggctgttctggaagaaacagatctcctggcaaaggccccagcatctccctcactgaaaccaggtgsccggctcctcggactctgctttatgttgcggtgagaactctgcccaggtgtgcagggtttggcttgtgggctgcttgctgctcatctgatttttgtcccagtagtccctgcgttcttcattcaaccccttctgggacttcagctcagagagcaccatcccgggggtcagggcctccccacaggagccctgcagtgtggtagcgccatggctgtctcaaaccaagcaaaggaaggaccctgaggccttcasgctaaccstcctcgagcaactgctgttggaaggcctccctgggcctggcccccaccctctgccacccagtcctcccagctgccatgtttcaaagacgacctttacctcctgcctttggattgactctgcatttgaccacggactccagtctgtgtgtagggagagagctgagtaggaggcctccactccggatcgaggcctgtatagggctcgtttccccacacatgcctatttctgaagaggcttctgtcttatttgaaggccagcccacacccagctactttaacaccaggtttatggaaaatgtcaggccttccccacaactccygtctaactgctgtcgcccccctacttgctggctctcagaagcctaggggagtccctgtggtcctgaattctttccccaaagacgaccagcatttaaccaacctaagggcccaaaggccttggacaactgcatggagctgcactctaggagaaggaggggaaccagatgttagatcaggggagggagcaggagtgtccctcccgtcagtgcctacccacctgtgaggcagccttytgatggcctggcccaccttccccagaaccaggggaggcctgaggcttcagttttactctgctgcaaaatgaaggcgggcctgcaagccgactacacctacggaggctgttgaggacaatttcattccattaaattaaaaaatactgtcttggcttttctttgggctgtgggggggcatccatttccagggtcggggaggaaataccaaatgcattgttgttctgctcaatacatctcacttgtttctaataaagaaagcagctgaac

SEQ ID NO: 5428 - DNA, 5203 bp, Homo sapiens
cagctggggaaaatcatgaaacctaatacatttgggaggtggaggaaggaagggcaaagcattccagaaagcccatcactgccttttggctgtcatccttttacattcagagttcaaggaagtattgtggtatgaatgccttgttaacaattatcattcgtctttggtgccattaccctggcaatataaagaaaataagcaacataaaagcaagaacggaaaaggccctttcacacaaataggacaycccttgcccagcactccctccctgaaagccgagggggcgcgagtcaggaggagtgctggtgtcctccaaatgccctttctggacctgggttcttcagcctgcttctgaagccaacaggcttgattaaggaaggtctggctccacagaaagctctttgtcaggggtagcacaaaacagattttttttaaaccctgcattagtatttactttttgttacagtggtttgagtccagccaatgacactggagccaaaaagaagaaaaagaaacaaaaaaagaagaaagaaaaaggcagtgagacagattcagcccaggatcagcctgtgaagatgaactctttgccagcagagaggatccaggaaatacagaaggccattgagctgytctcagtgggtcagggacctgccaaaaccatggaggaggctagcaagcgaagctaccagttctgggatacgcagcccgtccccaagctgggcgaagtggtgaacacccatggccccgtggagcctgacaaggacaatatccgccaggagccctacaccctgccmcagggcttcacctgggatgctttggacctgggcgatcgtggtgtgctaaaagaactgtacaccctcctgaatgagaactatgtggaagatgatgacaacatgttccgatttgattattccccggagtttcttttgtgggctctccggccacccggctggctcccccagtggcactgtggggttcgagtggtctcaagtcggaaattggttgggttcattagcgccatcccagcaaacatccatatctatgacacagagaagaagatggtagagatcaacttcctgtgtgtccacaagaagctgcgttccaagagggttgctccagttctgatccgagagatcaccaggcgggttcacctggagggcatcttccaagcagtttacactgccggggtggtactaccaaagcccgttggcacctgcaggtattggcatcggtccctaaacccacggaagctgattgaagtgaagttctccracctgagcagaaatatgaccatgcagcgcaccatgaagctctaccgactgccagagactcccaagacagctgggctgcgrccaatggaaacaaaggacattccagtagtgcaccagctcctcaccaggtacttgaagcaatttcaccttacgcccgtcatgagccaggaggaggtggagcactggttctacccccaggagaatatcatcgacactttcgtggtggagaacgcaaacggagaggtgacagatttcctgagcttttatacgctgccctccaccatcatgaaccatccaacccacaagagtctcaaagctgcttattctttctacaacgttcacacccagacccctcttctagacctcatgagcgacgcccttgtcctcgccaaaatgaaagggtttgatgtgttcaatgcactggatctcatggagaacaaaaccttcctggagaagctcaagtttggcataggggacggcaacctgcagtattacctttacaattggaaatgccccagcatgggggcagagaaggttggactggtgctacaataaccagtcaccagtgcgattctggataaagccactgaaaattcgaaccaggaaatggaaccccaccactgttggtccaattttcacacacgtgagaatccctggcaaagggagcagaactgaaccggctttaccaaaccgccagcgaactygacaattgtattgcgatggcgtgggctgcgtgacgtcacctccggtcgtgtctctggtctccgtgttttccagttaattacatcctcatgcagccgtgatcaagggaatgtaactgctgaaaactagctcgtgattggcatataatggagttaacgggtgaataataaaagtatatatatatattatatatatataaatattttaaatatctttcatgttccaaatgtacaaggatgtttggtctttaatgaaaagctgaatccagatcattcctcagaatgaggacccgaggacagtggcagacagacgcgttggcacagttcatggtttcctccagaggagacattggcttatcatggggaaaaagaggatctggagaacctcatccagctccccttctgaatcagctgggatgactggctttgagaaggaagggaagatggaacaggctcagatctcatgggatagcacgtggagctcttggctggggctgaccctgggcagggactttcctgcagggccagacctgcctgcattctgagacaaagcaatggacggtccgcagaagcagacctcattgattgagtcctttcttccatccccttggcctgctccctgtaggaagtcatcctgccaactratttaaaagggctctttagccagttgttgccaaccttatagggatgagtcccctgtgagattttgcttttccactgcctgggatgatgcagtttgaagaggcccttggacctccttgtaacatcagggacctttggagaccattatcagtgtaagccctgcttagctcatcttagagcaaagagccagcaccctgatgtccctggggtggctaggcaggagtggcgtggggccaatacccagaccccttcagccaccagcccctggcctgtgccttccaacccattagccatttcttgttgtgcccctttccaagatacagcctgcaagtggtagcaagaagtgattagaggcagatctggacttggcaacagaagtggtttcccatctccattgtctgagtctgattttcgctgatgctgttttgtggatttttgtggtagtgatggttgtcagtgctgccagtttcccaaaacgtaatcaagcctctggtcacatggctgtcgatgtaggcattctggagtggtgttcagccaagtgaccgggcaaaattgggctgtgaaattgtacttccaggcttggatgtaatttttgctctagagagaagcaagtggtgggaaggaggtagcatgacgtgtggtgtgcgggtttmcttgctgccgtcacctctccgctcatacaggaatgaagccttagccaggaggccaggctcagccctgtgccactcaccgaagccactttctacaggccagcaggggcttgttgcaggctgtgggttttggtgtggtttgtcagaggctaattctgcagagtttccaaaaccagaagacatcgtatgcttgggatgggggccgtgccacccgtgggaatsctgcccgctctgcagactgctgctagagccagcaactccactaaggtggattttcatcaggggcctgcagggccctcccttttcccattgttcctgcgctgcaaattgcaggccccagcaatcgtgactgacgtttgctccttgactccaagaaactgagaccaaagaagctgctgttcttagcaagatgcgcactgcattccacaggtgggaggagtcggagaggcaggggcttgctttgcagccccasagacaacsgttgcacagtgcctcaagccccagagtggctcaccctgtccagacctttgaggatatcaaaggacaaagtgcccaagtctttcctaccttgggggaacctggaacttggaaaggctccctgtcctagtcttgatctgttctgggccaggtcccagcttgagctgcctctgagatttgggctgtgcggatctctggagtgagctctgtttcggttgacccaggtcatggaatggaaacggtgaggccccagtggctgttctggaagaaacagatctcctggcaaaggccccagcatctccctcactgaaaccaggtgcccygctcctcggactctgctttatgttgcggtgagaactctgcccaggtgtgcagggtttggcttgtgggctgcttgctgctcatctgatttttgtcccagtagtccctgcgttcttcattcaaccccttctgggacttcagctcagagagcaccatcccgggggtcagggcctccccacaggagccctgcagtgtggtagcgccatggctgtctcaaaccaagcaaaggaaggacyctgaggccttcacgctaaccctcctcgagcaactgctgttggaaggcctccctgggcctggcccccaccctctgccacccagtcctcccagctgccatgtttcaaagacgacctttacctcctgcctttggattgactctgcatttgaccacggactccagtctgtgtgtagggagagagctgagtaggaggcctccactccggatcgaggcctgtatagggctcgtttccccacacatgcctatttctgaagaggcttctgtcttatttgaaggccagcccacacccagctactttaacaccaggtttatggaaaatgtcaggccttccccacaactcctgtctaactgctgtcgcccccctacttgctggctctcagaagcctaggggagtccctgtggtcctgaattctttccccaaagacgaccagcatttaaccaacctaagggcccaaaggccttggacaactgcatggagctgcactctaggagaaggaggggaaccagatgttagatcaggggagggagcaggagtgtccctcccgtcagtgcctacccacctgtgaggcagccttctgatggcctggcccaccttccccagaaccaggggaggcctgaggcttcagttttactctgctgcaaaatgaaggcgggcctgcaagccgactacacctacggaggctgttgaggacaatttcattccattaaattaaaaaatactgactggctggcaggcaggtgccatgtctgggaacagggacgggggagcttcacctttttgtcttggcttttctttgggctgtgggggggcatccatttccagggtcggggaggaaataccaaatgcattgttgttctgctcaatacatctcacttgtttctaataaagaaagcagctgaacaaaa

SEQ ID NO: 5429 - DNA, 1520 bp, Homo sapiens
ggcgcggagccctgctctcgcaactcaagatggcggacgagagtgagacagcagtgaagccgccggcacctccgctgccgcagatgatggaagggaacgggaacggccatgagcactgcagcgattgcgagaatgaggaggacaacagctacaaccggggtggtttgagtccagccaatgacactggagccaaaaagaagaaaaagaaamaaaaaaagaagaaagaaaaaggcagtgagacagattcagcccaggatcagcctgtgaagatgaactctttgccagcagagaggatccaggaaatacagaaggccattgagctgttctcagtgggtcagggacctgccaaaaccatggaggaggctagcaagcgaagctaccagttctgggatacgcagcccgtccccaagctgggcgaagtggtgaacacccatggccccgtggagcctgacaaggacaatatccgccaggagccctacaccctgccccagggcttcacctgggatgctttggacytgggcgatcgtggtgtgctaaaagaactgtacaccctcctgaatgagaactatgtggaagatgatgacaacatgttccgatttgattattccccggagtttcttttgtgggctctccggccacccggctggctcccccagtggcactgtggggttcgagtggtctcaagtcggaaattggttgggttcattagcgccatcccagcaaacatccatatctatgacacagagaagaagatggtagagatcaacttcctgtgtgtccacaagaagctgcgttccaagagggttgctccagttctgatccgagagatcaccaggcgggttcacctggagggcatcttccaagcagtttacactgccggggtggtactaccaaagccygttggcacctgcaggtattggcatcggtccctaaacccacggaagytgattgaagtgaagttctcccacctgagcagaaatatgaccatgcagcgcaccatgaagctctaccgactgccagaggccagtgctgccccgggtgctgggctgcgaccaatggaaacaaaggmcattccagtagtgcaccagctcctcaccaggtacttgaagcaatttcaccttacgcccgtcatgagccaggaggaggtggagcactggttctacccccaggagaatatcatcgacactttcgtggtggagaacgcaaacggagaggtgacagatttcctgagcttttatacgctgccctccaccatcatgaaccatccaacccacaagagtctcaaagctgcttattctttctacaacgttcacacccagacccctcttctagacctcatgagcgacgcccttgtcctcgccaaaatgaaagggtttgatgtgttcaatgcactggatctcatggagaacaaaaccttcctggagaagctcaagtttggcataggggacggcaacctgcagtattacctttacaattggaaatgccccagcatgggggcagagaaggtaggcgacacatag

SEQ ID NO: 5430 - DNA, 4897 bp, Homo sapiens
ggcgcggagccctgctctcgcaactcaagatggcggacgagagtgagacagcagtgaagccgccggcacctccgctgccgcagatgatggaagggaacgggaacggccatgagcactgcagcgattgcgagaatgaggaggacaacagctacaaccggggtggtttgagtccagccaatgacactggagccaaaaagaagaaaaagaaamaaaaaaagaagaaagaaaaaggcagtgagacagattcagcccaggatcagcctgtgaagatgaactctttgccagcagagaggatccaggaaatacagaaggccattgagctgttctcagtgggtcagggacctgccaaaaccatggaggaggctagcaagcgaagctaccagttctgggatacgcagcccgtccccaagctgggcgaagtggtgaacacccatggccccgtggagcctgacaaggacaatatccgccaggagccctacaccctgccccagggcttcacctgggatgctttggacytgggcgatcgtggtgtgctaaaagaactgtacaccctcctgaatgagaactatgtggaagatgatgacaacatgttccgatttgattattccccggagtttcttttgtgggctctccggccacccggctggctcccccagtggcactgtggggttcgagtggtctcaagtcggaaattggttgggttcattagcgccatcccagcaaacatccatatctatgacacagagaagaagatggtagagatcaacttcctgtgtgtccacaagaagctgcgttccaagagggttgctccagttctgatccgagagatcaccaggcgggttcacctggagggcatcttccaagcagtttacactgccggggtggtactaccaaagccygttggcacctgcaggtattggcatcggtccctaaacccacggaagytgattgaagtgaagttctcccacctgagcagaaatatgaccatgcagcgcaccatgaagctctaccgactgccagagactcccaagacagctgggctgcgaccaatggaaacaaaggmcattccagtagtgcaccagctcctcaccaggtacttgaagcaatttcaccttacgcccgtcatgagccaggaggaggtggagcactggttctacccccaggagaatatcatcgacactttcgtggtggagaacgcaaacggagaggtgacagatttcctgagcttttatacgctgccctccaccatcatgaaccatccaacccacaagagtctcaaagctgcttattctttctacaacgttcacacccagacccctcttctagacctcatgagcgacgcccttgtcctcgccaaaatgaaagggtttgatgtgttcaatgcactggatctcatggagaacaaaaccttcctggagaagctcaagtttggcataggggacggcaacctgcagtattacctttacaattggaaatgccccagcatgggggcagagaaggttggactggtgctacaataaccagtcaccagtgcgattctrgataaagccactgaaaattcgaaccaggaaatggaaccccaccactgttggtccaattttcacacacgtgagaatccctrgcaaagggagcagaactgaaccggctttaccaaaccgccagcgaacttgacaattgtattgcgatggcgtgggctgcgtgacgtcacctccggtcgtgtctctggtctccgtgttttccagttaattacatcctcatgcagccgtgatcaagggaatgtaactgctgaaaactagctcgtgattggcatataatggagttaacgggtgaataataaaagtatatatatatattatatatatataaatattttaaatatctttcatgttccaaatgtacaaggatgtttggtctttaatgaaaagctgaatccagatcattcctcagaatgaggacccgaggacagtggcagacagacgcgttggcacagttcatggtttcctccagaggagacattggcttatcatggggaaaaagaggatctggagaacctcatccagctccccttctgaatcagctgggatgactggctttgagaaggaagggaagatggaacaggctcagatctcatgggatagcacgtggagctcttggctggggctgaccctgggcagggactttcctgcagggccagacctgcctgcattctgagacaaagcaatggacggtccgcagaagcagacytcattgattgagtcctttcttccatccccttggcctgctccctgtaggaagtcatcctgccaactgatttaaaagggctctttagccagttgttgccaaccttatagggatgagtcccctgtgagattttgcttttccactgcctgggatgatgcagtttgaagaggcccttggacctccttgtaacatcagggacctttggagaccattatcagtgtaagccctgcttagctcatcttagagcaaagagccagcaccctgatgtccctggggtggctaggcaggagtggcgtggggccaatacccagaccccttcagccaccagcccctggcctgtgccttccaacccattagccatttcttgttgtgcccctttccaagatacagcctgcaagtggtagcaagaagtgattagaggcagatctggacttggcaacagaagtggtttcccatctccattgtctgagtctgattttcgctgatgctgttttgtggatttttgtggtagtgatggttgtcagtgctgccagtttcccaaaacgtaatcaagcctctggtcacatggctgtcgatgtaggcattctggagtggtgttcagccaagtgaccgggcaaaattgggctgtgaaattgtacttccargcttggatgtaatttttgctctagagagaagcaagtggtgggaaggaggtagcatgacgtgtggtgtgcgggtttccttgctgccgtcacctctccgctcatacaggaatgaagccttagccaggaggccaggctcagccctgtgccactcaccgaagccactttctacaggccagcaggggcttgttgcaggctgtgggttttggtgtggtttgtcagaggctaattctgcagagtttccaaaaccagaagacatcgtatgcttgggatgggggccgtgccacccgtgggaatgctgcccgctctgcagactgctgctagagccagcaactccactaaggtggattttcatcaggggcctgcagggccctcccttttcccattgttcctgcgctgcaaattgcaggccccagcaatcgtgactgacgtttgctccttgactccaagaaactgagaccaaagaagctgctgttcttagcaagatgcgcactgcattccacaggtgggaggagtcggagaggcaggggcttgctttgcagccccacagacaacagttgcacagtgcctcaagccccagagtggctcaccctgtccagacctttgaggatatcaaaggacaaagtgcccaagtctttcctaccttgggggaamctggaacttggaaaggctccctgtcctagtcttgatctgttctgggccaggtcccagcttgagctgcctctgagatttgggctgtgcggatctctggagtgagctctgtttcggttgacccaggtcatggaatggaaacggtgaggccccagtggctgttctggaagaaacagatctcctggcaaaggccccagcatctccctcactgaaaccaggtgsccggctcctcggactctgctttatgttgcggtgagaactctgcccaggtgtgcagggtttggcttgtgggctgcttgctgctcatctgatttttgtcccagtagtccctgcgttcttcattcaaccccttctgggacttcagctcagagagcaccatcccgggggtcagggcctccccacaggagccctgcagtgtggtagcgccatggctgtctcaaaccaagcaaaggaaggaccctgaggccttcasgctaaccstcctcgagcaactgctgttggaaggcctccctgggcctggcccccaccctctgccacccagtcctcccagctgccatgtttcaaagacgacctttacctcctgcctttggattgactctgcatttgaccacggactccagtctgtgtgtagggagagagctgagtaggaggcctccactccggatcgaggcctgtatagggctcgtttccccacacatgcctatttctgaagaggcttctgtcttatttgaaggccagcccacacccagctactttaacaccaggtttatggaaaatgtcaggccttccccacaactccygtctaactgctgtcgcccccctacttgctggctctcagaagcctaggggagtccctgtggtcctgaattctttccccaaagacgaccagcatttaaccaacctaagggcccaaaggccttggacaactgcatggagctgcactctaggagaaggaggggaaccagatgttagatcaggggagggagcaggagtgtccctcccgtcagtgcctacccacctgtgaggcagccttytgatggcctggcccaccttccccagaaccaggggaggcctgaggcttcagttttactctgctgcaaaatgaaggcgggcctgcaagccgactacacctacggaggctgttgaggacaatttcattccattaaattaaaaaatactgactggctggcaggcaggtgccatgtctgggaacagggacgggggagcttcacctttttgtcttggcttttctttgggctgtgggggggcatccatttccagggtcggggaggaaataccaaatgcattgttgttctgctcaatacatctcacttgtttctaataaagaaagcagctgaacaaaa

SEQ ID NO: 5431 - DNA, 3409 bp, Homo sapiens
ttaaaactaccgatgacgctgcctccgaggggccagatccacaaagggttaaatcccctgccgcagagcccacaaggggttaaagtcccggcgccacctcctcccacttccacgggtgtcgcttccacccaagctcccagttccctaggcccggccgtagcctcagcagaggacagacaaactcatctcccctttggctcgatgctctgctctgctcagttctcctccgcctcctcctcttttcctccctccctcctcccccttcccacagctcctcttccgcgtcctcccccgactttccctcccaacctgcctctccacctgccaacttccaactgctgtctcccaccagctcctcggccccgcccagccgtgctccgctcctccccgccacccccagctcgctcggaccccgcgtccccgacggggcggcgggctgggccgcgccctcggccccccgcattggccccgccttcccaagggcgccccgctcccagcccgggccacccttggttcccctccctctcccctccacacagaggcctgccaccgcctgccccgccctcgcaccgccccggccccgcccccttcccttcccgccccgccccgccccacctcctgctgcctcctccgactccctcccgcgccgctaagtttcttcgctcgccgcctcgctcagagccggggccgggccagagcggcgccccgctgccctgtccccgcgtgcagaccccgggcccggccccggccccccgccaagccatgctgtgcggccgctggagggttgccgccgcccgcccgaggagcccccrgtggccgcccaggtcgcagcccaagtcgcggcgccggtcgctctcccgtccccgccgactccctccgatggcggcaccaagaggcccgggctgcgggcgctgaagaagatgggcctgacggaggacgaggacgtgcgcgccatgctgcggggctcccggctccgcaagatccgctcgcgcacgtggcacaaggagcggctgtaccggctgcaggaggacggcctgagcgtgtggttccagcggcgcatcccgcgtgcgccatcgcagcacatctscttcgtgcagcacatcgaggcggtccgcgagggccaccagtccgagggcctgcggcgcttcgggggtgccttcgcgccagcgcgctgcctcaccatcgccttcaagggccgccgcaagaacctggacctggcggcgcccacggctgaggaagcgcagcgctgggtgcgcggtctgaccaagctccgcgcgcgcctggacgccatgagccagcgcgagcggctagaccactggatccactcctatctgcaccgggctgactccaaccaggacagcaagatgagcttcaaggagatcaagagcctgctgagaatggtcaacgtggacatgaacgacatgtacgcctacctcctcttcaaggagtgtgaccactccaacaacgaccgtctagagggggctgagatcgaggagttcctgcggcggctgctgaagcggccggagctggaggagatcttccatcagtactcgggcgaggaccgcgtgctgagtgcccctgagctgctggagttcctggaggaccagggcgaggagggcgccacactggcccgcgcccagcagctcattcagacctatgagctcaacgagacagccaagcagcatgagctgatgacaytggatggcttcatgatgtacctgttgtcgccggagggggctgccttggacaacacccacacgtgtgtgttccaggacatgaaccagccccttgcccactacttcatctcttcctcccacaacacctatctgactgaytcccagatcggggggcccagcagcaccgaggcctaygttagggcctttgcccagggatgccgctgcgtggagctggactgctgggaggggccaggaggggagcccgtcatctatcatggccataccctcacctccaagattctcttccgggacgtggtccaagccgtgcgcgaccatgccttcacgctgtccccttaccctgtcatcctatccctggagaaccactgcgggctggagcagcaggctgccatggcccgccacctctgcaccatcctgggggacatgctggtgacacaggcgctggactccccaaatcccgaggagctgccatccccagagcagctgaagggccgggtcctggtgaagggaaagaagytgcccgctgctcggagcgaggatggccgggctctgtcggatcgggaggaggaggaggaggatgacgaggaggaagaagaggaggtggaggctgcagcgcagaggcggctggccaagcagatctccccggagctgtcggccctggctgtgtactgccacgccacccgcctgcgaccctgcaccctgcccccaacgccccacaaccctgccaggtcagctccctcagcgagcgcaaagccaagaaactcattcgggaggcagggaacagctttgtcaggcacaatgcccgccagctgacccgcgtgtacccgctggggctgcggatgaactcagccaactacagtccccaggagatgtggaactcgggctgtcagctggtggccttgaacttccagacgccaggctacgagatggacctcaatgccgggcgcttcctagtcaatgggcagtgtggctacgtcctaaaacctgcctgcctgcggcaacctgactcgacctttgacccygagtacccaggacctcccagaaccactctcagcatccaggtgctgactgcacagcagctgcccaagctgaatgccgagaagccacactccattgtggaccccctggtgcgcattgagatccatggggtgcccgcagactgtgcccggcaggagactgactacgtgctcaacaatggcttcaacccccgctgggggcagaccctgcagttccagctgcgggctccggagctggcactggtccggtttgtggtggaagattatgacgccacctcccccaatgactttgtgggccagtttacactgcctcttagcagcctaaagcaagggtaccgccacatacacctgctttccaaggacggggcctcactgtcaccagccacgctcttcatccaaatccgcatccagccctcctgagtagctgggactacaggcacaggccaccamacctggctaatgtttaaattttatgtagagatggcggggggggcgggggtctccctatgttgcccaggctggtctcgagctcctgacctcaagtgatcctcctgccccagcattccaaagtgctgggattacaggtgtgagccactgcctggcctggccgtaggtttgtaactgtttcatagaagagccctggagaagacagtagaatgagcctatctagtttaaaaaataaagaagcacgttgatttc

SEQ ID NO: 5432 - DNA, 4075 bp, Homo sapiens
ttaaaactaccgatgacgctgcctccgaggggccagatccacaaagggttaaatcccctgccgcagagcccacaaggggttaaagtcccggcgccacctcctcccacttccacgggtgtcgcttccacccaagctcccagttccctaggcccggccgtagcctcagcagaggacagacaaactcatctcccctttggctcgatgctctgctctgctcagttctcctccgcctcctcctcttttcctccctccctcctcccccttcccacagctcctcttccgcgtcctcccccgactttccctcccaacctgcctctccacctgccaacttccaactgctgtctcccaccagctcctcggccccgcccagccgtgctccgctcctccccgccacccccagctcgctcggaccccgcgtccccgacggggcggcgggctgggccgcgccctcggccccccgcattggccccgccttcccaagggcgccccgctcccagcccgggccacccttggttcccctccctctcccctccacacagaggcctgccaccgcctgccccgccctcgcaccgccccggccccgcccccttcccttcccgccccgccccgccccacctcctgctgcctcctccgactccctcccgcgccgctaagtttcttcgctcgccgcctcgctcagagccggggccgggccagagcggcgccccgctgccctgtccccgcgtgcagaccccgggcccggccccggccccccgccaagccatgctgtgcggccgctggagggttgccgccgcccgcccgaggagcccccrgtggccgcccaggtcgcagcccaagtcgcggcgccggtcgctctcccgtccccgccgactccctccgatggcggcaccaagaggcccgggctgcgggcgctgaagaagatgggcctgacggaggacgaggacgtgcgcgccatgctgcggggctcccggctccgcaagatccgctcgcgcacgtggcacaaggagcggctgtaccggctgcaggaggacggcctgagcgtgtggttccagcggcgcatcccgcscttcgtgcagcacatcgaggcggtccgcgagggccaccagtccgagggcctgcggcgcttcgggggtgccttcgcgccagcgcgctgcctcaccatcgccttcaagggccgccgcaagaacctggacctggcggcgcccacggctgaggaagcgcagcgctgggtgcgcggtctgaccaagctccgcgcgcgcctggacgccatgagccagcgcgagcggctagaccactggatccactcctatctgcaccgggctgactccaaccaggacagcaagatgagcttcaaggagatcaagagcctgctgagaatggtcaacgtggacatgaacgacatgtacgcctacctcctcttcaaggagtgtgaccactccaacaacgaccgtctagagggggctgagatcgaggagttcctgcggcggctgctgaagcggccggagctggaggagatcttccatcagtactcgggcgaggaccgcgtgctgagtgcccctgagctgctggagttcctggaggaccagggcgaggagggcgccacactggcccgcgcccagcagctcattcagacctatgagctcaacgagacagccaagcagcatgagctgatgacaytggatggcttcatgatgtacctgttgtcgccggagggggctgccttggacaacacccacacgtgtgtgttccaggacatgaaccagccccttgcccactacttcatctcttcctcccacaacacctatctgactgaytcccagatcggggggcccagcagcaccgaggcctaygttagggcctttgcccagggatgccgctgcgtggagctggactgctgggaggggccaggaggggagcccgtcatctatcatggccataccctcacctccaagattctcttccgggacgtggtccaagccgtgcgcgaccatgccttcacgctgtccccttaccctgtcatcctatccctggagaaccactgcgggctggagcagcaggctgccatggcccgccacctctgcaccatcctgggggacatgctggtgacacaggcgctggactccccaaatcccgaggagctgccatccccagagcagctgaagggccgggtcctggtgaagggaaagaagytgcccgctgctcggagcgaggatggccgggctctgtcggatcgggaggaggaggaggaggatgacgaggaggaagaagaggaggtggaggctgcagcgcagaggcggctggccaagcagatctccccggagctgtcggccctggctgtgtactgccacgccacccgcctgcgaccctgcaccctgcccccaacgccccacaaccctgccaggtcagctccctcagcgagcgcaaagccaagaaactcattcgggaggcagggaacagctttgtcaggcacaatgcccgccagctgacccgcgtgtacccgctggggctgcggatgaactcagccaactacagtccccaggagatgtggaactcgggctgtcagctggtggccttgaacttccagacgccaggctacgagatggacctcaatgccgggcgcttcctagtcaatgggcagtgtggctacgtcctaaaacctgcctgcctgcggcaacctgactcgacctttgacccygagtacccaggacctcccagaaccactctcagcatccaggtgctgactgcacagcagctgcccaagctgaatgccgagaagccacactccattgtggaccccctggtgcgcattgagatccatggggtgcccgcagactgtgcccggcaggagactgactacgtgctcaacaatggcttcaacccccgctgggggcagaccctgcagttccagctgcgggctccggagctggcactggtccggtttgtggtggaagattatgacgccacctcccccaatgactttgtgggccagtttacactgcctcttagcagcctaaagcaagggtaccgccacatacacctgctttccaaggacggggcctcactgtcaccagccacgctcttcatccaaatccgcatccagcgctcctgagggcccacctcactcgccttggggttctgcgagtgccagtccacatcccctgcagagccctctcctcctctggagtcaggtggtgggagtaccagccccccagcccacccacttggcccactcagcccattcaccaggcgctggtctcacctgggtgctgagggctgcytgggcccctcctgaagaacagaaaggtgttcatgtgacttcagtgagctccaaccctggggccctgagatggccccagctcctcttgtcctcagcccacccctcattgtgacttatgaggagcaagcctgttgctgccaggagacttggggagcaggacacttgtgggccctcagttcccctctgtcctcccgtgggccatcccagcctccttcccccagaggagcgcagtcactccacttggccccgaccccgagcttagcccctaagccctcctttaccccaggccttcctggactcctccctccagctccggaacctgagctccccttcccttctcaaagcaagaagggagcgctgaggcatgaagccctggggaaactggcagtaggttttggtttttattttttgagacagggtctcgctccgtcgcccaggctggagtgcaatgttgcartcatggctcactgcagctttgaactcccaggctcaagcgatcctcccatctcagcctcctgagtagctgggactacaggcacaggccaccamacctggctaatgtttaaattttatgtagagatggcggggggggcgggggtctccctatgttgcccaggctggtctcgagctcctgacctcaagtgatcctcctgccccagcattccaaagtgctgggattacaggtgtgagccactgcctggcctggccgtaggtttgtaactgtttcatagaagagccctggagaagacagtagaatgagcctatctagtttaaaaaataaagaagcacgttgatttc

SEQ ID NO: 5433 - DNA, 2751 bp, Homo sapiens
ttcgctcgccgcctcgctcagagccggggccgggccagagcggcgccccgctgccctgtccccgcgtgcagaccccgggcccggccccggccccccgccaagccatgctgtgcggccgctggagggttgccgccgcccgcccgaggagcccccrgtggccgcccaggtcgcagcccaagtcgcggcgccggtcgctctcccgtccccgccgactccctccgatggcggcaccaagaggcccgggctgcgggcgctgaagaagatgggcctgacggaggacgaggacgtgcgcgccatgctgcggggctcccggctccgcaagatccgctcgcgcacgtggcacaaggagcggctgtaccggctgcaggaggacggcctgagcgtgtggttccagcggcgcatcccgcgtgcgccatcgcagcacatctscttcgtgcagcacatcgaggcggtccgcgagggccaccagtccgagggcctgcggcgcttcgggggtgccttcgcgccagcgcgctgcctcaccatcgccttcaagggccgccgcaagaacctggacctggcggcgcccacggctgaggaagcgcagcgctgggtgcgcggtctgaccaagctccgcgcgcgcctggacgccatgagccagcgcgagcggctagaccactggatccactcctatctgcaccgggctgactccaaccaggacagcaagatgagcttcaaggagatcaagagcctgctgagaatggtcaacgtggacatgaacgacatgtacgcctacctcctcttcaaggagtgtgaccactccaacaacgaccgtctagagggggctgagatcgaggagttcctgcggcggctgctgaagcggccggagctggaggagatcttccatcagtactcgggcgaggaccgcgtgctgagtgcccctgagctgctggagttcctggaggaccagggcgaggagggcgccacactggcccgcgcccagcagctcattcagacctatgagctcaacgagacagccaagcagcatgagctgatgacaytggatggcttcatgatgtacctgttgtcgccggagggggctgccttggacaacacccacacgtgtgtgttccaggacatgaaccagccccttgcccactacttcatctcttcctcccacaacacctatctgactgaytcccagatcggggggcccagcagcaccgaggcctaygttagggcctttgcccagggatgccgctgcgtggagctggactgctgggaggggccaggaggggagcccgtcatctatcatggccataccctcacctccaagattctcttccgggacgtggtccaagccgtgcgcgaccatgccttcacgctgtccccttaccctgtcatcctatccctggagaaccactgcgggctggagcagcaggctgccatggcccgccacctctgcaccatcctgggggacatgctggtgacacaggcgctggactccccaaatcccgaggagctgccatccccagagcagctgaagggccgggtcctggtgaagggaaagaagytgcccgctgctcggagcgaggatggccgggctctgtcggatcgggaggaggaggaggaggatgacgaggaggaagaagaggaggtggaggctgcagcgcagaggcggctggccaagcagatctccccggagctgtcggccctggctgtgtactgccacgccacccgcctgcgaccctgcaccctgcccccaacgccccacaaccctgccaggtcagctccctcagcgagcgcaaagccaagaaactcattcgggaggcagggaacagctttgtcaggcacaatgcccgccagctgacccgcgtgtacccgctggggctgcggatgaactcagccaactacagtccccaggagatgtggaactcgggctgtcagctggtggccttgaacttccagacgccaggctacgagatggacctcaatgccgggcgcttcctagtcaatgggcagtgtggctacgtcctaaaacctgcctgcctgcggcaacctgactcgacctttgacccygagtacccaggacctcccagaaccactctcagcatccaggtgctgactgcacagcagctgcccaagctgaatgccgagaagccacactccattgtggaccccctggtgcgcattgagatccatggggtgcccgcagactgtgcccggcaggagactgactacgtgctcaacaatggcttcaacccccgctgggggcagaccctgcagttccagctgcgggctccggagctggcactggtccggtttgtggtggaagattatgacgccacctcccccaatgactttgtgggccagtttacactgcctcttagcagcctaaagcaagggtaccgccacatacacctgctttccaaggacggggcctcactgtcaccagccacgctcttcatccaaatccgcatccagccctcctgagtagctgggactacaggcacaggccaccamacctggctaatgtttaaattttatgtagagatggcggggggggcgggggtctccctatgttgcccaggctggtctcgagctcctgacctcaagtgatcctcctgccccagcattccaaagtgctgggattacaggtgtgagccactgcctggcctggccgtaggtttgtaactgtttcatagaagagccctggagaagacagtagaatgagcctatctagtttaaaaaataaagaagcacgttgatttc

SEQ ID NO: 5434 - DNA, 2760 bp, Homo sapiens
ttcgctcgccgcctcgctcagagccggggccgggccagagcggcgccccgctgccctgtccccgcgtgcagaccccgggcccggccccggccccccgccaagccatgctgtgcggccgctggagggttgccgccgcccgcccgaggagcccccrgtggccgcccaggtcgcagcccaagtcgcggcgccggtcgctctcccgtccccgccgactccctccgatggcggcaccaagaggcccgggctgcgggcgctgaagaagatgggcctgacggaggacgaggacgtgcgcgccatgctgcggggctcccggctccgcaagatccgctcgcgcacgtggcacaaggagcggctgtaccggctgcaggaggacggcctgagcgtgtggttccagcggcgcatcccgcgtgcgccatcgcagcacatctscttcgtgcagcacatcgaggcggtccgcgagggccaccagtccgagggcctgcggcgcttcgggggtgccttcgcgccagcgcgctgcctcaccatcgccttcaagggccgccgcaagaacctggacctggcggcgcccacggctgaggaagcgcagcgctgggtgcgcggtctgaccaagctccgcgcgcgcctggacgccatgagccagcgcgagcggctagaccacacccacacctggatccactcctatctgcaccgggctgactccaaccaggacagcaagatgagcttcaaggagatcaagagcctgctgagaatggtcaacgtggacatgaacgacatgtacgcctacctcctcttcaaggagtgtgaccactccaacaacgaccgtctagagggggctgagatcgaggagttcctgcggcggctgctgaagcggccggagctggaggagatcttccatcagtactcgggcgaggaccgcgtgctgagtgcccctgagctgctggagttcctggaggaccagggcgaggagggcgccacactggcccgcgcccagcagctcattcagacctatgagctcaacgagacagccaagcagcatgagctgatgacaytggatggcttcatgatgtacctgttgtcgccggagggggctgccttggacaacacccacacgtgtgtgttccaggacatgaaccagccccttgcccactacttcatctcttcctcccacaacacctatctgactgaytcccagatcggggggcccagcagcaccgaggcctaygttagggcctttgcccagggatgccgctgcgtggagctggactgctgggaggggccaggaggggagcccgtcatctatcatggccataccctcacctccaagattctcttccgggacgtggtccaagccgtgcgcgaccatgccttcacgctgtccccttaccctgtcatcctatccctggagaaccactgcgggctggagcagcaggctgccatggcccgccacctctgcaccatcctgggggacatgctggtgacacaggcgctggactccccaaatcccgaggagctgccatccccagagcagctgaagggccgggtcctggtgaagggaaagaagytgcccgctgctcggagcgaggatggccgggctctgtcggatcgggaggaggaggaggaggatgacgaggaggaagaagaggaggtggaggctgcagcgcagaggcggctggccaagcagatctccccggagctgtcggccctggctgtgtactgccacgccacccgcctgcgaccctgcaccctgcccccaacgccccacaaccctgccaggtcagctccctcagcgagcgcaaagccaagaaactcattcgggaggcagggaacagctttgtcaggcacaatgcccgccagctgacccgcgtgtacccgctggggctgcggatgaactcagccaactacagtccccaggagatgtggaactcgggctgtcagctggtggccttgaacttccagacgccaggctacgagatggacctcaatgccgggcgcttcctagtcaatgggcagtgtggctacgtcctaaaacctgcctgcctgcggcaacctgactcgacctttgacccygagtacccaggacctcccagaaccactctcagcatccaggtgctgactgcacagcagctgcccaagctgaatgccgagaagccacactccattgtggaccccctggtgcgcattgagatccatggggtgcccgcagactgtgcccggcaggagactgactacgtgctcaacaatggcttcaacccccgctgggggcagaccctgcagttccagctgcgggctccggagctggcactggtccggtttgtggtggaagattatgacgccacctcccccaatgactttgtgggccagtttacactgcctcttagcagcctaaagcaagggtaccgccacatacacctgctttccaaggacggggcctcactgtcaccagccacgctcttcatccaaatccgcatccagccctcctgagtagctgggactacaggcacaggccaccamacctggctaatgtttaaattttatgtagagatggcggggggggcgggggtctccctatgttgcccaggctggtctcgagctcctgacctcaagtgatcctcctgccccagcattccaaagtgctgggattacaggtgtgagccactgcctggcctggccgtaggtttgtaactgtttcatagaagagccctggagaagacagtagaatgagcctatctagtttaaaaaataaagaagcacgttgatttc

SEQ ID NO: 5435 - DNA, 2713 bp, Homo sapiens
ttcgctcgccgcctcgctcagagccggggccgggccagagcggcgccccgctgccctgtccccgcgtgcagaccccgggcccggccccggccccccgccaagccatgctgtgcggccgctggagggttgccgccgcccgcccgaggagcccccrgtggccgcccaggtcgcagcccaagtcgcggcgccggtcgctctcccgtccccgccgactccctccgatggcggcaccaagaggcccgggctgcgggcgctgaagaagatgggcctgacggaggacgaggacgtgcgcgccatgctgcggggctcccggctccgcaagatccgctcgcgcacgtggcacaaggagcggctgtaccggctgcaggaggacggcctgagcgtgtggttccagcggcgcatcccgcgtgcgccatcgcagcacatctscttcgtgcagcacatcgaggcggtccgcgagggccaccagtccgagggcctgcggcgcttcgggggtgccttcgcgccagcgcgctgcctcaccatcgccttcaagggccgccgcaagaacctggacctggcggcgcccacggctgaggaagcgcagcgctgggtgcgcggtctgaccaagctccgcgcgcgcctggacgccatgagccagcgcgagcggctagaccacacccacacctggatccactcctatctgcaccgggctgactccaaccaggacagcaagatgagcttcaaggagatcaagagcctgctgagaatggtcaacgtggacatgaacgacatgtacgcctacctcctcttcaaggagtgtgaccactccaacaacgaccgtctagagggggctgagatcgaggagttcctgcggcggctgctgaagcggccggagctggaggagatcttccatcagtactcgggcgaggaccgcgtgctgagtgcccctgagctgctggagttcctggaggaccagggcgaggagggcgccacactggcccgcgcccagcagctcattcagacctatgagctcaacgagacagccaagcagcatgagctgatgacaytggatggcttcatgatgtacctgttgtcgccggagggggctgccttggacaacacccacacgtgtgtgttccaggacatgaaccagccccttgcccactacttcatctcttcctcccacaacacctatctgactgaytcccagatcggggggcccagcagcaccgaggcctaygttagggcctttgcccagggatgccgctgcgtggagctggactgctgggaggggccaggaggggagcccgtcatctatcatggccataccctcacctccaagattctcttccgggacgtggtccaagccgtgcgcgaccatgccttcacgctgtccccttaccctgtcatcctatccctggagaaccactgcgggctggagcagcaggctgccatggcccgccacctctgcaccatcctgggggacatgctggtgacacaggcgctggactccccaaatcccgaggagctgccatccccagagcagctgaagggccgggtcctggtgaagggaaagaagytgcccgctgctcggagcgaggatggccgggctctgtcggatcgggaggaggaggaggaggatgacgaggaggaagaagaggaggtggaggctgcagcgcagaggcggctggccaagcagatctccccggagctgtcggccctggctgtgtactgccacgccacccgcctgcgaccctgcaccctgcccccaacgccccacaaccctgccaggtcagctccctcagcgagcgcaaagccaagaaactcattcgggaggcagggaacagctttgtcaggcacaatgcccgccagctgacccgcgtgtacccgctggggctgcggatgaactcagccaactacagtccccaggagatgtggaactcgggctgtcagctggtggccttgaacttccagacgccaggctacgagatggacctcaatgccgggcgcttcctagtcaatgggcagtgtggctacgtcctaaaacctgcctgcctgcggcaacctgactcgacctttgacccygagtacccaggacctcccagaaccactctcagcatccaggtgctgactgcacagcagctgcccaagctgaatgccgagaagccacactccattgtggaccccctggtgcgcattgagatccatggggtgcccgcagactgtgcccggcaggagactgactacgtgctcaacaatggcttcaacccccgctgggggcagaccctgcagttccagctgcgggctccggagctggcactggtccggtttgtggtggaagattatgacgccacctcccccaatgactttgtgggccagtttacactgcctcttagcagcctaaagcaagggtaccgccacatacacctgctttccaaggacggggcctcactgtcaccagccacgctcttcatccaaatccgcatccagcgctcctgagggcccacctcactcgccttggggttctgcgagtgccagtccacatcccctgcagagccctctcctcctctggagtcaggtggtgggagtaccagccccccagcccacccacttggcccactcagcccattcaccaggcgctggtctcacctgggtgctgagggctgcytgggctccaaccctggggccctgagatggccccagctcctcttgtcctcagcccacccctcat

SEQ ID NO: 5436 - DNA, 2864 bp, Homo sapiens
gccaccgcctgccccgccctcgcaccgccccggccccgcccccttcccttcccgccccgccccgccccacctcctgctgcctcctccgactccctcccgcgccgctaagtttcttcgctcgccgcctcgctcagagccggggccgggccagagcggcgccccgctgccctgtccccgcgtgcagaccccgggcccggccccggccccccgccaagccatgctgtgcggccgctggagggttgccgccgcccgcccgaggagcccccrgtggccgcccaggtcgcagcccaagtcgcggcgccggtcgctctcccgtccccgccgactccctccgatggcggcaccaagaggcccgggctgcgggcgctgaagaagatgggcctgacggaggacgaggacgtgcgcgccatgctgcggggctcccggctccgcaagatccgctcgcgcacgtggcacaaggagcggctgtaccggctgcaggaggacggcctgagcgtgtggttccagcggcgcatcccgcgtgcgccatcgcagcacatctscttcgtgcagcacatcgaggcggtccgcgagggccaccagtccgagggcctgcggcgcttcgggggtgccttcgcgccagcgcgctgcctcaccatcgccttcaagggccgccgcaagaacctggacctggcggcgcccacggctgaggaagcgcagcgctgggtgcgcggtctgaccaagctccgcgcgcgcctggacgccatgagccagcgcgagcggctagaccactggatccactcctatctgcaccgggctgactccaaccaggacagcaagatgagcttcaaggagatcaagagcctgctgagaatggtcaacgtggacatgaacgacatgtacgcctacctcctcttcaaggagtgtgaccactccaacaacgaccgtctagagggggctgagatcgaggagttcctgcggcggctgctgaagcggccggagctggaggagatcttccatcagtactcgggcgaggaccgcgtgctgagtgcccctgagctgctggagttcctggaggaccagggcgaggagggcgccacactggcccgcgcccagcagctcattcagacctatgagctcaacgagacagccaagcagcatgagctgatgacaytggatggcttcatgatgtacctgttgtcgccggagggggctgccttggacaacacccacacgtgtgtgttccaggacatgaaccagccccttgcccactacttcatctcttcctcccacaacacctatctgactgaytcccagatcggggggcccagcagcaccgaggcctaygttagggcctttgcccagggatgccgctgcgtggagctggactgctgggaggggccaggaggggagcccgtcatctatcatggccataccctcacctccaagattctcttccgggacgtggtccaagccgtgcgcgaccatgccttcacgctgtccccttaccctgtcatcctatccctggagaaccactgcgggctggagcagcaggctgccatggcccgccacctctgcaccatcctgggggacatgctggtgacacaggcgctggactccccaaatcccgaggagctgccatccccagagcagctgaagggccgggtcctggtgaagggaaagaagytgcccgctgctcggagcgaggatggccgggctctgtcggatcgggaggaggaggaggaggatgacgaggaggaagaagaggaggtggaggctgcagcgcagaggcggctggccaagcagatctccccggagctgtcggccctggctgtgtactgccacgccacccgcctgcgaccctgcaccctgcccccaacgccccacaaccctgccaggtcagctccctcagcgagcgcaaagccaagaaactcattcgggaggcagggaacagctttgtcaggcacaatgcccgccagctgacccgcgtgtacccgctggggctgcggatgaactcagccaactacagtccccaggagatgtggaactcgggctgtcagctggtggccttgaacttccagacgccaggctacgagatggacctcaatgccgggcgcttcctagtcaatgggcagtgtggctacgtcctaaaacctgcctgcctgcggcaacctgactcgacctttgacccygagtacccaggacctcccagaaccactctcagcatccaggtgctgactgcacagcagctgcccaagctgaatgccgagaagccacactccattgtggaccccctggtgcgcattgagatccatggggtgcccgcagactgtgcccggcaggagactgactacgtgctcaacaatggcttcaacccccgctgggggcagaccctgcagttccagctgcgggctccggagctggcactggtccggtttgtggtggaagattatgacgccacctcccccaatgactttgtgggccagtttacactgcctcttagcagcctaaagcaagggtaccgccacatacacctgctttccaaggacggggcctcactgtcaccagccacgctcttcatccaaatccgcatccagccctcctgagtagctgggactacaggcacaggccaccamacctggctaatgtttaaattttatgtagagatggcggggggggcgggggtctccctatgttgcccaggctggtctcgagctcctgacctcaagtgatcctcctgccccagcattccaaagtgctgggattacaggtgtgagccactgcctggcctggccgtaggtttgtaactgtttcatagaagagccctggagaagacagtagaatgagcctatctagtttaaaaaataaagaagcacgttgatttc

SEQ ID NO: 5437 - DNA, 1443 bp, Homo sapiens
gatgcaaaagctggagaaaaatttgttgaagaggcctgtaggctaataatggaagaggtggttttgaaagctacagatgtcaatgagaaggtgtgtgaatggaggcctcctgaacaactgaaacagcttcttgatttggagatgagagactcaggcgagccaccccataaactattggaactctgtcgggatgtcatacactacagtgtcaaaactaaccacccaagatttttcaaccaattgtatgctggacttgattattactccttggtggcccgatttatgaccgaagcattgaatccaagtgtttatacgtatgaggtgtccccagtgtttctgttagtggaagaagcggttctgaagaaaatgattgaatttattggctggaaagaaggggatggaatatttaacccaggtggctcagtgtccaatatgtatgcaatgaatttagctagatacaaatattgtcctgatattaaggaaaaggggctgtctggttcgccaagattaatccttttcacatctgcagagtgtcattactctatgaagaaggcagcctcttttcttgggattggcactgagaatgtttgctttgtggaaacagatggaagaggtaaaatgatacctgaggaactggagaagcaagtctggcaagccagaaaagagggggcagcaccgtttcttgtctgtgccacttctggtacaactgtgttgggagcttttgaccctctggatgaaatagcagacatctgcgagaggcacagcctctggcttcatgtagatgcttcttggggtggctcagctttgatgtcgaggaagcaccgcaagcttctgcatggcatccacagggctgactctgtggcytggaacccacacaagatgctgatggctgggatccagtgctgtgctctccttgtgaaagacaaatctgatcttcttaaaaaatgctactctgccaaggcatcttacctcttccagcaggataaattctatkatgtgagctatgacacaggagacaagtctatccagtgtagcagaagaccagatgcattcaagttctggatgacctggaaggccctgggtacattaggccttgaagaaagagttaatcgtgctcttgctttatctaggtacctagtagatgaaatcaagaaaagagaaggattcaagttactgatggaacctgaatatgccaatatttgcttttggtacattccaccgagcctcagagagatggaagaaggacccgagttctgggcaaaacttaatttggtggccccagccattaaggagaggatgatgaagaagggaagcttgatgctgggctaccagccgcaccrgggaaaggtcaacttcttccrccaggtggtgatcagccctcaagtgagccgggaggacatggacttcctcctggatgagatagacttactgggtaaagacatg

SEQ ID NO: 5438 - DNA, 2708 bp, Homo sapiens
gcccccgcctaggcgagagcccagagagctgaacctgcatcccggacctgcggcgaccgtcgtacaccatgggcctccacctccgcccctaccgtgtggggctgctcccggatggcctcctgttcctcttgctgctgctaatgctgctcgcggacccagcgctcccggccggacgtcaccccccagtggtgctggtccctggtgatttgggtaaccaactggaagccaagctggacaagccgacagtggtgcactacctctgctccaagaagaccgaaagctacttcacaatctggctgaacctggaactgctgctgcctgtcatcattgactgctggattgacaatatcaggctggtttacaacaaaacatccagggccacccagtttcctgatggtgtggatgtacgtgtccctggctttgggaagaccttctcactggagttcctggaccccagcaaaagcagcgtgggttcctatttccacaccatggtggagagccttgtgggctggggctacacacggggtgaggatgtccgaggggctccctatgactggcgccgagccccaaatgaaaacgggccctacttcctggccctccgcgagatgatcgaggagatgtaccagctgtatgggggccccgtggtgctggttgcccacagtatgggcaacatgtacacgctctactttctgcagcggcagccgcaggcctggaaggacaagtatatccgggccttcgtgtcactgggtgcgccctgrgggggcgtggccaagaccctgcgcgtcctggcttcaggagacaacaaccggatcccagtcatcgggcccctgaagatccgggagcagcagcggtcagctgtctccaccagctggctgctgccctacaactacacatggtcacctgagaaggtgttcgtgcagacacccacaatcaactacacactgcgggactaccgcaagttcttccaggacatcggctttgaagatggctggctcatgcggcaggacacagaagggctggtggaagccacgatgccacctggcgtgcagctgcactgcctctatggyactggcgtccccacaccagactccttctactatgagagcttccctgaccgtgaccctaaaatctgctttggtgacggcgatggtactgtgaacttgaagagtgccctgcagtgccaggcctggcagagccgccaggagcaccaagtgttgctgcaggagctgccaggcagcgagcacatcgagatgctggccaacgccaccaccctggcctatctgaaacgtgtgctccttgggccctgactcctgtgccacaggactcctgtggctcggccgtggacctgctgttggcctctggggctgtcatggcccacgcgttttgcaaagtttgtgactcaccattcaaggccccgagtcttggactgtgaagcatctgccatggggaagtgctgtttgttatcctttctctgtggcagtgaagaaggaagaaatgagagtctagactcaagggacactggatggcaagaatgctgctgatggtggaactgctgtgaccttaggactggctccacagggtggactggctgggccctggtcccagtccctgcctggggccatgtgtcccccctattcctgtgggcttttcatacttgcctactgggccctggccccgcagccttcctatgagggatgttactgggctgtggtcctgtacccagaggtcccagggatcggctcctggcccctcgggtgacccttcccacacaccagccacagataggcctgccactggtcatgggtagctagagctgctggcttccctgtggcttarctggtggccagcctgactggcttcctgggcgagcctagtagctcctgcaggcaggggcagtttgttgcgttcttcgtggttcccaggccctgggacatctcactccactcctacctcccttaccaccaggagcattcaagctctggattgggcagcagatgtgcccccagtcccgcaggctgtgttccaggggccctgatttcctcggatgtgctattggccccaggactgaagctgcctcccttcaccctgggactgtggttccaaggatgagagcaggggttggagccatggccttctgggaacctatggagaaagggaatccaaggaagcagccaaggctgctcgcagcttccctgagctgcacctcttgctaaccccaccatcacactgccaccctgccctagggtctcactagtaccaagtgggtcagcacagggctgaggatggggctcctatccaccctggccagcacccagcttagtgctgggactagcccagaaacttgaatgggaccctgagagagccaggggtcccctgaggcccccctaggggctttctgtctgccccagggtgctccatggatctccctgtggcagcaggcatggagagtcagggctgccttcatggcagtaggctctaagtgggtgactggccacaggccgagaaaagggtacagcctctaggtggggttcccaaagacgccttcasgctggactgagctgctctcccacagggtttctgtgcagctggattttctctgttgcatacatgcctggcatctgtctccccttgttcctgagtggccccacatggggctctgagcaggctgtatctggattctggcaataaaagtactctggatgctgwaa

SEQ ID NO: 5439 - DNA, 1628 bp, Homo sapiens
ggacgccgtgcgcgtgcgcgcggcaggtcggcgccgggcgggggcggagcggccgtcgcaggtccacgccgtaaacagacaacatggcggccgcggtggcggcggcacctggggccttgggatccctgcatgctggcggcgcccgcctggtggccgcttgcagtgcgtggctctgcccggggttgaggctgcccggctcgttggcaggccggcgagcgggcccggcgatctgggcccagggctgggtacctgcggccgggggtcccgccccgaaaaggggctacagctctgagatgaagacggaggacgagctgcgggtgcggcacctggaggaggagaaccgaggaattgtggtgcttggaataaacagagcttatggcaaaaattcactcagtaaaaatcttataaaaatgctatcaaaagctgtggatgctttgaaatctgataagaaagtacggaccataataatcaggagtgaagtcccagggatattctgtgctggtgctgaccttaaggaaagagccaaaatgagttccagtgaagttggtccttttgtctccaaaataagagcagtgattaacgatattgctaatcttccagtaccaacaattgcagcaatagatggactcgctttaggtggtggtcttgaactggctttagcctgtgatataygagtagcagcttcctctgcaaaaatgggcctggttgaaacaaaattggcgattattcctggtggaggggggacacagcgattgccacgcgccattggaatgtccctggccaaggagctcatattctctgcgcgagtcctcgatggcaaagaagccaaagcagtgggcttaatcagccacgttctggaacagaaccaggagggagacgcggcctacaggaaggccttggacctggcgagagagtttttacctcagggacctgttgcaatgagagtggcaaaattagcaattaatcaagggatggaggtcgatttagtaacagggttagccatagaagaagcttgttatgctcagaccattccaacaaaagacagacttgaaggtcttcttgcttttaaagagaaaaggccccctcgctataaaggagaataaaaggaacagaaattcttaagatgccaatgtaataaatgtacttcctggaagtgtctttcggatccactatatgcctcagcacatggaaccttaatgaccaaagtgaagagcagattattcatacggtgtaataagcatctggaatggacccatccgtgtacttcattcaaatgtgtaaatgtcatattcattcagatttataaagctagtagtgtatagtcagaaacagaatcaaagttagatatacatttttaaatatttactgcatatgaggctttctgttaattttttaatgtgaataatttatatattgcacattctagggaataatattgattgtatgtctactgtgctgcattaagaaaataaaatttctatataccaaaaatgtgaagttataccaaataaagtttctaagtgattaatgcatacgaacagctacatatacatatatctaaacctgaaaaatgaattgatattctgagtgaaaactacctaatataaataaaattagtgaaaagaaaa

SEQ ID NO: 5440 - DNA, 1541 bp, Homo sapiens
ggacgccgtgcgcgtgcgcgcggcaggtcggcgccgggcgggggcggagcggccgtcgcaggtccacgccgtaaacagacaacatggcggccgcggtggcggcggcacctggggccttgggatccctgcatgctggcggcgcccgcctggtggccgcttgcagtgcgtggctctgcccggggttgaggctgcccggctcgttggcaggccggcgagcgggcccggcgatctgggcccagggctgggtacctgcggccgggggtcccgccccgaaaaggggctacagctctgagatgaagacggaggacgagctgcgggtgcggcacctggaggaggagaaccgaggaattgtggtgcttggaataaacagagcttatggcaaaaattcactcagtaaaaatcttataaaaatgctatcaaaagctgtggatgctttgaaatctgataagaaagtacggaccataataatcaggagtgaagtcccagggatattctgtgctgctaatcttccagtaccaacaattgcagcaatagatggactcgctttaggtggtggtcttgaactggctttagcctgtgatataygagtagcagcttcctctgcaaaaatgggcctggttgaaacaaaattggcgattattcctggtggaggggggacacagcgattgccacgcgccattggaatgtccctggccaaggagctcatattctctgcgcgagtcctcgatggcaaagaagccaaagcagtgggcttaatcagccacgttctggaacagaaccaggagggagacgcggcctacaggaaggccttggacctggcgagagagtttttacctcagggacctgttgcaatgagagtggcaaaattagcaattaatcaagggatggaggtcgatttagtaacagggttagccatagaagaagcttgttatgctcagaccattccaacaaaagacagacttgaaggtcttcttgcttttaaagagaaaaggccccctcgctataaaggagaataaaaggaacagaaattcttaagatgccaatgtaataaatgtacttcctggaagtgtctttcggatccactatatgcctcagcacatggaaccttaatgaccaaagtgaagagcagattattcatacggtgtaataagcatctggaatggacccatccgtgtacttcattcaaatgtgtaaatgtcatattcattcagatttataaagctagtagtgtatagtcagaaacagaatcaaagttagatatacatttttaaatatttactgcatatgaggctttctgttaattttttaatgtgaataatttatatattgcacattctagggaataatattgattgtatgtctactgtgctgcattaagaaaataaaatttctatataccaaaaatgtgaagttataccaaataaagtttctaagtgattaatgcatacgaacagctacatatacatatatctaaacctgaaaaatgaattgatattctgagtgaaaactacctaatataaataaaattagtgaaaagaaaa

SEQ ID NO: 5441 - DNA, 806 bp, Homo sapiens
ggacatcttgagctgaagcagggttttgagccactgctgctgctgccattgtcaccatggtctcagctctgcggggagcacccctgatcarggtgcactcaagccctgtttcttctccttctgtgagtggaccacggaggctggtgagctgcctgtcatcccaaagctcagctctgagccagagtggtggtggctccacctctgccgccggcatagaagccaggagcagggctctcagaaggcggtggtgcccagctgggatcatgttgttggccctggtctgtctgctcagctgcctgctaccctccagtgaggccaagctctacggtcgttgtgaactggccagagtgctacrtgacttcgggctggacggataccggggatacagcctggctgactgggtctgccttgcttatttcacaagcggtttcaacgcarctgctttggactacgaggctgatgggagcaccaacaacgggatcttccagatcaacagccggaggtggtgcagcaacctcaccccgaacgtccccaacgtgtgccggatgtactgctcagatttgttgaatcctaatctcaaggataccgttatctgtgccatgaagataacccaagagcytcagggtctgggttactgggaggcctggaggcatcactgccagggaaaagacctcactgaatgggtggayggctgtgacttctaggatggacggaaccatgcacagcaggctgggaaatgtggtttggttcctgacctaggcttgggaagacaarccagcgaataaaggatggttgaacgtgaatat

SEQ ID NO: 5442 - DNA, 1278 bp, Homo sapiens
gcgaaccttgcgggcgtccgtctggagccgcaggctcgggtgctcccgcagaaacgcccgcacgtcgcccggcaactcgctcatggccgacgcgcccgcggagcagcccggcggaagccgctcgcagaacctggagccgggggcggggctctgggcgggactcagcggcgccccggatgcagatgcytcctgcgtcccggaagcgcccgcggggccgggtgcgatggcggcggtggctgcgttgcagctggggctgcgggcggcggggctgggacgggccccggccagcgccgcctggaggagcgtcctcagggtctccccgcgcccaggggtggcctggaggccaagcagatgtggcagttctgcagcagaagcatctgccacaaaagcggaagatgactcctttcttcagtgggtcctgctcctcatccctgtgactgcctttggcttggggacatggcaggtcyagcgtcggaagtggaagctgaacctgattgcagagytggagtccagagttctggctgagcctgtccctctgccagccgacccaatggaactgaaaaatctggagtataggccagtgaaggtcaggrrgtgctttgaccattccaaggagctgtatatgatgccccggaccatggtggaccctgtccgggaggcccgggagggcggcctcatctcctcctcaactcagagtggggcctatgtggtcactcccttccactgcaccgacctgggagtcaccatcctggtaaatagagggttygttcccaggaagaaagtgaatcctgaaacscggcagaaaggccagattgagggagaagtgsacctcattgggatggtgaggctgacagaaaccaggyagccttttgtccctgagaacaatccagaaaggaaccactggcattatygagacctggaagctatggccagaatcacaggcgcagagcccatcttcaytgatgccaacttcyagagcacagtccctggaggacccattggagggcaaaccagagttactctgaggaacgagcatctgcagkacatcgtgacctggtatggactctctgcagctacatcctacctgtggtttaagaaattcctacgtgggacacctggtgtgtgacagatcagctgctgaagccctgtccctggataatgcagtatttcaagactgcctttatgctggatcatgtgctactggtataaagttctggccttctaccttaaatgagctcatgacyggttcatcataaaatcctggcttggtttcagtcc

SEQ ID NO: 5443 - DNA, 2767 bp, Homo sapiens
cctggcgctgctgcatcttctccaccacgccggccrtgcgcttctcccaccggcgctgccgctgcgccctgcgcttctccttrcgcttcagggcctcctgcagcaggcgttcgtcgtcacggatcttcacgccctccgccttgtagaggaggttggtccacttcatcttcgcctccagctcctgcgccttcccctcatcctggccgcgcagctcgtccagccggctctgccgtgcctgcaggcgctccagcagctgccggtagttcctyccggcggcgctggccggggcctgcggacacggacgggcgggctgagctccgggacccctccccgcgccccgcaccccgcaccccgcaccccgcaccccgcacccggcgctcacccgtcccagccccgccgcccgcagccccagctgcaacgcagccaccgccgccatcgcacccggccccgcgggcgcttccgggacgcaggargcatctgcatccggggcgccgctgagtcccgcccagagccccgcccccggctccaggttctgcgagcggcttccgccgggctgctccgcgggcgcgtcggccatgagcgagttgccgggcgacgtgcgggcgtttctgcgggagcacccgagcctgcggctccagacggacgcccgcaaggtgaggtgcatcctgacaggtcacgagctgccctgccgcctgccggagctccaggtctacacccgcggcaaaaagtaccagcggctggtccgcgcctccccggccttcgactatgcagagttcgagccgcacatcgtgcccagcaccaagaacccgcaccagttgttctgcaaactcaccctgcggcacatcaacaagtgcccagaacacgtgctgaggcacacccagggccggcggtaccagcgagctctgtgtaaatatgaagaatgtcagaagcaaggggtggagtacgtgcctgcctgcctggtgcaccggaggaggaggagggaggaccagatggacggtgacgggcctcgcccgcrggaagccttctgggagcccacatccagtgatgaggggggagctgcaagtgatgacagcatgacagacctgtacccacctgagctattcaccagaaaggaccttggaagcacggaggatggggatggcactgatgactttttgacagacaaagaggatgagaaggcaaagcccccaagagagaaggccmctgatgagrgcaggagagagaygaccgtgtaccragggctggtccagaagcgcgggaagaagcagttgggctcgttgaaaaagaagttcaagagtcatcaccgcaaacccaagagcttcagctcctgtaaacarccaggttaataaaagcacatgccgtgaagtttcgagaaagccttcagatatttcccccgctcctgatcaaaccgtgtgtcctctgaatgatcggctgtccccagtgtcttctctacccacttatccttgtctcatgacatctgctgccctctaaggcagggctgagggagtctgtcccccacacccaggaagcagcagggactctgagggactaattctcyctggacatggcttctgagtggtcttcagagaagcctagagaagtaacctcrctcactggcatcctgaggggagccccrttcaggctgggcaacgctataggatcacactgcatacaacaaacgccattatttattttgatgtgtttccaaaaatcaaaacgttttcaaacacaactaagatataaaatacagcataaaatgagatttagatctgtttcccacataaagcaaaaaaatcttagaaattgttttgccagaatcaattggtagatcccacttatcctcccctccctgcaaaggcatyttcccgaatcaggccctagcccacccagggccaggagaaacaggaacacccactaggacggaggcgctgctggtgcaraactggtgctgactgctcacgtggcctcctttggtccaccctactttccaccaatcagccaaccaaccttgaccacagagaaaccgtgacttggccaaggtcatttgatgggggctgtcatayggcactaacagggagcgaggtgtggaccaagagacagccctggtgaggttgaaacactgagayaagccagtcttcatgcagtgagcacttgaatgatcacaggagaagagaacccatgtcctgaagccattgmtcgatcttaccaatattcgggggtaaggaagtaggctaccaggggaatatttgcaaacgcgttgggactagttcggctgtgttaaaaaggtaggtgacttccaaaagcacttatgagcagaaacctgcctcacccctgccctgcagagccaatggatgagaggccaagagggaggcaggctcggggctgggccgcagcagccctggagacaggctgagccagcctgtccccagataggtctaggggccagagaggtgttcgactacccttgtggcatttactatggtgcagacgacagggagcaacaagcagttaagctcccccaaaaagagaaacacagtataaggcagtgttagaaaactttaaatacaggattaagatcaaatcggtaaggcatcacaaattgtaaaaaggaattttggctgcattcggcatagcaaacggacaatctgagtgagcgacagcctcaggaaagtggtgtgtcggggctgtccacagggcgagtgcagctgggaaagggcggtgctgctcagccagggcggcctgcgctttcgagaccttgctcagaaaa

SEQ ID NO: 5444 - DNA, 1804 bp, Homo sapiens
cccgtcccagccccgccgcccgcagccccagctgcaacgcagccaccgccgccatcgcacccggccccgcgggcgcttccgggacgcaggargcatctgcatccggggcgccgctgagtcccgcccagagccccgcccccggctccaggttctgcgagcggcttccgccgggctgctccgcgggcgcgtcggccatgagcgagttgccgggcgacgtgcgggcgtttctgcgggagcacccgagcctgcggctccagacggacgcccgcaaggtgaggtgcatcctgacaggtcacgagctgccctgccgcctgccggagctccaggtctacacccgcggcaaaaagtaccagcggctggtccgcgcctccccggccttcgactatgcagagttcgagccgcacatcgtgcccagcaccaagaacccgcaccagttgttctgcaaactcaccctgcggcacatcaacaagtgcccagaacacgtgctgaggcacacccagggccggcggtaccagcgagctctgtgtaaatatgaagaatgtcagaagcaaggggtggagtacgtgcctgcctgcctggtgcaccggaggaggaggagggaggaccagatggacggtgacgggcctcgcccgcrggaagccttctgggagcccacatccagtgatgaggggggagctgcaagtgatgacagcatgacagacctgtacccacctgagctattcaccagaaaggaccttggaagcacggaggatggggatggcactgatgactttttgacagacaaagaggatgagaaggcaaagcccccaagagagaaggccmctgatgagrgcaggagagagaygaccgtgtaccragggctggtccagaagcgcgggaagaagcagttgggctcgttgaaaaagaagttcaagagtcatcaccgcaaacccaagagcttcagctcctgtaaacarccaggttaataaaagcacatgccgtgaagtttcgagaaagccttcagatatttcccccgctcctgatcaaaccgtgtgtcctctgaatgatcggctgtccccagtgtcttctctacccacttatccttgtctcatgacatctgctgccctctaaggcagggctgagggagtctgtcccccacacccaggaagcagcagggactctgagggactaattctcyctggacatggcttctgagtggtcttcagagaagcctagagaagtaacctcrctcactggcatcctgaggggagccccrttcaggctgggcaacgctataggatcacactgcatacaacaaacgccattatttattttgatgtgtttccaaaaatcaaaacgttttcaaacacaactaagatataaaatacagcataaaatgagatttagatctgtttcccacataaagcaaaaaaatcttagaaattgttttgccagaatcaattggtagatcccacttatcctcccctccctgcaaaggcatyttcccgaatcaggccctagcccacccagggccaggagaaacaggagaagagaacccatgtcctgaagccattgmtcgatcttaccaatattcgggggtaaggaagtaggctaccaggggaatatttgcaaacgcgttgggactagttcggctgtgttaaaaaggtaggtgacttccaaaagcacttatgagcagaaacctgcctcacccctgccctgcagagccaatggatgagaggccaagagggaggcaggctcggggctgggccgcagcagccctggagacaggctgagccagcctgtccccagataggtctaggggcca

SEQ ID NO: 5445 - DNA, 2495 bp, Homo sapiens
gcggcgctggccggggcctgcggacacggacgggcgggctgagctccgggacccctccccgcgccccgcaccccgcaccccgcaccccgcaccccgcacccggcgctcacccgtcccagccccgccgcccgcagccccagctgcaacgcagccaccgccgccatcgcacccggccccgcgggcgcttccgggacgcaggargcatctgcatccggggcgccgctgagtcccgcccagagccccgcccccggctccaggttctgcgagcggcttccgccgggctgctccgcgggcgcgtcggccatgagcgagttgccgggcgacgtgcgggcgtttctgcgggagcacccgagcctgcggctccagacggacgcccgcaaggtgaggtgcatcctgacaggtcacgagctgccctgccgcctgccggagctccaggtctacacccgcggcaaaaagtaccagcggctggtccgcgcctccccggccttcgactatgcagagttcgagccgcacatcgtgcccagcaccaagaacccgcaccagttgttctgcaaactcaccctgcggcacatcaacaagtgcccagaacacgtgctgaggcacacccagggccggcggtaccagcgagctctgtgtaaatatgaagaatgtcagaagcaaggggtggagtacgtgcctgcctgcctggtgcaccggaggaggaggagggaggaccagatggacggtgacgggcctcgcccgcrggaagccttctgggagcccacatccagtgatgaggggggagctgcaagtgatgacagcatgacagacctgtacccacctgagctattcaccagaaaggaccttggaagcacggaggatggggatggcactgatgactttttgacagacaaagaggatgagaaggcaaagcccccaagagagaaggccmctgatgagrgcaggagagagaygaccgtgtaccragggctggtccagaagcgcgggaagaagcagttgggctcgttgaaaaagaagttcaagagtcatcaccgcaaacccaagagcttcagctcctgtaaacarccaggttaataaaagcacatgccgtgaagtttcgagaaagccttcagatatttcccccgctcctgatcaaaccgtgtgtcctctgaatgatcggctgtccccagtgtcttctctacccacttatccttgtctcatgacatctgctgccctctaaggcagggctgagggagtctgtcccccacacccaggaagcagcagggactctgagggactaattctcyctggacatggcttctgagtggtcttcagagaagcctagagaagtaacctcrctcactggcatcctgaggggagccccrttcaggctgggcaacgctataggatcacactgcatacaacaaacgccattatttattttgatgtgtttccaaaaatcaaaacgttttcaaacacaactaagatataaaatacagcataaaatgagatttagatctgtttcccacataaagcaaaaaaatcttagaaattgttttgccagaatcaattggtagatcccacttatcctcccctccctgcaaaggcatyttcccgaatcaggccctagcccacccagggccaggagaaacaggaacacccactaggacggaggcgctgctggtgcaraactggtgctgactgctcacgtggcctcctttggtccaccctactttccaccaatcagccaaccaaccttgaccacagagaaaccgtgacttggccaaggtcatttgatgggggctgtcatayggcactaacagggagcgaggtgtggaccaagagacagccctggtgaggttgaaacactgagayaagccagtcttcatgcagtgagcacttgaatgatcacaggagaagagaacccatgtcctgaagccattgmtcgatcttaccaatattcgggggtaaggaagtaggctaccaggggaatatttgcaaacgcgttgggactagttcggctgtgttaaaaaggtaggtgacttccaaaagcacttatgagcagaaacctgcctcacccctgccctgcagagccaatggatgagaggccaagagggaggcaggctcggggctgggccgcagcagccctggagacaggctgagccagcctgtccccagataggtctaggggccagagaggtgttcgactacccttgtggcatttactatggtgcagacgacagggagcaacaagcagttaagctcccccaaaaagagaaacacagtataaggcagtgttagaaaactttaaatacaggattaagatcaaatcggtaaggcatcacaaattgtaaaaaggaattttggctgcattcggcatagcaaacggacaatctgagtgagcgacagcctcaggaaagtggtgtgtcggggctgtccacagggcgagtgcagctgggaaagggcggtgctgctcagccagggcggcctgcgctttcgagaccttgctcagaaaa

SEQ ID NO: 5446 - DNA, 2441 bp, Homo sapiens
caagtcccgtgcgggtgaaccgcccaggctgcgcggaaccagaggcagggatccggtttccagccggttgtggagagacgagcgcttccggggactggagcgtgcgtgctgaggtatgcgcaacgcgtgcggggtctcttccggagtcttttmctggacggggtccctgcggtgggtgtgtttcggcctggcctgggcaggcgcttgtgctgccagggcgccgggcccggggaggccggggtctcgggtggccgccggcccakgcgctggacggcagcaggatggggaaggcgaaggtccccgcctccaagcgcgccccgagcagccccgtggctaagccgggtcctgtcaagacgctcactcggaagaaaaacaagaagaaaaaaaggttttggaaaagcaaggcgcgggaagtaagcaagaagccagcaagcggccccggtgctgtggtgcgacctccaaaggcaccagaagacttttctcaaaactggaaggcgctgcaagagtggctgctgaaacaaaaatctcaggccccagaaaagcctcttgtcatctctcagatgggttccaaaaagaagcccaaaattatccagcaaaacaaaaaagagacctcgcctcaagtgaagggagaggagatgccggcaggaaaagaccaggaggccagcaggggctctgttccttcaggttccaagatggacaggarggcgccagtacctcgcaccaaggccagtggaacagagcacaataagaaaggaaccaaggaaaggacaaatggtgatattgttccagaacgaggggacatcgagcataagaagcggaaagctaaggaggcagccccagccccacccaccgaggaagacatctggtttgacgacgtggacccagcggatatcgaagctgccataggtccagaggcggccaagatagcgaggaaacagttgggtcagagcgagggcagcgtcagcctcagcctcgtgaaagagcaggccttcggcggcctgacaagagccttagccttggactgtgagatggtgggcgtgggccctaagggggaggagagcatggccgcccgtgtgtccatcgtgaaccagtatgggaagtgcgtttatgacaagtacgtcaaaccarcygagcccgtgacggactataggacagcggtcagtgggattcggcctgagaacctcaagcagggagaagagcttgaagttgttcagaaggaagtggcagagatgctgaagggcagaattctagtggggcacgctctgcataatgacctaaaggtactatttcttgatcatccaaaaaagaagattcgggacacacagaaatataaacctttcaagartcaagtaaagagtggaaggccgtctctgagactactttcagagaagatccttgggctccaggtccagcaggcggagcactgttcaattcaggatgcccaggcagcaatgaggctgtacrtcatggtgaagaaggagtgggagagcatggcccgagacaggcgccccctgctgactgctccagaccactgcagtgacgacgcctagcagtcctgccctgctgctgctgccgccccgctacagaggcaatgtgaccagtcacagggacagatcacatctccccagagtggcaactctggtgaaaccttttcagaatcatggcagaggggcgtggcgtggtgctactgagaaggtcctccttcctcttgactttgtggtctgaaacctggtcttactgtccatgtgtgtttgggcccggatggtcagggtggggagcagggackgcyatgggcacgcctggccacgctttaccgactgctgaccccctgggcmaggtgaggttggggcctgtgggccgccagtccatacggtgctgtcacygcccatcttcggtgacaccctggggtgaggtgctcagcaccttcctctcgaggagccacattttcctcctttgtgttaggggacataacaagctctgctgggcttgagggacccagaccaggtgtctgcagtcagctcctgagacacagctggccggcacaacaggtgttacatcaggggtttcctgtggccgtttgractttgagcatttatctaaattaaattggcccagggttggctggtgggtcacccagcagaggcttctccccatagcacgaggatgtgttgcctgggcacggtgactgcggttattcctggaggtcrgcagacatgccaaccttgggctatttgagctggagaagctatgtgatgctagccggtggctttctgggctaggccccagtttgaggctcccctgggaactagagccaggaacagccagtggcactgacaaggggacggagtccaaggcgttattgggccacctgacagctggacagaaraggggcagacacaccgaggatgcgatttaaaataaatgcagatgtttacttggaa

SEQ ID NO: 5447 - DNA, 1585 bp, Homo sapiens
agacgcggagccatggccgaggtgttgcggacgctggccggaaaaccaaaatgccayrcacttcgacctatgatccttttcctaataatgcttgtcttggtcttgtttggttacrggktcctaagccccagaagtctaatgccaggaagcctggaacgggggttctgcatggctgttagggaacctgaccatctgcagcrygtctcgttgccaaggatggtctacccccagycaaaggtgctgacaccgtgtaggaagkatgtcctcgtggtgaccccttggctggctcccattgtctgggagggcacrttcaacatcgacatcctcaaygagcagttcaggctccagaacaccaccattgggttaactgtgtttgccatcaagaaatacgtggctttcctgaagctgttcctggagacggcggagaagcacttcatggtgggccaccgtgtccactactatgtcttcaccgaccagcyggccgcggtgccccrcgtgacgctggggaccggtsggcagctgtcagtgctggaggtgsgcgcctacaagcgctggcaggacgtgtccatgcgccgcatggagatgatcagtgacttctgcgagcggygcttcctcagcgaggtggattacctggtgtgcgtggacgtggacakggagwtccgcgaccaygtgggcgtggakatcctgactccrctgttcggcaccctgcacyccrgcttctacggaagcagccgggaggcyttcacctacgagcgccggccccagtcccaggcctacatmccyaaggacgagggcgatttctactacmtggggrsgttcttcggggggtcggtgcaagagrtgcagcggctcaccagggyctgccaccaggccatgatggtcraccaggccaacggcatcgaggccgtgtggcacgacgagagccacctgaacaagtacctrctgcgccacaaacccaccaaggtgctctcccccgagtacttgtgggaccagcagctgctgggctggcccgccgtcctgaggaagctgaggttcactgcggtgcccaagaaccaccaggcggtccbggaacccgtgagcggctgccaggggctctgggagggctgccrgcagccccgtccccctcccgcccttggttttagcagaacgggtaaactctgtttcctttgtccgtcctgttgtgagtaactgaagcctaggccccgtccccacctcaaatcacacacaccccctccccrccacagagacaccattacatacacagacacacacagaaagacacacacagacacaaaatcacacacacaccctccccgccacagagacaccattacatacacagacacacacagaaagacacagacacaaaatcacacacacaccctccccgccacagagacacaccattacatacacagacacgcaatcgcagatacgcccttccggccacagaaacacaccattacacacacatacacagaaagacacacacagacacacaatcacacgcagcccctccccgccacagagacacaccattacatacacagacacacacagaaagacacacacagacacaaaatca

SEQ ID NO: 5448 - DNA, 1590 bp, Homo sapiens
agacgcggagccatggccgaggtgttgcggacgctggccggaaaaccaaaatgccayrcacttcgacctatgatccttttcctaataatgcttgtcttggtcttgtttggttacrggktcctaagccccagaagtctaatgccaggaagcctggaacgggggttctgcatggctgttagggaacctgaccatctgcagcrygtctcgttgccaaggatggtctacccccagycaaaggtgctgacaccgtgtaggaagkatgtcctcgtggtgaccccttggctggctcccattgtctgggagggcacrttcaacatcgacatcctcaaygagcagttcaggctccagaacaccaccattgggttaactgtgtttgccatcaagaaatacgtggctttcctgaagctgttcctggagacggcggagaagcacttcatggtgggccaccgtgtccactactatgtcttcaccgaccagcyggccgcggtgccccrcgtgacgctggggaccggtsggcagctgtcagtgctggaggtgsgcgcctacaagcgctggcaggacgtgtccatgcgccgcatggagatgatcagtgacttctgcgagcggygcttcctcagcgaggtggattacctggtgtgcgtggacgtggacakggagwtccgcgaccaygtgggcgtggakatcctgactccrctgttcggcaccctgcacyccrgcttctacggaagcagccgggaggcyttcacctacgagcgccggccccagtcccaggcctacatmccyaaggacgagggcgatttctactacmtggggrsgttcttcggggggtcggtgcaagagrtgcagcggctcaccagggyctgccaccaggccatgatggtcraccaggccaacggcatcgaggccgtgtggcacgacgagagccacctgaacaagtacctrctgcgccacaaacccaccaaggtgctctcccccgagtacttgtgggaccagcagctgctgggctggcccgccgtcctgaggaagctgaggttcactgcggtgcccaagaaccaccaggcggtccbggaacccgtgagcggctgccaggggctctgggagggctgccrgcagccccgtccccctcccgcccttggttttagcagaacgggtaaactctgtttcctttgtccgtcctgttgtgagtaactgaagcctaggccccgtccccacctcaaatcacacacaccccctccccrccacagagacaccattacatacacagacacacacagaaagacacacacagacacaaaatcacacacacaccctccccgccacagagacaccattacatacacagacacacacagaaagacacagacacaaaatcacacacacaccctccccgccacagagacacaccattacatacacagacacgcaatcgcagatacgcccttccggccacagaaacacaccattacacacacatacacagaaagacacacacagacacacaatcacacgcagcccctccccgccacagagacacaccattacatacacagacacacacagaaagacacacacagacacaaaatcacacac

SEQ ID NO: 5449 - DNA, 1845 bp, Homo sapiens
tggcctcyccggattctgttaacggtagtggtggcttgttgggatccgttgagtgatgggagagtgtgctctttaacttcggagagagatgcgctctcgtgtagccgtcagggcctgccataaggtctgcaggtgcctgttgtctgggtttgggggtcgagtagatgcggggcagccggagctgttgacggaaaggagtagccccaaaggagggcatgtgaagtcgcacgcggagctcgaggggaacggcgagcacccagaagcccccgggtctggagagggaagcgaggcgctgttagagatctgtcagagaaggcatttcctaagtggaagcaagcagcagcttagccgggattctcttctgagtgggtgccaycccggcttcggacccttgggcgtagagttgcggaagaacctggccgcagaatggtggacctcggtggtggtgttcagggagcaggtattcccggtggacgccctccaccacaaaccaggccctttgctacccggggacagtgccttcaggttagtttctgcagaaactctacgcgaaatcttgcaagacaaagagctgagtaaggaacagctagtarcatttcttgagaacgtattaaaaacttctgggaaactacgggagaaccttcttcacggtgccttggaacactatgttaattgcctggatctggtaaacaagaggctaccttatggccttgctcagattggagtgtgttttcatcctgtttttgacactaagcagatacgaaatggtgttaaaagtattggtgagaagactgaagcttcgttagtatggtttactcctccgagaacttcaaaccagtggcttgatttctggttacgtcatcgactccagtggtggagaaagtttgccatgagtccatctaacttcagcagcagtgactgtcaggatgaagaaggccggaaaggaaacaaactttactacaattttccctggggaaaggagttaatagaaaccctgtggaacctaggagatcacgaacttttacacatgtatcctggcaatgtgtctaaattacatggccgagatggacgaaaaaatgtggttccttgtgttctctctgtaaatggggacctagaccgaggcatgctggcctacctctatgattctttccagctgacagagaactcctttacaagaaagaaaaatcttcatagaaaggtacttaaacttcacccttgtttagcccctattaaggttgctttggatgtaggaagaggccccacattggaactaagacaggtttgtcaagggctatttaatgagttactagaaaatgggatttctgtgtggcctggttatttggaaactatgcagtcytcattggaacaactttattcgaagtatgatgaaatgagtattctcttcacagttttggttactgaaactactttggagaatggattaatacatctgagaagcagagacaccacaatgaaggaaatgatgcatatatccaaattaaaagactttttgattaagtatatatcatcagctaagaatgtatagatttttatatttgtataataaatattcttctctcctaatttggttgtcttatgttcacttagatttatttctagcccctttgcacttayaaagtggacatttgtggtgcttgctttcattcagtgtttatattttttatgtctttcattgtatcaggaatatgttcagctacaagaaacaaaaatctactatactggattaagcaaattggggtttgtttttcttacatacaagaactctagcgggtagactgtccaaagctagtattactgtttctatagttagggacccaggcactt

SEQ ID NO: 5450 - DNA, 3620 bp, Homo sapiens
tgcggcccgggccgaggaaggagaagtgggaggaggggggagctcggcgtcccgctccctccgcggctcatggcgacgactctcggcacatccgggaccctccggccgtggcggccgaggcgccggctgctcgggccccagccccggccgctgtggtgactccgccgcgcctcgccgtcgcccccgtgccgcccgccgcccccgccgcccccgccgccggggacatgtctaaccccggaggccggaggaacgggcccgtcaagctgcgcctgacagtactctgtgcaaaaaacctggtgaaaaaggattttttccgacttcctgatccatttgctaaggtggtggttgatggatctgggcaatgccattctacagatactgtgaagaatacgcttgatccaaagtggaatcagcattatgacctgtatattggaaagtctgattcagttacgatcagtgtatggaatcacaagaagatccataagaaacaaggtgctggatttctcggttgtgttcgtcttctttccaatgccatcaaccgcctcaaagacactggttatcagaggttggatttatgcaaactcgggccaaatgacaatgatacagttagaggacagatagtagtaagtcttcagtccagagaccgaataggcacaggaggacaagttgtggactgcagtcgtttatttgataacgatttaccagacggctgggaagaaaggagaaccgcctctggaagaatccagtatctaaaccatataacaagaactacgcaatgggagcgcccaacacgaccggcatccgaatattctagccctggcagacctcttagctgctttgttgatgagaacactccaattagtggaacaaatggtgcaacatgtggacagtcttcagatcccaggctggcagagaggagagtcaggtcacaacgacatagaaattacatgagcagaacacatttacatactcctccagacctaccagaaggctatgaacagaggacaacgcaacaaggccaggtgtatttcttacatacacagactggtgtgagcacatggcatgatccaagagtgcccagggatcttagcaacatcaattgtgaagagcttggtccattgcctcctggatgggagatccgtaatacggcaacaggcagagtttatttygttgaccataacaacagaacaacacaatttacagatcctcggctgtctgctaacttgcatttagttttaaatcggcagaaccaattgaaagaccaacagcaacagcaagtggtatcgttatgtcctgatgacacagaatgcctgacagtcccaaggtacaagcgagacctggttcagaaactaaaaattttgcggcaagaactttcccaacaacagcctcaggcaggtcattgccgcattgaggtttccagggaagagatttttgaggaatcatatcgacaggtcatgaaaatgagaccaaaagatctctggaagcgattaatgataaaatttcgtggagaagaaggccttgactatggaggcgttgccagggaatggttgtatctcttgtcacatgaaatgttgaatccatactatggcctcttccagtattcaagagatgatatttatacattgcagatcaatcctgattctgcagttaatccggaacatttatcctatttccactttgttggacgaataatgggaatggctgtgtttcatggacattatattgatggtggtttcacattgcctttttataagcaattgcttgggaagtcaattaccttggatgacatggagttagtagatccggatcttcacaacagtttagtgtggatacttgagaatgatattacaggtgttttggaccataccttctgtgttgaacataatgcatatggtgaaattattcagcatgaacttaaaccaaatggcaaaagtatccctgttaatgaagaaaataaaaaagaatatgtcaggctctatgtgaactggagatttttacgaggcattgaggctcaattcttggctctgcagaaaggatttaatgaagtaattccacaacatctgctgaagacatttgatgagaaggagttagagctcattatttgtggacttggaaagatagatgttaatgactggaaggtaaacacccggttaaaacactgtacaccagacagcaacattgtcaaatggttctggaaagctgtggagttttttgatgaagagcgacgagcaagattgcttcagtttgtgacaggatcctctcgagtgcctctgcagggcttcaaagcattgcaaggtgctgcaggcccgagactctttaccatacaccagattgatgcctgcactaacaacctgccgaaagcccacacttgcttcaatcgaatagacattccaccctatgaaagctatgaaaagctatatgaaaagctgctaacagccattgaagaaacatgtggatttgctgtggaatgacaagcttcaaggatttacccaggactctatttatacaaccctgactgacagcctcctttcagcagagtttcaaagaatatgctgaaatacaggaaaacactcccccccccccyyttttttttttttttttacattttaggacactgtgaggggaaaggacaattttgaaattccttttcaaggaaaaaaaaggtctttatgctttgccatgaggccacattcagctgctatttaaacttaatatcttgaacctaaagaatgctgacttttcctacatttccagagttaggcagtattctacacttaaagactactactatttttataaaaggtaatctattcaaatttcttcacagatttcaagtctctcaaacatcaagacaacttcagcagtcggtacaagtcacatttcattttgattgaatacatgatcttgaacagctcctgtacttgctctttgtaaaaaaaaataaaattattttgaattattctacctttgtaaacaattggctaaaagaatcatctttaagaaattaagccatttacatgtttgtgtttttctatagcagagcattatattttgcattatatgtttcaacctaktctaagtgggtcttttttacatttttcaagaacggatttcctggaatacagcgatataattttggttgtcaaattcctaatgcaaccatttagtctaaacttagtcatttatttgtgacaataagatgtgttcaggggctccctgtttttaagagactcttttaaaaaaaaaaaaacctaatgtttttatcttgagtcaatatgattaggtattttggatttacttttaatcttaaaatactgcatttttatagcttctcagagcatgtggatgggatgggattttcgttattttgctgggtcagcttatctttaatatatggactattcctataaaccaaagtctctgacaagtgcacctaatttatattgtattttaactacagtgtaagtttccattaacaaaaccatcctaaagcgttaactgctcataattttaatcagctacagttatgaaaaaggaagaattttgctctaaagattattaataagcttagaaaatcctgcttttacctaacagaatgaagtggggttgaggggcggtag

SEQ ID NO: 5451 - DNA, 1578 bp, Homo sapiens
ctgacgcttgggggaggagaggtagttgcttggtatttttggctttccaccataaaactggagacagtttccttcattccaagtcgttttaatgtcactgttgaacgtgtgtgtcctgagttctcatctgaaagctttcatatcggttgactgcagatttgatttgtatccactgtcaccagcactgctcacttaggactttctggatccrgacccaggcagcgcacactggactcttgaggaagaaggagactctaattttggattccttggtggaggaaaataaaacactctggtcttgccgccaacgatgcaagtgtgactgctggcgtcttcatgagctccagaggtcacagcacgctaccaaggactctcatggcccctcggatgatttccgagggagacataggaggcattgctcaaatcacctcctctctattcctgggcagaggcagtgtggcctccaatcggcacctcctccaggctcgtggcatcacctgcattgttaatgctaccattgagatccctaatttcaactggccccaatttgagtatgttaaagtgcctctggctgacatgccgcatgcccccattggactgtactttgacaccgtggctgacaagatccacagtgtgagcaggaagcacggggccaccttggtgcactgtgctgcaggggtgagccgctcagccacgctgtgtatcgcgtacctgatgaaattccacaacgtgtgcctgctggaggcrtacaactgggtgaaagcccggcgacctgtcatcaggcccaacgtaggcttctggaggcaactgatagactacgagcgccagctctttgggaagtcgacagttaaaatggtacagacaccttatggcatagttcccgacgtctatgagaaggagtcccgacacctgatgccttactggggratttagtgccactgaagcctgcgtcagcagcccgagcggggccggcatctgctccccgccgtctgctccctctccactctcttctcaaatggctgacttctggttctccctcaagtgttttttacactgggtgttcaaatttattttaagagatagggagggaggggacataaagggaatgcatacattgctagtcacatttttaaaattaacattttggaatagtgtttatggaaatctttagcttttaatcatttttaccaatttgaacagtttaataaactggttctgctctcttctgaatctcatgcctttggcaccttggtaggtgcaggaggagctcagtgcaaaaatcactytggggcctcattaaccctttagagacaagctttgccccaggctgcggaccagacagatgcttagggaaggttgatamcagcttcagtctctactggattagccctactctttcctttcccctccattatttagtgactctgtaagtaagttaaatacacccttattatktagctgttaagtaactataatgaaatctgctgcaaaatctctcttggaatccatgtgcccaggattatattagcattatttttaataaatctatatgcttaacatattagaatttttactaat

SEQ ID NO: 5452 - DNA, 1510 bp, Homo sapiens
ggcggcgcgcgcggcgcccagcccgcagaagccggtggccgcgcaggaggacggagccctaaccgcaaccccgcgccgcgccgcgccgatttgatttgtatccactgtcaccagcactgctcacttaggactttctggatccrgacccaggcagcgcacactggactcttgaggaagaaggagactctaattttggattccttggtggaggaaaataaaacactctggtcttgccgccaacgatgcaagtgtgactgctggcgtcttcatgagctccagaggtcacagcacgctaccaaggactctcatggcccctcggatgatttccgagggagacataggaggcattgctcaaatcacctcctctctattcctgggcagaggcagtgtggcctccaatcggcacctcctccaggctcgtggcatcacctgcattgttaatgctaccattgagatccctaatttcaactggccccaatttgagtatgttaaagtgcctctggctgacatgccgcatgcccccattggactgtactttgacaccgtggctgacaagatccacagtgtgagcaggaagcacggggccaccttggtgcactgtgctgcaggggtgagccgctcagccacgctgtgtatcgcgtacctgatgaaattccacaacgtgtgcctgctggaggcrtacaactgggtgaaagcccggcgacctgtcatcaggcccaacgtaggcttctggaggcaactgatagactacgagcgccagctctttgggaagtcgacagttaaaatggtacagacaccttatggcatagttcccgacgtctatgagaaggagtcccgacacctgatgccttactggggratttagtgccactgaagcctgcgtcagcagcccgagcggggccggcatctgctccccgccgtctgctccctctccactctcttctcaaatggctgacttctggttctccctcaagtgttttttacactgggtgttcaaatttattttaagagatagggagggaggggacataaagggaatgcatacattgctagtcacatttttaaaattaacattttggaatagtgtttatggaaatctttagcttttaatcatttttaccaatttgaacagtttaataaactggttctgctctcttctgaatctcatgcctttggcaccttggtaggtgcaggaggagctcagtgcaaaaatcactytggggcctcattaaccctttagagacaagctttgccccaggctgcggaccagacagatgcttagggaaggttgatamcagcttcagtctctactggattagccctactctttcctttcccctccattatttagtgactctgtaagtaagttaaatacacccttattatktagctgttaagtaactataatgaaatctgctgcaaaatctctcttggaatccatgtgcccaggattatattagcattatttttaataaatctatatgcttaacatattagaatttttactaat

SEQ ID NO: 5453 - DNA, 2638 bp, Homo sapiens
aaagcccggaggcgcgcgcgaccggcggctctttggcgcggattagggggtctcggcgagggagtcatcaagctttggtgtatgtgttggccggttctgaagtcttgaagaagctctgctgaggaagaccaaagcagcactmgttgccaattagggaatggaccgtttgggtycctttagcaatgatccctctgataagccaccttgccgaggctgctcctcctacctcatggagccttatatcaagtgtgctgaatgtgggccacctccttttttcctctgcttgcagtgtttcactcgaggctttgagtacaagaaacatcaaagcgatcatacttatgaaataatgacttcagattttcctgtccttgatcccagctggactgctcaagaagaaatggcccttttagaagctgtgatggactgtggctttggaaattggcaggatgtagccaatcaaatgtgcaccaagaccaaggaggagtgtgagaagcactatrtgaagcatttcatcaataaccctctgtttgcatctaccctgctgaacctgaaacaagcagaggaagcaaaaactgctgacacagccattycatttcactctacagatgaccctccccgacctacctttgactccttgctttctcgggacatggccgggtacatgccagctcgagcagatttcattgaggaatttgacaattatgcagaatgggacttgagagacattgattttgttgaagatgactcggacattttacatgctctgaagatggctgtggtagatatctatcattccaggttaaaggagagacaaagacgaaaaaaaattataagagaccatggattaatcaaccttagaaagtttcaattaatggaacggcggtatcccaaggaggtccaggacctgtatgaaacaatgaggcgatttgcaagaattgtggggccagtggaacatgacaaattcattgaaagccatgcattggaatttgaactccgaagggaaatcaagaggctccaagaatacaggacagcaggcattaccaatttttgtagtgccagaacstacgatcacctcaagaagacacgggaggaagagcgccttaaacgcactatgctctcagaagttctccagtatatccaggacagtagtgcttgccagcagtggctccgccggcaagctgacattgattccggcctgagtccttccatkccaatggcttcgaattcaggtagacggagtgcaccacccttgaacctcactggcctccctggcacagagaagctgaatgaaaaagaaaaggagctctgtcagatggtgaggttggtccctggagcctatttagaatacaaatctgctctattgaacgaatgtaacaagcaaggaggcttaagactggcgcaggcaagagcactcatcaagatagatgtgaacaaaacccggaaaatctatgatttcctcatcagagaaggatacatcactaaaggctaaggctccaagagcttgggatcagaagtcagaagtttggaatgtggtgggtcaaaggacaatatgggtgggcattctggagagttgtttttcagctgaattctcatggtgaaaacaggggaaaggacaaaggaaaccttaagttgtattgtctactttcttctccatcctgctttaaaacactcctgttgttggtattatgctgcagagttgtgtgctacataagctattattaaatgtgagtgggcattcattcctaacacctcttgtaactaaaagaaccatagtacctcacatcacagtgctggtagaaatggaactaaaccacagtctgtaatcccaggaaattgcttgaacacaggaggcagaggttgcagcgagctgagatcacgccactgtgctccagcctgggcaacaaagtgagactctgtctcaaaaaaaaaaaaacaaaaaaaaacctttaatgtctggctttgtactttgcagtctgcctgtctaatctgcagtagtcttttgaggaggtggcaccggatataacatgtctctgttatttttagaattaattaaaatgttttgctatttaatttgtgggtgtgtcaaatattctggtaactgaaacacacttaaggtgttggatgcctgccccatcacgctgcactgtctgctgtcacatgtgtcctgaactcaccctgtttttgccctgggtttcccaggataccaagcccctgaggatggagatgatgcaacaaacctcagctttgcttggattgtgacttgaaccctatttctcaatggtgaaaggctagcctgcaataaaagctgcttttaaaacagaagtaaagcagctttatatatgggactcactagatatgagggtaagtagccccaccacatgtaaaacttggtcctcaaacgtttctgcagaataagaagccaaacttatggttatcttgtttctgttagaaacaaagttgtatatagaaataacttcgtcagaatcgacacaaatcacatcgaatagttgactgtttaattccttctacattcaaatatctaattaaaatactgtgtgctttgttggaagcatctgctcaaacttttgactkttgtaaatatgcatgcagctgggaagggattcatctaagggataag

SEQ ID NO: 5454 - DNA, 3984 bp, Homo sapiens
atttcccgctcagccctggagcgcgtagctctaccaagaatggccactgtgccagatgcccctgaccagcgttgcccatttgaatttcctagcaggccccccaaagtaggtatttcagtaccctgttagagctgaggcgcaggtaaaatgactggcccagkccggtcccaccccgtaaggatttgaacgttggctccacaactcgggagcctgcgcctttcctcctcccaacgtggactcctgcccggcgaagtgcctcacttccttctcccgggagtcatcaagctttggtgtatgtgttggccggttctgaagtcttgaagaagctctgctgaggaagaccaaagcagcactmgttgccaattagggaatggaccgtttgggtycctttagcaatgatccctctgataagccaccttgccgaggctgctcctcctacctcatggagccttatatcaagtgtgctgaatgtgggccacctccttttttcctctgcttgcagtgtttcactcgaggctttgagtacaagaaacatcaaagcgatcatacttatgaaataatgacttcagattttcctgtccttgatcccagctggactgctcaagaagaaatggcccttttagaagctgtgatggactgtggctttggaaattggcaggatgtagccaatcaaatgtgcaccaagaccaaggaggagtgtgagaagcactatrtgaagcatttcatcaataaccctctgtttgcatctaccctgctgaacctgaaacaagcagaggaagcaaaaactgctgacacagccattycatttcactctacagatgaccctccccgacctacctttgactccttgctttctcgggacatggccgggtacatgccagctcgagcagatttcattgaggaatttgacaattatgcagaatgggacttgagagacattgattttgttgaagatgactcggacattttacatgctctgaagatggctgtggtagatatctatcattccaggttaaaggagagacaaagacgaaaaaaaattataagagaccatggattaatcaaccttagaaagtttcaattaatggaacggcggtatcccaaggaggtccaggacctgtatgaaacaatgaggcgatttgcaagaattgtggggccagtggaacatgacaaattcattgaaagccatgcattggaatttgaactccgaagggaaatcaagaggctccaagaatacaggacagcaggcattaccaatttttgtagtgccagaacstacgatcacctcaagaagacacgggaggaagagcgccttaaacgcactatgctctcagaagttctccagtatatccaggacagtagtgcttgccagcagtggctccgccggcaagctgacattgattccggcctgagtccttccatkccaatggcttcgaattcaggtagacggagtgcaccacccttgaacctcactggcctccctggcacagagaagctgaatgaaaaagaaaaggagctctgtcagatggtgaggttggtccctggagcctatttagaatacaaatctgctctattgaacgaatgtaacaagcaaggaggcttaagactggcgcaggcaagagcactcatcaagatagatgtgaacaaaacccggaaaatctatgatttcctcatcagagaaggatacatcactaaaggctaaggctccaagagcttgggatcagaagtcagaagtttggaatgtggtgggtcaaaggacaatatgggtgggcattctggagagttgtttttcagctgaattctcatggtgaaaacaggggaaaggacaaaggaaaccttaagttgtattgtctactttcttctccatcctgctttaaaacactcctgttgttggtattatgctgcagagttgtgtgctacataagctattattaaatgtgagtgggcattcattcctaacacctcttgtaactaaaagaaccatagtacctcacatcacagtgctggtagaaatggaactaaaccacagtctgtaatcccaggagtccagctcagatccttatattgcgaggtaagtttgctgattatctgtcttgccttcaaacactgcagacagatttaaaataaagagaaaggttttagagcataagaaagctctcgttgaaggattttttaagctgacaactttttttttttttttttgagacagagtttgctcttgtcctccaggctggagtgtgatggcaagatctcagctcactacaacctctgcctcccaggagaattgcttgaacacaggaggcagaggttgcagcgagctgagatcacgccactgtgctccagcctgggcaacaaagtgagactctgtctcaaaaaaaaaaaaacaaaaaaaaacctttaatgtctggctttgtactttgcagtctgcctgtctaatctgcagtagtcttttgaggaggtggcaccggatataacatgtctctgttatttttagaattaattaaaatgttttgctatttaatttgtgggtgtgtcaaatattctggtaactgaaacacacttaaggtgttggatgcctgccccatcacgctgcactgtctgctgtcacatgtgtcctgaactcaccctgtttttgccctgggtttcccaggataccaagcccctgaggatggagatgatgcaacaaacctcagctttgcttggattgtgacttgaaccctatttctcaatggtgaaaggctagcctgcaataaaagctgcttttaaaacagaagtaaagcagctttatatatgggactcactagatatgagggtaagtagccccaccacatgtaaaacttggtcctcaaacgtttctgcagaataagaagccaaacttatggttatcttgtttctgttagaaacaaagttgtatatagaaataacttcgtcagaatcgacacaaatcacatcgaatagttgactgtttaattccttctacattcaaatatctaattaaaatactgtgtgctttgttggaagcatctgctcaaacttttgactkttgtaaatatgcatgcagctgggaagggattcatctaagggataagaaatgaaaaagacactctaaggacctgagggaattcaaatagaggacttcgattttttaaaaagaatgacgtggaaatgayctgttttccttgtaaaatcatatctcgtagaaaacattttaccaytaccatcacccctagttggttgtgaagtgattgcctcttatccctgaaaggaaactcctgttctgaaaagttgggatgcattagccatcagtgttaggtgacgtctgttgtagtctgaagagtccttaaccttgattaaggaaggcttcctgggagaggtgggcttttggggcaattatatgatagagaagagagagaaaaatggcagatggaagtgggagacaattccacacacagggggtggagaatgatgtggaggcagcagtgggtgtaaggacaatggtgccaagagatttatttggctagaacacaaggggcagctgggtagttaggagtgggaggatggtaggacagtctgacagaaaccttggaaacagttgaactctgaaaagctgatggcaaatcagatttcatgaggaaaatggcatggttgaaaatagtaatagaaaaataagactgaagttttaaatgactggatttttgaaagtaggattattatttctttggtataccgaactttgcaaagatacgtagcattgcatccttcctctttgcttctagacagggttggccataaaccaactacactgatagaggtctctccagattgtctcagaagagagagtttaccctgaaacttaatgacatgaataaaacctgtttactgaaatttttattgcaatttaacgttaaaagtttctgctggagttttatgcatatttttctctctaagtggtgggaaataaagaacaaatctctttccatgtaa

SEQ ID NO: 5455 - DNA, 2851 bp, Homo sapiens
atttcccgctcagccctggagcgcgtagctctaccaagaatggccactgtgccagatgcccctgaccagcgttgcccatttgaatttcctagcaggccccccaaagtaggtatttcagtaccctgttagagctgaggcgcaggtaaaatgactggcccagkccggtcccaccccgtaaggatttgaacgttggctccacaactcgggagcctgcgcctttcctcctcccaacgtggactcctgcccggcgaagtgcctcacttccttctcccgggagtcatcaagctttggtgtatgtgttggccggttctgaagtcttgaagaagctctgctgaggaagaccaaagcagcactmgttgccaattagggaatggaccgtttgggtycctttagcaatgatccctctgataagccaccttgccgaggctgctcctcctacctcatggagccttatatcaagtgtgctgaatgtgggccacctccttttttcctctgcttgcagtgtttcactcgaggctttgagtacaagaaacatcaaagcgatcatacttatgaaataatgacttcagattttcctgtccttgatcccagctggactgctcaagaagaaatggcccttttagaagctgtgatggactgtggctttggaaattggcaggatgtagccaatcaaatgtgcaccaagaccaaggaggagtgtgagaagcactatrtgaagcatttcatcaataaccctctgtttgcatctaccctgctgaacctgaaacaagcagaggaagcaaaaactgctgacacagccattycatttcactctacagatgaccctccccgacctacctttgactccttgctttctcgggacatggccgggtacatgccagctcgagcagatttcattgaggaatttgacaattatgcagaatgggacttgagagacattgattttgttgaagatgactcggacattttacatgctctgaagatggctgtggtagatatctatcattccaggttaaaggagagacaaagacgaaaaaaaattataagagaccatggattaatcaaccttagaaagtttcaattaatggaacggcggtatcccaaggaggtccaggacctgtatgaaacaatgaggcgatttgcaagaattgtggggccagtggaacatgacaaattcattgaaagccatgcattggaatttgaactccgaagggaaatcaagaggctccaagaatacaggacagcaggcattaccaatttttgtagtgccagaacstacgatcacctcaagaagacacgggaggaagagcgccttaaacgcactatgctctcagaagttctccagtatatccaggacagtagtgcttgccagcagtggctccgccggcaagctgacattgattccggcctgagtccttccatkccaatggcttcgaattcaggtagacggagtgcaccacccttgaacctcactggcctccctggcacagagaagctgaatgaaaaagaaaaggagctctgtcagatggtgaggttggtccctggagcctatttagaatacaaatctgctctattgaacgaatgtaacaagcaaggaggcttaagactggcgcaggcaagagcactcatcaagatagatgtgaacaaaacccggaaaatctatgatttcctcatcagagaaggatacatcactaaaggctaaggctccaagagcttgggatcagaagtcagaagtttggaatgtggtgggtcaaaggacaatatgggtgggcattctggagagttgtttttcagctgaattctcatggtgaaaacaggggaaaggacaaaggaaaccttaagttgtattgtctactttcttctccatcctgctttaaaacactcctgttgttggtattatgctgcagagttgtgtgctacataagctattattaaatgtgagtgggcattcattcctaacacctcttgtaactaaaagaaccatagtacctcacatcacagtgctggtagaaatggaactaaaccacagtctgtaatcccaggaaattgcttgaacacaggaggcagaggttgcagcgagctgagatcacgccactgtgctccagcctgggcaacaaagtgagactctgtctcaaaaaaaaaaaaacaaaaaaaaacctttaatgtctggctttgtactttgcagtctgcctgtctaatctgcagtagtcttttgaggaggtggcaccggatataacatgtctctgttatttttagaattaattaaaatgttttgctatttaatttgtgggtgtgtcaaatattctggtaactgaaacacacttaaggtgttggatgcctgccccatcacgctgcactgtctgctgtcacatgtgtcctgaactcaccctgtttttgccctgggtttcccaggataccaagcccctgaggatggagatgatgcaacaaacctcagctttgcttggattgtgacttgaaccctatttctcaatggtgaaaggctagcctgcaataaaagctgcttttaaaacagaagtaaagcagctttatatatgggactcactagatatgagggtaagtagccccaccacatgtaaaacttggtcctcaaacgtttctgcagaataagaagccaaacttatggttatcttgtttctgttagaaacaaagttgtatatagaaataacttcgtcagaatcgacacaaatcacatcgaatagttgactgtttaattccttctacattcaaatatctaattaaaatactgtgtgctttgttggaagcatctgctcaaacttttgactkttgtaaatatgcatgcagctgggaagggattcatctaagggataag

SEQ ID NO: 5456 - DNA, 2975 bp, Homo sapiens
aaagcccggaggcgcgcgcgaccggcggctctttggcgcggattagggggtctcggcgagggagtcatcaagctttggtgtatgtgttggccggttctgaagtcttgaagaagctctgctgaggaagaccaaagcagcactmgttgccaattagggaatggaccgtttgggtycctttagcaatgatccctctgataagccaccttgccgaggctgctcctcctacctcatggagccttatatcaagtgtgctgaatgtgggccacctccttttttcctctgcttgcagtgtttcactcgaggctttgagtacaagaaacatcaaagcgatcatacttatgaaataatgacttcagattttcctgtccttgatcccagctggactgctcaagaagaaatggcccttttagaagctgtgatggactgtggctttggaaattggcaggatgtagccaatcaaatgtgcaccaagaccaaggaggagtgtgagaagcactatrtgaagcatttcatcaataaccctctgtttgcatctaccctgctgaacctgaaacaagcagaggaagcaaaaactgctgacacagccattycatttcactctacagatgaccctccccgacctacctttgactccttgctttctcgggacatggccgggtacatgccagctcgagcagatttcattgaggaatttgacaattatgcagaatgggacttgagagacattgattttgttgaagatgactcggacattttacatgctctgaagatggctgtggtagatatctatcattccaggttaaaggagagacaaagacgaaaaaaaattataagagaccatggattaatcaaccttagaaagtttcaattaatggaacggcggtatcccaaggaggtccaggacctgtatgaaacaatgaggcgatttgcaagaattgtggggccagtggaacatgacaaattcattgaaagccatgcattggaatttgaactccgaagggaaatcaagaggctccaagaatacaggacagcaggcattaccaatttttgtagtgccagaacstacgatcacctcaagaagacacgggaggaagagcgccttaaacgcactatgctctcagaagttctccagtatatccaggacagtagtgcttgccagcagtggctccgccggcaagctgacattgattccggcctgagtccttccatkccaatggcttcgaattcaggtagacggagtgcaccacccttgaacctcactggcctccctggcacagagaagctgaatgaaaaagaaaaggagctctgtcagatggtgaggttggtccctggagcctatttagaatacaaatctgctctattgaacgaatgtaacaagcaaggaggcttaagactggcgcaggcaagagcactcatcaagatagatgtgaacaaaacccggaaaatctatgatttcctcatcagagaaggatacatcactaaagaattaattaaaatgttttgctatttaatttgtgggtgtgtcaaatattctggtaactgaaacacacttaaggtgttggatgcctgccccatcacgctgcactgtctgctgtcacatgtgtcctgaactcaccctgtttttgccctgggtttcccaggataccaagcccctgaggatggagatgatgcaacaaacctcagctttgcttggattgtgacttgaaccctatttctcaatggtgaaaggctagcctgcaataaaagctgcttttaaaacagaagtaaagcagctttatatatgggactcactagatatgagggtaagtagccccaccacatgtaaaacttggtcctcaaacgtttctgcagaataagaagccaaacttatggttatcttgtttctgttagaaacaaagttgtatatagaaataacttcgtcagaatcgacacaaatcacatcgaatagttgactgtttaattccttctacattcaaatatctaattaaaatactgtgtgctttgttggaagcatctgctcaaacttttgactkttgtaaatatgcatgcagctgggaagggattcatctaagggataagaaatgaaaaagacactctaaggacctgagggaattcaaatagaggacttcgattttttaaaaagaatgacgtggaaatgayctgttttccttgtaaaatcatatctcgtagaaaacattttaccaytaccatcacccctagttggttgtgaagtgattgcctcttatccctgaaaggaaactcctgttctgaaaagttgggatgcattagccatcagtgttaggtgacgtctgttgtagtctgaagagtccttaaccttgattaaggaaggcttcctgggagaggtgggcttttggggcaattatatgatagagaagagagagaaaaatggcagatggaagtgggagacaattccacacacagggggtggagaatgatgtggaggcagcagtgggtgtaaggacaatggtgccaagagatttatttggctagaacacaaggggcagctgggtagttaggagtgggaggatggtaggacagtctgacagaaaccttggaaacagttgaactctgaaaagctgatggcaaatcagatttcatgaggaaaatggcatggttgaaaatagtaatagaaaaataagactgaagttttaaatgactggatttttgaaagtaggattattatttctttggtataccgaactttgcaaagatacgtagcattgcatccttcctctttgcttctagacagggttggccataaaccaactacactgatagaggtctctccagattgtctcagaagagagagtttaccctgaaacttaatgacatgaataaaacctgtttactgaaatttttattgcaatttaacgttaaaagtttctgctggagttttatgcatatttttctctctaagtggtgggaaataaagaacaaatctctttccatgtaat

SEQ ID NO: 5457 - DNA, 6088 bp, Homo sapiens
agaactgtggcgctttctgggtaaagatggacgtccacgatctctttcgccggctsggcgcgggggccaaattcgacrcgagacgcttctcggcagacgcagctcgattccagataggaaaaaggaaatatgactttgattcttcggaggtgcttcagggactggacttttttggaaacaagaagtctgtcccaggtgtgtgtggagcatcacaaacacatcagaagccccaaaatggagagaaaaaagaagagagcctaactgaaaggaagagggagcagagcaagaaaaaaaggaagacgatgacttcagaaattgcttcccaagaagaaggtgctactatacagtggatgtcatctgtagaagcaaagattgaagacaaaaaagttcagagagaaagtaaactaacttccggaaagttggagaatctcagaaaagaaaagataaacttcttgcggaataaacacaaaattcacgtccaaggaaccgatcttcctgacccaattgctrcatttcagcaacttgaccaggaatataaaatcaattctcgactacttcagaacattctagatgcaggtttccaaatgcctacgccaatccaaatgcaagccatcccagttatgctgcatggtcgggaacttctggcttctgctccaactggatctggaaaaacattagcttttagcattcctattttaatgcagctgaaacaacccgcaaataaaggcttcagagccctgattatatcaccaacacgagaacttgccagccagattcacagagagttaataaaaatttctgagggaacaggattcagratacacatgatccacaaagcagcagtggcagccaagaaatttggacctaaatcatctaaaaagtttgatattcttgtgactactccaaatcgactaatctatttattaaagcaagatccccccggaatcgacctagcaagtgttgagtggcttgtagtagacgaatcagataaactgtttgaagatggcaaaactgggttcagagaccagctggcttccattttcctggcctgcacatcccacaaggtccgaagagctatgttcagtgcaacttttgcatatgatgttgaacagtggtgcaaactcaacctggacaatgtcatcagtgtgtccattggagcaaggaattctgcagtagaaactgtagaacaagagcttctctttgttggatctgagaccggaaaacttctggccgtgagagaacttgttaaaaagggtttcaatccacctgttcttgtttttgttcagtccattgaaagggctaaagaactttttcatgagctcatatatgaaggtattaatgtggatgttattcatgcagagagaacacaacaacagagagataacacagtccacagtttcagagcaggaaaaayctgggttctgatttgtacagccttgctagcaagagggattgattttaaaggtgtgaacttggtgatcaactatgactttccaactagctcagtggaatatatccacaggataggtcgaactggaagagcagggaataagggaaaagcaattacatttttcactgaggatgataagccattattaagaagcgttgctaatgttatacagcaggctgggtgtcctgtaccagaatacataaaaggttttcagaaactactaagcaaacaaaagaaaaagatgattaagaaaccattggaaagggagagcattagtacaactccaaaatgtttcttagaaaaagctaaggataaacagaaaaaggtcactggtcagaacagcaagaagaaagtagctcttgaagacaaaagttaaaaacagactttaaaaatactgtcccagaaatgtaattttatgatcccagcatgaatgttattttcatggaatacttgaagtcttayagtcacctgtaccaaacatttgaaatcaactacaagtacatgggactggtgataaatgatcctaaactatcaagtcagtttcaatttgtaggtgccttttttttttcctgtagagatgagggtcttgccatgttgtccaggctggtcttgaactcctgacctcacacaatcctcctgccttagcctcctgagtaactgagattacaggcacaagctgctgcacscagctctgtaggtgacttttaaatgattatacaatggaaataacattcattgacatttctgtggtttgaatccagagagatacttcttatagaaaaacaaatgtttatgctaaaaataacaccaaaatgtggtgaactcttaaggacttttcccttcaagtgtgaaggaaggtgtgatgaatgctgtggagaggcatctggaacagaaattcaaaataaagccttgacattaaataccccttccactgctcactttgtggatggtagcatgagctgtctaccaagaagaaacctgctgctctcttaattttaatatttcctaatttgttgatggccttttgtgttgtgaaccacaacaaagagaggcctcttttgtggctggttattccagttccctgggattttaaattctttggtctattaagtatccttgtattggatacgtaataccttagtgctgtcataatgttgtacaagatcatgatcagcttctccctttcttcattttctgtgatttaaccatgttctttcctgtctctttccatttaagatattttatttgaatactgataaacattttatcctgataaggaagaatgttcttgttacttgatatacctctgtcttcattctcttacagcttatctttccttaggttgatggtgcctcatttaataagtagatctctacttaagctaaaggattatgatcatatggtgttggagactattagctattagatttttctcaaaatatgagttttgtacaatggaatgaaaaagtgacttcatatacgtaagactggtgcctaagaatgacttgaatgttatcagtactaccacagaactataatatacattgccttttctcagcagcatttgaattcaacttatttatttcctctatttgtagctttttgttctagagtcagaacaggtggactttgctttgaatattttagatgggacaaaaattgttcatcttcggaatttatttaaagaaagatctactggtacagggtgtaaaaatacttacaagaatatgatttttttgtttgttcatgcaaacagatcctttacccaatatatattctggaggtaggtatactggtgcaacccatttgccagctgtgtgactttgagtaagttcttaatttctcagagtttcagtgttctcatctataaaattatgtctccaattgtgagtacctagcactgtacctgatacatagtaaactcacaataaatatttcttaaacatagattttgttaggaatacaggcttgataacacagtccttacccttacaatgtaatgttagagataaaggagcaaatagagtcacgcatcacttaatgacagagatatgttctgagaaatgcatcgttaggtgatattgtcattgtgtaaacatcatgttgtttacttccacaaacctagatggtatagcctaccagtacacctaggctatatggtatagtctgttgctcctaggctacaaacccgtatagcatgttactgtcctgcatgctatagacagttggaacatgtagacttgtataaacactgcacacttaacctatactaaatttattgaaaatatttttcttggccaggcgtagtggctcatgcctgtaatcctaacacttcgggaggcctaggcgggcaggttgtctgagctcaggagtttagagaccagcccgggcaacatggcaaaaccccatctctactaaaaaaaataccaaaaaaagttagccgggtgtggtggcatagtcccggctactcaggagtctgaggcaggagaatagcttgaacctgtgaggcggaggttgcagtaagccgagatcgcgctactgcactccagcctgggcgacagggcaagactgtcttgaaaataaacacacacacacacattatatatattatgtattatatatattagatatatattttttcttcaataaattaaccttagcttactgtaacttttactttatgagtttttttgttttgttttttttttttttctcctgggttcaagtgattctcctgcctcagcctcccgagttgctgggactacaggcatgcgccaccacacccagctaatttttgtatttttagtgacagggtttcaccatgttggccaggctggtctcaaactcctgacctggagtgagccactatatccggcctttataaacttttttgattcttgtcataacacttagcctaaaatgcaaatgtacagctgtagaaaaatactttatttctttatatccttattctagaagctttttttctattaatttttgtttgtttgttttgttttactatttacttctaaaacttttttgttaaaaaccatggcacaaacacacacattatgctaggcatacaaaaggtcaggatcatcagtctcactgtcttccacccccacttctcatcccaccattgtatctgctgtctgtggctgaccaaaacatcatcatgtagcacatgactagtgtggcaagtgctctgttagatgtaaggccatgatgctaaagcatcacaagagggcatctaacccagattggggatgtcatggaaggccgacatcctgagttgaatcctgcaaatgtaaaaaccaataggcaaagaagaggaacaaaaaggattccaggacaaactgaggtcacatctatgatccttgactttattgtgtctgyttaaagtatctacagtaacctgtatcaacttagtcagtgtattaatactaaatttagctccttcaaagcagttggaactatgtgctacataaatttcagcttcacacaaggaagggaaggagtgaaattagtgaacaggcagttacagcaaaagaaaaaacataaaaattgaatagctggctctggtgaaatgagcaaggactttagagtcaaactggcctggatttgaatcctgatcctcattgcttgtagctgtatgatctggacaaatgacagtarctgtttctaaccttgattttctcatctgtaagatgccaattgtaactcctaaggatactgaggattttttaaaatgcgtgtacagttcctgaccagtggtttgtgcctaataacttattacaaattattacccagtaaaaaccttgagacaagagtgaaaacgtaaagctaattaatccattacttgttagcaagcaaactacgtgcttgagaaaattactcaactttcatgttttacttccagacagtagtttgattaaaagaaaaaaaaaaatcacagcccaggcatgtggctcacaccctggcacttggaggccgaggtgggagcatagcttgagcctagcagtttgaaactagcctgggcaacatagatcctatctctacaaaaaaaaaaaaaaaaaaaaaaaaaaattggcccggtgtggtggtgcatgcctgtggtcccagctactcaggaggctgaggcgagaggatcgcttgagccagggaggctgaggctgctgtgagccatgatcatgccactgcactccagcctggacaacagagcaagaccctgtctcaaaaaaaaaaaaaatcagtaaaaaatatgccgaaatagcttcagagtaattatgaattgccttccaaaaaccactgttttgcacttgcctgcaagaataggaaaaacaaaaggactgtaaggtggcaggatggcagaaccaaacaagagtagtacaccttggagttttttcgaaatatgggttgggtttttgggctcttggttgatttaaaataaaatttaaatgccttcagcgtctgtgataggtgccaacatgaagctaccgagttccagagaaagaggggagagctgatcactcatcagtgctgcgagactatcaaagggcccttcaggacctatctgttctttgtgtgtaaagagtaacaataaaagaacaccagtgtacccaccgtatagtttaaaaatca

SEQ ID NO: 5458 - DNA, 6084 bp, Homo sapiens
agaactgtggcgctttctgggtaaagatggacgtccacgatctctttcgccggctsggcgcgggggccaaattcgacrcgagacgcttctcggcagacgcagctcgattccagataggaaaaaggaaatatgactttgattcttcggaggtgcttcagggactggacttttttggaaacaagaagtctgtcccaggtgtgtgtggagcatcacaaacacatcagaagccccaaaatggagagaaaaaagaagagagcctaactgaaaggaagagggagcagagcaagaaaaaaaggaagacgatgacttcagaaattgcttcccaagaagaaggtgctactatacagtggatgtcatctgtagaagcaaagattgaagacaaaaaagttcagagagaaagtaaactaacttccggaaagttggagaatctcagaaaagaaaagataaacttcttgcggaataaacacaaaattcacgtccaaggaaccgatcttcctgacccaattgctrcatttcagcaacttgaccaggaatataaaatcaattctcgactacttcagaacattctagatgcaggtttccaaatgcctacgccaatccaaatgcaagccatcccagttatgctgcatggtcgggaacttctggcttctgctccaactggatctggaaaaacattagcttttagcattcctattttaatgcagctgaaacaacccgcaaataaaggcttcagagccctgattatatcaccaacacgagaacttgccagccagattcacagagagttaataaaaatttctgagggaacaggattcagratacacatgatccacaaagcagcagtggcagccaagaaatttggacctaaatcatctaaaaagtttgatattcttgtgactactccaaatcgactaatctatttattaaagcaagatccccccggaatcgacctagcaagtgttgagtggcttgtagtagacgaatcagataaactgtttgaagatggcaaaactgggttcagagaccagctggcttccattttcctggcctgcacatcccacaaggtccgaagagctatgttcagtgcaacttttgcatatgatgttgaacagtggtgcaaactcaacctggacaatgtcatcagtgtgtccattggaggaattctgcagtagaaactgtagaacaagagcttctctttgttggatctgagaccggaaaacttctggccgtgagagaacttgttaaaaagggtttcaatccacctgttcttgtttttgttcagtccattgaaagggctaaagaactttttcatgagctcatatatgaaggtattaatgtggatgttattcatgcagagagaacacaacaacagagagataacacagtccacagtttcagagcaggaaaaayctgggttctgatttgtacagccttgctagcaagagggattgattttaaaggtgtgaacttggtgatcaactatgactttccaactagctcagtggaatatatccacaggataggtcgaactggaagagcagggaataagggaaaagcaattacatttttcactgaggatgataagccattattaagaagcgttgctaatgttatacagcaggctgggtgtcctgtaccagaatacataaaaggttttcagaaactactaagcaaacaaaagaaaaagatgattaagaaaccattggaaagggagagcattagtacaactccaaaatgtttcttagaaaaagctaaggataaacagaaaaaggtcactggtcagaacagcaagaagaaagtagctcttgaagacaaaagttaaaaacagactttaaaaatactgtcccagaaatgtaattttatgatcccagcatgaatgttattttcatggaatacttgaagtcttayagtcacctgtaccaaacatttgaaatcaactacaagtacatgggactggtgataaatgatcctaaactatcaagtcagtttcaatttgtaggtgccttttttttttcctgtagagatgagggtcttgccatgttgtccaggctggtcttgaactcctgacctcacacaatcctcctgccttagcctcctgagtaactgagattacaggcacaagctgctgcacscagctctgtaggtgacttttaaatgattatacaatggaaataacattcattgacatttctgtggtttgaatccagagagatacttcttatagaaaaacaaatgtttatgctaaaaataacaccaaaatgtggtgaactcttaaggacttttcccttcaagtgtgaaggaaggtgtgatgaatgctgtggagaggcatctggaacagaaattcaaaataaagccttgacattaaataccccttccactgctcactttgtggatggtagcatgagctgtctaccaagaagaaacctgctgctctcttaattttaatatttcctaatttgttgatggccttttgtgttgtgaaccacaacaaagagaggcctcttttgtggctggttattccagttccctgggattttaaattctttggtctattaagtatccttgtattggatacgtaataccttagtgctgtcataatgttgtacaagatcatgatcagcttctccctttcttcattttctgtgatttaaccatgttctttcctgtctctttccatttaagatattttatttgaatactgataaacattttatcctgataaggaagaatgttcttgttacttgatatacctctgtcttcattctcttacagcttatctttccttaggttgatggtgcctcatttaataagtagatctctacttaagctaaaggattatgatcatatggtgttggagactattagctattagatttttctcaaaatatgagttttgtacaatggaatgaaaaagtgacttcatatacgtaagactggtgcctaagaatgacttgaatgttatcagtactaccacagaactataatatacattgccttttctcagcagcatttgaattcaacttatttatttcctctatttgtagctttttgttctagagtcagaacaggtggactttgctttgaatattttagatgggacaaaaattgttcatcttcggaatttatttaaagaaagatctactggtacagggtgtaaaaatacttacaagaatatgatttttttgtttgttcatgcaaacagatcctttacccaatatatattctggaggtaggtatactggtgcaacccatttgccagctgtgtgactttgagtaagttcttaatttctcagagtttcagtgttctcatctataaaattatgtctccaattgtgagtacctagcactgtacctgatacatagtaaactcacaataaatatttcttaaacatagattttgttaggaatacaggcttgataacacagtccttacccttacaatgtaatgttagagataaaggagcaaatagagtcacgcatcacttaatgacagagatatgttctgagaaatgcatcgttaggtgatattgtcattgtgtaaacatcatgttgtttacttccacaaacctagatggtatagcctaccagtacacctaggctatatggtatagtctgttgctcctaggctacaaacccgtatagcatgttactgtcctgcatgctatagacagttggaacatgtagacttgtataaacactgcacacttaacctatactaaatttattgaaaatatttttcttggccaggcgtagtggctcatgcctgtaatcctaacacttcgggaggcctaggcgggcaggttgtctgagctcaggagtttagagaccagcccgggcaacatggcaaaaccccatctctactaaaaaaaataccaaaaaaagttagccgggtgtggtggcatagtcccggctactcaggagtctgaggcaggagaatagcttgaacctgtgaggcggaggttgcagtaagccgagatcgcgctactgcactccagcctgggcgacagggcaagactgtcttgaaaataaacacacacacacacattatatatattatgtattatatatattagatatatattttttcttcaataaattaaccttagcttactgtaacttttactttatgagtttttttgttttgttttttttttttttctcctgggttcaagtgattctcctgcctcagcctcccgagttgctgggactacaggcatgcgccaccacacccagctaatttttgtatttttagtgacagggtttcaccatgttggccaggctggtctcaaactcctgacctggagtgagccactatatccggcctttataaacttttttgattcttgtcataacacttagcctaaaatgcaaatgtacagctgtagaaaaatactttatttctttatatccttattctagaagctttttttctattaatttttgtttgtttgttttgttttactatttacttctaaaacttttttgttaaaaaccatggcacaaacacacacattatgctaggcatacaaaaggtcaggatcatcagtctcactgtcttccacccccacttctcatcccaccattgtatctgctgtctgtggctgaccaaaacatcatcatgtagcacatgactagtgtggcaagtgctctgttagatgtaaggccatgatgctaaagcatcacaagagggcatctaacccagattggggatgtcatggaaggccgacatcctgagttgaatcctgcaaatgtaaaaaccaataggcaaagaagaggaacaaaaaggattccaggacaaactgaggtcacatctatgatccttgactttattgtgtctgyttaaagtatctacagtaacctgtatcaacttagtcagtgtattaatactaaatttagctccttcaaagcagttggaactatgtgctacataaatttcagcttcacacaaggaagggaaggagtgaaattagtgaacaggcagttacagcaaaagaaaaaacataaaaattgaatagctggctctggtgaaatgagcaaggactttagagtcaaactggcctggatttgaatcctgatcctcattgcttgtagctgtatgatctggacaaatgacagtarctgtttctaaccttgattttctcatctgtaagatgccaattgtaactcctaaggatactgaggattttttaaaatgcgtgtacagttcctgaccagtggtttgtgcctaataacttattacaaattattacccagtaaaaaccttgagacaagagtgaaaacgtaaagctaattaatccattacttgttagcaagcaaactacgtgcttgagaaaattactcaactttcatgttttacttccagacagtagtttgattaaaagaaaaaaaaaaatcacagcccaggcatgtggctcacaccctggcacttggaggccgaggtgggagcatagcttgagcctagcagtttgaaactagcctgggcaacatagatcctatctctacaaaaaaaaaaaaaaaaaaaaaaaaaaattggcccggtgtggtggtgcatgcctgtggtcccagctactcaggaggctgaggcgagaggatcgcttgagccagggaggctgaggctgctgtgagccatgatcatgccactgcactccagcctggacaacagagcaagaccctgtctcaaaaaaaaaaaaaatcagtaaaaaatatgccgaaatagcttcagagtaattatgaattgccttccaaaaaccactgttttgcacttgcctgcaagaataggaaaaacaaaaggactgtaaggtggcaggatggcagaaccaaacaagagtagtacaccttggagttttttcgaaatatgggttgggtttttgggctcttggttgatttaaaataaaatttaaatgccttcagcgtctgtgataggtgccaacatgaagctaccgagttccagagaaagaggggagagctgatcactcatcagtgctgcgagactatcaaagggcccttcaggacctatctgttctttgtgtgtaaagagtaacaataaaagaacaccagtgtacccaccgtatagtttaaaaatca

SEQ ID NO: 5459 - DNA, 5731 bp, Homo sapiens
ttgcgggaaagagccaaaccctggcgttggggggcccgggcggggagcccctcccgcggtccacagcgacgcctgcccagccctcctccccttccggctccggcacggggccccgaggcgttcggaggccaggcgggtttctgtcaggcccggggaggaggggcgggcggggcggccgctgcctccccgggacgggccgtaccacgcggacggggaggacggggccaggggactgcagggcggctgcaccgcccgggggcggggtgcggagcgggccggcgggctccccggggcggggcgggagggcggggcgtggggcggacggaaccaccggggcggggtgggaggtaacgggacgggcgcgaccatggcgcggtgagggagcgggggtggggatcggtccgsgggaggcctgaggccgctggcttgtgcgctgtctccgccgcccccctctttcgccgccgccgccgccgccccgggcatgtcgtccaactgcaccagcaccacggcggtggcggtggcgccgctcagcgccagcaagaccaagaccaagaagaagcatttcgtgtgccagaaagtgaagctattccgggccagcgagccgatcctcagcgtcctgatgtggggggtgaaccacacgatcaatgagctgagcaatgttcctgttcctgtcatgctaatgccagatgacttcaaagcctacagcaagatcaaggtggacaatcatctcttcaataaggagaacctgcccagccgctttaagtttaaggagtattgccccatggtgttccgaaaccttcgggagaggtttggaattgatgatcaggattaccagaattcagtgacrcgcagcgcccccatcaacagtgacagccagggtcggtgtggcacgcgtttcctcaccacctacgaccggcgctttgtcatcaagactgtgtccagcgaggacgtggcggagatgcacaacatcttaaagaaataccaccagtttatagtggagtgtcatggcaacacgcttttgccacagttcctgggcatgtaccgcctgaccgtggatggtgtggaaacctacatggtggttaccaggaacgtgttcagccatcggctcactgtgcatcgcaagtatgacctcaagggttctacggttgccagagaagcgagcgacaaggagaaggccaaggacttgccaacattcaaagacaatgacttcctcaatgaagggcagaagctgcatgtgggagaggagagtaaaaagaacttcctggagaaactgaagcgggacgttgagttcttggcacagctgaagatcatggactacagcctgctggtgggcatccacgacgtggaccgggcagagcaggaggagatggaggtggaggagcgggcagaggacgaggagtgtgagaatgatggggtgggtggcaacctactctgctcctatggcacacctccggacagccctggcaacctcctcagctttcctcggttctttggtcctggggaattcgacccctctgttgacgtctatgccatgaaaagccatgaaagttcccccaagaaggaggtgtatttyatggccatcattgatatcctcacgccatacgatacmaagaagaaagctgcacatgctgccaaaacggtgaaacacggggcaggggccgagatctcgactgtgaaccctgagcagtactccaaacgcttcaacgagtttatgtccaacatcctgacgtagttctcttctaccttcagccagagccagagagctggatatggggtcggggatcgggagttagggagaagggtgtatttgggctagatgggagggtgggagcagagtcgggtttgggagggctttagcaatgagactgcagcctgtgacaccgaaagagactttagctgaagaggagggggatgtgctgtgtgtgyacctgctcacaggatgtaaccccaccttctgcttacccttgattttttctccccatttgacacccaggttaaaaaggggttccctttttggtaccttgtaaccttttaagataccttggggctagagatgacttcgtgggtttatttgggttttgtttctgaaatttcattgctccaggtttgctatttataatcatatttcatcagcctacccaccctccccatctttgctgagctctcagttcccttcaattaaagagatacccrgtagacccagcacaagggtccttccagaaccaagtgctatggatgccagattggagaggtcagacacctcgccctgctgcatttgctcttgtctrgattaactttgtaatttatggagtattgtgcacaacttcctccacctttcccttggattcaagtgaaaactgttgcattattcctccatcctgtctggaatacaccaggtcaacaccagagatctcagatcagaatcagagatctcagaggggaataagttcatcctcatgggatggtgaggggcaggaaagcggctgggctcttggacacctggttctcagagaaccctgtgatgatcacccaagccccaggctgtcttagcccctggagttcagaagtcctctctgtaaakcctgcctcccactaggtcaagaggaactagagtacctttggatttatcaggaccctcatgtttaaatggttatttccctttgggaaaacttcagaaactgatgtatcaaatgaggccctgtgccctcgatctatttccttcttccttctgacctcctcccaggcactcttacttctagccgaactcttagctctgggcagatctccaagcgcctggagtgctttttagcagagacacctcgttaagctccgggatgaccttgtaggagatctgtctccctgtgcctggagagttacagccagmaaggtgcccccatcttagagtgtggtgtccaaacgtgaggtggcttcctagttacatgaggatgtgatccaggaaatccagtttggaggcttgatgtgggttttgacctggcctcagccttggggctgtttttccttgttgccccgctctagacttttagcagatctgcagcccacaggcttttttggaaggagtggcttcctgcaggtgttccacctgccttcggagcctgccacccaggccctcagaactgagccacaggctgctctggccaggagagaaacagctctgttgttctgcattgggggaggtacattcctgcatcttctcaccccctcaaccaggaactggggatttgggatgagatatggtcagacttgtagataaccccaaagatgtgaagatcgcttgtgaaaccattttgaatgaatagattggtttcctgtggctccytccaaacctggccaagcccagcttccgaagcaggaaccagcactgtctctgtgcctgactcacagcatataggtcaggaaagaatggagacggcattcttggacttcactggggctgctggattggatgggaaaccttctggaagaggcagatgggggtcaaaccactgccttggccccaggaaggggccataggtaggtctgaacaactgccgcaagaccactacatgacttagggaacttgaaaccaactggctcatggagaaaacaaatytgacttgggaaagggattatgtaggaataatgtttggacttgatttccccacgtcataatgaagaatggaagtttggatctgctcctcgtcaggcgcagcatctctgaagcttggaaagctgtcttccagcagcctccgtggcctcgggttcctaccggcttctctgcatttggtctgctgatcatgttgccataatgtgtatggaaagtgtaacacattcttactggttaaagacgactaccaggtatctaacttgtttaacattgagtttgtgtgtgtgtgtgtatgtttgtgtgttttgtatattgtttacattttgagaggtagcattctgtttcaaatgctttttgtttttctgacagtattgttgactgggtcataacattttgagctgtggtttggtggattttcaatttttttttttaaaggtcattcgctgtgctatcttcaaaaccttgagtttggcccccaatttttggcattcaaatgtttaaaagctatttatcttggtttatacaagtttcctttctcttctttttgtcatggtattctatttggtctgcagtttgaatgtagagaaagtggactgatcccccaagcgttgtctgcccccactctttcctccttgggtcccgccattcttttactgggcagtcgagggcattggaggggaagtgactgccctcagcctcactccctggggccatgaagaaaagctaaacagtctcatggcatctcagaataatgttgggtctcccaagaagaaaggtgtaagaataacgacatggctgattaggcgaggccaggatagggctaaggccaggattcctggctggcatccagtcaccccttctcccatccttccccctcttcttccacaagtccgcagccgagacactgtagtctcccagccacagtgatgagtgccctggagactccactgacctctagatgaaggcccctggccctggttcctgttaattaacctctgggtctttgagtcccccagcacaaacttctttcctgtaccctgcggcttggggtcacagggcatgccgggaagccacagctgaggggcgcagactgaagcagtgctccacctctccttctttagctcaggggttgctggtctgtggcaggcgccacgagtggcccctgtggctgttctcagtggcagtctcttaagttcccaccacaggcagctctttatcccctctccctacttsactctttctcttgcctgtgcttttggcctcaaacaggcctgctggtagcgctcagggcgtgaggctacactcctgccctgcctttcctgtcttcatggtctgccagggcataccttggggaggtggaccaaagacccaggactttttgcagtagccagtcctaccccccagttgtctttttaccaattcagggtgggagagaaaactgcagcaccccagcatgtgagttactcaggtgttgggggctagaagggacagtgcgtttaaacaacactcagagctctggccttaaacctgtggccccccaagtctaggagcctcatctcttyctggcagtcatgcgggcaggaggtcctgaaagggaaaacccattcagacaactgttccccaatctaccagccatctgcaggggtcagtgaccgtggccctctccctcctctagaatgtgccacttatgaagagtgccccatggggaaaaggagactcagctgtcccttggcagcttgtgccagtatcccagggcagaagtttccacaggagcctcttgcccttgcgcagagccactgtgagaggcggtgggagccaacacccttgggggagggggcagtactgctcggcacatcccagcatcaggtcagatcaytgaaattaaaaaatgtgaattaagttcatatccaccttttggggaagcaggacaaaccaccaccccaccaagtgtgtgacttctccatatcccactgcagtttccattttttaaatgggaattttcaatcccctgtgcttgtctaacgtctgctttaaaaagtttgagaccctgttactgtttgaaaatgcatgcatgttacgatgaatctccaacctgaggaaaaaaataaaactcaaaaagctttgtgt

SEQ ID NO: 5460 - DNA, 2164 bp, Homo sapiens
accgctctgggctgcgctcctcgcttgccctcggactcggctcccgctgcgagcggccgccctgcccgcgcaccgcgctcagcgcccaccgccgggcttcccgcgccggacccagtacctcggctccccggggccggaccgaggccgcaagcagcgccgcggggtgtggggcggacccaggagatgaaatgacaacgtcaaccctccagaaagccattgatctggtgacgaaagccacagaggaggacaaagccaagaactacgaggaggcgctgcggctgtaccagcatgcggtggagtacttcctccacgctatcaagtatgaggcccacagcgacaaggccaaggagagcattcgagccaagtgcgtgcagtacctagaccgggccgagaagctgaaggattatttacgaagcaaagagaaacacggcaagaagccagtcaaagagaaccagagtgagggcaagggcagtgacagtgacagtgaaggggataatccggagaaaaagaaactgcaagaacagctgatgggtgccgtcgtgatggagaagcccaacatacggtggaacgacgtggccgggctggagggggccaaggaggccctcaaagaagctgtcattttgccaatcaaattcccacacttgttcacaggcaagcgcaccccctggcgggggattctgctgttcggaccccctggcacagggaaatcctacctggccaaagccgtggcaacagaggccaacaactccaccttcttctctgtgtcctcctcagatctgatgtccaagtggctgggggagagtgaaaagctggtcaagaacctgtttgagctggccaggcagcacaagccctccatcatcttcatcgatgaggtggattccctctgcgggtcccgaaatgaaaatgagagtgaggccgcccggaggatcaaaacggagttcttggtccagatgcagggggtggggaataacaatgatgggactctggttcttggagccacaaacatcccatgggtgttggattcggccatcaggaggaggtttgaaaarcgaatttatatccccttgccggaggaagctgcccgcgcccagatgttccggttgcatctcgggagcactccccacaacctcacggatgcaaacatccacgagctggcccggaagacggaaggctactcgggcgcggacatcagcatcatcgtgcgggactctctcatgcagcccgtgaggaaggtgcagtcrgccacacacttcaaaaaggtctgtggcccctctcgcaccaaccccagcatgatgattgatgacctcctgactccatgctcaccaggggacccaggagccatggagatgacttggatggatgtccctggggacaaactcttagagcctgtggtttgcatgtcggacatgctgcggtctctggccaccacccggcccacggtgaatgcagacgacctcctgaaagtgaagaaattctcagaggactttgggcaagagagttaaaagcactccccatgtcaacagccagacagggctccagggcttgtcccagtcaatacagagttccctctgctgtctggccgtctgccagggagccagaaggaagggccttgcagccacagagacactccactgccctggggcacacagtggacactgctcttcctacttcctcctctcctggatgctcatcagctccttctgcctcccccccttttttttccatcttttgttcccctaaattaatgctgcttggattttcatcttatttataaagataaaatcacctggaagtgtcaaggagtggggcggggtggcgggggagaagcagccgtgctgccaggtcacccagacctccagacagccggctagccccactgcccgttccttttacgcccaagttttgctccttgagagcagattggctgatgcccctgcaaccccagcccaagctctgcctcaaagaccgagtgacataagccattcccaccctcctaggttcacatccagggctgtgtcttccttgggggaggagatggtgtcgtttagatcagggtaaggcagtcaggcgggtgttcaccactgccttttcttcctctgagcgtgagaacactgaacccagccactgcccctgggtccctgtcctggaaatgrtctaataaatc

SEQ ID NO: 5461 - DNA, 1819 bp, Homo sapiens
accgctctgggctgcgctcctcgcttgccctcggactcggctcccgctgcgagcggccgccctgcccgcgcaccgcgctcagcgcccaccgccgggcttcccgcgccggacccagtacctcggctccccggggccggaccgaggccgcaagcagcgccgcggggtgtggggcggacccaggagatgaaatgacaacgtcaaccctccagaaagccattgatctggtgacgaaagccacagaggaggacaaagccaagaactacgaggaggcgctgcggctgtaccagcatgcggtggagtacttcctccacgctatcaagtatgaggcccacagcgacaaggccaaggagagcattcgagccaagtgcgtgcagtacctagaccgggccgagaagctgaaggattatttacgaagcaaagagaaacacggcaagaagccagtcaaagagaaccagagtgagggcaagggcagtgacagtgacagtgaaggggataatccggagaaaaagaaactgcaagaacagctgatgggtgccgtcgtgatggagaagcccaacatacggtggaacgacgtggccgggctggagggggccaaggaggccctcaaagaagctgtcattttgccaatcaaattcccacacttgttcacaggcaagcgcaccccctggcgggggattctgctgttcggaccccctggcacagggaaatcctacctggccaaagccgtggcaacagaggccaacaactccaccttcttctctgtgtcctcctcagatctgatgtccaagtggctgggggagagtgaaaagctggtcaagaacctgtttgagctggccaggcagcacaagccctccatcatcttcatcgatgaggtggattccctctgcgggtcccgaaatgaaaatgagagtgaggccgcccggaggatcaaaacggagttcttggtccagatgcagggggtggggaataacaatgatgggactctggttcttggagccacaaacatcccatgggtgttggattcggccatcaggaggaggtttgaaaarcgaatttatatccccttgccggaggaagctgcccgcgcccagatgttccggttgcatctcgggagcactccccacaacctcacggatgcaaacatccacgagctggcccggaagacggaaggctactcgggcgcggacatcagcatcatcgtgcgggactctctcatgcagcccgtgaggaaggtgcagtcrgccacacacttcaaaaaggtgagtgcccgcggccactgctgagaaaaatctcatagtaagagcgggatgttcgkttttttttttcccagctcctggtcctgctccccggctgctcaggtgacacagtctctgaggcctcctggagagccgagggccagtgccatgggggctgcacccactgtcccctccctgcagctcttctggagtgtggccatctcagggtgtgtgaaagcagaggacagggccactttactgtcttaaccctgctgcggcctcctccgtcagcactgtgtgctcttgtgcggggtggacaccaaatcagtgtttggaaagtgttggatataaaatgaccaggaagacctgtctattcattcagcagatctctgctgagtatttgctgtgggtcctcctgtgtgcccggccctgtcctaagtgctgggaagatatgagtgaccaacagacaaaaatcctagaccttccgttgttggtggggagacagtcaacacagtcagtgagtktctcagaggatggagatggagcagggttaggagagaggtgtctcgggcatggagggaagg

SEQ ID NO: 5462 - DNA, 2241 bp, Homo sapiens
accgctctgggctgcgctcctcgcttgccctcggactcggctcccgctgcgagcggccgccctgcccgcgcaccgcgctcagcgcccaccgccgggcttcccgcgccggacccagtacctcggctccccggggccggaccgaggccgcaagcagcgccgcggggtgtggggcggacccaggagatgaaatgacaacgtcaaccctccagaaagccattgatctggtgacgaaagccacagaggaggacaaagccaagaactacgaggaggcgctgcggctgtaccagcatgcggtggagtacttcctccacgctatcaagtatgaggcccacagcgacaaggccaaggagagcattcgagccaagtgcgtgcagtacctagaccgggccgagaagctgaaggattatttacgaagcaaagagaaacacggcaagaagccagtcaaagagaaccagagtgagggcaagggcagtgacagtgacagtgaaggggataatccggagaaaaagaaactgcaagaacagctgatgggtgccgtcgtgatggagaagcccaacatacggtggaacgacgtggccgggctggagggggccaaggaggccctcaaagaagctgtcattttgccaatcaaattcccacacttgttcacaggcaagcgcaccccctggcgggggattctgctgttcggaccccctggcacagggaaatcctacctggccaaagccgtggcaacagaggccaacaactccaccttcttctctgtgtcctcctcagatctgatgtccaagtggctgggggagagtgaaaagctggtcaagaacctgtttgagctggccaggcagcacaagccctccatcatcttcatcgatgaggtggattccctctgcgggtcccgaaatgaaaatgagagtgaggccgcccggaggatcaaaacggagttcttggtccagatgcagggggtggggaataacaatgatgggactctggttcttggagccacaaacatcccatgggtgttggattcggccatcaggaggaggtttgaaaarcgaatttatatccccttgccggaggaagctgcccgcgcccagatgttccggttgcatctcgggagcactccccacaacctcacggatgcaaacatccacgagctggcccggaagacggaaggctactcgggcgcggacatcagcatcatcgtgcgggactctctcatgcagcccgtgaggaaggtgcagtcrgccacacacttcaaaaaggtctgtggcccctctcgcaccaaccccagcatgatgattgatgacctcctgactccatgctcaccaggggacccaggagccatggagatgacttggatggatgtccctggggacaaactcttagagcctgtggtttgcatgtcggacatgctgcggtctctggccaccacccggcccacggtgaatgcagacgacctcctgaaagtgaagaaattctcagaggactttgggcaagagagttaaaagctgcttcacttgggcaatggtgaaggtgggaggttgattggggcaaatccaggcactccccatgtcaacagccagacagggctccagggcttgtcccagtcaatacagagttccctctgctgtctggccgtctgccagggagccagaaggaagggccttgcagccacagagacactccactgccctggggcacacagtggacactgctcttcctacttcctcctctcctggatgctcatcagctccttctgcctcccccccttttttttccatcttttgttcccctaaattaatgctgcttggattttcatcttatttataaagataaaatcacctggaagtgtcaaggagtggggcggggtggcgggggagaagcagccgtgctgccaggtcacccagacctccagacagccggctagccccactgcccgttccttttacgcccaagttttgctccttgagagcagattggctgatgcccctgcaaccccagcccaagctctgcctcaaagaccgagtgacataagccattcccaccctcctaggttcacatccagggctgtgtcttccttgggggaggagatggtgtcgtttagatcagggtaaggcagtcaggcgggtgttcaccactgccttttcttcctctgagcgtgagaacactgaacccagccactgcccctgggtccctgtcctggaaatgrtctaataaatccttttcccttcttgagctacccaa

SEQ ID NO: 5463 - DNA, 999 bp, Homo sapiens
gagtgcgttcgcggctgctttgacctggtgggcgccgcctccggcactgcaccgaggcggggcgccagcgcccaggttgctgggctggccttggcgcccccttcccctacccagagcgcaggcaggcaggggggtcccgccgcgccccttcagcatatgccggtgcagctgacgacagccctkcgtgtggtgggcaccagcctgtttgccctggcagtgctgggtggcatcctggcagcctatgtgacgggctaccagttcatccacacggaaaagcactacctgtccttcggcctgtacggcgccatcctgggcctgcacctgctcattcagagcctttttgccttcctggagcaccggcgcatgcgacgtgccggccaggccctgaagctgccctccccgcggcggggctcggtggcactgtgcattgccgcataccaggaggaccctgactacttgcgcaagtgcctgcgctcggcccagcgcatctccttccctgacctcaaggtggtcatggtggtggatggcaaccgccaggaggacgcctacatgctggacatcttccacgaggtgctgggcggcaccgagcaggccggcttctttgtgtggcgcagcaacttccatgaggcaggcgagggtgagacggaggccagcctgcaggagggcatggaccgtgtgcgggatgtggtgcgggccagcaccttctcgtgcatcatgcagaagtggggaggcaagcgcgaggtcatgtacacggccttcaaggccctcggcgattcggtggactacatccaggtgtgcgactctgacactgtgctggatccagcctgcaccatcgagatgcttcgagtcctggaggaggatccccaagtagggggagtcgggggagatgtccagcccccagggaaaggtatggcagtagaggatgaccaggtccaagctgcccaggtcagagctacggaagcatggtccgttcaccaacgccacgtttctagagagcag

SEQ ID NO: 5464 - DNA, 4219 bp, Homo sapiens
gagtgcgttcgcggctgctttgacctggtgggcgccgcctccggcactgcaccgaggcggggcgccagcgcccaggttgctgggctggccttggcgcccccttcccctacccagagcgcaggcaggcaggggggtcccgccgcgccccttcagcatatgccggtgcagctgacgacagccctkcgtgtggtgggcaccagcctgtttgccctggcagtgctgggtggcatcctggcagcctatgtgacgggctaccagttcatccacacggaaaagcactacctgtccttcggcctgtacggcgccatcctgggcctgcacctgctcattcagagcctttttgccttcctggagcaccggcgcatgcgacgtgccggccaggccctgaagctgccctccccgcggcggggctcggtggcactgtgcattgccgcataccaggaggaccctgactacttgcgcaagtgcctgcgctcggcccagcgcatctccttccctgacctcaaggtggtcatggtggtggatggcaaccgccaggaggacgcctacatgctggacatcttccacgaggtgctgggcggcaccgagcaggccggcttctttgtgtggcgcagcaacttccatgaggcaggcgagggtgagacggaggccagcctgcaggagggcatggaccgtgtgcgggatgtggtgcgggccagcaccttctcgtgcatcatgcagaagtggggaggcaagcgcgaggtcatgtacacggccttcaaggccctcggcgattcggtggactacatccaggtgtgcgactctgacactgtgctggatccagcctgcaccatcgagatgcttcgagtcctggaggaggatccccaagtagggggagtcgggggagatgtccagatcctcaacaagtacgactcatggatttccttcctgagcagcgtgcggtactggatggccttcaacgtggagcgggcctgccagtcctactttggctgtgtgcagtgtattagtgggcccttgggcatgtaccgcaacagcctcctccagcagttcctggaggactggtaccatcagaagttcctaggcagcaagtgcagcttcggggatgaccggcacctcaccaaccgagtcctgagccttggctaccgaactaagtataccgcgcgctccaagtgcctcacagagacccccactaagtacctccggtggctcaaccagcaaacccgctggagcaagtcttacttccgggagtggctctacaactctctgtggttccataagcaccacctctggatgacctacgagtcagtggtcacgggtttcttccccttcttcctcattgccacggttatacagcttttctaccggggccgcatctggaacattctcctcttcctgctgacggtgcagctggtgggcattatcaaggccacctacgcctgcttccttcggggcaatgcagagatgatcttcatgtccctctactccctcctctatatgtccagccttctgccggccaagatctttgccattgctaccatcaacaaatctggctggggcacctctggccgaaaaaccattgtggtgaacttcattggcctcattcctgtgtccatctgggtggcagttctcctgggagggctggcctacacagcttattgccaggacrtgttcagtgagacagagctagccttccttgtctctggggctatactgtatggctgctactgggtggccctcctcatgctatatctggccatcatcgcccggcgatgtgggaagaagccggagcagtacagcttggcttttgctgaggtgtgacatggcccccaagcagagcgggtaaagtgcaatgggtaagggagggaaggggaatggaagagaaaagacagggtgggagggaggagggagtgctgtgttttagtctcttaatggtccaaaggacaaatctaaaatgcaaagaacggtgatgtagtatggcctgacagctctgtttagaggaggcaacactgatcccccagatgcagggctgcaggggattctgtgttttcagactgcctgtctgcttgcatctgcacataggcagtagcctcctcctgggctccagagggcactcagaagttgtgctaaaccaagttaagtcccattcagtggcaacttgtgataggtacctgagtgacggcaacctgcggaaggaggttctcccagcccatctgaacacaaccagaggtggcaggagaatttctactgagcgagctgggccggttagtgtatgtcacccccaccccacccctaagtagtcatcaatgcaataagattgcgcctgagatacaaggcccagaagcctgatctttgggcatcagaaaacagggtccaggaatggtgctttatgtgagataccccactccacatcaacattccagggatgagccaaaccagcagggagttagcactgaactgcttttaaaagtgcacattaaaaaggaaagtttgccaggaggaacaaagagattgtggtggtgctaaaggaggccataagctacacagaggccttgggtgttccacctggaaactgctcagacgtctagatgggttcttagcttgtctgtgatctctgctggggagataaaaagattaagccccaacatgttcagaaaagaagtgaagtcttgggtattttaacctgtatactcttgaattcctctcaaattcagctctgatctgaggctaagacacactccccacttcactttcttcaaagccacattttttgaggtatcactgcagtcacctcttctaccctcatcatcataggtaaggttttcaaggtggcaattggggcggagccccggctcttatagaagcttcagcaggaggcaagcgtgttctcagcacatatgggaactatgaggagcctctgatcaaattggctacaatcttggagctgcttggacggattccttggcagccgggttagcatgtgtgactttcaggctactgttcttgacaatcatctccaatggaaagcttttcagtgttcccaaagtgaactctcaaatccaaaatggttatctttgagaccatccattctcctcagtggcttctccagggaattcttacagccaagttgtgacagtcactgcatttgcctgcttctttccagaaaccaaactaggagatgaaactggttcctacatcctaaggttcttgctttctctctcatgcctcctgaggctgtttttggctgttttccctctgctgcttttggggaatgaggggaagccattttccagtgacttgcaatccaggctgttctcagcgttttgagtttaaaacctgggatcctgactaagcctttgacttaagggttgcttgcttgccctccaaatgtcctttctcagaggggccagctaacccgtgcagaaccagcactaaggtggacagcagacaagagggcaagcctctagtgtaccaagtgcttcctacaaagacgcaaggtgtgctctgagccacagatgggcaaaccctggtgctttccttcatctcccacgaactcaagggttttccaggtgtagctaacagttgccacatcacacagacctcgagtttctggtaagactgctggttgacatcagacccaacccatgaaggctggaaggcagcaggcatttgctaaggcagctgatccaggcaatcgttctgctggccaagaagttaaactattttgagcattagaatggaggaaatccggtcagccaagtgcagagttcagacttcgctaagggcttgtttttcttcagcatttacttgaagattaatgtaggatgacaggctctcctggctgtcctaccatcagctctgccttgcactgtggtcgtcaactttcctcaaatcaaaaacaggcaggtacaggtagtgggctcacaacgtttgacctcgactggtttttctaagttattttgtacatttttcagcagcaaaaccaaatttggtcttcagctttatccccgtttcttgcaagggaagagcctttatacaattggacgcattttggtttttcctcattgagaattcaaatcctcttttgtattgtttctacaataatttgtaaacatatttatttttacctgctttttttttttttttaattttcaggtcaagttttttatactgcacttatttgtcaaaataaagattctcacatatgccggttatctcgaaa

SEQ ID NO: 5465 - DNA, 2767 bp, Homo sapiens
gtcacacacacccctacaatcccctcccccagccccgagagacttttcttgacttccaccagttgctccggcgggtgagagtggagaggsccctccttcatcccccaggctccctcccttcctggagctgcagcctcagcatcctccgcccagcaccccaggattcaggcgttgggtcccgcccttgtaggctgtccacctcaaacgggccggacaggatatataagagagaatgcaccgtgcactacacacgcgactcccacaaggttgcagccggagccgcccagctcaccgagagcctagttccggccagggtcgccccggcaaccacgagcccagccaatcagcgccccggactgcaccagagccatggtcggcagaagagcactgatcgtactggctcactcagagaggacgtccttcaactatgccatgaaggargctgctgcagcggctttgaagaagaaaggatgggaggtggtggagtcggacctctatgccatgaacttcaatcccatcatttccagaaaggacatcacaggtaaactgaaggaccctgcgaactttcagtatcctgccgagtctgttctggcttataaagaaggccatctgagcccagatattgtggctgaacaaaagaagctggaagccgcagaccttgtgatattccagttccccctgcagtggtttggagtccctgccattctgaaaggctggtttgagcgagtgttcataggagagtttgcttacacttacgctgccatgtatgacaaaggacccttcyggagtaagaaggcagtgctttccatcaccactggtggcagtggctccatgtactctctgcaagggatccacggggacatgaatgtcattctctggccaattcagagtggcattctgcatttctgtggcttccaagtcttagaayctcaactgacatatagcattgggcacactccagcagacgcccgaattcaaatcctggaaggatggaagaaacgcctggagaatatttgggatgagacaccactgtattttgctccaagcagcctctttgacctaaacttccaggcaggattcttaatgaaaaaagaggtacaggatgaggagaaaaacaagaaatttggcctttctgtgggccatcacttgggcaagtccatcccaactgacaaccasatcaaagctagaaaatgagattccttagcctggatttccttytaacatgttatcaaatctgggtatctttccaggcttccctgacttgctttagtttttaagatttgtgtttttctttttccmcaaggaataaatgagagggaatcgacygtattcgtgcatttttggatcatttttaactgattcttatgattactatcatggcatataaccaaaatccgactgggctcaagaggccacttagggaaagatgtagaaagatgctagaaaaatgttctttaaaggcatctacacaatttaattcctctttttagggctaaagttttagggtacagtttggctaggtatcattcaactctccaatgttctattaatcacctctctgtagtttatggcagaagggaattgctcagagaaggaaaagactgaatctacctgccctaagggacttaacttgtttggtagttagccatctaatgcttgtttatgatatttcttgctttcaattacaaagcagttactaatatgcctagcacaagtaccactcttggtcagcttttgttgtttatatacagtacacagataccttgaaaggaagagctaataaatctcttctttgctgcagtcatctactttttttttaattaaaaaaaatttttttttgaagcagtcttgctctgttacccaggctggagtgcagtggtgtgatctcggctcactgcaacctctgcctcccaggttccagcaattctcctgcctcagcctccctagtagctgggatgacaggcgcctgccatcatgcctgactaatttttgtatttttagtagagacggcgtttcaccatgttggccaggctggtctcaaactcctgacctcaggtgatccgcctacctcagcctcccaaagtgctgggattacaggcgtgatccaccacacctggcccttgcaatcttctactttaaggtttgcagagataaaccaataaatccacaccgtacatctgcaatatgaattcaagaaaggaaatagtaccttcaatacttaaaaatagtcttccacaaaaaatactttatttctgatctatacaaattttcagaaggttattttctttatcattgctaaactgatgacttacyatgggatggggtccagtcccatgaccttggggtacaattgtaaacctagagttttatcaactttggtgaacagttttggcataatagtcaatttctacttctggaagtcatctcattccactgttggtattatataawtcaaggagaatatgataaaacactgccctcttgtggtgcattgaaagaagagatgagaaatgatgaaaaggttgcctgaaaaatgggagacagcctcttacttgccaagaaaatgaagggattggaccgagctggaaaacctcctttaccagatgctgactggcactggtggtttttgctctcgacagtatccacaatagctgacggctgggtgtttcagtttgaaaatattttgttgccttcatcttcactgcaattttgtgtaaatttctcaaagatctgaattaaataaataaaattcatttctacagaccca

SEQ ID NO: 5466 - DNA, 2513 bp, Homo sapiens
acgcgactcccacaaggttgcagccggagccgcccagctcaccgagagcctagttccggccagggtcgccccggcaaccacgagcccagccaatcagcgccccggactgcaccagagccatggcagaagagcactgatcgtactggctcactcagagaggacgtccttcaactatgccatgaaggargctgctgcagcggctttgaagaagaaaggatgggaggtggtggagtcggacctctatgccatgaacttcaatcccatcatttccagaaaggacatcacaggtaaactgaaggaccctgcgaactttcagtatcctgccgagtctgttctggcttataaagaaggccatctgagcccagatattgtggctgaacaaaagaagctggaagccgcagaccttgtgatattccagttccccctgcagtggtttggagtccctgccattctgaaaggctggtttgagcgagtgttcataggagagtttgcttacacttacgctgccatgtatgacaaaggacccttcyggagtaagaaggcagtgctttccatcaccactggtggcagtggctccatgtactctctgcaagggatccacggggacatgaatgtcattctctggccaattcagagtggcattctgcatttctgtggcttccaagtcttagaayctcaactgacatatagcattgggcacactccagcagacgcccgaattcaaatcctggaaggatggaagaaacgcctggagaatatttgggatgagacaccactgtattttgctccaagcagcctctttgacctaaacttccaggcaggattcttaatgaaaaaagaggtacaggatgaggagaaaaacaagaaatttggcctttctgtgggccatcacttgggcaagtccatcccaactgacaaccasatcaaagctagaaaatgagattccttagcctggatttccttytaacatgttatcaaatctgggtatctttccaggcttccctgacttgctttagtttttaagatttgtgtttttctttttccmcaaggaataaatgagagggaatcgacygtattcgtgcatttttggatcatttttaactgattcttatgattactatcatggcatataaccaaaatccgactgggctcaagaggccacttagggaaagatgtagaaagatgctagaaaaatgttctttaaaggcatctacacaatttaattcctctttttagggctaaagttttagggtacagtttggctaggtatcattcaactctccaatgttctattaatcacctctctgtagtttatggcagaagggaattgctcagagaaggaaaagactgaatctacctgccctaagggacttaacttgtttggtagttagccatctaatgcttgtttatgatatttcttgctttcaattacaaagcagttactaatatgcctagcacaagtaccactcttggtcagcttttgttgtttatatacagtacacagataccttgaaaggaagagctaataaatctcttctttgctgcagtcatctactttttttttaattaaaaaaaatttttttttgaagcagtcttgctctgttacccaggctggagtgcagtggtgtgatctcggctcactgcaacctctgcctcccaggttccagcaattctcctgcctcagcctccctagtagctgggatgacaggcgcctgccatcatgcctgactaatttttgtatttttagtagagacggcgtttcaccatgttggccaggctggtctcaaactcctgacctcaggtgatccgcctacctcagcctcccaaagtgctgggattacaggcgtgatccaccacacctggcccttgcaatcttctactttaaggtttgcagagataaaccaataaatccacaccgtacatctgcaatatgaattcaagaaaggaaatagtaccttcaatacttaaaaatagtcttccacaaaaaatactttatttctgatctatacaaattttcagaaggttattttctttatcattgctaaactgatgacttacyatgggatggggtccagtcccatgaccttggggtacaattgtaaacctagagttttatcaactttggtgaacagttttggcataatagtcaatttctacttctggaagtcatctcattccactgttggtattatataawtcaaggagaatatgataaaacactgccctcttgtggtgcattgaaagaagagatgagaaatgatgaaaaggttgcctgaaaaatgggagacagcctcttacttgccaagaaaatgaagggattggaccgagctggaaaacctcctttaccagatgctgactggcactggtggtttttgctctcgacagtatccacaatagctgacggctgggtgtttcagtttgaaaatattttgttgccttcatcttcactgcaattttgtgtaaatttctcaaagatctgaattaaataaataaaattcatttctacagaccca

SEQ ID NO: 5467 - DNA, 3545 bp, Homo sapiens
acggaagccgaggaaggctgagcgcgggctctcaaggaaagtagtcgcggaatctcagttagcggtggagaggcagtatgtccggttcaatggcgactgcggaagctagcggcagcgatgggaaagggcaggaagtcgagacctcagtcacctattaccggttggaggaggtggcaaagcgcaactccttgaaggaactgtggcttgtgatccatgggcgagtctacgatgtcacccgcttcctcaacgagcaccctggaggagaagaggttctgctggaacaagctggtgtagatgcaagtgaaagctttgaagatgtaggacactcttctgatgccagagaaatgctaaagcagtactacattggtgatatccatccgagtgaccttaaacctgaaagtggtagcaaggacccttcmaaaaatgatacrtgcaaaagttgctgggcatattggattttacccatcataggcgctgttctcttaggtttcctgtaccgctactacacatcggaaagcaaatcctcctgaggaggccttgctgaagttagaaagtgcatccactttggggcgaaaactagagacttgcttgggggctgcagaagtgccctctcctcgaatcctgccagttgcattcttcccccytggagccaagacgattggccagacatcacctcagatctgagaccagcgtcttccatctctcagagccttactcccaaagtacctgctcactgttccgtgttgaacaattgccggtgtttcctctcttcactggtttccatgagtacccttatatttcacaactttctgttcataagttatagtgacattgctctttggtaaaaatgcctgctttccaatactttgattgcatattagacattcttaacagggcggcagtctagtgttgaaagttttatttttccatttttcttttaagtaaattttttttaaaaaattctgatttagggctaggtgtggtggctcaggcctgtaatcctggcactttgggaggccaaggtgggaagatcgcttgaggccaagagttcaagaccagcctgggcaacatagcgagacccctatctgtattaaaaaaaaatctgatttaattcttttatttatcataaggggtttaattcctgaagtaaaggtttgcacctattaaacttaaaactgccaaatgatttttgttcttttatgtgcgtgataaaaatacaaagaatggtgtggccacctcctccctttcaagctagggcagcaggtagctcttcccagcccctgagcccagccccttcccaagtggtgccggacaaaaaactacatggccctttcgtgtcttgggggtggaaaggtagggatgaattggggtgatagaaccctggtgaattcagagtaatctttctttagaaaactggtgttttctaaagaaacaggataggagtttagagaaggcaccaaagctttcactttggtttggcaccagtttctaaccatctgttttttctaccctagctatcttttattggtaaaatataaatgtataattatgtttgtagagctttaccaaggagtttccctccttttttgtttgttgattagcaaatttttgattctccattttccaaaagtaagagactccagcatggccttctgtttgccccgcagtaaagtaacttccatataaaatggtatttgaaagtgagagttcatgacaacagaccgttttccatttcatctgtattttatctccgtgactccaacttgtgggtttgttctgtttttccatgagaataaaatactggcggtttttttctcagatgtgtgttcattgagaagtaggttactagaattatgttactgtgtcttattggttcaatgatgatttctctggcatattagacttttattttttccyccatggaagcacttgaggaaataaatagtacmctggctgttttctgccagcaactgtggtgatttttctccctgtcctttgagaattgctagtctgcttctgagccattgtcatatccagcagggagcagcttggttcaagaaggaccatagaggctgctcagcatctcctccctccctcccagcttgccagggatttgatgagacaggaaactgcccagcaaaccagggactgcccatgtaaactatttaagaaaaagttcaacccaggtcttgtatcctgtgatttagcagttgaatgaatacagaattcatcaaaataatattaaccttgtacttgcacacttggatatatttgggagtaattttaggagatttctggctgacttttattatcagggatatgggtttagtaaagcttttatytttagaaaaatgtttgtatgcattataagatgctacttttaagacaatattgaaaaaaactttggttattatttaacaaaagtggtatgacttgatgcttctctatttaaaggcaaggaaggattggtatatgattgcctgtaataaataaattgcgtgattattggagtacattggggtaaaagtaaagaacagaggagtattgaggagcttgaaagggaacattcaaactaaagccaagcctgaagataacttgaatcagttgtaaaagtgtgttggcaatgtccgaaattgaatgaaaaacatctggcttataagaaatgttwaagaactaccatcttaagtaaaattggtgtttttgttatttttaaggtaaatgccaatgcaaaaggtwtgtttttctacttcacattggttttcttttcctgtttacatctgcwcttgttttttgctgagagccagaggaaaagataattagactttgtctcttccacccatgaaatcccccagtacccagggcttcttctgaactactgccgatgtgatgtcactttgtatctggaaaatcactttggggtccatttactgttattttgttgcctacaaaaacagccaggtgaaagctaaatcttgtgtgagagtttgcagaggtttttctatacaataaagtagtatagcacactagccaaatccatccaaaaggaccttttttttaggaagtagacttgaattcacaaaacagtcttgacatgggtagctggtgaaaaaccctctggagagcaagtggagccagtccccattggctgacagtgccacctggagctggtctctggggtgttcggttgtttattcctgaggaagactagctgctgctgctgctgctgctgcaaactgtactgtacacatcatggctgctggacacgaaggaggaggtgagagaagtttcatgctaccgaaatagagggtgttggtaccactgcccctggcctgagagccagggtttaaacctgcctcagtagagtctagtttgaaatgacaccaaaattcctcagcccctactcagcaattggttttggtttccaaatgacttctgcatttgtaaagataacagagtggtggggtcaaagtttatcttgtgtttagatctcttcaagactgcttaagcaaaaacaaaaatcccttggaacctatcgtttgagcctg

SEQ ID NO: 5468 - DNA, 1054 bp, Homo sapiens
acggaagccgaggaaggctgagcgcgggctctcaaggaaagtagtcgcggaatctcagttagcggtggagaggcagtatgtccggttcaatggcgactgcggaagctagcggcagcgatgggaaagggcaggaagtcgagacctcagtcacctattaccggttggaggaggtggcaaagcgcaactccttgaaggaactgtggcttgtgatccatgggcgagtctacgatgtcacccgcttcctcaacgagcaccctggaggagaagaggttctgctggaacaagctggtgtagatgcaagtgaaagctttgaagatgtaggacactcttctgatgccagagaaatgctaaagcagtactacattggtgatatccatccgagtgaccttaaacctgaaagtggtagcaaggacccttcmaaaaatgatacrtgcaaaagttgctgggcatattggattttacccatcataggcgctgttctcttaggtttcctgtaccgctactacacatcggaaagcaaatcctcctgaggaggccttgctgaagttagaaagtgcatccactttggggcgaaaactagagacttgcttgggggctgcagaagtgccctctcctcgaatcctgccagttgcattcttcccccytggagccaagacgattggccagacatcacctcagatctgagaccagcgtcttccatctctcagagccttactcccaaagtacctgctcactgttccgtgttgaacaattgccggtgtttcctctcttcactggtttccatgagtacccttatatttcacaactttctgttcataagttatagtgacattgctctttggtaaaaatgcctgctttccaatactttgattgcatattagacattcttaacagggcggcagtctagtgttgaaagttttatttttccatttttcttttaagtaaattttttttaaaaaattctgatttagggctggtcttgaactccyggcctcaagtgatccacccgccttggcctcccaaagtgctgagattacaggcgtgagccaccgcc

SEQ ID NO: 5469 - DNA, 456 bp, Homo sapiens
atgtctgtgagtcaggattccagagaccatggtcctgatgggatggagcctggagacgtcattgagagtaactggaatgaggttgacgacagctttgatgacatgaacctctcagagtccctcctccatrgcatgtacatctacagttctgagaagccctctgtcatccagcagaaggtggactggctcactgcgaagatgcatgctcgagatttcaccgtctctgccatgcatggagatatggaccaaaaggaacgcgatgtgatcagaaggagtttcattctggctctagcagagcaaaactatatccacagaatcagtcgaggtagatggtttgaccttaaggatgcggatattaacatggtgacagaagaagacaagaggactcttcgagacatcaggaccttctacaacacctccattgaggaaatgcccctcgatgttgctgacctcatc

SEQ ID NO: 5470 - DNA, 1124 bp, Homo sapiens
gccgcgcgccccccgctccctgctgctccgcgtcctccgggaccgccctccgaggtcccccggggtcgctgctcctgcgcccagtgcgctccttgttctcccacaggttccttcggagagcgagcgggagtcggtgctcggcctcctgcggggagcagcccgaggcctggtctcagagaacacagtagatgtgtagtcagtttgttcaataaatatgcttgatggagcttcaatacccacctccacccccttctcccagaatctgcagggagaggtcgggaggtgacaacgccagcatgccagtgctatcggaggactctggtttgcatgaaaccctggccctgctgacctcccagctcagacctgactccaaccacaaggaggagatgggcttcctgagggatgttttcagtgaaaaaagcctcagttacttaatgaagattcatgagaagcttcgctattatgaaaggcaaagtccaaccccagttctgcacagcgctgtggccctcgctgaggacgtgatggaggagttgcaggccgcctccgtgcacagtgatgagagggagctgctccagctgctgtccaccccgcacctgagggctgtgctcatggtacatgacacrgttgcccagaagaattttgaccccgttctcccgcctctgcctgacaatatcgatgargattttgatgaggaatcggtgaagatcgtccgcttggtgaagaacaaggaacccctgggtgccaccatccggcgggacgagcactcaggggctgttgtggtggccaggatcatgcgaggaggcgcagcagacaggagcggcctggtccacgttggagatggaagcaaagagggaagtattaatcagagaccagccccaaatcaggcaggaaagaggcaaaggaaaccgaaatgggttgttcagatgacccaggagaaaagcaaggaagggagccctctggggccgtagcggtcaggagggatggagaattggaattcaacacgtagtgtccttgggttctcatggaaagtcttcygtccctttgacttttgaaaatacagttaccaacccgccactgctaaatttgaactggcttaaaaataataaaaatactaaaaaatacaa

SEQ ID NO: 5471 - DNA, 2999 bp, Homo sapiens
agcttccacgccgctgtttcttcatcaataaaatgggaacattcgcagtcatttctcaggactttgtgcagacaaaaagtttatcatagaaatcaccccacacaatgcttggcacatcgaggacactcagcacatcttagctttatttccttcctctctgaaaaaagtaagcagagttatttgttcccatcctctctgtccacagcctggtctcagagaacacagtagatgtgtagtcagtttgttcaataaatatgcttgatggagcttcaatacccacctccacccccttctcccagaatctgcagggagaggtcgggaggtgacaacgccagcatgccagtgctatcggaggactctggtttgcatgaaaccctggccctgctgacctcccagctcagacctgactccaaccacaaggaggagatgggcttcctgagggatgttttcagtgaaaaaagcctcagttacttaatgaagattcatgagaagcttcgctattatgaaaggcaaagtccaaccccagttctgcacagcgctgtggccctcgctgaggacgtgatggaggagttgcaggccgcctccgtgcacagtgatgagagggagctgctccagctgctgtccaccccgcacctgagggctgtgctcatggtacatgacacrgttgcccagaagaattttgaccccgttctcccgcctctgcctgacaatatcgatgargattttgatgaggaatcggtgaagatcgtccgcttggtgaagaacaaggaacccctgggtgccaccatccggcgggacgagcactcaggggctgttgtggtggccaggatcatgcgaggaggcgcagcagacaggagcggcctggtccacgttggagatgagctccgagaagtgaacgggatcgcagtcctgcacaagcggcccgacgagatcagccagattctggcccagtcccagggatccatcaccctaaaaatcatcccagccacccaggaggaagatcgcttaaaggagagcaaggtgttcatgcgcgccctcttccactacaaccctcgggaggaccgggccatcccttgccaggaggcgggcctgcccttccagcgcaggcaggtcctggaggtggtgagccaggacgaccccacgtggtggcaggccaagcgagtcggggacaccaaccttcgagccggcctcatcccctccaaggggttccaggagagacgactaagctaccggagagccgcgggcaccctgccgagcccccagagcctcaggaagcccccctatgatcagccttgtgacaaagagacctgtgactgtgagggctacctcaaagggcactatgtggctggtcttcggaggagcttccggctgggctgtagggagagactgggtggctcgcaggaaggaaagatgtcctccrgagctgagtctccggagctgctgacttacgaagaggtggccaggtaccaacaccagcccggagagcggccccgcctggtggttctgatcgggtctctgggagcccgactgcaygagctgaagcaaaaggtggtggctgagaacccacagcactttggcgtcgctgttccacataccaccaggccccgaaagagccatgagaaggaaggagtggaatatcactttgtgtctaagcaagcatttgaggccgacttacatcacaacaagttcctggaacatggtgaatataaggaaaatctgtatggaaccagcctggaggccattcaggctgttatggccaaaaacaaagtttgtttggtggatgtggagccagaagcactgaaacaactgaggacctcagaatttaaaccctatattatatttgtaaagcctgcaattcaggaaaaaagaaaaacgccacctatgtccccagcttgtgaggacacagcagccccatttgatgagcagcagcaagagatggccgcttctgccgccttcatagaccggcattacgggcacctggtagacgccgtgctggtgaaggaggatctccagggtgcctacagccagctcaaagtggtcttagagaagctgagcaaggacactcactgggtacctgttagttgggtcrggtaactttatcccagaacatccaagctggacgggaccttgaagatcatctagtccagactccctcattttaccatcaaggaatctcaagcgcagagagggagagaattctccacaaattccatcatcgagaagagtataagtgggaagtcttgtttgttgttggtttttgtctgttgtttttcactgcacctctttggatcatgatttgaaaggggcatatcagaaaacaacacatttcatttattaaagtatcacaggcaagctgaccctgattctttgtaccaaagttaagtagccactgtcttttgtgggtggtagtggttaatttatacagtactgattcgcagaatgtttaagctttttaaacatagtgacgcttagtagtttttttggaagctaacttgttttatccaaggggattttacatgtaactgaagttcccctgtcttcaagcactaaaacgttgatcttaaccttttttttgaagtgcttgcctggtaatagaaaacgggttctctgcctattttaaaatagtgaatatacgtaaattttctctggaaggctgaggcacacttcaccatcaacatgaattactgtactatcctgtactgcagtggtgccttcagggactcgaggaatgtaaggttgcctttcccctttctaaataccctcagattcctaacatcgagcccatgctttgtttgatttgttctattccatccattgtcccttttgttactgacagttgccttggtcctagccagtccctgccatgagatcataggggttcccattgtgctagatcttgggaaaccagatgactctccctgtcaaaactatggctacgtcactgtaaaccatttctgtcaagaataaaagtatgtagacccagagtgtgggcctaatgg

SEQ ID NO: 5472 - DNA, 2935 bp, Homo sapiens
gggaaggcggagccagcggcggcccaggctctgggcactcgcgcggctcccgttcgcggagcacacatcccggcgcgacgaggttccttcggagagcgagcgggagtcggtgctcggcctcctgcggggagcagcccgaggcctggtctcagagaacacagtagatgtgtagtcagtttgttcaataaatatgcttgatggagcttcaatacccacctccacccccttctcccagaatctgcagggagaggtcgggaggtgacaacgccagcatgccagtgctatcggaggactctggtttgcatgaaaccctggccctgctgacctcccagctcagacctgactccaaccacaaggaggagatgggcttcctgagggatgttttcagtgaaaaaagcctcagttacttaatgaagattcatgagaagcttcgctattatgaaaggcaaagtccaaccccagttctgcacagcgctgtggccctcgctgaggacgtgatggaggagttgcaggccgcctccgtgcacagtgatgagagggagctgctccagctgctgtccaccccgcacctgagggctgtgctcatggtacatgacacrgttgcccagaagaattttgaccccgttctcccgcctctgcctgacaatatcgatgargattttgatgaggaatcggtgaagatcgtccgcttggtgaagaacaaggaacccctgggtgccaccatccggcgggacgagcactcaggggctgttgtggtggccaggatcatgcgaggaggcgcagcagacaggagcggcctggtccacgttggagatgagctccgagaagtgaacgggatcgcagtcctgcacaagcggcccgacgagatcagccagattctggcccagtcccagggatccatcaccctaaaaatcatcccagccacccaggaggaagatcgcttaaaggagagcaaggtgttcatgcgcgccctcttccactacaaccctcgggaggaccgggccatcccttgccaggaggcgggcctgcccttccagcgcaggcaggtcctggaggtggtgagccaggacgaccccacgtggtggcaggccaagcgagtcggggacaccaaccttcgagccggcctcatcccctccaaggggttccaggagagacgactaagctaccggagagccgcgggcaccctgccgagcccccagagcctcaggaagcccccctatgatcagccttgtgacaaagagacctgtgactgtgagggctacctcaaagggcactatgtggctggtcttcggaggagcttccggctgggctgtagggagagactgggtggctcgcaggaaggaaagatgtcctccrgagctgagtctccggagctgctgacttacgaagaggtggccaggtaccaacaccagcccggagagcggccccgcctggtggttctgatcgggtctctgggagcccgactgcaygagctgaagcaaaaggtggtggctgagaacccacagcactttggcgtcgctgttccacataccaccaggccccgaaagagccatgagaaggaaggagtggaatatcactttgtgtctaagcaagcatttgaggccgacttacatcacaacaagttcctggaacatggtgaatataaggaaaatctgtatggaaccagcctggaggccattcaggctgttatggccaaaaacaaagtttgtttggtggatgtggagccagaagcactgaaacaactgaggacctcagaatttaaaccctatattatatttgtaaagcctgcaattcaggaaaaaagaaaaacgccacctatgtccccagcttgtgaggacacagcagccccatttgatgagcagcagcaagagatggccgcttctgccgccttcatagaccggcattacgggcacctggtagacgccgtgctggtgaaggaggatctccagggtgcctacagccagctcaaagtggtcttagagaagctgagcaaggacactcactgggtacctgttagttgggtcrggtaactttatcccagaacatccaagctggacgggaccttgaagatcatctagtccagactccctcattttaccatcaaggaatctcaagcgcagagagggagagaattctccacaaattccatcatcgagaagagtataagtgggaagtcttgtttgttgttggtttttgtctgttgtttttcactgcacctctttggatcatgatttgaaaggggcatatcagaaaacaacacatttcatttattaaagtatcacaggcaagctgaccctgattctttgtaccaaagttaagtagccactgtcttttgtgggtggtagtggttaatttatacagtactgattcgcagaatgtttaagctttttaaacatagtgacgcttagtagtttttttggaagctaacttgttttatccaaggggattttacatgtaactgaagttcccctgtcttcaagcactaaaacgttgatcttaaccttttttttgaagtgcttgcctggtaatagaaaacgggttctctgcctattttaaaatagtgaatatacgtaaattttctctggaaggctgaggcacacttcaccatcaacatgaattactgtactatcctgtactgcagtggtgccttcagggactcgaggaatgtaaggttgcctttcccctttctaaataccctcagattcctaacatcgagcccatgctttgtttgatttgttctattccatccattgtcccttttgttactgacagttgccttggtcctagccagtccctgccatgagatcataggggttcccattgtgctagatcttgggaaaccagatgactctccctgtcaaaactatggctacgtcactgtaaaccatttctgtcaagaataaaagtatgtagacccagagtgtgggcctaatgg

SEQ ID NO: 5473 - DNA, 3051 bp, Homo sapiens
gcgcccgccccgccgcgcgccccccgctccctgctgctccgcgtcctccgggaccgccctccgaggtcccccggggtcgctgctcctgcgcccagtgcgctccttgttctcccacaggttccttcggagagcgagcgggagtcggtgctcggcctcctgcggggagcagcccgaggcttactgaaagcttccacgccgctgtttcttcatcaataaaatgggaacattcgcagtcatttctcaggactttgtgcagacaaaaagtttatcatagaaatcaccccacacaatgcttggcacatcgaggacactcagcacatcttagctttatttccttcctctctgaaaaaaaatctgcagggagaggtcgggaggtgacaacgccagcatgccagtgctatcggaggactctggtttgcatgaaaccctggccctgctgacctcccagctcagacctgactccaaccacaaggaggagatgggcttcctgagggatgttttcagtgaaaaaagcctcagttacttaatgaagattcatgagaagcttcgctattatgaaaggcaaagtccaaccccagttctgcacagcgctgtggccctcgctgaggacgtgatggaggagttgcaggccgcctccgtgcacagtgatgagagggagctgctccagctgctgtccaccccgcacctgagggctgtgctcatggtacatgacacrgttgcccagaagaattttgaccccgttctcccgcctctgcctgacaatatcgatgargattttgatgaggaatcggtgaagatcgtccgcttggtgaagaacaaggaacccctgggtgccaccatccggcgggacgagcactcaggggctgttgtggtggccaggatcatgcgaggaggcgcagcagacaggagcggcctggtccacgttggagatgagctccgagaagtgaacgggatcgcagtcctgcacaagcggcccgacgagatcagccagattctggcccagtcccagggatccatcaccctaaaaatcatcccagccacccaggaggaagatcgcttaaaggagagcaaggtgttcatgcgcgccctcttccactacaaccctcgggaggaccgggccatcccttgccaggaggcgggcctgcccttccagcgcaggcaggtcctggaggtggtgagccaggacgaccccacgtggtggcaggccaagcgagtcggggacaccaaccttcgagccggcctcatcccctccaaggggttccaggagagacgactaagctaccggagagccgcgggcaccctgccgagcccccagagcctcaggaagcccccctatgatcagccttgtgacaaagagacctgtgactgtgagggctacctcaaagggcactatgtggctggtcttcggaggagcttccggctgggctgtagggagagactgggtggctcgcaggaaggaaagatgtcctccrgagctgagtctccggagctgctgacttacgaagaggtggccaggtaccaacaccagcccggagagcggccccgcctggtggttctgatcgggtctctgggagcccgactgcaygagctgaagcaaaaggtggtggctgagaacccacagcactttggcgtcgctgttccacataccaccaggccccgaaagagccatgagaaggaaggagtggaatatcactttgtgtctaagcaagcatttgaggccgacttacatcacaacaagttcctggaacatggtgaatataaggaaaatctgtatggaaccagcctggaggccattcaggctgttatggccaaaaacaaagtttgtttggtggatgtggagccagaagcactgaaacaactgaggacctcagaatttaaaccctatattatatttgtaaagcctgcaattcaggaaaaaagaaaaacgccacctatgtccccagcttgtgaggacacagcagccccatttgatgagcagcagcaagagatggccgcttctgccgccttcatagaccggcattacgggcacctggtagacgccgtgctggtgaaggaggatctccagggtgcctacagccagctcaaagtggtcttagagaagctgagcaaggacactcactgggtacctgttagttgggtcrggtaactttatcccagaacatccaagctggacgggaccttgaagatcatctagtccagactccctcattttaccatcaaggaatctcaagcgcagagagggagagaattctccacaaattccatcatcgagaagagtataagtgggaagtcttgtttgttgttggtttttgtctgttgtttttcactgcacctctttggatcatgatttgaaaggggcatatcagaaaacaacacatttcatttattaaagtatcacaggcaagctgaccctgattctttgtaccaaagttaagtagccactgtcttttgtgggtggtagtggttaatttatacagtactgattcgcagaatgtttaagctttttaaacatagtgacgcttagtagtttttttggaagctaacttgttttatccaaggggattttacatgtaactgaagttcccctgtcttcaagcactaaaacgttgatcttaaccttttttttgaagtgcttgcctggtaatagaaaacgggttctctgcctattttaaaatagtgaatatacgtaaattttctctggaaggctgaggcacacttcaccatcaacatgaattactgtactatcctgtactgcagtggtgccttcagggactcgaggaatgtaaggttgcctttcccctttctaaataccctcagattcctaacatcgagcccatgctttgtttgatttgttctattccatccattgtcccttttgttactgacagttgccttggtcctagccagtccctgccatgagatcataggggttcccattgtgctagatcttgggaaaccagatgactctccctgtcaaaactatggctacgtcactgtaaaccatttctgtcaagaataaaagtatgtagacccagagtgtgggcctaatgg

SEQ ID NO: 5474 - DNA, 9545 bp, Homo sapiens
cccccgccgtccccgcgcggtcgcccaccccggcccgacaagcagcttgggcrtccagcccggcccggtccctgcagggagggagcgcaggagctgggggcggctctcccggggcggggctcgctccacaagcgccaggggccgcgcggggcgtgggcgtgggcggggccgggggcggggccggccttggctgccgcggcacaggcggcggcgtctccagggggagccaaggtacgtaggcggcgtccgcctcacccgagcatccttccccgccggtggccgcccgcccgcggcccgcgctcgcagcctcccgcctggcggttgacttctttgtgtcgtattctctgcctgcgccctgtctctgcaggacctgttcgttcttctttgggctataagaaggcagaggatgagatgtcccgggccacgtctgttggagaccagctggaggcacccgcccgcaccatttacctcaaccaaccgcatctcaacaaattccgcgacaaccagatcagtacggccaagtacagcgtgttgacatttctacctcgattcttgtatgagcagattagaagagctgctaatgccttctttctcttcattgccttattacagcaaattccagatgtatctccaacaggaagatataccaccctggtgccattgatcattattttaacaattgcaggcatcaaagagattgtagaagattttaagcgacacaaggcagacaatgcagttaacaaaaagaaaacaataggcaggagaaatggttttagctgcataaaattgtccagaaaagcagaggagagttatctgagaaatactcagtgggtctttggcatagttgtttatactggacacgacaccaaactcatgcagaattcaaccaaagcrcctctcaagagatcaaatgttgagaaggtgactaacgtgcagatcctggtgttgtttggcatcctcttggtcatggccttggtgagctcggcgggggccctgtactggaacaggtctcatggtgaaaagaactggtacatcaagaagatggacaccacctcagataattttggatacaacctactgacgttcatcatcttatacaacaatcttattcccatcagtctgttggtgactcttgaggttgtgaagtatactcaagcccttttcataaactgggacacagatatgtattatataggaaatgacactcctgccatggccaggacatcaaaccttaatgaagagcttgggcaggtgaaatatctcttttctgacaagactggaacgcttacatgcaatatcatgaactttaagaagtgcagcattgccggagtaacctatggcacgtgggtgaagcagaagcacagggaggcggaagcagaggggcaagtggaagcacgtggtgaagtgcaagcatgtggggaggcggaagcacgtgggcaaatggaagcatgtgggcaaggccgaggctcctggggaggcagggtgtgtggagccccttgcattcaggagttcctcacccttctggccgtgtgccacacggttgttcctgagaaggatggagataacatcatctaccaggcctcttccccagatgaagctgctttggtgaaaggagctaaaaagctgggctttgtcttcacagccagaacaccattctcagtcatcatagaagcgatgggacaggaacaaacattyggaatccttaatgtcctggaattttctagtgacagaaaaagaatgtctgtaattgttcgaactccttcaggacgacttcggctttactgtaaaggggctgataatgtgatttttgagagactttcaaaagactcaaaatatatggaggaaacattatgccatctggaatactttgccacggaaggcttgcggactctctgtgtggcttatgctgatctctctgagaatgagtatgaggagtggctgaaagtctatcaggaagccagcaccatattgaaggacagagctcaacggttggaagagtgttacgagatcattgagaagaatttgctgctacttggagccacagccatagaagatcgccttcaagcaggagttccagaaaccatcgcaacactgttgaaggcagaaattaaaatatgggtgttgacaggagacaaacaagaaactgcgattaatatagggtattcctgccgattggtatcgcagaatatggcccttatcctattgaaggaggactctttggatgccacaagggcagccattactcagcactgcactgaccttgggaatttgctgggcaaggaaaatgacrtggccctsatcatcgatggccacacmctgaagtacgcgctctccttcgaagtccggaggagtttcctggatttggcactctcgtgcaaagcggtcatatgctgcagagtgtctcctctgcagaagtctgagatagtggatgtggtgaagaagcgggtgaaggccatcaccctcgccatcggagacggcgccaacgatgtcgggatgatccagacagcccacgtgggtgtgggaatcagtgggaatgaaggcatgcaggccaccaacaactcggattacgccatcgcacagttttcctacttagagaagcttctgttggttcatggagcctggagctacaaccgggtgaccaagtgcatcttgtactgcttctataagaacgtggtcctgtatattattgagctttggttcgcctttgttaatggattttctgggcagattttatttgaacgttggtgcatcggcctgtacaatgtgattttcaccgctttgccgcccttcactctgggaatctttgagaggtcttgcactcaggagagcatgctcaggtttccccagctctacaaaatcacccagaatggcgaaggcttcaacacaaaggttttctggggtcactgcatcaacgccttggtccactccctcatcctcttctggtttcccatgaaagctctggagcatgatactgtgttgacaagtggtcatgctaccgactatttatttgttggaaatattgtttacacatatgttgttgttactgtttgtctgaaagctggtttggagaccacagcttggactaarttcagtcatctggctgtctggggaagcatgctgacctggctggtgttttttggcatctactcgaccatctggcccaccattcccattgctccagatatgagaggacaggcaactatggtcctgagctccrcacacttctggttgggattatttctggttcctactgcctgtttgattgaagatgtggcatggagagcagccaagcacacctgcaaaaagacattgctggaggaggtgcaggagctggaaaccaagtctcgagtcctgggaaaagcggtgctgcgggatagcaatggaaagaggctgaacgagcgcgaccgcctgatcaagaggctgggccggaagacgcccccgacgctgttccggggcagctccctgcagcagggcgtcccgcatgggtatgctttttctcaagaagaacacggagctgttagtcaggaagaagtcatccgtgcttatgacaccaccaaaaagaaatccaggaagaaataagacaygaattttcctgactgatcttaggaaagagattcagtttgttgcacccagtgttaacacatctttgtcagagaagactggcgtcagcagccaaaacaccaggaaacacatttctgtggccttagccaagcagtttgttagttacatattccctcgcaaacctggagtgcagaccacaggggaagctatctttgccctcccaactcgtctgcagtgcttagcctaacttttgtttatgtcgttatgaagcattcaactgtgctctgtgaggtgtgaaattaaaaacattatgtttcaccaatatttaaacatcagtactagttgtcctgggagaaagggaaaggagttttatgttgcgtgagaggcccatcctgtgtaattggagcagggcacacttgcttcctgttgagttaactcagaggttaagtccaacgggccacatgcagacttcactgtaggcaggttgctctcctgctttgattcctgttttgtgtgtaaaattggcataaacttcttgattgcagtgaaatcacaaaattctmtatcggggtggtcaacctgagaacatttattkgaacctcttagccacatttccagcagggcaaaccaactgatgccctggaagagtcttccgcaccctctccaggtgcactcggcccagtcctgccgccgtgtccaggcgcccctcacccccacacctgctgcatggctggccacaccactcagtgcatggcggccgatgggcmgccaacccaaacccgcgcctttccttgttccactgcagactcagatacagatgcgaaaaattccttcttccaccgcccttctcgttctgtaaagaaagaaaagaaacatagcctttctgcatatattctaaacgtctctctgcctctgtctgacatggggccaccccacaggtcagagtggtggtagaaccccttcaggactcccagccgtggtcaggctctgaatactcccttcccaacatccagactgctgggcctttggcatccacttacattagaacccacgtttgtttcagagcacattttggactttcactgttgggaaatgaatgaatttataacatgcctgcacagcgaaggaacacacctgtcgctcttagctctagagtcagaggatgagtaaacccagatgcaagagtataggacattgagtggggagaacaagacgaccacagaagtcctcagaaggagaaggaaggacacggagacactgagaggaggacacagaggaatcgccaccagatctttgcagtagaaactctgaaatargccttgagacccagacaattgtcatgatcagcccagtgtgtatgagagcttaaacaagaccttcacacacagttctaattgaaaagaattccaaacatttcagggaaacacctttttaaaaaatatactgacatggtttcctttctgtatcccatcagtgttagacacaggtacctatcagaatacggcatatcctgaattatctaagacaaggaagtgaagagcrgaatcactgactttcccaactgcagagtcccacacttaaatctcaacagaacctagatgtcttcaggcatgaatgtgagcacctggagcccttactaaacaacctgcctggagccctgttctctgctctggttgccaaaccagatttttggatggcctaaatacttgtgrgcaactgttactggtgaaaaatgggagtggagagcatgttttggattttcactgtggggaaatgaatgaatttatcacatgactgtgcagcgaaggagcacacctgtcactcttagctctagagtcggaggatgagtcaaccctgtaggaatgattgtgctaaattaggaaataacactttagtgcactttgcttcctaacccttttttgtcagaaatctacaacctactgggcatggaaatgatttaaaatatgatctgcattgactaagaaaactcatcctcacttatgaggtgaccaggatgcagagagggcctgaggggcagcagaacaatgcaattcacaggtgaggctccaaaaagggccatttctttctccccaaggtgcatagaacatttttaaatatcagagtacccagcaagacggaaggactgtcatgcaggaactctaacacaaaatgtgcctatgactaacacgacaaaccaaggtgtatggtttctttgcacacccagaaaggtgatggccaagatacagaggagaaacgaaaactggaattgaatgtgcattaggcatcttaactattcatattttgtytcatttgggaactaagcctatttggaaagagtggattagaaattgaattctttgtcaaacagttagctctgtcttgaacttgaagccttccaaatcagaattatgtatttaagtgtgtgtttgtgtttgtttggggtttttgtttcttacrttagagttcatattttctgggatttaaggatacaggtgtattttcctattctcttgagaagtagactaaacaatatttgcagtgatgacagacgcacacagaagaaaacattagaagagatgcctttctatcctctcatgtggttgagcattcttacagccaaatgactaaattggctgtaaattggtttctaggaggagcagctgtcactacgtgtgatgtataatatttagccagggccaactcaggggctgtgtcatttgtcctatctttaaattgaggtcagagtgtcacacacaacccctcccctggggcagggtggactggactaggttgcatacgctggctgtcagctcagcaaaaatgccacatggggcttgtcactccrccagacactcactgactcacgggctggcaggtcacgctcggttagcgctccagggcctgactctggattgagctaaactggcagaatccactcaggccaacccttggtctactgctgtgtacagacagcccagtcctgtgttgagtctctcttctcctggatgaccctgcaaaaggaagagascagttgtactgtgggcttagttctgggtttccactgcacactgacacgtgccagcaagggtagctgtggaaaacacgtatcaggagagcagagtagtctggatgaatactctgtgctgatcagaacgggctcggtcataatttaggagtggagctgatgtgtctgtcctgcctcaatgcagaatattccaggcttcttgaccagggttatgttcacccatctcccaacacacacatgcacacatgaaaacaaaaacatggtaactcttttggttcggcacaccatacaaaacgtgctttggggcgaggagtgctgtttcttttaacacttgtagaggaatatcctgagaagtgaacctgggctttgggagagctcagctgagaattctgttgacattttctttcccttgacaaggcttcaggttcgtctcactatagggagctggctgtgaaaatcagtaataacttgtcaagaagcagtgaaaaatgcgggggggtggaaagagtctaggtaactaatgtcttataatgcatatgtatgtaaatattacaggatttaaggttgaattttttaaaaagaaagttatagtctgtaatttccatttgttataataatgacctttaatcttgtcatttggaaccataaagcatttttatcaggtacctctgttccaagggatttatgtcttagaccatagctgaattgaatgtttgcaaaacactgctataggataaggtggtctttagttttgaacgtgtgaaaggactgcacacttttcagccagggtttgagttactgcccagggtcatcgtctcaaagtaattcaaggagtgatttaacatcagcatttgaaatgtagtcttcatctcctgggatccataaaaaaatgtgaacagggaaatggtggctaagcagagcctgaaataataacttggcaaagaaatgagtttatcaggtcgagtcaaaacatggcatcccctgttacactcaagaaatgctttcttcatgtaaatgtttatacgggcatatataatcacaatgggaacagttaaaaccccctcccttcaaaaaaagaaaatctatatcagttgggtttggttttggttcttcattggctcaaggcagttaactgtctcagtatagcctttggggagatttaacctcattctagccatttttccatcctgaaggccaagaaggactattagaagggtttttgaggggtttcggaggtgagggcccaagacccccataatgacatcattaggtattcttgaaaggtgttaacagaccagcacgctcgatgtgttgtacccttcatttatttttttttctcagcatcccaagttgtccatcagtacattccccttcaccttacctgatcttcatttaatgcccagtctgtaactaatgttctgtttaaagctctcttaatttgttggctatgagtgatttgtgaatctgggatgtaaccctgagtgaggagaaaagggcattgagccagcataaatctgaatgggcagaagccacaaacaaatgggagcagaaaagaagggcgagctcccccgcgccgcaccccgtgtataatccagtgttaacctctgaggaacacctcggctctcccaactgaggagagacaaaagagggattctttttacacccaggctggcgcattttcaagtgacaatctcgggctctagttgcctttgagatatccactctgctctttctcccaggcctcagaccaagaaaaacatgctctcaagattagcccataggcagttcttgtgacctggctgaagaaagaaaggagacctgtttgttttaaaagtcgggcgcaaagtgtcaggtggctttgatttatgacagaaagaggaagaagaaagttggagtaatagcactatccaaataaccctgcccaggaaacttgggggtcaagagagcttatcaagagccttttataggtaagctcttccgtgtgaaagagaaaaggccggaaagagggagagagcccagagagcaggctgcgaactcacttccaatgggattggagtctgttgtattcttaagagatagcctgatatgtggtttataggtgaatcaataaacaccaacaacaacaaaaaaaaaaaaaaaaaaaaaggaagaaaagmaaaaaaggaaaccagccctgtcatggaatttctctccttccctgcacagtaaagacttttgggttttcatggataaaatcaatgtcagtactgaaactcctactctcccctcccgccccactctcccccgttgcccgagatggccaagttcaggcctgtgcaatgccgcttccctctgagcctccctctcaagggccacgcaggcagctgcagcagggccagctgcaggatggggctgccggtcactgaattgtcgttcaaatgcatcatctttgtggcgtctttctcatgcgagcaaagccacgtgctctcctgtctgctgtcacatctgtgcctggattgcttaaatattgtttgtgatggggaggttttaatctggtgatgcagagggaagcagggctgtgggggcacrtttaattggctcccagcagcgtggggrgtgcttctatggtgtgtggggttttttgttgcctccctctagaagtgttaccgttttcacgtcctattaatgtcctctggttgttaaattacagcagcacattacagtgcactgggttccctcctggagtgaatacaaacggagggcatctacttgtatttttagaagttttgggagaatttagtgatttgtggctttgatcaatcctgttgactggtgtatgtctgcgcaaacctgtttcaaataaatcttttgttaaagtaagtgattggactgttttattttggaattttcttttccactaatcagcatttactgccacagggactgcggcctgtaacacaggggtttgtcagcatgtgca

SEQ ID NO: 5475 - DNA, 667 bp, Homo sapiens
agggaaaggagttttatgttgcgtgagaggcccatcctgtgtaattggagcagggcacacttgcttcctgttgagttaactcagaggttaagtccaacgggccacatgcagacttcactgtaggcaggttgctctcctgctttgattcctgttttgtgtgtaaaattggcataaacttcttgattgcagtgaaatcacaaaattctmtatcggggtggtcaacctgagaacatttattkgaacctcttagccacatttccagcagggcaaaccaactgatgccctggaagagtcttccgcaccctctccaggtgcactcggcccagtcctgccgccgtgtccaggcgcccctcacccccacacctgctgcatggctggccacaccactcagtgcatggcggccgatgggcmgccaacccaaacccgcgcctttccttgttccactgcagactcagatacagatgcgaaaaattccttcttccaccgcccttctcgttctgtaaagaaagaaaaagtgttaccgttttcacgtcctattaatgtcctctggttgttaaattacagcagcacattacagtgcactgggttccctcctggagtgaatacaaacggagggcatctacttgtatttttagaagttttgggagaatttagtgatttgtggctt

SEQ ID NO: 5476 - DNA, 7821 bp, Homo sapiens
tgacagaaaaagaatgtctgtaattgttcgaactccttcaggacgacttcggctttactgtaaaggggctgataatgtgatttttgagagactttcaaaagactcaaaatatatggaggaaacattatgccatctggaatactttgccacggaaggcttgcggactctctgtgtggcttatgctgatctctctgagaatgagtatgaggagtggctgaaagtctatcaggaagccagcaccatattgaaggacagagctcaacggttggaagagtgttacgagatcattgagaagaatttgctgctacttggagccacagccatagaagatcgccttcaagcaggagttccagaaaccatcgcaacactgttgaaggcagaaattaaaatatgggtgttgacaggagacaaacaagaaactgcgattaatatagggtattcctgccgattggtatcgcagaatatggcccttatcctattgaaggaggactctttggatgccacaagggcagccattactcagcactgcactgaccttgggaatttgctgggcaaggaaaatgacrtggccctsatcatcgatggccacacmctgaagtacgcgctctccttcgaagtccggaggagtttcctggatttggcactctcgtgcaaagcggtcatatgctgcagagtgtctcctctgcagaagtctgagatagtggatgtggtgaagaagcgggtgaaggccatcaccctcgccatcggagacggcgccaacgatgtcgggatgatccagacagcccacgtgggtgtgggaatcagtgggaatgaaggcatgcaggccaccaacaactcggattacgccatcgcacagttttcctacttagagaagcttctgttggttcatggagcctggagctacaaccgggtgaccaagtgcatcttgtactgcttctataagaacgtggtcctgtatattattgagctttggttcgcctttgttaatggattttctgggcagattttatttgaacgttggtgcatcggcctgtacaatgtgattttcaccgctttgccgcccttcactctgggaatctttgagaggtcttgcactcaggagagcatgctcaggtttccccagctctacaaaatcacccagaatggcgaaggcttcaacacaaaggttttctggggtcactgcatcaacgccttggtccactccctcatcctcttctggtttcccatgaaagctctggagcatgatactgtgttgacaagtggtcatgctaccgactatttatttgttggaaatattgtttacacatatgttgttgttactgtttgtctgaaagctggtttggagaccacagcttggactaarttcagtcatctggctgtctggggaagcatgctgacctggctggtgttttttggcatctactcgaccatctggcccaccattcccattgctccagatatgagaggacaggcaactatggtcctgagctccrcacacttctggttgggattatttctggttcctactgcctgtttgattgaagatgtggcatggagagcagccaagcacacctgcaaaaagacattgctggaggaggtgcaggagctggaaaccaagtctcgagtcctgggaaaagcggtgctgcgggatagcaatggaaagaggctgaacgagcgcgaccgcctgatcaagaggctgggccggaagacgcccccgacgctgttccggggcagctccctgcagcagggcgtcccgcatgggtatgctttttctcaagaagaacacggagctgttagtcaggaagaagtcatccgtgcttatgacaccaccaaaaagaaatccaggaagaaataagacaygaattttcctgactgatcttaggaaagagattcagtttgttgcacccagtgttaacacatctttgtcagagaagactggcgtcagcagccaaaacaccaggaaacacatttctgtggccttagccaagcagtttgttagttacatattccctcgcaaacctggagtgcagaccacaggggaagctatctttgccctcccaactcgtctgcagtgcttagcctaacttttgtttatgtcgttatgaagcattcaactgtgctctgtgaggtgtgaaattaaaaacattatgtttcaccaatatttaaacatcagtactagttgtcctgggagaaagggaaaggagttttatgttgcgtgagaggcccatcctgtgtaattggagcagggcacacttgcttcctgttgagttaactcagaggttaagtccaacgggccacatgcagacttcactgtaggcaggttgctctcctgctttgattcctgttttgtgtgtaaaattggcataaacttcttgattgcagtgaaatcacaaaattctmtatcggggtggtcaacctgagaacatttattkgaacctcttagccacatttccagcagggcaaaccaactgatgccctggaagagtcttccgcaccctctccaggtgcactcggcccagtcctgccgccgtgtccaggcgcccctcacccccacacctgctgcatggctggccacaccactcagtgcatggcggccgatgggcmgccaacccaaacccgcgcctttccttgttccactgcagactcagatacagatgcgaaaaattccttcttccaccgcccttctcgttctgtaaagaaagaaaagaaacatagcctttctgcatatattctaaacgtctctctgcctctgtctgacatggggccaccccacaggtcagagtggtggtagaaccccttcaggactcccagccgtggtcaggctctgaatactcccttcccaacatccagactgctgggcctttggcatccacttacattagaacccacgtttgtttcagagcacattttggactttcactgttgggaaatgaatgaatttataacatgcctgcacagcgaaggaacacacctgtcgctcttagctctagagtcagaggatgagtaaacccagatgcaagagtataggacattgagtggggagaacaagacgaccacagaagtcctcagaaggagaaggaaggacacggagacactgagaggaggacacagaggaatcgccaccagatctttgcagtagaaactctgaaatargccttgagacccagacaattgtcatgatcagcccagtgtgtatgagagcttaaacaagaccttcacacacagttctaattgaaaagaattccaaacatttcagggaaacacctttttaaaaaatatactgacatggtttcctttctgtatcccatcagtgttagacacaggtacctatcagaatacggcatatcctgaattatctaagacaaggaagtgaagagcrgaatcactgactttcccaactgcagagtcccacacttaaatctcaacagaacctagatgtcttcaggcatgaatgtgagcacctggagcccttactaaacaacctgcctggagccctgttctctgctctggttgccaaaccagatttttggatggcctaaatacttgtgrgcaactgttactggtgaaaaatgggagtggagagcatgttttggattttcactgtggggaaatgaatgaatttatcacatgactgtgcagcgaaggagcacacctgtcactcttagctctagagtcggaggatgagtcaaccctgtaggaatgattgtgctaaattaggaaataacactttagtgcactttgcttcctaacccttttttgtcagaaatctacaacctactgggcatggaaatgatttaaaatatgatctgcattgactaagaaaactcatcctcacttatgaggtgaccaggatgcagagagggcctgaggggcagcagaacaatgcaattcacaggtgaggctccaaaaagggccatttctttctccccaaggtgcatagaacatttttaaatatcagagtacccagcaagacggaaggactgtcatgcaggaactctaacacaaaatgtgcctatgactaacacgacaaaccaaggtgtatggtttctttgcacacccagaaaggtgatggccaagatacagaggagaaacgaaaactggaattgaatgtgcattaggcatcttaactattcatattttgtytcatttgggaactaagcctatttggaaagagtggattagaaattgaattctttgtcaaacagttagctctgtcttgaacttgaagccttccaaatcagaattatgtatttaagtgtgtgtttgtgtttgtttggggtttttgtttcttacrttagagttcatattttctgggatttaaggatacaggtgtattttcctattctcttgagaagtagactaaacaatatttgcagtgatgacagacgcacacagaagaaaacattagaagagatgcctttctatcctctcatgtggttgagcattcttacagccaaatgactaaattggctgtaaattggtttctaggaggagcagctgtcactacgtgtgatgtataatatttagccagggccaactcaggggctgtgtcatttgtcctatctttaaattgaggtcagagtgtcacacacaacccctcccctggggcagggtggactggactaggttgcatacgctggctgtcagctcagcaaaaatgccacatggggcttgtcactccrccagacactcactgactcacgggctggcaggtcacgctcggttagcgctccagggcctgactctggattgagctaaactggcagaatccactcaggccaacccttggtctactgctgtgtacagacagcccagtcctgtgttgagtctctcttctcctggatgaccctgcaaaaggaagagascagttgtactgtgggcttagttctgggtttccactgcacactgacacgtgccagcaagggtagctgtggaaaacacgtatcaggagagcagagtagtctggatgaatactctgtgctgatcagaacgggctcggtcataatttaggagtggagctgatgtgtctgtcctgcctcaatgcagaatattccaggcttcttgaccagggttatgttcacccatctcccaacacacacatgcacacatgaaaacaaaaacatggtaactcttttggttcggcacaccatacaaaacgtgctttggggcgaggagtgctgtttcttttaacacttgtagaggaatatcctgagaagtgaacctgggctttgggagagctcagctgagaattctgttgacattttctttcccttgacaaggcttcaggttcgtctcactatagggagctggctgtgaaaatcagtaataacttgtcaagaagcagtgaaaaatgcgggggggtggaaagagtctaggtaactaatgtcttataatgcatatgtatgtaaatattacaggatttaaggttgaattttttaaaaagaaagttatagtctgtaatttccatttgttataataatgacctttaatcttgtcatttggaaccataaagcatttttatcaggtacctctgttccaagggatttatgtcttagaccatagctgaattgaatgtttgcaaaacactgctataggataaggtggtctttagttttgaacgtgtgaaaggactgcacacttttcagccagggtttgagttactgcccagggtcatcgtctcaaagtaattcaaggagtgatttaacatcagcatttgaaatgtagtcttcatctcctgggatccataaaaaaatgtgaacagggaaatggtggctaagcagagcctgaaataataacttggcaaagaaatgagtttatcaggtcgagtcaaaacatggcatcccctgttacactcaagaaatgctttcttcatgtaaatgtttatacgggcatatataatcacaatgggaacagttaaaaccccctcccttcaaaaaaagaaaatctatatcagttgggtttggttttggttcttcattggctcaaggcagttaactgtctcagtatagcctttggggagatttaacctcattctagccatttttccatcctgaaggccaagaaggactattagaagggtttttgaggggtttcggaggtgagggcccaagacccccataatgacatcattaggtattcttgaaaggtgttaacagaccagcacgctcgatgtgttgtacccttcatttatttttttttctcagcatcccaagttgtccatcagtacattccccttcaccttacctgatcttcatttaatgcccagtctgtaactaatgttctgtttaaagctctcttaatttgttggctatgagtgatttgtgaatctgggatgtaaccctgagtgaggagaaaagggcattgagccagcataaatctgaatgggcagaagccacaaacaaatgggagcagaaaagaagggcgagctcccccgcgccgcaccccgtgtataatccagtgttaacctctgaggaacacctcggctctcccaactgaggagagacaaaagagggattctttttacacccaggctggcgcattttcaagtgacaatctcgggctctagttgcctttgagatatccactctgctctttctcccaggcctcagaccaagaaaaacatgctctcaagattagcccataggcagttcttgtgacctggctgaagaaagaaaggagacctgtttgttttaaaagtcgggcgcaaagtgtcaggtggctttgatttatgacagaaagaggaagaagaaagttggagtaatagcactatccaaataaccctgcccaggaaacttgggggtcaagagagcttatcaagagccttttataggtaagctcttccgtgtgaaagagaaaaggccggaaagagggagagagcccagagagcaggctgcgaactcacttccaatgggattggagtctgttgtattcttaagagatagcctgatatgtggtttataggtgaatcaataaacaccaacaacaacaaaaaaaaaaaaaaaaaaaaaggaagaaaagmaaaaaaggaaaccagccctgtcatggaatttctctccttccctgcacagtaaagacttttgggttttcatggataaaatcaatgtcagtactgaaactcctactctcccctcccgccccactctcccccgttgcccgagatggccaagttcaggcctgtgcaatgccgcttccctctgagcctccctctcaagggccacgcaggcagctgcagcagggccagctgcaggatggggctgccggtcactgaattgtcgttcaaatgcatcatctttgtggcgtctttctcatgcgagcaaagccacgtgctctcctgtctgctgtcacatctgtgcctggattgcttaaatattgtttgtgatggggaggttttaatctggtgatgcagagggaagcagggctgtgggggcacrtttaattggctcccagcagcgtggggrgtgcttctatggtgtgtggggttttttgttgcctccctctagaagtgttaccgttttcacgtcctattaatgtcctctggttgttaaattacagcagcacattacagtgcactgggttccctcctggagtgaatacaaacggagggcatctacttgtatttttagaagttttgggagaatttagtgatttgtggctttgatcaatcctgttgactggtgtatgtctgcgcaaacctgtttcaaataaatcttttgttaaagtaagtgattggactgttttattttggaattttcttttccactaatcagcatttactgccacagggactgcggcctgtaacacaggggtttgtcagcatgtgca

SEQ ID NO: 5477 - DNA, 9803 bp, Homo sapiens
cccccgccgtccccgcgcggtcgcccaccccggcccgacaagcagcttgggcrtccagcccggcccggtccctgcagggagggagcgcaggagctgggggcggctctcccggggcggggctcgctccacaagcgccaggggccgcgcggggcgtgggcgtgggcggggccgggggcggggccggccttggctgccgcggcacaggcggcggcgtctccagggggagccaaggtacgtaggcggcgtccgcctcacccgagcatccttccccgccggtggccgcccgcccgcggcccgcgctcgcagcctcccgcctggcggttgacttctttgtgtcgtattctctgcctgcgccctgtctctgcaggacctgttcgttcttctttgggctataagaaggcagaggatgagatgtcccgggccacgtctgttggagaccagctggaggcacccgcccgcaccatttacctcaaccaaccgcatctcaacaaattccgcgacaaccagatcagtacggccaagtacagcgtgttgacatttctacctcgattcttgtatgagcagattagaagagctgctaatgccttctttctcttcattgccttattacagcaaattccagatgtatctccaacaggaagatataccaccctggtgccattgatcattattttaacaattgcaggcatcaaagagattgtagaagattttaagcgacacaaggcagacaatgcagttaacaaaaagaaaacaatagtgttaagaaatggtatgtggcataccattatgtggaaagaggtggcagtgggagacattgtgaaggtcgtcaatgggcagtatcttccagcagatgtggtcctgctgtcatccagtgaacctcaggcaatgtgttatgttgaaacagctaatctggatggggagacgaaccttaaaatacgtcagggtttgagtcacactgctgacatgcaaacacgtgaagttctgatgaagttatctggaactatagagtgtgaagggcccaaccgccacctctatgacttcactggaaacttgaacttagatgggaaaagccttgttgcccttgggcctgaccagatcttattaagaggtacacagcttagaaatactcagtgggtctttggcatagttgtttatactggacacgacaccaaactcatgcagaattcaaccaaagcrcctctcaagagatcaaatgttgagaaggtgactaacgtgcagatcctggtgttgtttggcatcctcttggtcatggccttggtgagctcggcgggggccctgtactggaacaggtctcatggtgaaaagaactggtacatcaagaagatggacaccacctcagataattttggatacaacctactgacgttcatcatcttatacaacaatcttattcccatcagtctgttggtgactcttgaggttgtgaagtatactcaagcccttttcataaactgggacacagatatgtattatataggaaatgacactcctgccatggccaggacatcaaaccttaatgaagagcttgggcaggtgaaatatctcttttctgacaagactggaacgcttacatgcaatatcatgaactttaagaagtgcagcattgccggagtaacctatggtcacttcccagaattggcaagagagccgtcttcagatgacttctgtgattcctgtgactttgatgaccccaggctgttgaagaacattgaggatcgccatcccacagccccttgcattcaggagttcctcacccttctggccgtgtgccacacggttgttcctgagaaggatggagataacatcatctaccaggcctcttccccagatgaagctgctttggtgaaaggagctaaaaagctgggctttgtcttcacagccagaacaccattctcagtcatcatagaagcgatgggacaggaacaaacattyggaatccttaatgtcctggaattttctagtgacagaaaaagaatgtctgtaattgttcgaactccttcaggacgacttcggctttactgtaaaggggctgataatgtgatttttgagagactttcaaaagactcaaaatatatggaggaaacattatgccatctggaatactttgccacggaaggcttgcggactctctgtgtggcttatgctgatctctctgagaatgagtatgaggagtggctgaaagtctatcaggaagccagcaccatattgaaggacagagctcaacggttggaagagtgttacgagatcattgagaagaatttgctgctacttggagccacagccatagaagatcgccttcaagcaggagttccagaaaccatcgcaacactgttgaaggcagaaattaaaatatgggtgttgacaggagacaaacaagaaactgcgattaatatagggtattcctgccgattggtatcgcagaatatggcccttatcctattgaaggaggactctttggatgccacaagggcagccattactcagcactgcactgaccttgggaatttgctgggcaaggaaaatgacrtggccctsatcatcgatggccacacmctgaagtacgcgctctccttcgaagtccggaggagtttcctggatttggcactctcgtgcaaagcggtcatatgctgcagagtgtctcctctgcagaagtctgagatagtggatgtggtgaagaagcgggtgaaggccatcaccctcgccatcggagacggcgccaacgatgtcgggatgatccagacagcccacgtgggtgtgggaatcagtgggaatgaaggcatgcaggccaccaacaactcggattacgccatcgcacagttttcctacttagagaagcttctgttggttcatggagcctggagctacaaccgggtgaccaagtgcatcttgtactgcttctataagaacgtggtcctgtatattattgagctttggttcgcctttgttaatggattttctgggcagattttatttgaacgttggtgcatcggcctgtacaatgtgattttcaccgctttgccgcccttcactctgggaatctttgagaggtcttgcactcaggagagcatgctcaggtttccccagctctacaaaatcacccagaatggcgaaggcttcaacacaaaggttttctggggtcactgcatcaacgccttggtccactccctcatcctcttctggtttcccatgaaagctctggagcatgatactgtgttgacaagtggtcatgctaccgactatttatttgttggaaatattgtttacacatatgttgttgttactgtttgtctgaaagctggtttggagaccacagcttggactaarttcagtcatctggctgtctggggaagcatgctgacctggctggtgttttttggcatctactcgaccatctggcccaccattcccattgctccagatatgagaggacaggcaactatggtcctgagctccrcacacttctggttgggattatttctggttcctactgcctgtttgattgaagatgtggcatggagagcagccaagcacacctgcaaaaagacattgctggaggaggtgcaggagctggaaaccaagtctcgagtcctgggaaaagcggtgctgcgggatagcaatggaaagaggctgaacgagcgcgaccgcctgatcaagaggctgggccggaagacgcccccgacgctgttccggggcagctccctgcagcagggcgtcccgcatgggtatgctttttctcaagaagaacacggagctgttagtcaggaagaagtcatccgtgcttatgacaccaccaaaaagaaatccaggaagaaataagacaygaattttcctgactgatcttaggaaagagattcagtttgttgcacccagtgttaacacatctttgtcagagaagactggcgtcagcagccaaaacaccaggaaacacatttctgtggccttagccaagcagtttgttagttacatattccctcgcaaacctggagtgcagaccacaggggaagctatctttgccctcccaactcgtctgcagtgcttagcctaacttttgtttatgtcgttatgaagcattcaactgtgctctgtgaggtgtgaaattaaaaacattatgtttcaccaatatttaaacatcagtactagttgtcctgggagaaagggaaaggagttttatgttgcgtgagaggcccatcctgtgtaattggagcagggcacacttgcttcctgttgagttaactcagaggttaagtccaacgggccacatgcagacttcactgtaggcaggttgctctcctgctttgattcctgttttgtgtgtaaaattggcataaacttcttgattgcagtgaaatcacaaaattctmtatcggggtggtcaacctgagaacatttattkgaacctcttagccacatttccagcagggcaaaccaactgatgccctggaagagtcttccgcaccctctccaggtgcactcggcccagtcctgccgccgtgtccaggcgcccctcacccccacacctgctgcatggctggccacaccactcagtgcatggcggccgatgggcmgccaacccaaacccgcgcctttccttgttccactgcagactcagatacagatgcgaaaaattccttcttccaccgcccttctcgttctgtaaagaaagaaaagaaacatagcctttctgcatatattctaaacgtctctctgcctctgtctgacatggggccaccccacaggtcagagtggtggtagaaccccttcaggactcccagccgtggtcaggctctgaatactcccttcccaacatccagactgctgggcctttggcatccacttacattagaacccacgtttgtttcagagcacattttggactttcactgttgggaaatgaatgaatttataacatgcctgcacagcgaaggaacacacctgtcgctcttagctctagagtcagaggatgagtaaacccagatgcaagagtataggacattgagtggggagaacaagacgaccacagaagtcctcagaaggagaaggaaggacacggagacactgagaggaggacacagaggaatcgccaccagatctttgcagtagaaactctgaaatargccttgagacccagacaattgtcatgatcagcccagtgtgtatgagagcttaaacaagaccttcacacacagttctaattgaaaagaattccaaacatttcagggaaacacctttttaaaaaatatactgacatggtttcctttctgtatcccatcagtgttagacacaggtacctatcagaatacggcatatcctgaattatctaagacaaggaagtgaagagcrgaatcactgactttcccaactgcagagtcccacacttaaatctcaacagaacctagatgtcttcaggcatgaatgtgagcacctggagcccttactaaacaacctgcctggagccctgttctctgctctggttgccaaaccagatttttggatggcctaaatacttgtgrgcaactgttactggtgaaaaatgggagtggagagcatgttttggattttcactgtggggaaatgaatgaatttatcacatgactgtgcagcgaaggagcacacctgtcactcttagctctagagtcggaggatgagtcaaccctgtaggaatgattgtgctaaattaggaaataacactttagtgcactttgcttcctaacccttttttgtcagaaatctacaacctactgggcatggaaatgatttaaaatatgatctgcattgactaagaaaactcatcctcacttatgaggtgaccaggatgcagagagggcctgaggggcagcagaacaatgcaattcacaggtgaggctccaaaaagggccatttctttctccccaaggtgcatagaacatttttaaatatcagagtacccagcaagacggaaggactgtcatgcaggaactctaacacaaaatgtgcctatgactaacacgacaaaccaaggtgtatggtttctttgcacacccagaaaggtgatggccaagatacagaggagaaacgaaaactggaattgaatgtgcattaggcatcttaactattcatattttgtytcatttgggaactaagcctatttggaaagagtggattagaaattgaattctttgtcaaacagttagctctgtcttgaacttgaagccttccaaatcagaattatgtatttaagtgtgtgtttgtgtttgtttggggtttttgtttcttacrttagagttcatattttctgggatttaaggatacaggtgtattttcctattctcttgagaagtagactaaacaatatttgcagtgatgacagacgcacacagaagaaaacattagaagagatgcctttctatcctctcatgtggttgagcattcttacagccaaatgactaaattggctgtaaattggtttctaggaggagcagctgtcactacgtgtgatgtataatatttagccagggccaactcaggggctgtgtcatttgtcctatctttaaattgaggtcagagtgtcacacacaacccctcccctggggcagggtggactggactaggttgcatacgctggctgtcagctcagcaaaaatgccacatggggcttgtcactccrccagacactcactgactcacgggctggcaggtcacgctcggttagcgctccagggcctgactctggattgagctaaactggcagaatccactcaggccaacccttggtctactgctgtgtacagacagcccagtcctgtgttgagtctctcttctcctggatgaccctgcaaaaggaagagascagttgtactgtgggcttagttctgggtttccactgcacactgacacgtgccagcaagggtagctgtggaaaacacgtatcaggagagcagagtagtctggatgaatactctgtgctgatcagaacgggctcggtcataatttaggagtggagctgatgtgtctgtcctgcctcaatgcagaatattccaggcttcttgaccagggttatgttcacccatctcccaacacacacatgcacacatgaaaacaaaaacatggtaactcttttggttcggcacaccatacaaaacgtgctttggggcgaggagtgctgtttcttttaacacttgtagaggaatatcctgagaagtgaacctgggctttgggagagctcagctgagaattctgttgacattttctttcccttgacaaggcttcaggttcgtctcactatagggagctggctgtgaaaatcagtaataacttgtcaagaagcagtgaaaaatgcgggggggtggaaagagtctaggtaactaatgtcttataatgcatatgtatgtaaatattacaggatttaaggttgaattttttaaaaagaaagttatagtctgtaatttccatttgttataataatgacctttaatcttgtcatttggaaccataaagcatttttatcaggtacctctgttccaagggatttatgtcttagaccatagctgaattgaatgtttgcaaaacactgctataggataaggtggtctttagttttgaacgtgtgaaaggactgcacacttttcagccagggtttgagttactgcccagggtcatcgtctcaaagtaattcaaggagtgatttaacatcagcatttgaaatgtagtcttcatctcctgggatccataaaaaaatgtgaacagggaaatggtggctaagcagagcctgaaataataacttggcaaagaaatgagtttatcaggtcgagtcaaaacatggcatcccctgttacactcaagaaatgctttcttcatgtaaatgtttatacgggcatatataatcacaatgggaacagttaaaaccccctcccttcaaaaaaagaaaatctatatcagttgggtttggttttggttcttcattggctcaaggcagttaactgtctcagtatagcctttggggagatttaacctcattctagccatttttccatcctgaaggccaagaaggactattagaagggtttttgaggggtttcggaggtgagggcccaagacccccataatgacatcattaggtattcttgaaaggtgttaacagaccagcacgctcgatgtgttgtacccttcatttatttttttttctcagcatcccaagttgtccatcagtacattccccttcaccttacctgatcttcatttaatgcccagtctgtaactaatgttctgtttaaagctctcttaatttgttggctatgagtgatttgtgaatctgggatgtaaccctgagtgaggagaaaagggcattgagccagcataaatctgaatgggcagaagccacaaacaaatgggagcagaaaagaagggcgagctcccccgcgccgcaccccgtgtataatccagtgttaacctctgaggaacacctcggctctcccaactgaggagagacaaaagagggattctttttacacccaggctggcgcattttcaagtgacaatctcgggctctagttgcctttgagatatccactctgctctttctcccaggcctcagaccaagaaaaacatgctctcaagattagcccataggcagttcttgtgacctggctgaagaaagaaaggagacctgtttgttttaaaagtcgggcgcaaagtgtcaggtggctttgatttatgacagaaagaggaagaagaaagttggagtaatagcactatccaaataaccctgcccaggaaacttgggggtcaagagagcttatcaagagccttttataggtaagctcttccgtgtgaaagagaaaaggccggaaagagggagagagcccagagagcaggctgcgaactcacttccaatgggattggagtctgttgtattcttaagagatagcctgatatgtggtttataggtgaatcaataaacaccaacaacaacaaaaaaaaaaaaaaaaaaaaaggaagaaaagmaaaaaaggaaaccagccctgtcatggaatttctctccttccctgcacagtaaagacttttgggttttcatggataaaatcaatgtcagtactgaaactcctactctcccctcccgccccactctcccccgttgcccgagatggccaagttcaggcctgtgcaatgccgcttccctctgagcctccctctcaagggccacgcaggcagctgcagcagggccagctgcaggatggggctgccggtcactgaattgtcgttcaaatgcatcatctttgtggcgtctttctcatgcgagcaaagccacgtgctctcctgtctgctgtcacatctgtgcctggattgcttaaatattgtttgtgatggggaggttttaatctggtgatgcagagggaagcagggctgtgggggcacrtttaattggctcccagcagcgtggggrgtgcttctatggtgtgtggggttttttgttgcctccctctagaagtgttaccgttttcacgtcctattaatgtcctctggttgttaaattacagcagcacattacagtgcactgggttccctcctggagtgaatacaaacggagggcatctacttgtatttttagaagttttgggagaatttagtgatttgtggctttgatcaatcctgttgactggtgtatgtctgcgcaaacctgtttcaaataaatcttttgttaaagtaagtgattggactgttttattttggaattttcttttccactaatcagcatttactgccacagggactgcggcctgtaacacaggggtttgtcagcatgtgca

SEQ ID NO: 5478 - DNA, 1803 bp, Homo sapiens
ggcggaggcagcccctctgtgccgcagcgtttctcagactcttttgctctggaacttagcatgctgcaccacatctatttttatccatctctgactctcctgctctgctgtgtcatccttgatgacaaagtctgtctgtttcccctcgcatcctccccagcacgacgcacagttcctgccaatgggaagtggaaaacctttgctgaaggactgcgctctgcaagcgaagagactcctgctgccaatattgaaacaatcataaatatcttattaggtttcctgggaacaaagccatgctgcaaagggtatgaaagcctgtttggcagggatgaagagtttacatctataactgatagtattatttttctttgcacttacagtacggccaagtacagcgtgttgacatttctacctcgattcttgtatgagcagattagaagagctgctaatgccttctttctcttcattgccttattacagcaaattccagatgtatctccaacaggaagatataccaccctggtgccattgatcattattttaacaattgcaggcatcaaagagattgtagaagattttaagcgacacaaggcagacaatgcagttaacaaaaagaaaacaatagtgttaagaaatggtatgtggcataccattatgtggaaagaggtggcagtgggagacattgtgaaggtcgtcaatgggcagtatcttccagcagatgtggtcctgctgtcatccagtgaacctcaggcaatgtgttatgttgaaacagctaatctggatggggagacgaaccttaaaatacgtcagggtttgagtcacactgctgacatgcaaacacgtgaagttctgatgaagttatctggaactatagagtgtgaagggcccaaccgccacctctatgacttcactggaaacttgaacttagatgggaaaagccttgttgcccttgggcctgaccagatcttattaagaggtacacagcttagaaatactcagtgggtctttggcatagttgtttatactggacacgacaccaaactcatgcagaattcaaccaaagcrcctctcaagagatcaaatgttgagaaggtgactaacgtgcagatcctggtgttgtttggcatcctcttggtcatggccttggtgagctcggcgggggccctgtactggaacaggtctcatggtgaaaagaactggtacatcaagaagatggacaccacctcagataattttggatacaacctactgacgttcatcatcttatacaacaatcttattcccatcagtctgttggtgactcttgaggttgtgaagtatactcaagcccttttcataaactgggacacagatatgtattatataggaaatgacactcctgccatggccaggacatcaaaccttaatgaagagcttgggcagttttgtgaccactctgttttccgtttctctggcagtcacttcccagaattggcaagagagccgtcttcagatgacttctgtcggatgcctcctccctgtagtgattcctgtgactttgatgaccccaggctgttgaagaacattgaggatcgccatcccacagccccttgcattcaggagttcctcacccttctggccgtgtgccacacggttgttcctgagaaggatggagataacatcatctaccaggcctcttccccagtgatatgtcaatgtttcaccaactcccacttgacagatgaagctgctttggtgaaaggagctaaaaagctgggctttgtcttcacagccagaacaccattctcagtcatcatagaagcg

SEQ ID NO: 5479 - DNA, 9505 bp, Homo sapiens
gctcgcagcctcccgcctggcggttgacttctttgtgtcgtattctctgcctgcgccctgtctctgcaggacctgttcgttcttctttgggctataagaaggcagaggatgagatgtcccgggccacgtctgttggagaccagctggaggcacccgcccgcaccatttacctcaaccaaccgcatctcaacaaattccgcgacaaccagatcagtacggccaagtacagcgtgttgacatttctacctcgattcttgtatgagcagattagaagagctgctaatgccttctttctcttcattgccttattacagcaaattccagatgtatctccaacaggaagatataccaccctggtgccattgatcattattttaacaattgcaggcatcaaagagattgtagaagattttaagcgacacaaggcagacaatgcagttaacaaaaagaaaacaatagtgttaagaaatggtatgtggcataccattatgtggaaagaggtggcagtgggagacattgtgaaggtcgtcaatgggcagtatcttccagcagatgtggtcctgctgtcatccagtgaacctcaggcaatgtgttatgttgaaacagctaatctggatggggagacgaaccttaaaatacgtcagggtttgagtcacactgctgacatgcaaacacgtgaagttctgatgaagttatctggaactatagagtgtgaagggcccaaccgccacctctatgacttcactggaaacttgaacttagatgggaaaagccttgttgcccttgggcctgaccagatcttattaagaggtacacagcttagaaatactcagtgggtctttggcatagttgtttatactggacacgacaccaaactcatgcagaattcaaccaaagcrcctctcaagagatcaaatgttgagaaggtgactaacgtgcagatcctggtgttgtttggcatcctcttggtcatggccttggtgagctcggcgggggccctgtactggaacaggtctcatggtgaaaagaactggtacatcaagaagatggacaccacctcagataattttggatacaacctactgacgttcatcatcttatacaacaatcttattcccatcagtctgttggtgactcttgaggttgtgaagtatactcaagcccttttcataaactgggacacagatatgtattatataggaaatgacactcctgccatggccaggacatcaaaccttaatgaagagcttgggcaggtgaaatatctcttttctgacaagactggaacgcttacatgcaatatcatgaactttaagaagtgcagcattgccggagtaacctatggtcacttcccagaattggcaagagagccgtcttcagatgacttctgtgattcctgtgactttgatgaccccaggctgttgaagaacattgaggatcgccatcccacagccccttgcattcaggagttcctcacccttctggccgtgtgccacacggttgttcctgagaaggatggagataacatcatctaccaggcctcttccccagatgaagctgctttggtgaaaggagctaaaaagctgggctttgtcttcacagccagaacaccattctcagtcatcatagaagcgatgggacaggaacaaacattyggaatccttaatgtcctggaattttctagtgacagaaaaagaatgtctgtaattgttcgaactccttcaggacgacttcggctttactgtaaaggggctgataatgtgatttttgagagactttcaaaagactcaaaatatatggaggaaacattatgccatctggaatactttgccacggaaggcttgcggactctctgtgtggcttatgctgatctctctgagaatgagtatgaggagtggctgaaagtctatcaggaagccagcaccatattgaaggacagagctcaacggttggaagagtgttacgagatcattgagaagaatttgctgctacttggagccacagccatagaagatcgccttcaagcaggagttccagaaaccatcgcaacactgttgaaggcagaaattaaaatatgggtgttgacaggagacaaacaagaaactgcgattaatatagggtattcctgccgattggtatcgcagaatatggcccttatcctattgaaggaggactctttggatgccacaagggcagccattactcagcactgcactgaccttgggaatttgctgggcaaggaaaatgacrtggccctsatcatcgatggccacacmctgaagtacgcgctctccttcgaagtccggaggagtttcctggatttggcactctcgtgcaaagcggtcatatgctgcagagtgtctcctctgcagaagtctgagatagtggatgtggtgaagaagcgggtgaaggccatcaccctcgccatcggagacggcgccaacgatgtcgggatgatccagacagcccacgtgggtgtgggaatcagtgggaatgaaggcatgcaggccaccaacaactcggattacgccatcgcacagttttcctacttagagaagcttctgttggttcatggagcctggagctacaaccgggtgaccaagtgcatcttgtactgcttctataagaacgtggtcctgtatattattgagctttggttcgcctttgttaatggattttctgggcagattttatttgaacgttggtgcatcggcctgtacaatgtgattttcaccgctttgccgcccttcactctgggaatctttgagaggtcttgcactcaggagagcatgctcaggtttccccagctctacaaaatcacccagaatggcgaaggcttcaacacaaaggttttctggggtcactgcatcaacgccttggtccactccctcatcctcttctggtttcccatgaaagctctggagcatgatactgtgttgacaagtggtcatgctaccgactatttatttgttggaaatattgtttacacatatgttgttgttactgtttgtctgaaagctggtttggagaccacagcttggactaarttcagtcatctggctgtctggggaagcatgctgacctggctggtgttttttggcatctactcgaccatctggcccaccattcccattgctccagatatgagaggacaggcaactatggtcctgagctccrcacacttctggttgggattatttctggttcctactgcctgtttgattgaagatgtggcatggagagcagccaagcacacctgcaaaaagacattgctggaggaggtgcaggagctggaaaccaagtctcgagtcctgggaaaagcggtgctgcgggatagcaatggaaagaggctgaacgagcgcgaccgcctgatcaagaggctgggccggaagacgcccccgacgctgttccggggcagctccctgcagcagggcgtcccgcatgggtatgctttttctcaagaagaacacggagctgttagtcaggaagaagtcatccgtgcttatgacaccaccaaaaagaaatccaggaagaaataagacaygaattttcctgactgatcttaggaaagagattcagtttgttgcacccagtgttaacacatctttgtcagagaagactggcgtcagcagccaaaacaccaggaaacacatttctgtggccttagccaagcagtttgttagttacatattccctcgcaaacctggagtgcagaccacaggggaagctatctttgccctcccaactcgtctgcagtgcttagcctaacttttgtttatgtcgttatgaagcattcaactgtgctctgtgaggtgtgaaattaaaaacattatgtttcaccaatatttaaacatcagtactagttgtcctgggagaaagggaaaggagttttatgttgcgtgagaggcccatcctgtgtaattggagcagggcacacttgcttcctgttgagttaactcagaggttaagtccaacgggccacatgcagacttcactgtaggcaggttgctctcctgctttgattcctgttttgtgtgtaaaattggcataaacttcttgattgcagtgaaatcacaaaattctmtatcggggtggtcaacctgagaacatttattkgaacctcttagccacatttccagcagggcaaaccaactgatgccctggaagagtcttccgcaccctctccaggtgcactcggcccagtcctgccgccgtgtccaggcgcccctcacccccacacctgctgcatggctggccacaccactcagtgcatggcggccgatgggcmgccaacccaaacccgcgcctttccttgttccactgcagactcagatacagatgcgaaaaattccttcttccaccgcccttctcgttctgtaaagaaagaaaagaaacatagcctttctgcatatattctaaacgtctctctgcctctgtctgacatggggccaccccacaggtcagagtggtggtagaaccccttcaggactcccagccgtggtcaggctctgaatactcccttcccaacatccagactgctgggcctttggcatccacttacattagaacccacgtttgtttcagagcacattttggactttcactgttgggaaatgaatgaatttataacatgcctgcacagcgaaggaacacacctgtcgctcttagctctagagtcagaggatgagtaaacccagatgcaagagtataggacattgagtggggagaacaagacgaccacagaagtcctcagaaggagaaggaaggacacggagacactgagaggaggacacagaggaatcgccaccagatctttgcagtagaaactctgaaatargccttgagacccagacaattgtcatgatcagcccagtgtgtatgagagcttaaacaagaccttcacacacagttctaattgaaaagaattccaaacatttcagggaaacacctttttaaaaaatatactgacatggtttcctttctgtatcccatcagtgttagacacaggtacctatcagaatacggcatatcctgaattatctaagacaaggaagtgaagagcrgaatcactgactttcccaactgcagagtcccacacttaaatctcaacagaacctagatgtcttcaggcatgaatgtgagcacctggagcccttactaaacaacctgcctggagccctgttctctgctctggttgccaaaccagatttttggatggcctaaatacttgtgrgcaactgttactggtgaaaaatgggagtggagagcatgttttggattttcactgtggggaaatgaatgaatttatcacatgactgtgcagcgaaggagcacacctgtcactcttagctctagagtcggaggatgagtcaaccctgtaggaatgattgtgctaaattaggaaataacactttagtgcactttgcttcctaacccttttttgtcagaaatctacaacctactgggcatggaaatgatttaaaatatgatctgcattgactaagaaaactcatcctcacttatgaggtgaccaggatgcagagagggcctgaggggcagcagaacaatgcaattcacaggtgaggctccaaaaagggccatttctttctccccaaggtgcatagaacatttttaaatatcagagtacccagcaagacggaaggactgtcatgcaggaactctaacacaaaatgtgcctatgactaacacgacaaaccaaggtgtatggtttctttgcacacccagaaaggtgatggccaagatacagaggagaaacgaaaactggaattgaatgtgcattaggcatcttaactattcatattttgtytcatttgggaactaagcctatttggaaagagtggattagaaattgaattctttgtcaaacagttagctctgtcttgaacttgaagccttccaaatcagaattatgtatttaagtgtgtgtttgtgtttgtttggggtttttgtttcttacrttagagttcatattttctgggatttaaggatacaggtgtattttcctattctcttgagaagtagactaaacaatatttgcagtgatgacagacgcacacagaagaaaacattagaagagatgcctttctatcctctcatgtggttgagcattcttacagccaaatgactaaattggctgtaaattggtttctaggaggagcagctgtcactacgtgtgatgtataatatttagccagggccaactcaggggctgtgtcatttgtcctatctttaaattgaggtcagagtgtcacacacaacccctcccctggggcagggtggactggactaggttgcatacgctggctgtcagctcagcaaaaatgccacatggggcttgtcactccrccagacactcactgactcacgggctggcaggtcacgctcggttagcgctccagggcctgactctggattgagctaaactggcagaatccactcaggccaacccttggtctactgctgtgtacagacagcccagtcctgtgttgagtctctcttctcctggatgaccctgcaaaaggaagagascagttgtactgtgggcttagttctgggtttccactgcacactgacacgtgccagcaagggtagctgtggaaaacacgtatcaggagagcagagtagtctggatgaatactctgtgctgatcagaacgggctcggtcataatttaggagtggagctgatgtgtctgtcctgcctcaatgcagaatattccaggcttcttgaccagggttatgttcacccatctcccaacacacacatgcacacatgaaaacaaaaacatggtaactcttttggttcggcacaccatacaaaacgtgctttggggcgaggagtgctgtttcttttaacacttgtagaggaatatcctgagaagtgaacctgggctttgggagagctcagctgagaattctgttgacattttctttcccttgacaaggcttcaggttcgtctcactatagggagctggctgtgaaaatcagtaataacttgtcaagaagcagtgaaaaatgcgggggggtggaaagagtctaggtaactaatgtcttataatgcatatgtatgtaaatattacaggatttaaggttgaattttttaaaaagaaagttatagtctgtaatttccatttgttataataatgacctttaatcttgtcatttggaaccataaagcatttttatcaggtacctctgttccaagggatttatgtcttagaccatagctgaattgaatgtttgcaaaacactgctataggataaggtggtctttagttttgaacgtgtgaaaggactgcacacttttcagccagggtttgagttactgcccagggtcatcgtctcaaagtaattcaaggagtgatttaacatcagcatttgaaatgtagtcttcatctcctgggatccataaaaaaatgtgaacagggaaatggtggctaagcagagcctgaaataataacttggcaaagaaatgagtttatcaggtcgagtcaaaacatggcatcccctgttacactcaagaaatgctttcttcatgtaaatgtttatacgggcatatataatcacaatgggaacagttaaaaccccctcccttcaaaaaaagaaaatctatatcagttgggtttggttttggttcttcattggctcaaggcagttaactgtctcagtatagcctttggggagatttaacctcattctagccatttttccatcctgaaggccaagaaggactattagaagggtttttgaggggtttcggaggtgagggcccaagacccccataatgacatcattaggtattcttgaaaggtgttaacagaccagcacgctcgatgtgttgtacccttcatttatttttttttctcagcatcccaagttgtccatcagtacattccccttcaccttacctgatcttcatttaatgcccagtctgtaactaatgttctgtttaaagctctcttaatttgttggctatgagtgatttgtgaatctgggatgtaaccctgagtgaggagaaaagggcattgagccagcataaatctgaatgggcagaagccacaaacaaatgggagcagaaaagaagggcgagctcccccgcgccgcaccccgtgtataatccagtgttaacctctgaggaacacctcggctctcccaactgaggagagacaaaagagggattctttttacacccaggctggcgcattttcaagtgacaatctcgggctctagttgcctttgagatatccactctgctctttctcccaggcctcagaccaagaaaaacatgctctcaagattagcccataggcagttcttgtgacctggctgaagaaagaaaggagacctgtttgttttaaaagtcgggcgcaaagtgtcaggtggctttgatttatgacagaaagaggaagaagaaagttggagtaatagcactatccaaataaccctgcccaggaaacttgggggtcaagagagcttatcaagagccttttataggtaagctcttccgtgtgaaagagaaaaggccggaaagagggagagagcccagagagcaggctgcgaactcacttccaatgggattggagtctgttgtattcttaagagatagcctgatatgtggtttataggtgaatcaataaacaccaacaacaacaaaaaaaaaaaaaaaaaaaaaggaagaaaagmaaaaaaggaaaccagccctgtcatggaatttctctccttccctgcacagtaaagacttttgggttttcatggataaaatcaatgtcagtactgaaactcctactctcccctcccgccccactctcccccgttgcccgagatggccaagttcaggcctgtgcaatgccgcttccctctgagcctccctctcaagggccacgcaggcagctgcagcagggccagctgcaggatggggctgccggtcactgaattgtcgttcaaatgcatcatctttgtggcgtctttctcatgcgagcaaagccacgtgctctcctgtctgctgtcacatctgtgcctggattgcttaaatattgtttgtgatggggaggttttaatctggtgatgcagagggaagcagggctgtgggggcacrtttaattggctcccagcagcgtggggrgtgcttctatggtgtgtggggttttttgttgcctccctctagaagtgttaccgttttcacgtcctattaatgtcctctggttgttaaattacagcagcacattacagtgcactgggttccctcctggagtgaatacaaacggagggcatctacttgtatttttagaagttttgggagaatttagtgatttgtggctttgatcaatcctgttgactggtgtatgtctgcgcaaacctgtttcaaataaatcttttgttaaagtaagtgattggactgttttattttggaattttcttttccactaatcagcatttactgccacagggactgcggcctgtaacacaggggtttgtcagcatgtgca

SEQ ID NO: 5480 - DNA, 1921 bp, Homo sapiens
waacttatcagaagtcaacttatccttgttgacttatccttgttacagtttcaggaggtgcaaatgttcattgatgaaaattccagcaaccttccttacagtagcaataatagaggattcgtgcctgttagagccatagcgcttgagcaggcaaacaggcctcatctgccrtgctccttgggctctcatcttcataaggaggacagtattgtgggaagatgtagcaaaaggtatcctgtgggtccttttattcatgtttgtttcatgtcttccacatacctgataactcttacagaacagtacgtgctggagtggaggagcaggtgggccaggcatttgggaggcactgcagacgctgaagagaacagacctttgccttgcaggaatcagtccttccaggaagacaggcctggaaatggtgatttctgggcatgggctgagtattctgatgggaagagagtggaggagggggaagtgaagctggcagaggggaaggagggcctgacggagatgggagaagcatcagaggaccccgccaggaaggagacgacactggaggtggtcttcaggatagagctgaagttagccgaggggagtccagatgcgagggagtttgcggtgcaggttttgtctggagaaaagcagagcagtgggaatgtggcatacactaaacctctagggagacaatacacctactctccaggagatggagtggtgggaggagggaggaattttccaaatagcccacaggatcatgaaggcttttcctcacatgttggtttttatcacctcggaccattggtcacagaatctggtctggaccttgtgccactgtgggaggatggccataggagaaaaagaaaaagcatcgctccctgtggctccagtggacacacgcgtgctttcctcacctttctatcaccagagccccaagacctagcatgcacttgccactgtgccctggaagctgagtcactctcatctaagtggatggcagggggttcctgggtggagttccttgtaacccctctggctcaagtgagctcagtgtacaaatctacaatcgagatccagcccctctttgacaaccaggcaggttttctccttatttttgctttttgggaaaggcagctgttggatgttcatagattgtactttaagccattggaatcctcacttgacttacttgagatccaaatcccagagtggcaagcccaagtgtctcctctgcagaagtctgagatagtggatgtggtgaagaagcgggtgaaggccatcaccctcgccatcggagacggcgccaacgatgtcgggatgatccagacagcccacgtgggtgtgggaatcagtgggaatgaaggcatgcaggccaccaacaactcggattacgccatcgcacaggtgytgggacaccccctggctaggtgcttaaggtcagggagaagcagtgatttacagctgtcgccttctctgtagttatgagaggggtgctgtccaggaccacccctgtgaggtgaattgccaagagcacgagctgggtttgggccataatgaccccatggtcagtagcaatcagcctcctgcagttaggccaagttcagtccagcggaggctgatccgagcctcgcatgccagggctcctgatgtgctgtactgcactggtggcctgaggatgaaagaaagattgcgatacatcatgaatagatgcctgctcatcggctgggtagcaggaattcccttgtgtttctacggtgttgaggtgtttgaagaatgtgttcaccttaatcacatgaacacaaggaaaaatggctacacaccccttcaacctgaaatcaggagtcactcctcaacgtcactcaaggtcatggacgatagtgtaaagaggtatcgtagggtcayggaccatcgtgtaaaagggtat

SEQ ID NO: 5481 - DNA, 2235 bp, Homo sapiens
agttcgcctcygcagcctctgcgrggaagtgccggggctgctcgaggctcagttcttaggactgcaaggaggcagccccggcgtgcggcggtgcgcacagtctagagtggccagggcgcgagagtgcaacgtcctcctggccccgagcgcgtcgtcgcgccccgggagcagaccctcgcccagcagttaccgccgtcccgactttccgttccagttgcagctcctgccgggcaacatgtcaagagccgccgccgctacagctgccgccgccacctggggaagagcagcagcagcagcggcggccgcgggcacacgggggcaataaaccgagccacccgggcgtccagcgtgccggggaaccctctctgcgctcactgcccggcgggacccacgccatgtgctgagccatgtccctggccgcgcccgcgggcagcgcatggggcagcgcctgagtggcggcagatcttgcctcgatgtccccggccggctcctaccgcagccgccgccgcccccgccgccggtgaggaggaagctcgcgctgctcttcgccatgctctgcgtctggctctatatgttcctgtactcgtgcgccggctcctgcgccgccgcgccggggctgctgctcctgggctctgggtcccgcgccgcacacgacccgccagccctggccacagctccggacsggacgccccccaggctgccgttccgggcgccgccagccaccccactggcttcaggcaaggagatggccgagggcgctgcgagcccrgaggagcagagtcccgaggtgccggactccccaagccccatctccagctttttcagtgggtctgggagcaagcagctgccgcaggccatcatcatcggcgtgaagaagggcggcacgcgggcgctgctggagtttctgcgcgtgcaccccgacgtgcgcgccgtgggcgccgagccccatttcttcgatcgcagctacgacaagggcctcgcttggtaccgggacctgatgcccagaaccctggacgggcagatcaccatggagaagacgcccagttacttcgtcacgcgggaggccccygcgcgcatctcggccatgtccaaggacaccaagctcatcgtggtggtgcgggacccggtgaccagggccatctcggactacacgcagacgctgtccaagcggcccgacatccccaccttcgagagcttgacgttcaaaaacaggacagcgggcctcatcgacacgtcgtggagcgccatccagatcggcatctacgccaagcacctggagcactggctgcgccacttccccatccgccagatgctcttcgtgagcggcgagcggctcatcagcgacccggccggggagctgggccgcgtgcaagacttcctgggcctcaagaggatcatcacggacaagcacttctacttcaacaagaccaagggcttcccctgcctgaagaaggcggagggcagcagccggccccattgcctgggcaagaccaagggcaggacccatcctgagatcgaccgcgaggtggtgcgcaggctgcgcgagttctaccggcctttcaacctcaagttctaccagatgaccgggcacgactttggctgggattgagcagacccgggctatgtaccttacccacgtggcttatctattgacagagattatatgtatgtaaaatgtacagaaatctattttataataatttatttttaattcataagcaattaattcactaagctgcctagccacactctttagagagttagcttcataatctgttaacattccaaagtgtttaactctagtatttcgttytcttcttcacaattgatggtgcttctattttttcttctcccctacctgttatatttaaaacaaagaaaagcacaacttgagatttttgttgttacgggtattcagccttcagtcaccgtctgagttctccagttgctgcctccttgtcttgtcttgggtctcccattccagcttccctgtctcttcctgcctgtgtacctcgtaggaacgctgagctgcctcaacagggctgtattctgaagggcaggcctcatgcagcagcctccttgcagatgtggtgtcccgtccaatgatgtagcctgaaagccacagccctagggttctgtccctccctccattcagcacatggggaaatttctcactccctttacagggacatccacatcctttttttttcttttttttttttttttttttttttg

SEQ ID NO: 5482 - DNA, 2808 bp, Homo sapiens
agttcgcctcygcagcctctgcgrggaagtgccggggctgctcgaggctcagttcttaggactgcaaggaggcagccccggcgtgcggcggtgcgcacagtctagagtggccagggcgcgagagtgcaacgtcctcctggccccgagcgcgtcgtcgcgccccgggagcagaccctcgcccagcagttaccgccgtcccgactttccgttccagttgcagctcctgccgggcaacatgtcaagagccgccgccgctacagctgccgccgccacctggggaagagcagcagcagcagcggcggccgcgggcacacgggggcaataaaccgagccacccgggcgtccagcgtgccggggaaccctctctgcgctcactgcccggcgggacccacgccatgtgctgagccatgtccctggccgcgcccgcgggcagcgcatggggcagcgcctgagtggcggcagatcttgcctcgatgtccccggccggctcctaccgcagccgccgccgcccccgccgccggtgaggaggaagctcgcgctgctcttcgccatgctctgcgtctggctctatatgttcctgtactcgtgcgccggctcctgcgccgccgcgccggggctgctgctcctgggctctgggtcccgcgccgcacacgacccgccagccctggccacagctccggacsggacgccccccaggctgccgttccgggcgccgccagccaccccactggcttcaggcaaggagatggccgagggcgctgcgagcccrgaggagcagagtcccgaggtgccggactccccaagccccatctccagctttttcagtgggtctgggagcaagcagctgccgcaggccatcatcatcggcgtgaagaagggcggcacgcgggcgctgctggagtttctgcgcgtgcaccccgacgtgcgcgccgtgggcgccgagccccatttcttcgatcgcagctacgacaagggcctcgcttggtaccgggacctgatgcccagaaccctggacgggcagatcaccatggagaagacgcccagttacttcgtcacgcgggaggccccygcgcgcatctcggccatgtccaaggacaccaagctcatcgtggtggtgcgggacccggtgaccagggccatctcggactacacgcagacgctgtccaagcggcccgacatccccaccttcgagagcttgacgttcaaaaacaggacagcgggcctcatcgacacgtcgtggagcgccatccagatcggcatctacgccaagcacctggagcactggctgcgccacttccccatccgccagatgctcttcgtgagcggcgagcggctcatcagcgacccggccggggagctgggccgcgtgcaagacttcctgggcctcaagaggatcatcacggacaagcacttctacttcaacaagaccaagggcttcccctgcctgaagaaggcggagggcagcagccggccccattgcctgggcaagaccaagggcaggacccatcctgagatcgaccgcgaggtggtgcgcaggctgcgcgagttctaccggcctttcaacctcaagttctaccagatgaccgggcacgactttggctgggattgagcagacccgggctatgtaccttacccacgtggcttatctattgacagagattatatcataacatggcttgaagtaaaaggcagtatccaagtccttcacctggtcttgccctgtctactttctgatcattctgatggtctgatgtggctgttgatgtggaactgcagaagagttcagagaagagtatgcaacaaagccataggaaaacacacaggagcttttccctccccttcaggtccccgccctctttccaagctggacaattttttattaagttgtttattccctgccttaaaactgaaacaggaaattttctggtagaaggagggtcatttagtcacgaacactgaagtgggtcaaaattctattctgggtcaaatccttgaattcaaacagatgtccataatcagtactgatggaatagagcaagtttttctatgtaagacaaataaatcaaacatcatgtgcatctcctcataagggtctgcaagggtctgatggtttaaagttcctaacagatctggttgcagcatctgccggagcttgcaccccatcatcggacggtcatcttcctgctgcagaagttaggtaacataagacttagatttcttcctgttctagcaatctgcaagaccaccaggcttaactttttagctgccagaagacaaacccccttttctgtttcggcaatttgtcctggcacgtgttttggacttcctccgatttacacgaaaagctctgatattcattggagtactttattttttttcctcagttttgtttcttttctcatgtaaaaacaaacaaaaaggtcaacaaaaaaaaattgaggtttttcttgtttctatctagttcatgctttctttgcggtgtttgaacagtagtctgttaacttagtaggtggtacctggaaaggtattttaagtatagtgactgtttaataaatacttaattggatgatggaggaggagaaattgttttcttcccaggattctctttgggggtcattttgtgtgacagatatattttagacatttggagaaacagtttcagatcctgccaggatatttttgtaaaaaaggaaaatggaagattccaataaactagaaacagtacgtatctaagatgctgacacagaagctaatgtgacttttcagcttatcaagaggatggccaataaaacttaaaggtgtggttag

SEQ ID NO: 5483 - DNA, 2629 bp, Homo sapiens
aggacgccgcggtccgccggatctccagcgctcagtccgcgccgcaggtggtgcttgtctgcagagtcatgacctctttccgcttggccctcatccagcttcagatttcttccatcaaatcagataacgtcactcgcgcttgtagcttcatccgggaggcagcaacgcaaggagccaaaatagtttctttgccggaatgctttaattctccatatggagcgaaatattttcctgaatatgcagagaaaattcctggtgaatccacacagaagctttctgaagtagcaaaggaatgcagcatatatctcattggaggctctatccctgaagaggatgckgggaaattatataacacctgtgctgtgtttgggcctgatggaactttactagcaaagtatagaaagatccatctgtttgacattgatgttcctggaaaaattacatttcaagaatctaaaacattgagtccgggtgatagtttctccacatttgatactccttactgcagagtgggtctgggcatctgctacgacatgcggtttgcagagcttgcacaaatctacgcacagagaggctgccagctgttggtatatccaggagcttttaatctgaccactggaccagcccattgggagttacttcagcgaagccgggctgttgataatcaggtgtatgtggccacagcctctcctgcccgggatgacaaagcctcctatgttgcctggggacacagcaccgtggtgaacccttggggggaggttctagccaaagctggcacagaagaagcaatcgtgtattcagacatagacctgaagaagctggctgaaatacgccagcaaatccccgtttttagacagaagcgatcagacctctatgctgtggagatgaaaaagccctaaagtttatgtttctaatgtgtcacagaataggacgatatgattctacaacataatcaactccctattaaattctttaatgaagattttttttttaattcggccttgtccttcctaggttctctattgagatgagaaagcctcattatgctgacattttccacgccacattaaatagttaaaaaggatgcagcctggagccagagagcagaaagctgggctggttctgaagcttcttccatacttaagttgcctccaagcagtttgtgaaagtatcagatcttggtatcctggtgattgattcacctaatataaatatatttgtgtcatgaacctcttatcccgttgctggagttgtaatctccatcatctagaaaacgtggtctggtgctattcttttccaagcagtaccttgaagttccatttttggttcatgagtagctatagaacgcaaggtgatacatctttggtgtttgccagagaagttggcagccccacccctcctaccagcctttgcactcttcaaatttaaaaaggagctacttatcaaccccaggcccttctggtcttagaggaaggactgggccaacaaagagcaccatgggagaatggcagtggtggcatttagtgaagacaatttagtatgaatstctgcaaaagatttttttgatagcgttgagtgtctgaaagtcccattatttttcttttttctttttccccagtaacactttctagctccacggataaggaatcactgaacctagtagttcttagacagcttggtttgagaatccttttgcggttaaaaattagggactgagccaggcgcagtagcatgcgcctgtagtcctagccacattggaggctgaggtaggaggatcccttgagtccacaagtttgagttcagccagagaccctatctcactatatatatgtatctcaaagacttcaatgggtttttgcttacatgggccagtaattgttgaacaaccagctatttgatttgagctatctgcatgacacctctaaacacagagttgggaatagatgtgcacaatcagctctggggagctggtgcaatcctgccctagcacaccactggtttaagatagatatatcatatagatatttaccatttaccatattggaaagtaaaatggagaaaaatttaaaacacaagatacatgagcacacattccattagctattaaggtgatggacacggtgtccaaatgacacggtgtcatttaacttctggaaaacaacactgtgtactgagaacaagagaaagacaaatgacttttttaaattaagtttttaatttacaattgatgcataattttactttaaaaaaataagtgtgcaatttggtaaactttgacatatacagctataaaccactccaatcaagataacatatttaccacccccaacagtttccatgtgctgtattataatccctctggctagtcctttgtcaatcactgataaattttattactatagattagcttgcattttctaaaattatataaaaatgaaatcatgccattagtgctttttctgtatgtcttctttcactcaaaatcacttggaactcaaaattacttctttcactcaaaatcactcaaaattacatactctgtatgtcttctttcactcaaaattacttctttcatttttagacggaagcatttagacctcaaaattacttggagattcatctggtatgt

SEQ ID NO: 5484 - DNA, 2684 bp, Homo sapiens
aggacgccgcggtccgccggatctccagcgctcagtccgcgccgcaggtggtgcttgtctgcagagtcatgacctctttccgcttggccctcatccagcttcagatttcttccatcaaatcagataacgtcactcgcgcttgtagcttcatccgggaggcagcaacgcaaggagccaaaatagtttctttgccggaatgctttaattctccatatggagcgaaatattttcctgaatatgcagagaaaattcctggtgaatccacacagaagctttctgaagtagcaaaggaatgcagcatatatctcattggaggctctatccctgaagaggatgckgggaaattatataacacctgtgctgtgtttgggcctgatggaactttactagcaaagtatagaaagatccatctgtttgacattgatgttcctggaaaaattacatttcaagaatctaaaacattgagtccgggtgatagtttctccacatttgatactccttactgcagagtgggtctgggcatctgctacgacatgcggtttgcagagcttgcacaaatctacgcacagagaggctgccagctgttggtatatccaggagcttttaatctgaccactggaccagcccattgggagttacttcagcgaagccgggctgttgataatcaggtgtatgtggccacagcctctcctgcccgggatgacaaagcctcctatgttgcctggggacacagcaccgtggtgaacccttggggggaggttctagccaaagctggcacagaagaagcaatcgtgtattcagacatagacctgaagaagctggctgaaatacgccagcaaatccccgtttttagacagaagcgatcagacctctatgctgtggagatgaaaaagccctaaagtttatgtttctaatgtgtcacagaataggacgatatgattctacaacataatcaactccctattaaattctttaatgaagattttttttttaattcggccttgtccttcctaggttctctattgagatgagaaagcctcattatgctgacattttccacgccacattaaatagttaaaaaggatgcagcctggagccagagagcagaaagctgggctggttctgaagcttcttccatacttaagttgcctccaagcagtttgtgaaagtatcagatcttggtatcctggtgattgattcacctaatataaatatatttgtgtcatgaacctcttatcccgttgctggagttgtaatctccatcatctagaaaacgtggtctggtgctattcttttccaagcagtaccttgaagttccatttttggttcatgagtagctatagaacgcaaggtgatacatctttggtgtttgccagagaagttggcagccccacccctcctaccagcctttgcactcttcaaatttaaaaaggagctacttatcaaccccaggcccttctggtcttagaggaaggactgggccaacaaagagcaccatgggagaatggcagtggtggcatttagtgaagacaatttagtatgaatstctgcaaaagatttttttgatagcgttgagtgtctgaaagtcccattatttttcttttttctttttccccagtaacactttctagctccacggataaggaatcactgaacctagtagttcttagacagcttggtttgagaatccttttgcggttaaaaattagggactgagccaggcgcagtagcatgcgcctgtagtcctagccacattggaggctgaggtaggaggatcccttgagtccacaagtttgagttcagccagagaccctatctcactatatatatgtatctcaaagacttcaatgggtttttgcttacatgggccagtaattgttgaacaaccagctatttgagaaaaagccctgattttgctgcttttcatggtgtaaatacttaaccatggctgagtttgagctatctgcatgacacctctaaacacagagttgggaatagatgtgcacaatcagctctggggagctggtgcaatcctgccctagcacaccactggtttaagatagatatatcatatagatatttaccatttaccatattggaaagtaaaatggagaaaaatttaaaacacaagatacatgagcacacattccattagctattaaggtgatggacacggtgtccaaatgacacggtgtcatttaacttctggaaaacaacactgtgtactgagaacaagagaaagacaaatgacttttttaaattaagtttttaatttacaattgatgcataattttactttaaaaaaataagtgtgcaatttggtaaactttgacatatacagctataaaccactccaatcaagataacatatttaccacccccaacagtttccatgtgctgtattataatccctctggctagtcctttgtcaatcactgataaattttattactatagattagcttgcattttctaaaattatataaaaatgaaatcatgccattagtgctttttctgtatgtcttctttcactcaaaatcacttggaactcaaaattacttctttcactcaaaatcactcaaaattacatactctgtatgtcttctttcactcaaaattacttctttcatttttagacggaagcatttagacctcaaaattacttggagattcatctggtatgt

SEQ ID NO: 5485 - DNA, 2105 bp, Homo sapiens
agcacttcctcatagaccttggatgtgggaggattgcattcagtctagttcctggttgccggctgaaataacctgctctccaaaatgtccacaaaagtgacttaagtcaggttcccccaaaccagacaccaagacaagaatccatgtgtgtgtgactgaaggaagtgctgggagagccccagctgcagcctggatgtgaactgcaactccaaagtgtgtccagactcaaggcaagggcactaggctttccagacctcctactaagtcattgatccagcactgccctgccaggacataaatccctggcacctcttgctctctgcaaaggagggcaaagcagcttcaggagcccttgggagtcctccaaagagagtctagggtacaggtccgaaagtagaagaacacagaaggcaggccaggggcactgtgagatggtaaaagagatctgaagggatccaggggatcatggacattgaagcatatctkgaaagaattggctataagaagtctaggaacaaattggacttggaaacattaactgacattcttcaacaccagatccgagctgttccctttgagaaccttaacatccattgtggggatgccatggacttaggcttagaggccatttttgatcaagttgtgagaagaaatyggggtggatggtgtctccaggtcaatcatcttctgtactgggctctgaccactattggttttgagaccacgatgttgggagggtatgtttacagcactccagccaaaaaatacagcactggcatgattcaccttctcctgcaggtgaccattgatggcaggaactacattgtcgatgctgggtttggacgctcataccagatgtggcagcctctggagttaatttctgggaaggatcagcctcaggtgccttgtgtcttccgtttgacrgaagagaatggattctggtatctagaccaaatcagaagggaacagtacattccaaatgaagaatttcttcattctgatctcctagaagacagcaaatacyraaaaatctactcctttactcttaagcctcgaacaattgaagattttgagtctatgaatacatacctgcagacatctccatcatctgtgtttactagtaaatcattttgttccttgcagaccccagatggggttcactgtttggtgggcttcaccctcacccataggagattcaattataaggacaatacagatctaatagagttcaagactctgagygaggaagaaatagaaaaagtgctgaaaaatatatttaatatttccttgcagagaaagcttgtgcccaaacatggtgatagattttttactatttagaataaggagtaaaacaatcttgtctatttgtcatccagctcaccagttatcaactgaygacctatcatgtatcttctgtacccttaccttattttgaagaaaatcctagacatcaaatcatttcacctataaaaatgtcawcatatataattaaacagctttttaaagaaacataaccacaaaccttttcaaataataataataataataataawaaatgtmttttaaagatggcctgtggttatcttggaaattggtgatttatgctagaaagcttttaatgttggtttattgttgaattcctagaaaagttttattggtagatgagtaaataaaatattgtaaaaaaacttattgtctataaagtatattaaaacattgttggctaatataatttgaaaaaaagtggttttttggaagacttaggatattatggtgctacataatttttcctcgatgctctcttcctctcatctttcttgtctcttaaattactttacttccttgcacactttgccatacaagaatgaacatgagcttttcttgtgtagatctgagttgaaatcctgtggacactgggcgaattactttttagatctgtagctctgactcctcaggcataaaatgggaataatgcttttacagtttagtggcggaactaaactcccaaaattatttgttatatggatcaagtaataaygtcagtaatgtttttggtacaaagtcattatttaataaaagttattgttccatcttgcttgcccccc

SEQ ID NO: 5486 - DNA, 2823 bp, Homo sapiens
gaaatccaacccggtcacctacccgcgcgactgtgtccacggatggcacgaaagccaagcgagtccccctgccgagctactcgcgtccgcctcctcccaagctgagctctgctccgcccacctgagtccttcgccagttaggaggaaacacagccgcttaatgaactgctgcatcgggctgggagagaaagctcgcgggtcccaccgggcctcctacccaagtctcagcgcgcttttcaccgaggcctcarttctgggatttggcarctttgctgtgaaagcccaagtgggtaaccaacagcttggaggacccgagtggattcgattctctctcactcctcggccactcaactgctccttgtccctgactccgcgagggcaaagatgggtcagggtgggatgttacattagtgttgagactctttggatccgtttcgtgggtaccgaggacgcctgggtacgcgggacaggctgcacccgcctgctagaggcgccccatcgaggcgccacgggtcgcgggtcacgcggcggagggggcgtggcctgcccccggcccagccggctcttctttgcctctgctggagtccggggagtggcgttggctgctagagcgatgccgggccggagttgcgtcgccttagtcctcctggctgccgccgtcagctgtgccgtcgcgcagcacgcgccgccgtggacagaggactgcagaaaatcaacctatcctccttcaggaccaacgtacagaggtgcagttccatggtacaccataaatcttgacttaccaccctacaaaagatggcatgaattgatgcttgacaaggcaccaatgctaaaggttatagtgaattctctgaagaatatgataaatacattcgtgccaagtggaaaarttatgcaggtggtggatgaaaaattgcctggcctacttggcaactttcctggcccttttgaagaggaaatgaagggtattgccgctgttactgawatacctttaggagagattatttcattcaatattttttatgaattatttaccatttgtacttcaatagtagcagaagacaaaaaaggtcatctaatacatgggagaaacatggattttggagtatttcttgggtggaacataaataatgatacctgggtcataactgagcaactaaaacctttaacagtgaatttggatttccaaagaaacaacaaaactgtcttcaaggcttcaagctttgctggctatgtgggcatgttaacaggattcaaaccaggactgttcagtcttacrctgaatgaacgtttcagtataaatggtggttatctgggtattctagaatggattctgggaaagaaagatgycatgtggatagggttcctcactagaacagttctggaaaatagcacaagttatgaagaagccaagaatttattgaccaagaccaagatattggccccagcctactttatcctgggaggcaaccagtctggggaaggttgtgtgattacacgagacagaaaggaatcattggatgtatatgaactcgatgctaagcagggtagatggtatgtggtacaaacaaattatgaccgttggaaacatcccttcttccttratgatcgcagaacgcctgcaaagatgtgtytgaaccgcaccagccaagagaatatctcatttgaaaccatgtatgatgtcctgtcaacaaaacctgtcctcaacaagctgaccrtatacacaaccttgatagatgttaccaaaggtcaattcgaaacttacctgcgggactgccctgacccttgtataggttggtgagcacacgtctggcctacagaatgcggcctctgagacatgaagacaccatctccatgtgaccgaacactgcagctgtctgaccttccaaagactaagactcgcggcaggttctctttgagtcaawagcttgtcttcgtccatctgttgacaaatgacagaycttttttttttccccctatcagtwgatttttcttatttacagataacttctttaggggaagtaaaacagtcatctagaattcaytgagttttgtttcactttgacatttggggatctggtgggcagtcgaaccatggtgaactccacctccgtggaataaatggagattcagcgtgggtgttgaatccagcacgtctgtgtgagtaacgggacagtaaacactccacattcttcagtttttcacttctacctacatatttgtatgtttttctgtataacagccttttccttctggttctaactgctgttaaaattaatatatcattatctttgctgttattgacagcgatataattttattacatatgattagagggatgagacagacattcacctgtatatttcttttaatgggcacaaaatgggcccttgcctctaaatagcactttttggggttcaagaagtaatcagtatgcaaagcaatcttttatacaataattgaagtgttccctttttcataattactstacttccyagtaaccctaaggaagttgctaacttaaaaaacygcatcccasgttctgttaatttaattctcataagtagcattsatgtaataaacaggtttttagtttgttcttcagattgatagggagttttaaagaaattttagtagttactaaaattatgttactgtatttttcagaaatcmaactgyttatgaaaagtactaatagaacttgttaacctttctaaccttcacgattaactgtgaaatgtacgtcatttgtgcaagaccgtttgtccmcttcattttgtataatcacagttgtgttcctgacactcaataaacagtcaytgg

SEQ ID NO: 5487 - DNA, 2475 bp, Homo sapiens
gtcgcgggtcacgcggcggagggggcgtggcctgcccccggcccagccggctcttctttgcctctgctggagtccggggagtggcgttggctgctagagcgatgccgggccggagttgcgtcgccttagtcctcctggctgccgccgtcagctgtgccgtcgcgcagcacgcgccgccgtggacagaggactgcagaaaatcaacctatcctccttcaggaccaacgtacagaggtgcagttccatggtacaccataaatcttgacttaccaccctacaaaagatggcatgaattgatgcttgacaaggcaccaatgctaaaggttatagtgaattctctgaagaatatgataaatacattcgtgccaagtggaaaarttatgcaggtggtggatgaaaaattgcctggcctacttggcaactttcctggcccttttgaagaggaaatgaagggtattgccgctgttactgawatacctttaggagagattatttcattcaatattttttatgaattatttaccatttgtacttcaatagtagcagaagacaaaaaaggtcatctaatacatgggagaaacatggattttggagtatttcttgggtggaacataaataatgatacctgggtcataactgagcaactaaaacctttaacagtgaatttggatttccaaagaaacaacaaaactgtcttcaaggcttcaagctttgctggctatgtgggcatgttaacaggattcaaaccaggactgttcagtcttacrctgaatgaacgtttcagtataaatggtggttatctgggtattctagaatggattctgggaaagaaagatgycatgtggatagggttcctcactagaacagttctggaaaatagcacaagttatgaagaagccaagaatttattgaccaagaccaagatattggccccagcctactttatcctgggaggcaaccagtctggggaaggttgtgtgattacacgagacagaaaggaatcattggatgtatatgaactcgatgctaagcagggtagatggtatgtggtacaaacaaattatgaccgttggaaacatcccttcttccttratgatcgcagaacgcctgcaaagatgtgtytgaaccgcaccagccaagagaatatctcatttgaaaccatgtatgatgtcctgtcaacaaaacctgtcctcaacaagctgaccrtatacacaaccttgatagatgttaccaaaggtcaattcgaaacttacctgcgggactgccctgacccttgtataggttggtgagcacacgtctggcctacagaatgcggcctctgagacatgaagacaccatctccatgtgaccgaacactgcagctgtctgaccttccaaagactaagactcgcggcaggttctctttgagtcaawagcttgtcttcgtccatctgttgacaaatgacagaycttttttttttccccctatcagtwgatttttcttatttacagataacttctttaggggaagtaaaacagtcatctagaattcaytgagttttgtttcactttgacatttggggatctggtgggcagtcgaaccatggtgaactccacctccgtggaataaatggagattcagcgtgggtgttgaatccagcacgtctgtgtgagtaacgggacagtaaacactccacattcttcagtttttcacttctacctacatatttgtatgtttttctgtataacagccttttccttctggttctaactgctgttaaaattaatatatcattatctttgctgttattgacagcgatataattttattacatatgattagagggatgagacagacattcacctgtatatttcttttaatgggcacaaaatgggcccttgcctctaaatagcactttttggggttcaagaagtaatcagtatgcaaagcaatcttttatacaataattgaagtgttccctttttcataattactstacttccyagtaaccctaaggaagttgctaacttaaaaaacygcatcccasgttctgttaatttagtaaataaacaagtcaaagacttgtggaaaataggaagtgaacccatattttaaattctcataagtagcattsatgtaataaacaggtttttagtttgttcttcagattgatagggagttttaaagaaattttagtagttactaaaattatgttactgtatttttcagaaatcmaactgyttatgaaaagtactaatagaacttgttaacctttctaaccttcacgattaactgtgaaatgtacgtcatttgtgcaagaccgtttgtccmcttcattttgtataatcacagttgtgttcctgacactcaataaacagtcaytggaaagagtgccagtcagcagtcatgcacgctgattgggtgtgtacatctgtgttggtttggaggaggggggttattatcaagaaatacaagctgaacatcgtatctgaatt

SEQ ID NO: 5488 - DNA, 2757 bp, Homo sapiens
gaaatccaacccggtcacctacccgcgcgactgtgtccacggatggcacgaaagccaagcgagtccccctgccgagctactcgcgtccgcctcctcccaagctgagctctgctccgcccacctgagtccttcgccagttaggaggaaacacagccgcttaatgaactgctgcatcgggctgggagagaaagctcgcgggtcccaccgggcctcctacccaagtctcagcgcgcttttcaccgaggcctcarttctgggatttggcarctttgctgtgaaagcccaagtgggtaaccaacagcttggaggacccgagtggattcgattctctctcactcctcggccactcaactgctccttgtccctgactccgcgctagagcgatgccgggccggagttgcgtcgccttagtcctcctggctgccgccgtcagctgtgccgtcgcgcagcacgcgccgccgtggacagaggactgcagaaaatcaacctatcctccttcaggaccaacgtacagaggtgcagttccatggtacaccataaatcttgacttaccaccctacaaaagatggcatgaattgatgcttgacaaggcaccaatgctaaaggttatagtgaattctctgaagaatatgataaatacattcgtgccaagtggaaaarttatgcaggtggtggatgaaaaattgcctggcctacttggcaactttcctggcccttttgaagaggaaatgaagggtattgccgctgttactgawatacctttaggagagattatttcattcaatattttttatgaattatttaccatttgtacttcaatagtagcagaagacaaaaaaggtcatctaatacatgggagaaacatggattttggagtatttcttgggtggaacataaataatgatacctgggtcataactgagcaactaaaacctttaacagtgaatttggatttccaaagaaacaacaaaactgtcttcaaggcttcaagctttgctggctatgtgggcatgttaacaggattcaaaccaggactgttcagtcttacrctgaatgaacgtttcagtataaatggtggttatctgggtattctagaatggattctgggaaagaaagatgycatgtggatagggttcctcactagaacagttctggaaaatagcacaagttatgaagaagccaagaatttattgaccaagaccaagatattggccccagcctactttatcctgggaggcaaccagtctggggaaggttgtgtgattacacgagacagaaaggaatcattggatgtatatgaactcgatgctaagcagggtagatggtatgtggtacaaacaaattatgaccgttggaaacatcccttcttccttratgatcgcagaacgcctgcaaagatgtgtytgaaccgcaccagccaagagaatatctcatttgaaaccatgtatgatgtcctgtcaacaaaacctgtcctcaacaagctgaccrtatacacaaccttgatagatgttaccaaaggtcaattcgaaacttacctgcgggactgccctgacccttgtataggttggtgagcacacgtctggcctacagaatgcggcctctgagacatgaagacaccatctccatgtgaccgaacactgcagctgtctgaccttccaaagactaagactcgcggcaggttctctttgagtcaawagcttgtcttcgtccatctgttgacaaatgacagaycttttttttttccccctatcagtwgatttttcttatttacagataacttctttaggggaagtaaaacagtcatctagaattcaytgagttttgtttcactttgacatttggggatctggtgggcagtcgaaccatggtgaactccacctccgtggaataaatggagattcagcgtgggtgttgaatccagcacgtctgtgtgagtaacgggacagtaaacactccacattcttcagtttttcacttctacctacatatttgtatgtttttctgtataacagccttttccttctggttctaactgctgttaaaattaatatatcattatctttgctgttattgacagcgatataattttattacatatgattagagggatgagacagacattcacctgtatatttcttttaatgggcacaaaatgggcccttgcctctaaatagcactttttggggttcaagaagtaatcagtatgcaaagcaatcttttatacaataattgaagtgttccctttttcataattactstacttccyagtaaccctaaggaagttgctaacttaaaaaacygcatcccasgttctgttaatttagtaaataaacaagtcaaagacttgtggaaaataggaagtgaacccatattttaaattctcataagtagcattsatgtaataaacaggtttttagtttgttcttcagattgatagggagttttaaagaaattttagtagttactaaaattatgttactgtatttttcagaaatcmaactgyttatgaaaagtactaatagaacttgttaacctttctaaccttcacgattaactgtgaaatgtacgtcatttgtgcaagaccgtttgtccmcttcattttgtataatcacagttgtgttcctgacactcaataaacagtcaytggaaagagtgccagtcagcagtcatgcacgctgattgggtgtgtacatctgtgttggtttggaggaggggggttattatcaagaaatacaagctgaacatcgtatctgaatt

SEQ ID NO: 5489 - DNA, 2987 bp, Homo sapiens
gaaatccaacccggtcacctacccgcgcgactgtgtccacggatggcacgaaagccaagcgagtccccctgccgagctactcgcgtccgcctcctcccaagctgagctctgctccgcccacctgagtccttcgccagttaggaggaaacacagccgcttaatgaactgctgcatcgggctgggagagaaagctcgcgggtcccaccgggcctcctacccaagtctcagcgcgcttttcaccgaggcctcarttctgggatttggcarctttgctgtgaaagcccaagtgggtaaccaacagcttggaggacccgagtggattcgattctctctcactcctcggccactcaactgctccttgtccctgactccgcgagggcaaagatgggtcagggtgggatgttacattagtgttgagactctttggatccgtttcgtgggtaccgaggacgcctgggtacgcgggacaggctgcacccgcctgctagaggcgccccatcgaggcgccacgggtcgcgggtcacgcggcggagggggcgtggcctgcccccggcccagccggctcttctttgcctctgctggagtccggggagtggcgttggctgctagagcgatgccgggccggagttgcgtcgccttagtcctcctggctgccgccgtcagctgtgccgtcgcgcagcacgcgccgccgtggacagaggactgcagaaaatcaacctatcctccttcaggaccaacgtacagaggtgcagttccatggtacaccataaatcttgacttaccaccctacaaaagatggcatgaattgatgcttgacaaggcaccaatgctaaaggttatagtgaattctctgaagaatatgataaatacattcgtgccaagtggaaaarttatgcaggtggtggatgaaaaattgcctggcctacttggcaactttcctggcccttttgaagaggaaatgaagggtattgccgctgttactgawatacctttaggagagattatttcattcaatattttttatgaattatttaccatttgtacttcaatagtagcagaagacaaaaaaggtcatctaatacatgggagaaacatggattttggagtatttcttgggtggaacataaataatgatacctgggtcataactgagcaactaaaacctttaacagtgaatttggatttccaaagaaacaacaaaactgtcttcaaggcttcaagctttgctggctatgtgggcatgttaacaggattcaaaccaggactgttcagtcttacrctgaatgaacgtttcagtataaatggtggttatctgggtattctagaatggattctgggaaagaaagatgycatgtggatagggttcctcactagaacagttctggaaaatagcacaagttatgaagaagccaagaatttattgaccaagaccaagatattggccccagcctactttatcctgggaggcaaccagtctggggaaggttgtgtgattacacgagacagaaaggaatcattggatgtatatgaactcgatgctaagcagggtagatggtatgtggtacaaacaaattatgaccgttggaaacatcccttcttccttratgatcgcagaacgcctgcaaagatgtgtytgaaccgcaccagccaagagaatatctcatttgaaaccatgtatgatgtcctgtcaacaaaacctgtcctcaacaagctgaccrtatacacaaccttgatagatgttaccaaaggtcaattcgaaacttacctgcgggactgccctgacccttgtataggttggtgagcacacgtctggcctacagaatgcggcctctgagacatgaagacaccatctccatgtgaccgaacactgcagctgtctgaccttccaaagactaagactcgcggcaggttctctttgagtcaawagcttgtcttcgtccatctgttgacaaatgacagaycttttttttttccccctatcagtwgatttttcttatttacagataacttctttaggggaagtaaaacagtcatctagaattcaytgagttttgtttcactttgacatttggggatctggtgggcagtcgaaccatggtgaactccacctccgtggaataaatggagattcagcgtgggtgttgaatccagcacgtctgtgtgagtaacgggacagtaaacactccacattcttcagtttttcacttctacctacatatttgtatgtttttctgtataacagccttttccttctggttctaactgctgttaaaattaatatatcattatctttgctgttattgacagcgatataattttattacatatgattagagggatgagacagacattcacctgtatatttcttttaatgggcacaaaatgggcccttgcctctaaatagcactttttggggttcaagaagtaatcagtatgcaaagcaatcttttatacaataattgaagtgttccctttttcataattactstacttccyagtaaccctaaggaagttgctaacttaaaaaacygcatcccasgttctgttaatttagtaaataaacaagtcaaagacttgtggaaaataggaagtgaacccatattttaaattctcataagtagcattsatgtaataaacaggtttttagtttgttcttcagattgatagggagttttaaagaaattttagtagttactaaaattatgttactgtatttttcagaaatcmaactgyttatgaaaagtactaatagaacttgttaacctttctaaccttcacgattaactgtgaaatgtacgtcatttgtgcaagaccgtttgtccmcttcattttgtataatcacagttgtgttcctgacactcaataaacagtcaytggaaagagtgccagtcagcagtcatgcacgctgattgggtgtgtacatctgtgttggtttggaggaggggggttattatcaagaaatacaagctgaacatcgtatctgaatt

SEQ ID NO: 5490 - DNA, 2390 bp, Homo sapiens
tgcaacccagagggcaggatttcctgctggactttgaaatccaacccggtcacctacccgcgcgactgtgtccacggatggcacgaaagccaagcgagtccccctgccgagctactcgcgtccgcctcctcccaagctgagctctgctccgcccacctgagtccttcgccagttaggaggaaacacagccgcttaatgaactgctgcatcgggctgggagagaaagctcgcgggtcccaccgggcctcctacccaagtctcagcgcgcttttcaccgaggcctcarttctgggatttggcarctttgctgtgaaagcccaatggacagaggactgcagaaaatcaacctatcctccttcaggaccaacgtatttcccgtcagtgataatcaggtacagaggtgcagttccatggtacaccataaatcttgacttaccaccctacaaaagatggcatgaattgatgcttgacaaggcaccaatgcctggcctacttggcaactttcctggcccttttgaagaggaaatgaagggtattgccgctgttactgawatacctttaggagagattatttcattcaatattttttatgaattatttaccatttgtacttcaatagtagcagaagacaaaaaaggtcatctaatacatgggagaaacatggattttggagtatttcttgggtggaacataaataatgatacctgggtcataactgagcaactaaaacctttaacagtgaatttggatttccaaagaaacaacaaaactgtcttcaaggcttcaagctttgctggctatgtgggcatgttaacaggattcaaaccaggactgttcagtcttacrctgaatgaacgtttcagtataaatggtggttatctgggtattctagaatggattctgggaaagaaagatgycatgtggatagggttcctcactagaacagttctggaaaatagcacaagttatgaagaagccaagaatttattgaccaagaccaagatattggccccagcctactttatcctgggaggcaaccagtctggggaaggttgtgtgattacacgagacagaaaggaatcattggatgtatatgaactcgatgctaagcagggtagatggtatgtggtacaaacaaattatgaccgttggaaacatcccttcttccttratgatcgcagaacgcctgcaaagatgtgtytgaaccgcaccagccaagagaatatctcatttgaaaccatgtatgatgtcctgtcaacaaaacctgtcctcaacaagctgaccrtatacacaaccttgatagatgttaccaaaggtcaattcgaaacttacctgcgggactgccctgacccttgtataggttggtgagcacacgtctggcctacagaatgcggcctctgagacatgaagacaccatctccatgtgaccgaacactgcagctgtctgaccttccaaagactaagactcgcggcaggttctctttgagtcaawagcttgtcttcgtccatctgttgacaaatgacagaycttttttttttccccctatcagtwgatttttcttatttacagataacttctttaggggaagtaaaacagtcatctagaattcaytgagttttgtttcactttgacatttggggatctggtgggcagtcgaaccatggtgaactccacctccgtggaataaatggagattcagcgtgggtgttgaatccagcacgtctgtgtgagtaacgggacagtaaacactccacattcttcagtttttcacttctacctacatatttgtatgtttttctgtataacagccttttccttctggttctaactgctgttaaaattaatatatcattatctttgctgttattgacagcgatataattttattacatatgattagagggatgagacagacattcacctgtatatttcttttaatgggcacaaaatgggcccttgcctctaaatagcactttttggggttcaagaagtaatcagtatgcaaagcaatcttttatacaataattgaagtgttccctttttcataattactstacttccyagtaaccctaaggaagttgctaacttaaaaaacygcatcccasgttctgttaatttaattctcataagtagcattsatgtaataaacaggtttttagtttgttcttcagattgatagggagttttaaagaaattttagtagttactaaaattatgttactgtatttttcagaaatcmaactgyttatgaaaagtactaatagaacttgttaacctttctaaccttcacgattaactgtgaaatgtacgtcatttgtgcaagaccgtttgtccmcttcattttgtataatcacagttgtgttcctgacactcaataaacagtcaytgg

SEQ ID NO: 5491 - DNA, 2470 bp, Homo sapiens
gaaatccaacccggtcacctacccgcgcgactgtgtccacggatggcacgaaagccaagcgagtccccctgccgagctactcgcgtccgcctcctcccaagctgagctctgctccgcccacctgagtccttcgccagttaggaggaaacacagccgcttaatgaactgctgcatcgggctgggagagaaagctcgcgggtcccaccgggcctcctacccaagtctcagcgcgcttttcaccgaggcctcarttctgggatttggcarctttgctgtgaaagcccaagtgggtaaccaacagcttggaggacccgagtggattcgattctctctcactcctcggccactcaactgctccttgtccctgactccgcgagggcaaagatgggtcagggtgggatgttacattagtgttgagactctttggatccgtttcgtgggtaccgaggacgcctgggtacgcgggacaggctgcacccgcctgctagaggcgccccatcgaggcgccacgggtcgcgggtcacgcggcggagggggcgtggcctgcccccggcccagccggctcttctttgcctctgctggagtccggggagtggcgttggctgctagagcgatgccgggccggagttgcgtcgccttagtcctcctggctgccgccgtcagctgtgccgtcgcgcagcacgcgccgccgtggacagaggactgcagaaaatcaacctatcctccttcaggaccaacgtggaacataaataatgatacctgggtcataactgagcaactaaaacctttaacagtgaatttggatttccaaagaaacaacaaaactgtcttcaaggcttcaagctttgctggctatgtgggcatgttaacaggattcaaaccaggactgttcagtcttacrctgaatgaacgtttcagtataaatggtggttatctgggtattctagaatggattctgggaaagaaagatgycatgtggatagggttcctcactagaacagttctggaaaatagcacaagactcgatgctaagcagggtagatggtatgtggtacaaacaaattatgaccgttggaaacatcccttcttccttratgatcgcagaacgcctgcaaagatgtgtytgaaccgcaccagccaagagctgaccrtatacacaaccttgatagatgttaccaaaggtcaattcgaaacttacctgcgggactgccctgacccttgtataggttggtgagcacacgtctggcctacagaatgcggcctctgagacatgaagacaccatctccatgtgaccgaacactgcagctgtctgaccttccaaagactaagactcgcggcaggttctctttgagtcaawagcttgtcttcgtccatctgttgacaaatgacagaycttttttttttccccctatcagtwgatttttcttatttacagataacttctttaggggaagtaaaacagtcatctagaattcaytgagttttgtttcactttgacatttggggatctggtgggcagtcgaaccatggtgaactccacctccgtggaataaatggagattcagcgtgggtgttgaatccagcacgtctgtgtgagtaacgggacagtaaacactccacattcttcagtttttcacttctacctacatatttgtatgtttttctgtataacagccttttccttctggttctaactgctgttaaaattaatatatcattatctttgctgttattgacagcgatataattttattacatatgattagagggatgagacagacattcacctgtatatttcttttaatgggcacaaaatgggcccttgcctctaaatagcactttttggggttcaagaagtaatcagtatgcaaagcaatcttttatacaataattgaagtgttccctttttcataattactstacttccyagtaaccctaaggaagttgctaacttaaaaaacygcatcccasgttctgttaatttagtaaataaacaagtcaaagacttgtggaaaataggaagtgaacccatattttaaattctcataagtagcattsatgtaataaacaggtttttagtttgttcttcagattgatagggagttttaaagaaattttagtagttactaaaattatgttactgtatttttcagaaatcmaactgyttatgaaaagtactaatagaacttgttaacctttctaaccttcacgattaactgtgaaatgtacgtcatttgtgcaagaccgtttgtccmcttcattttgtataatcacagttgtgttcctgacactcaataaacagtcaytggaaagagtgccagtcagcagtcatgcacgctgattgggtgtgtacatctgtgttggtttggaggaggggggttattatcaagaaatacaagctgaacatcgtatctgaattaaataacaagggttatgtaagtgggttattaaatatgactaaayggtcac

SEQ ID NO: 5492 - DNA, 1980 bp, Homo sapiens
cggaaatcgcggggagggtcaaaggagacccggtctccgaggctcatggcgatgctggtcctagtacccggacgagttatgcggcctctgggtggccaactttggcgcttcttgcctcgcggactcgagttttggggcccagccgaggggactgcgagagtcttgctgaggcagttctgcgcgcggcaagcggaggcgtggcgtgcctcggggcgcyctggctattgcctgggaacccggcccctcagcactgcgaggccgccacccccgtggtcgcagaagggccccggagactccacgcgcccctcgaagcccgggcctgtttcctggaagtctttagcratcacatttgctattggaggagctttactggctggaatgaagcacgtcaagaaagaaaaggcagagaagttagagaaggaacggcagcgacacatcggcaagcctttacttgggggaccgttttccctcacaactcatactggggagcgtaaaactgacaaggactacttgggtcagtggttattgatttattttggcttcactcattgccctgatgtctgtcyagaagaactagaaaagatgattcaagtcgtggatgaaatagatagcattacaactctgccagatctaactccrcttttcatcagcattgacccagagagggacacaaaagaagccatcgcaaattatgtgaaagaattttctcccaaactggttggcttgactggcacgagagaagaggtcgatcaagtggccagagcatacagagtgtattacagccctggccccaaggacgaagatgaagactacatagtggatcacacaataataatgtacttgattggaccagatggtgagtttctagattattttggccagaacaagaggaagggagaaatagctgcttcaattgccacacacatgaggccatacagaaaaaagagctagccaaagcagtgttgctggatgcagtattctcttgctaagaggaaggaaactgtctcgcataggagcctatataaatataaacatatatacgtgcactctacagaatggccttcataccatgagaacatttctgttttggatggggatgttacccttgcgttcaaccaaaattgattcttggaactgtaaagattacaacccaaagtctcccaggaagctgtggggagaccagaggatcaagctgaagtgaagccagtgaagagcccacctgyggaaggacatggcggggcgaggcacagccagtgcattyctgcctgcgracaggccctcccagcagctttgccgcctctccatcgtcttgggcccttgctcaaatagctgtgggactgaatttcacagaaaagaatataatttccatagtgctcttgcttgcctcttcttgagttctttgctcttctgagttcttggtggctaataacagtcagattagggtctctgccattcagagttgatgcttgaaaactttagttttccttattaatgaatatcactatcagatttgactaatgaagaggaaatctattgtttgggggaaaaaaaacatcagtttgatttctctaggggttcttttatgtgatttttagctaagtggtgtgccaggttttcagygacataccaaatggaaataagaggatattgatcaygagtgtgatgctgagtasctttctgcatatactggattgtactttgtgtaaagtaaacatactcagttttgctgttcagacaagcgtgatctttttcatgggtgatgagtgggtacatagatggctgcacacagttctcaggraagagacccacaggctccagcgggcaggtgggtgggacgcttgctgaagtgcagttccccagacccagagctgaattcactgaatctgcagtatgatgcagagacctgcttccatgacagataccccaggtgactcggatgctggcggactgggaccatcccttaagaaagtgttttttggg

SEQ ID NO: 5493 - DNA, 918 bp, Homo sapiens
atgcgcgaggggctgggcgcggcgtgcgaggccgccgggccccggctgtgcaggctgctctgcaggatcctccggccgaagcctgactgctgcccgcgcagagccagtccagtgacacaggatgaccttcagtatcacaacctcagcaagcagcagaatgagtccccgcagcccctcgtggagacgggaaagaagtctccrgaatctctggtcaagctggatgcaaccccattgtcctccccacggcatgtgaggatcaaaaactggggcagcgggatgactttccaagacacacttcaccataaggccaaagggattttaacttgcaggtccaaatcttgcctggggtccattatgactcccaaaagtttgaccagaggacccagggacaagcctacccctccagatgagcttctacctcaagctatcgaatttgtcaaccaatattacggctccttcaaagaagctcatagacatcatagcatttctaatgccttagaaaatgactatatgaaaatggctatcacatctaaaactctgaaggaattggatgtgaatgtaaaaaataatcctttcttgcatatgcacgtgctgaccaccatgtgtgttggtggtgtgggtgttatggtgatcattactgttgtcatgctcagggcaaaaatagaggaacatctggccagggtggaagcggtaacaaaggagatagaaacaacaggaacctaccaactgacgggagatgagctcatcttcgccaccaagcaggcctggcgcaatgccccacgctgcattgggaggatccagtggtccaacctgcaggtgaacttccttagacttgagcgggagagagctggaggcggccaggccctgagcagatggcttggaacagccacacagagctgtgcccaggcctcctgggac

SEQ ID NO: 5494 - DNA, 4064 bp, Homo sapiens
ctctcggccacctttgatgaggggactgggcagttctagacagtcccgaagttctcaaggcacaggtctcttcctggtttgactgtccttaccccggggaggcagtgcagccagctgcaagccccacagtgaagaacatctgagctcaaatccagataagtgacataagtgacctgctttgtaaagccatagagatggcctgtccttggaaatttctgttcaagaccaaattccaccagtatgcaatgaatggggaaaaagacatcaacaacaatgtggagaaagcyccctgtgccacctccagtccagtgacacaggatgaccttcagtatcacaacctcagcaagcagcagaatgagtccccgcagcccctcgtggagacgggaaagaagtctccrgaatctctggtcaagctggatgcaaccccattgtcctccccacggcatgtgaggatcaaaaactggggcagcgggatgactttccaagacacacttcaccataaggccaaagggattttaacttgcaggtccaaatcttgcctggggtccattatgactcccaaaagtttgaccagaggacccagggacaagcctacccctccagatgagcttctacctcaagctatcgaatttgtcaaccaatattacggctccttcaaagaggcaaaaatagaggaacatctggccagggtggaagcggtaacaaaggagatagaaacaacaggaacctaccaactgacgggagatgagctcatcttcgccaccaagcaggcctggcgcaatgccccacgctgcattgggaggatccagtggtccaacctgcaggtcttcgatgcccgcagctgttccactgccygggaaatgtttgaacacatctgcagacacgtgcgttactccaccaacaatggcaacatcaggtcggccatcaccgtgttcccccagcggagtgatggcaagcacgacttccgggtggcccgtcttgttccccagctgtgcatcgacctgggctggaagcccaagtacggccgcttcgatgtggtccccctggtcctgcaggccaatggccgtgaccctgagctcttygaaatcccacctgaccttgtgcttgaggtggccatggaacatcccaaatacgagtggtttcgggaactggagctaaagtggtacgccctgcctgcagtggccaacatgctgcttgaggtgggcggcctggagttcccagggtgccccttcaatggctggtacatgggcacagagatcggagtccgggacttctgtgaygtccagcgctacaacatcctggaggaagtgggcaggagaatgggcctggaaacgcacaagctggcctcgctctggaaagaccaggctgtcgttgagatcaacattgctgtgctccatagtttccagaagcagaatgtgaccatcatggaccaccactcggctgcagaatccttcatgaagtacatgcagaatgaataccggtcccgtgggggctgcccggcagactggatttggctggtccctcccatgtctgggagcatcacccccgtgtttcaccaggagatgctgaactacgtcctgtcccctttctactactatcaggtagaggcctggaaaacccatgtctggcaggacgagaagcrgagacccaagagaagagagattccattgaaagtcttggtcaaagctgtgctctttgcctgtatgctgatgcgcaagacaatggcgtcccgagtcagagtcaccatcctctttgcgacagagacaggaaaatcagaggcgctggcctgggacctgggggccttattcagctgtgccttcaaccccaaggttgtctgcatggataagtacaggctgagctgcctggaggaggaacggctgctgttggtggtgaccagtacgtttggcaatggagactgccctggcaatggagagaaactgaagaaatygctcttcatgctgaaagagctcaacaacaaattcaggtacgctgtgtttggcctcggctccagcatgtaccctcggttctgcgcctttgctcatgacattgatcagaagctgtcccacctgggggcctctcagctcaccccgatgggagaaggggatgagctcagtgggcaggaggacgccttccgcagctgggccgtgcaaaccttcaaggcagcctgtgagacgtttsatgtccgaggcaaacagcacattcagatccccaagctctacacctccaatgtgacctgggacccgcaccactacaggctcgtgcaggactcacagcctttggacctcagcaaagccctcagcagcatgcatgccaagaacgtgttcaccatgaggctcaaatctcggcagaatctacaaagtccgacatccagccgtgccaccatcctggtggaactctcctgtgaggatggccaaggcctgaactacctgccgggggagcaccttggggtttgcccaggcaaccagccggccctggtccaaggyatcctggagcgagtggtggatggccccacaccccaccagacagtgcgcctggaggccctggatgagagtggcagctactgggtcagtgacaagaggctgcccccctgctcactcagccaggccctcacctacttcctggacatcaccacacccccacccagctgctgctccaaaagctggcccaggtggccacagaaragcctgagagacgaggctggaggccctgtgccagccctcagagtacagcaagtggaagttcaccaacagccccacattcctggagytgctagaggagttcccgtccctgcgggtgtctgctggcttcctgctttcccagctccccattctgaagcccaggttctactccatcagctcctcccgggatcacacgcccacrgagatccacctgactgtggccgtggtcacctaccacacccgagatggccagggtcccctgcaccacggcgtctgcagcacatggctcaacagcctgaagccccaagacccagtgccctgctttgtgcggaaygccagcggcttccacctccccgaggatccctcccatcctygcatcctcatcgggcctggcacaggcatcgcgcccttccgcagtttctggcagcaacggctccatgactcccagcacaagggagtgcggggaggccgcatgaccttggtgtttgggtgccgccgcccagatgaggaccacatctaccaggaggagatgctggagatggcccagaagggggtgctgcatgcggtgcacacagcctattcccgcctgcctggcaagcccaaggtctatgttcaggacatcctgcggcagcagctggccagcgaggtgctccgtgtgctccacaaggagccaggccacctctatgtttgcggggatgtgcgcatggcccgggacgtggcccacaccctgaagcagctggtggctgccaagctgaaattgaatgaggagcaggtcgaggactatttctttcagctcaagagccagaagcgctatcacgaagatatctttggtgctgtatttccttacgaggcgaagaaggacagggtggcggtgcagcccagcagcctggagatgtcagcgctctgagggcctacaggaggggttaaagctgccggcacagaacttaaggatggagccagctctgcattatcygaggtcacagggcctggggagatggaggaaagtgatatcccccagcctcaaktcttatttcctcaacgttgctccccatcaagccctttacttgacctcctaacaagtagcaccctggattgatcggagcctcctctctcaaactggggcctccctggtcccttggagacraaatcttaaatgccaggcctggcaagtgggtgaaagatggaacttgctgctgagtgcaccacttcaagtgaccaccaggaggtgctatcgcaccactgtgtatttaactgccttgtgtacagttatttatgcctctgtatttaaaaaactaacacccagtctgttccccatggccacttgggtcttccctgtatgattccttgatggagatatttacatgaattgcattttactttaatcac

SEQ ID NO: 5495 - DNA, 4133 bp, Homo sapiens
ctctcggccacctttgatgaggggactgggcagttctagacagtcccgaagttctcaaggcacaggtctcttcctggtttgactgtccttaccccggggaggcagtgcagccagctgcaagccccacagtgaagaacatctgagctcaaatccagataagtgacataagtgacctgctttgtaaagccatagagatggcctgtccttggaaatttctgttcaagaccaaattccaccagtatgcaatgaatggggaaaaagacatcaacaacaatgtggagaaagcyccctgtgccacctccagtccagtgacacaggatgaccttcagtatcacaacctcagcaagcagcagaatgagtccccgcagcccctcgtggagacgggaaagaagtctccrgaatctctggtcaagctggatgcaaccccattgtcctccccacggcatgtgaggatcaaaaactggggcagcgggatgactttccaagacacacttcaccataaggccaaagggattttaacttgcaggtccaaatcttgcctggggtccattatgactcccaaaagtttgaccagaggacccagggacaagcctacccctccagatgagcttctacctcaagctatcgaatttgtcaaccaatattacggctccttcaaagaggcaaaaatagaggaacatctggccagggtggaagcggtaacaaaggagatagaaacaacaggaacctaccaactgacgggagatgagctcatcttcgccaccaagcaggcctggcgcaatgccccacgctgcattgggaggatccagtggtccaacctgcaggtcttcgatgcccgcagctgttccactgccygggaaatgtttgaacacatctgcagacacgtgcgttactccaccaacaatggcaacatcaggtcggccatcaccgtgttcccccagcggagtgatggcaagcacgacttccgggtgtggaatgctcagctcatccgctatgctggctaccagatgccagatggcagcatcagaggggaccctgccaacgtggaattcactcagctgtgcatcgacctgggctggaagcccaagtacggccgcttcgatgtggtccccctggtcctgcaggccaatggccgtgaccctgagctcttygaaatcccacctgaccttgtgcttgaggtggccatggaacatcccaaatacgagtggtttcgggaactggagctaaagtggtacgccctgcctgcagtggccaacatgctgcttgaggtgggcggcctggagttcccagggtgccccttcaatggctggtacatgggcacagagatcggagtccgggacttctgtgaygtccagcgctacaacatcctggaggaagtgggcaggagaatgggcctggaaacgcacaagctggcctcgctctggaaagaccaggctgtcgttgagatcaacattgctgtgctccatagtttccagaagcagaatgtgaccatcatggaccaccactcggctgcagaatccttcatgaagtacatgcagaatgaataccggtcccgtgggggctgcccggcagactggatttggctggtccctcccatgtctgggagcatcacccccgtgtttcaccaggagatgctgaactacgtcctgtcccctttctactactatcaggtagaggcctggaaaacccatgtctggcaggacgagaagcrgagacccaagagaagagagattccattgaaagtcttggtcaaagctgtgctctttgcctgtatgctgatgcgcaagacaatggcgtcccgagtcagagtcaccatcctctttgcgacagagacaggaaaatcagaggcgctggcctgggacctgggggccttattcagctgtgccttcaaccccaaggttgtctgcatggataagtacaggctgagctgcctggaggaggaacggctgctgttggtggtgaccagtacgtttggcaatggagactgccctggcaatggagagaaactgaagaaatygctcttcatgctgaaagagctcaacaacaaattcaggtacgctgtgtttggcctcggctccagcatgtaccctcggttctgcgcctttgctcatgacattgatcagaagctgtcccacctgggggcctctcagctcaccccgatgggagaaggggatgagctcagtgggcaggaggacgccttccgcagctgggccgtgcaaaccttcaaggcagcctgtgagacgtttsatgtccgaggcaaacagcacattcagatccccaagctctacacctccaatgtgacctgggacccgcaccactacaggctcgtgcaggactcacagcctttggacctcagcaaagccctcagcagcatgcatgccaagaacgtgttcaccatgaggctcaaatctcggcagaatctacaaagtccgacatccagccgtgccaccatcctggtggaactctcctgtgaggatggccaaggcctgaactacctgccgggggagcaccttggggtttgcccaggcaaccagccggccctggtccaaggyatcctggagcgagtggtggatggccccacaccccaccagacagtgcgcctggaggccctggatgagagtggcagctactgggtcagtgacaagaggctgcccccctgctcactcagccaggccctcacctacttcctggacatcaccacacccccacccagctgctgctccaaaagctggcccaggtggccacagaaragcctgagagacgaggctggaggccctgtgccagccctcagagtacagcaagtggaagttcaccaacagccccacattcctggagytgctagaggagttcccgtccctgcgggtgtctgctggcttcctgctttcccagctccccattctgaagcccaggttctactccatcagctcctcccgggatcacacgcccacrgagatccacctgactgtggccgtggtcacctaccacacccgagatggccagggtcccctgcaccacggcgtctgcagcacatggctcaacagcctgaagccccaagacccagtgccctgctttgtgcggaaygccagcggcttccacctccccgaggatccctcccatcctygcatcctcatcgggcctggcacaggcatcgcgcccttccgcagtttctggcagcaacggctccatgactcccagcacaagggagtgcggggaggccgcatgaccttggtgtttgggtgccgccgcccagatgaggaccacatctaccaggaggagatgctggagatggcccagaagggggtgctgcatgcggtgcacacagcctattcccgcctgcctggcaagcccaaggtctatgttcaggacatcctgcggcagcagctggccagcgaggtgctccgtgtgctccacaaggagccaggccacctctatgtttgcggggatgtgcgcatggcccgggacgtggcccacaccctgaagcagctggtggctgccaagctgaaattgaatgaggagcaggtcgaggactatttctttcagctcaagagccagaagcgctatcacgaagatatctttggtgctgtatttccttacgaggcgaagaaggacagggtggcggtgcagcccagcagcctggagatgtcagcgctctgagggcctacaggaggggttaaagctgccggcacagaacttaaggatggagccagctctgcattatcygaggtcacagggcctggggagatggaggaaagtgatatcccccagcctcaaktcttatttcctcaacgttgctccccatcaagccctttacttgacctcctaacaagtagcaccctggattgatcggagcctcctctctcaaactggggcctccctggtcccttggagacraaatcttaaatgccaggcctggcaagtgggtgaaagatggaacttgctgctgagtgcaccacttcaagtgaccaccaggaggtgctatcgcaccactgtgtatttaactgccttgtgtacagttatttatgcctctgtatttaaaaaactaacacccagtctgttccccatggccacttgggtcttccctgtatgattccttgatggagatatttacatgaattgcattttactttaatcac

SEQ ID NO: 5496 - DNA, 1675 bp, Homo sapiens
acttggccgggtcccgaggcccctggccggcgggctcggacgttaggagcagaacyagctccaggtcccggtctgtccgggcgtcgctgccctctgaagctcaggccggacgccccagtccctggccgaacaaggtgccgcggcccacccaccccggtacccgccgtccgaccccgttgccctgcacctgaggatgttgtcagcataggaatgtgtttctgatcatctgaatcttaatcatgtccaactgcctgcaaaatttcctgaaaattacaagcactcgtcttctatgttcaagattatgccaacagttaagaagtaaaaggaagtttttcggaactgtgccaatatccagattgcataggcgagttgtcattacaggcattggcttagtgactcctcttggtgttggaactcacctggtttgggatcgtcttatcggaggagagagtggaattgtttcactggttggtgaagagtataagagtatcccttgcagtgttgctgcttatgtgccaagaggtagtgatgaaggtcagttcaatgaacaaaactttgtgtccaaatcagatatcaagtccatgtcttctcccaccatcatggccattggggctgcagaattagccatgaaggattctggctggcatcctcagtcagaagctgatcaagtggctactggtgttgcaattggcatgggaatgattcctcttgaagttgtttctgaaactgctttgaattttcagacaaaaggttacaataaagttagcccattttttgtccctaagattctggtcaatatggcagcaggccaggtcagcattcgatataaactcaagggcccaaatcatgcagtatccacagcctgtaccacaggagctcatgctgtgggagactcatttagatttatagcccatggtgatgctgatgtgatggtggctggaggtacagattcttgyattagccctttatctcttgctgggttttccagagcccgggctctgagcacaaactcagatcccaagttggcatgtcgaccatttcatccaaagagagatggttttgtaatgggagaaggtgcagctgtgctggtgctggaagaatatgaacatgctgttcaaagaagagcccggatctatgcagaagttttgggctatggactytcaggtgatgctggtcacataactgcccctgatcctgaaggagaaggtgccttaaggtgtatggctgctgctttaaaagatgcaggtgtgcagcctgaggagatatcctatatcaatgcacatgctacttccacaccattgggagatgctgctgaaaacaaagctatcaaacatctcttcaaagaccatgcatatgcccttgcagtttcctcaactaagggagcaacaggacatctgctgggagctgcaggggcagtcgaggcagcttttaccacattagcttgttattatcaaaaactaccacctactttaaacctggattgttcggaaccagaatttgatctcaactatgttccactaaaggcacaggaatggaaaactgagaaaagatttattggcctcaccaattcctttggttttggtggtactaatgcaacactttgtattgctggactryagaacatataatttgtaattaaatactgatttttaaatgytatatgtgaagaaattat

SEQ ID NO: 5497 - DNA, 1081 bp, Homo sapiens
gtgcgcgtgcgctcgagagcgtcatcgcccccgactgtggagaagtgtccggggtagccccgttacaggaatgtgtttctgatcatctgaatcttaatcatgtccaactgcctgcaaaatttcctgaaaattacaagcactcgtcttctatgttcaagattatgccaacagttaagaagtaaaaggaagtttttcggaactgtgccaatatccagattgcataggcgagttgtcattacaggcattggcttagtgactcctcttggtgttggaactcacctggtttgggatcgtcttatcggaggagagagtggaattgtttcactggttggtgaagagtataagagtatcccttgcagtgttgctgcttatgtgccaagaggtagtgatgaagagcccgggctctgagcacaaactcagatcccaagttggcatgtcgaccatttcatccaaagagagatggttttgtaatgggagaaggtgcagctgtgctggtgctggaagaatatgaacatgctgttcaaagaagagcccggatctatgcagaagttttgggctatggactytcaggtgatgctggtcacataactgcccctgatcctgaaggagaaggtgccttaaggtgtatggctgctgctttaaaagatgcaggtgtgcagcctgaggagatatcctatatcaatgcacatgctacttccacaccattgggagatgctgctgaaaacaaagctatcaaacatctcttcaaagaccatgcatatgcccttgcagtttcctcaactaagggagcaacaggacatctgctgggagctgcaggggcagtcgaggcagcttttaccacattagcttgttattatcaaaaactaccacctactttaaacctggattgttcggaaccagaatttgatctcaactatgttccactaaaggcacaggaatggaaaactgagaaaagatttattggcctcaccaattcctttggttttggtggtactaatgcaacactttgtattgctggactryagaacatataatttgtaattaaatactgatttttaaatgytatatgtgaagaaattat

SEQ ID NO: 5498 - DNA, 1535 bp, Homo sapiens
gtgcgcgtgcgctcgagagcgtcatcgcccccgactgtggagaagtgtccggggtagccccgttacaggaatgtgtttctgatcatctgaatcttaatcatgtccaactgcctgcaaaatttcctgaaaattacaagcactcgtcttctatgttcaagattatgccaacagttaagaagtaaaaggaagtttttcggaactgtgccaatatccagattgcataggcgagttgtcattacaggcattggcttagtgactcctcttggtgttggaactcacctggtttgggatcgtcttatcggaggagagagtggaattgtttcactggttggtgaagagtataagagtatcccttgcagtgttgctgcttatgtgccaagaggtagtgatgaaggtcagttcaatgaacaaaactttgtgtccaaatcagatatcaagtccatgtcttctcccaccatcatggccattggggctgcagaattagccatgaaggattctggctggcatcctcagtcagaagctgatcaagtggctactggtgttgcaattggcatgggaatgattcctcttgaagttgtttctgaaactgctttgaattttcagacaaaaggttacaataaagttagcccattttttgtccctaagattctggtcaatatggcagcaggccaggtcagcattcgatataaactcaagggcccaaatcatgcagtatccacagcctgtaccacaggagctcatgctgtgggagactcatttagatttatagcccatggtgatgctgatgtgatggtggctggaggtacagattcttgyattagccctttatctcttgctgggttttccagagcccgggctctgagcacaaactcagatcccaagttggcatgtcgaccatttcatccaaagagagatggttttgtaatgggagaaggtgcagctgtgctggtgctggaagaatatgaacatgctgttcaaagaagagcccggatctatgcagaagttttgggctatggactytcaggtgatgctggtcacataactgcccctgatcctgaaggagaaggtgccttaaggtgtatggctgctgctttaaaagatgcaggtgtgcagcctgaggagatatcctatatcaatgcacatgctacttccacaccattgggagatgctgctgaaaacaaagctatcaaacatctcttcaaagaccatgcatatgcccttgcagtttcctcaactaagggagcaacaggacatctgctgggagctgcaggggcagtcgaggcagcttttaccacattagcttgttattatcaaaaactaccacctactttaaacctggattgttcggaaccagaatttgatctcaactatgttccactaaaggcacaggaatggaaaactgagaaaagatttattggcctcaccaattcctttggttttggtggtactaatgcaacactttgtattgctggactryagaacatataatttgtaattaaatactgatttttaaatgytatatgtgaagaaattat

SEQ ID NO: 5499 - DNA, 2126 bp, Homo sapiens
aaaccctaatgatgaaaaatatagatccatccggattggaaacacagccttttctactagactcttgcctgtcagaggagctgttgaatgtttatttgaaatgggctttgaagagggagaaacacatctcatctttcctaaaaaagcttcagtggagcagctgcaaaaaattcgtgacctgattgccatagagagaagtagcagactggatggctcaaataagagccacaaagtaaagtcatctcagcaacctgcagccagtacccagcttcctacaacaccatcttcaaatcccagtgggttaaaccagcacacaaggaaccgtcaagggcagtcatcagatccaccatctgcttcaacggttgctgctgactcagccattctagaagttcttcagtccaacattcagcatgtgctggtctatgaaaatcctgctcttcaggagaaagcgttggcttgtattccggtccaagaactaaaaaggaaatcacaagaaaagttatcgagagctagaaaattggataaagatataataaccctgagaaacttttggaaacaagatgtggacggtgtggcgagtgggccaattgttttacactgtgctgccgagctgtagggtttgaagctcgctatgtttgggattacacagaccatgtctggacagaagtctattctccttctcagcagcggtggctgcactgtgatgcatgtgaagatgtctgtgacaagccactcctttatgaaataggatggggcaagaagctttcctatgtcatagcattttcaaaagatgaggtagttgatgtcacttggcgatattcctgcaaacatgaagaggtgattgccagaagaactaaggttaaagaagcattacttcgagacactattaatgggcttaataagcagaggcaactgtttttgtcagaaaacagaaggaaagaacttctccagaggataattgtggagcttgttgaatttatatctcccaaaacccctaaacctggagaacttgggggaagaatatctgggtcagtggcttggagagtagcccgaggtgaaatgggtctacagagaaaagaaaccttgtttattccctgtgaaaatgagaagatttctaaacagctccacctttgttacaatattgtgaaagatcgttatgttcgagtttcaaataacaatcaaaccatttctggatgggagaatggcgtgtggaaaatggaatctatattcagaaaagttgaaacagactggcacatggtatatttggcccgaaaggaaggatcatcttttgcttatatttcctggaagtttgagtgtgggtcagttggcctaaaagtagatagcatttctattagaacaagtagtcaaacttttcagactggaacagtagaatggaaattgcgatctgatacagcacaagtagaactgacaggcgataacagtcttcactcctatgctgatttttctggtgccactgaagttattttggaagcagaattaagcagaggagatggtgatgtcgcttggcaacacacccagctgtttagacaaagcttaaatgaccatgaagaaaattgtttggagataattataaaattcagtgacctttgagaacctgaacattatagaaaagctggcaataatcaaggacttactgaagtagtctgttggttcagtgcatscttagttggcagttaccaccctgtgctagcatatttcttttgctagctatccatcatgtaaccctcatgaaaattatctttatacgtggactataataaaatattgaattaaaacctttcttccatatgtgactataatttggagtaaagtcttgttgactcaatatgggattttaatctaaaactgtaagtatggttttaaaagttaaataatgatattcatgattaaatgctattcatgattatgataaaatcttgggcttatgatagtaatttgacattttctgatcagccattcatttcttcagaagtggttaaattagagtctcctaatatttttaattaatgtgaaagtacagtagctcataaattatataatgcatgaaaatttatatgattataaatattcaggcatttaagaaataaaatgaagtattttgcctt

SEQ ID NO: 5500 - DNA, 2666 bp, Homo sapiens
cggagagcgaggggcggcggcggcgcccgctggcrctcaagcatggcggcggcggcattgggcagctcctcaggctcggcgtccccggccgtggctgagctctgccagaacaccccggagacctttttggaggcctccaagctgctgctcacctatgctgacaacatcctcaggtgcagggcaacggggtcggacggcgggtaccggggtgggtgggccgcggcaccttgttcggccagggactggggcgtccggcctgagcttcagagggcagcgacgcccggacagaccgggacctggagctrgttctgctcctaacgtccgagcccgccggccaggggcctcgggacccggccaagtcccacccccgctcgagaaaaggaagtttctttgcagttgtgacttggcacctgcagtcagggtgctgcgggtgaactggagtcccggaagcggggccgggcggaggagaggtaggaaggcgtgcttcagacactgccgctcttctcgtcgtttaacggcctcagatatcgggacacaacgaaaccctaatgatgaaaaatatagatccatccggattggaaacacagccttttctactagactcttgcctgtcagaggagctgttgaatgtttatttgaaatgggctttgaagagggagaaacacatctcatctttcctaaaaaagcttcagtggagcagctgcaaaaaattcgtgacctgattgccatagagagaagtagcagactggatggctcaaataagagccacaaagtaaagtcatctcagcaacctgcagccagtacccagcttcctacaacaccatcttcaaatcccagtgggttaaaccagcacacaaggaaccgtcaagggcagtcatcagatccaccatctgcttcaacggttgctgctgactcagccattctagaagttcttcagtccaacattcagcatgtgctggtctatgaaaatcctgctcttcaggagaaagcgttggcttgtattccggtccaagaactaaaaaggaaatcacaagaaaagttatcgagagctagaaaattggataaagatataataaccctgagaaacttttggaaacaagatgtggacggtgtggcgagtgggccaattgttttacactgtgctgccgagctgtagggtttgaagctcgctatgtttgggattacacagaccatgtctggacagaagtctattctccttctcagcagcggtggctgcactgtgatgcatgtgaagatgtctgtgacaagccactcctttatgaaataggatggggcaagaagctttcctatgtcatagcattttcaaaagatgaggtagttgatgtcacttggcgatattcctgcaaacatgaagaggtgattgccagaagaactaaggttaaagaagcattacttcgagacactattaatgggcttaataagcagaggcaactgtttttgtcagaaaacagaaggaaagaacttctccagaggataattgtggagcttgttgaatttatatctcccaaaacccctaaacctggagaacttgggggaagaatatctgggtcagtggcttggagagtagcccgaggtgaaatgggtctacagagaaaagaaaccttgtttattccctgtgaaaatgagaagatttctaaacagctccacctttgttacaatattgtgaaagatcgttatgttcgagtttcaaataacaatcaaaccatttctggatgggagaatggcgtgtggaaaatggaatctatattcagaaaagttgaaacagactggcacatggtatatttggcccgaaaggaaggatcatcttttgcttatatttcctggaagtttgagtgtgggtcagttggcctaaaagtagatagcatttctattagaacaagtagtcaaacttttcagactggaacagtagaatggaaattgcgatctgatacagcacaagtagaactgacaggcgataacagtcttcactcctatgctgatttttctggtgccactgaagttattttggaagcagaattaagcagaggagatggtgatgtcgcttggcaacacacccagctgtttagacaaagcttaaatgaccatgaagaaaattgtttggagataattataaaattcagtgacctttgagaacctgaacattatagaaaagctggcaataatcaaggacttactgaagtagtctgttggttcagtgcatscttagttggcagttaccaccctgtgctagcatatttcttttgctagctatccatcatgtaaccctcatgaaaattatctttatacgtggactataataaaatattgaattaaaacctttcttccatatgtgactataatttggagtaaagtcttgttgactcaatatgggattttaatctaaaactgtaagtatggttttaaaagttaaataatgatattcatgattaaatgctattcatgattatgataaaatcttgggcttatgatagtaatttgacattttctgatcagccattcatttcttcagaagtggttaaattagagtctcctaatatttttaattaatgtgaaagtacagtagctcataaattatataatgcatgaaaatttatatgattataaatattcaggcatttaagaaataaaatgaagtattttgcctt

SEQ ID NO: 5501 - DNA, 2406 bp, Homo sapiens
rctcaagcatggcggcggcggcattgggcagctcctcaggctcggcgtccccggccgtggctgagctctgccagaacaccccggagacctttttggaggcctccaagctgctgctcacctatgctgacaacatcctcaggtgcagggcaacggggtcggacggcgggtaccggggtgggtgggccgcggcaccttgttcggccagggactggggcgtccggcctgagcttcagagggcagcgacgcccggacagaccgggacctggagctrgttctgctcctaacgtccgagcccgccggccaggggcctcgggacccggccaagtcccacccccgctcgagaaaaggaagtttctttgcagttgtgacttggcacctgcagtcagggtgctgcgggtgaactggagtcccggaagcggggccgggcggaggagaggtaggaaggcgtgcttcagacactgccgctcttctcgtcgtttaacggcctcagatatcgggacacaacggtaaccgcaccgcgcgtgtcattccccctgcgtgcatttttcgagcggagtggcttacatttccacatacttatcagaagttactcactgacaaagtgatgttttcttcccatgttgagactatccgagtactaaagcataatgcttctgaagtggtgggttttaaaatttttaattttttttctgcccacttttgttgattgaaacattatagtattttgaagttacagtttttatattaatacctggattctactatgtaacataaccctttaagaattcgtggaggtaatcgccttggatgagagtaatttccttcattctcctgtcagcaaaattgcacttctagaggtctaagggaccttgyagattttgggaattgggaggcaagtttgattattcattttgaataagtacccacctcaactcttcagatcaaatgatctgaagggacatggtgtgggggggtagggaaatggaactgaggttaaaggagagccacttgctttaggggtgttacctcatttatcaggtcaccgtgattaattaggttctctgttcccctcagcccctggtgcattaagtgtttggtatattgtcatgaagtctaaaaggaaattctcagtttcaaggttataggtttcacgtgacccaattttagacattagttacatgtgcagtttttaaaatccatgtcagtaatatttcatttaggcaatggtaatgatttttaaagtaaattgaagggaaaatatattgagcccttattttgtggcagatgctatgaaagatgcaacatgtggcctgttcacagctacataattgtgacctgtgtggggaccamcttcgtgctctgtgacaycttctcaactcaccttttttactctttgaggccttacagctcttcacagtacaaggatgccaagggactccataaatgaactgataggctgggttctccagagcccattagctgagacttaccacctggaaagccaccaggctatttaaaaccccactagtcagaaaagagaggtggccttgtaatgaagcctcacttctgctttaaatctagtgaaacccaaaatgctgaggtttagtatgagggggaaacctttgcatgcaaataatgacatttagcatcataatcttcattatgaatgtttactaatggctcgttgctgattttcgtttttgagacggagtttgctcttgttgatgaggctggagtgcagtggcgcgatcttgactcactgcaacctccgcctcacagcttcaagattctgaaagatgaggggtgtgacaatgagcgcaaaggatagtggacacactggaataatgctgagaaattaagagtttaagaaagtctttgtgcgttgcttttccaaggataggaaagaggatatgatgggtttgaagtctaatgtccctacagccctctaagtctttgagggctttagggtcaggcctttggtatcagtctatacacaaaaccacggtcagtttactcaacatacttaataagaaaaagaatttgaggaactggatgtgactgtcattgctggagcctgtttgcagtatacttttactgagaaaaatagattaatgtgaggtccagagatgatataaaaataaaattgctcactgggcacggtggctcacacctgtaaccccagcactgtgggaggccaaggtgggcggattgcttgagcttaggagtttgagaccagcctgggcaacatggctaaaccccgtctctacaaaaaaattaaaaaattagccaagcrtggtggcagacacctgtagtcccagctacttggagggcagaggtgggaggatggcttgagcccataatcatgccactgcattctagctttgatggcgaagtgagacctttctc

SEQ ID NO: 5502 - DNA, 2936 bp, Homo sapiens
ccccctcctccaggcccacacccctcagccccggagcccaggccccgcctctccctgcggaaccccttcccaacctgtacgaccaggccccaactctgggtcgaagcacctcgcccctgccggccgaggccccccaccttcttccgaacagccccttgccccccgcgaaggggcagccgtagctcccagccgagctcccccgctcctggccccggtccccgaccccgccccaggcccccgaccccgcccctgccggccgaagaccccgcccctgccggccgaggaccccgcccctgccggccgaggaccccgcccctgccggccgaggaccccgcccctgccggccgaggaccccgcccctgccggtggctgcggtagctgctgcgcgctgaggcgcctgctcagtgtgggacgcggagagcgaggggcggcggcggcgcccgctggcrctcaagcatggcggcggcggcattgggcagctcctcaggctcggcgtccccggccgtggctgagctctgccagaacaccccggagacctttttggaggcctccaagctgctgctcacctatgctgacaacatcctcagaaaccctaatgatgaaaaatatagatccatccggattggaaacacagccttttctactagactcttgcctgtcagaggagctgttgaatgtttatttgaaatgggctttgaagagggagaaacacatctcatctttcctaaaaaagcttcagtggagcagctgcaaaaaattcgtgacctgattgccatagagagaagtagcagactggatggctcaaataagagccacaaagtaaagtcatctcagcaacctgcagccagtacccagcttcctacaacaccatcttcaaatcccagtgggttaaaccagcacacaaggaaccgtcaagggcagtcatcagatccaccatctgcttcaacggttgctgctgactcagccattctagaagttcttcagtccaacattcagcatgtgctggtctatgaaaatcctgctcttcaggagaaagcgttggcttgtattccggtccaagaactaaaaaggaaatcacaagaaaagttatcgagagctagaaaattggataaaggtatcaatataagtgatgaggattttcttttgctggagcttttgcactggtttaaggaagaattttttcactgggtgaataacgttttgtgcagcaaatgtggtggacagactaggtctagagatagatcattactgcccagtgatgatgagctgaagtggggtgcaaaggaagtggaagatcattactgtgatgcctgccagttcagcaatcgattcccaagatataataaccctgagaaacttttggaaacaagatgtggacggtgtggcgagtgggccaattgttttacactgtgctgccgagctgtagggtttgaagctcgctatgtttgggattacacagaccatgtctggacagaagtctattctccttctcagcagcggtggctgcactgtgatgcatgtgaagatgtctgtgacaagccactcctttatgaaataggatggggcaagaagctttcctatgtcatagcattttcaaaagatgaggtagttgatgtcacttggcgatattcctgcaaacatgaagaggtgattgccagaagaactaaggttaaagaagcattacttcgagacactattaatgggcttaataagcagaggcaactgtttttgtcagaaaacagaaggaaagaacttctccagaggataattgtggagcttgttgaatttatatctcccaaaacccctaaacctggagaacttgggggaagaatatctgggtcagtggcttggagagtagcccgaggtgaaatgggtctacagagaaaagaaaccttgtttattccctgtgaaaatgagaagatttctaaacagctccacctttgttacaatattgtgaaagatcgttatgttcgagtttcaaataacaatcaaaccatttctggatgggagaatggcgtgtggaaaatggaatctatattcagaaaagttgaaacagactggcacatggtatatttggcccgaaaggaaggatcatcttttgcttatatttcctggaagtttgagtgtgggtcagttggcctaaaagtagatagcatttctattagaacaagtagtcaaacttttcagactggaacagtagaatggaaattgcgatctgatacagcacaagtagaactgacaggcgataacagtcttcactcctatgctgatttttctggtgccactgaagttattttggaagcagaattaagcagaggagatggtgatgtcgcttggcaacacacccagctgtttagacaaagcttaaatgaccatgaagaaaattgtttggagataattataaaattcagtgacctttgagaacctgaacattatagaaaagctggcaataatcaaggacttactgaagtagtctgttggttcagtgcatscttagttggcagttaccaccctgtgctagcatatttcttttgctagctatccatcatgtaaccctcatgaaaattatctttatacgtggactataataaaatattgaattaaaacctttcttccatatgtgactataatttggagtaaagtcttgttgactcaatatgggattttaatctaaaactgtaagtatggttttaaaagttaaataatgatattcatgattaaatgctattcatgattatgataaaatcttgggcttatgatagtaatttgacattttctgatcagccattcatttcttcagaagtggttaaattagagtctcctaatatttttaattaatgtgaaagtacagtagctcataaattatataatgcatgaaaatttatatgattataaatattcaggcatttaagaaataaaatgaagtattttgcctt

SEQ ID NO: 5503 - DNA, 2592 bp, Homo sapiens
cccctgccggccgaggaccccgcccctgccggccgaggaccccgcccctgccggccgaggaccccgcccctgccggtggctgcggtagctgctgcgcgctgaggcgcctgctcagtgtgggacgcggagagcgaggggcggcggcggcgcccgctggcrctcaagcatggcggcggcggcattgggcagctcctcaggctcggcgtccccggccgtggctgagctctgccagaacaccccggagacctttttggaggcctccaagctgctgctcacctatgctgacaacatcctcagaaaccctaatgatgaaaaatatagatccatccggattggaaacacagccttttctactagactcttgcctgtcagaggagctgttgaatgtttatttgaaatgggctttgaagagggagaaacacatctcatctttcctaaaaaagcttcagtggagcagctgcaaaaaattcgtgacctgattgccatagagagaagtagcagactggatggctcaaataagagccacaaagtaaagtcatctcagcaacctgcagccagtacccagcttcctacaacaccatcttcaaatcccagtgggttaaaccagcacacaaggaaccgtcaagggcagtcatcagatccaccatctgcttcaacggttgctgctgactcagccattctagaagttcttcagtccaacattcagcatgtgctggtctatgaaaatcctgctcttcaggagaaagcgttggcttgtattccggtccaagaactaaaaaggaaatcacaagaaaagttatcgagagctagaaaattggataaaggtatcaatataagtgatgaggattttcttttgctggagcttttgcactggtttaaggaagaattttttcactgggtgaataacgttttgtgcagcaaatgtggtggacagactaggtctagagatagatcattactgcccagtgatgatgagctgaagtggggtgcaaaggaagtggaagatcattactgtgatgcctgccagttcagcaatcgattcccaagatataataaccctgagaaacttttggaaacaagatgtggacggtgtggcgagtgggccaattgttttacactgtgctgccgagctgtagggtttgaagctcgctatgtttgggattacacagagttacagcgcacattaagcctaaaactgaccacgttaaaggagattggaaaaacatttttaaggatttcaaagagacagaaattaatacaggtagttgatgtcacttggcgatattcctgcaaacatgaagaggtgattgccagaagaactaaggttaaagaagcattacttcgagacactattaatgggcttaataagcagaggcaactgtttttgtcagaaaacagaaggaaagaacttctccagaggataattgtggagcttgttgaatttatatctcccaaaacccctaaacctggagaacttgggggaagaatatctgggtcagtggcttggagagtagcccgaggtgaaatgggtctacagagaaaagaaaccttgtttattccctgtgaaaatgagaagatttctaaacagctccacctttgttacaatattgtgaaagatcgttatgttcgagtttcaaataacaatcaaaccatttctggatgggagaatggcgtgtggaaaatggaatctatattcagaaaagttgaaacagactggcacatggtatatttggcccgaaaggaaggatcatcttttgcttatatttcctggaagtttgagtgtgggtcagttggcctaaaagtagatagcatttctattagaacaagtagtcaaacttttcagactggaacagtagaatggaaattgcgatctgatacagcacaagtagaactgacaggcgataacagtcttcactcctatgctgatttttctggtgccactgaagttattttggaagcagaattaagcagaggagatggtgatgtcgcttggcaacacacccagctgtttagacaaagcttaaatgaccatgaagaaaattgtttggagataattataaaattcagtgacctttgagaacctgaacattatagaaaagctggcaataatcaaggacttactgaagtagtctgttggttcagtgcatscttagttggcagttaccaccctgtgctagcatatttcttttgctagctatccatcatgtaaccctcatgaaaattatctttatacgtggactataataaaatattgaattaaaacctttcttccatatgtgactataatttggagtaaagtcttgttgactcaatatgggattttaatctaaaactgtaagtatggttttaaaagttaaataatgatattcatgattaaatgctattcatgattatgataaaatcttgggcttatgatagtaatttgacattttctgatcagccattcatttcttcagaagtggttaaattagagtctcctaatatttttaattaatgtgaaagtacagtagctcataaattatataatgcatgaaaatttatatgattataaatattcaggcatttaagaaataaaatgaagtattttgcctt

SEQ ID NO: 5504 - DNA, 2646 bp, Homo sapiens
cccctgccggccgaggaccccgcccctgccggccgaggaccccgcccctgccggccgaggaccccgcccctgccggtggctgcggtagctgctgcgcgctgaggcgcctgctcagtgtgggacgcggagagcgaggggcggcggcggcgcccgctggcrctcaagcatggcggcggcggcattgggcagctcctcaggctcggcgtccccggccgtggctgagctctgccagaacaccccggagacctttttggaggcctccaagctgctgctcacctatgctgacaacatcctcagaaaccctaatgatgaaaaatatagatccatccggattggaaacacagccttttctactagactcttgcctgtcagaggagctgttgaatgtttatttgaaatgggctttgaagagggagaaacacatctcatctttcctaaaaaagcttcagtggagcagctgcaaaaaattcgtgacctgattgccatagagagaagtagcagactggatggctcaaataagagccacaaagtaaagtcatctcagcaacctgcagccagtacccagcttcctacaacaccatcttcaaatcccagtgggttaaaccagcacacaaggaaccgtcaagggcagtcatcagatccaccatctgcttcaacggttgctgctgactcagccattctagaagttcttcagtccaacattcagcatgtgctggtctatgaaaatcctgctcttcaggagaaagcgttggcttgtattccggtccaagaactaaaaaggaaatcacaagaaaagttatcgagagctagaaaattggataaaggtatcaatataagtgatgaggattttcttttgctggagcttttgcactggtttaaggaagaattttttcactgggtgaataacgttttgtgcagcaaatgtggtggacagactaggtctagagatagatcattactgcccagtgatgatgagctgaagtggggtgcaaaggaagtggaagatcattactgtgatgcctgccagttcagcaatcgattcccaagatataataaccctgagaaacttttggaaacaagatgtggacggtgtggcgagtgggccaattgttttacactgtgctgccgagctgtagggtttgaagctcgctatgtttgggattacacagaccatgtctggacagaagtctattctccttctcagcagcggtggctgcactgtgatgcatgtgaagatgtctgtgacaagccactcctttatgaaataggatggggcaagaagctttcctatgtcatagcattttcaaaagatgaggtagttgatgtcacttggcgatattcctgcaaacatgaagaggtgattgccagaagaactaaggttaaagaagcattacttcgagacactattaatgggcttaataagcagaggcaactgtttttgtcagaaaacagaaggaaagaacttctccagaggataattgtggagcttgttgaatttatatctcccaaaacccctaaacctggagaacttgggggaagaatatctgggtcagtggcttggagagtagcccgaggtgaaatgggtctacagagaaaagaaaccttgtttattccctgtgaaaatgagaagatttctaaacagctccacctttgttacaatattgtgaaagatcgttatgttcgagtttcaaataacaatcaaaccatttctggatgggagaatggcgtgtggaaaatggaatctatattcagaaaagttgaaacagactggcacatggtatatttggcccgaaaggaaggatcatcttttgcttatatttcctggaagtttgagtgtgggtcagttggcctaaaagtagatagcatttctattagaacaagtagtcaaacttttcagactggaacagtagaatggaaattgcgatctgatacagcacaagtagaactgacaggcgataacagtcttcactcctatgctgatttttctggtgccactgaagttattttggaagcagaattaagcagaggagatggtgatgtcgcttggcaacacacccagctgtttagacaaagcttaaatgaccatgaagaaaattgtttggagataattataaaattcagtgacctttgagaacctgaacattatagaaaagctggcaataatcaaggacttactgaagtagtctgttggttcagtgcatscttagttggcagttaccaccctgtgctagcatatttcttttgctagctatccatcatgtaaccctcatgaaaattatctttatacgtggactataataaaatattgaattaaaacctttcttccatatgtgactataatttggagtaaagtcttgttgactcaatatgggattttaatctaaaactgtaagtatggttttaaaagttaaataatgatattcatgattaaatgctattcatgattatgataaaatcttgggcttatgatagtaatttgacattttctgatcagccattcatttcttcagaagtggttaaattagagtctcctaatatttttaattaatgtgaaagtacagtagctcataaattatataatgcatgaaaatttatatgattataaatattcaggcatttaagaaataaaatgaagtattttgcctt

SEQ ID NO: 5505 - DNA, 2724 bp, Homo sapiens
cggagagcgaggggcggcggcggcgcccgctggcrctcaagcatggcggcggcggcattgggcagctcctcaggctcggcgtccccggccgtggctgagctctgccagaacaccccggagacctttttggaggcctccaagctgctgctcacctatgctgacaacatcctcaggtgcagggcaacggggtcggacggcgggtaccggggtgggtgggccgcggcaccttgttcggccagggactggggcgtccggcctgagcttcagagggcagcgacgcccggacagaccgggacctggagctrgttctgctcctaacgtccgagcccgccggccaggggcctcgggacccggccaagtcccacccccgctcgagaaaaggaagtttctttgcagttgtgacttggcacctgcagtcagggtgctgcgggtgaactggagtcccggaagcggggccgggcggaggagaggtaggaaggcgtgcttcagacactgccgctcttctcgtcgtttaacggcctcagatatcgggacacaacgaaaccctaatgatgaaaaatatagatccatccggattggaaacacagccttttctactagactcttgcctgtcagaggagctgttgaatgtttatttgaaatgggctttgaagagggagaaacacatctcatctttcctaaaaaagcttcagtggagcagctgcaaaaaattcgtgacctgattgccatagagagaagtagcagactggatggctcaaataagagccacaaagtaaagtcatctcagcaacctgcagccagtacccagcttcctacaacaccatcttcaaatcccagtgggttaaaccagcacacaaggaaccgtcaagggcagtcatcagatccaccatctgcttcaacggttgctgctgactcagccattctagaagttcttcagtccaacattcagcatgtgctggtctatgaaaatcctgctcttcaggagaaagcgttggcttgtattccggtccaagaactaaaaaggaaatcacaagaaaagttatcgagagctagaaaattggataaaggtatcaatataagtgatgaggattttcttttgctggagcttttgcactggtttaaggaagaattttttcactgggtgaataacgttttgtgcagcaaatgtggtggacagactaggtctagagatagatcattactgcccagtgatgatgagctgaagtggggtgcaaaggaagtggaagatcattactgtgatgcctgccagttcagcaatcgattcccaagatataataaccctgagaaacttttggaaacaagatgtggacggtgtggcgagtgggccaattgttttacactgtgctgccgagctgtagggtttgaagctcgctatgtttgggattacacagaccatgtctggacagaagtctattctccttctcagcagcggtggctgcactgtgatgcatgtgaagatgtctgtgacaagccactcctttatgaaataggatggggcaagaagctttcctatgtcatagcattttcaaaagatgaggtagttgatgtcacttggcgatattcctgcaaacatgaagaggtgattgccagaagaactaaggttaaagaagcattacttcgagacactattaatgggcttaataagcagagaaaagaaaccttgtttattccctgtgaaaatgagaagatttctaaacagctccacctttgttacaatattgtgaaagatcgttatgttcgagtttcaaataacaatcaaaccatttctggatgggagaatggcgtgtggaaaatggaatctatattcagaaaagttgaaacagactggcacatggtatatttggcccgaaaggaaggatcatcttttgcttatatttcctggaagtttgagtgtgggtcagttggcctaaaagtagatagcatttctattagaacaagtagtcaaacttttcagactggaacagtagaatggaaattgcgatctgatacagcacaagtagaactgacaggcgataacagtcttcactcctatgctgatttttctggtgccactgaagttattttggaagcagaattaagcagaggagatggtgatgtcgcttggcaacacacccagctgtttagacaaagcttaaatgaccatgaagaaaattgtttggagataattataaaattcagtgacctttgagaacctgaacattatagaaaagctggcaataatcaaggacttactgaagtagtctgttggttcagtgcatscttagttggcagttaccaccctgtgctagcatatttcttttgctagctatccatcatgtaaccctcatgaaaattatctttatacgtggactataataaaatattgaattaaaacctttcttccatatgtgactataatttggagtaaagtcttgttgactcaatatgggattttaatctaaaactgtaagtatggttttaaaagttaaataatgatattcatgattaaatgctattcatgattatgataaaatcttgggcttatgatagtaatttgacattttctgatcagccattcatttcttcagaagtggttaaattagagtctcctaatatttttaattaatgtgaaagtacagtagctcataaattatataatgcatgaaaatttatatgattataaatattcaggcatttaagaaataaaatgaagtattttgcctt

SEQ ID NO: 5506 - DNA, 5768 bp, Homo sapiens
gtgcggtgttatgccggacaagagggaggtgaccgtggcggcggcggyggcggctctgtttattgtccctctcggtgtgtgtgtgtgaggaaatcggggctgcagcgaggctaaggctgcctttgaagcagcggcggcgaccgggacgactactctggcgactcgagtggctggccttcgcggagtgtgagaaggacaaggcacctctgcgtcctcgccacgtccgagcgcctcgggctccccggccgccctcgcggctcgcacgcccgggcttcagcccggcctgcagcggcgcccgcgggcgggcgagaaggcaacgccgccgctcggccgccgccggtcgctccctgctttctcctcagccgccgcgctaggcccgggcgacgcggacgccgcgcctcgagtttgagggcagccggcggcgcggcctcctcagcgggctcggctggacgtccgctccggatcttcgcgatggggcgcgggggtcggcgcggctaggagtgcggcgagtggagcggtgggtgcggagcggcggggcccagcggcccgcagggaggcgggagcggcggctgcggcctcagggcctgtgagctggaggcactcgccatggccaagtcgggtggctgcggcgcgggagccggcgtgggcggcggcaacggggcactgacctgggtgaacaatgctgcaaaaaaagaagagtcagaaactgccaacaaaaatgattcttcaaagaagttgtctgttgagagagtgtatcagaagaagacacaacttgaacacattcttcttcgtcctgatacatatattgggtcagtggagccattgacgcagttcatgtgggtgtatgatgaagatgtaggaatgaattgcagggaggttacctttgtgccaggtttatacaagatctttgatgaaattttggttaatgctgctgacaataaacagagggataagaacatgacttgtattaaagtttctattgatcctgaatctaacattataagcatttggaataatgggaaaggcattccagtagtagaacacaaggtrgagaaagtttatgttcctgctttaatttttggacagcttttaacatccagtaactatgatgatgatgagaaaaaagttacaggtggtcgtaatggttatggtgcaaaactttgtaatattttcagtacaaagtttacagtagaaacagcttgcaaagaatacaaacacagttttaagcagacatggatgaataatatgatgaagacttctgaagccaaaattaaacattttgatggtgaagattacacatgcataacattccaaccagatctgtccaaatttaagatggaaaaacttgacaaggatattgtggccctcatgactagaagggcatatgatttggctggttcgtgtagaggggtcaaggtcatgtttaatggaaagaaattgcctgtaaatggatttcgcagttatgtagatctttatgtgaaagacaaattggatgaaactggggtggccctgaaagttattcatgagcttgcaaatgaaagatgggatgtttgtctcacattgagtgaaaaaggattccagcaaatcagctttgtaaatagtattgcaactacaaaaggtggacggcacgtggattatgtggtagatcaagttgttggtaaactgattgaagtagttaagaaaaagaacaaagctggtgtatcagtgaaaccatttcaagtaaaaaaccatatatgggtttttattaattgccttattgaaaatccaacttttgattctcagactaaggaaaacatgactctgcagcccaaaagttttgggtctaaatgccagctgtcagaaaaattttttaaagcagcctctaattgtggcattgtagaaagtatcctgaactgggtgaaatttaaggctcagactcagctgaataagaagtgttcatcagtaaaatacagtaaaatcaaaggtattcccaaactggatgatgctaatgatgctggtggtaaacattccctggagtgtacactgatattaacagagggagactctgccaaatcactggctgtgtctggattaggtgtgattggacgagacagatacggagtttttccactcaggggcaaaattcttaatgtacgggaagcttctcataaacagatcatggaaaatgctgaaataaataatattattaaaatagttggtctacaatataagaaaagttacgatgatgcagaatctctgaaaaccttacgctatggaaagattatgattatgaccgatcaggatcaagatggttctcacataaaaggcctgcttattaatttcatccatcacaattggccatcacttttgaagcatggttttcttgaagagttcattactcctattgtaaaggcaagcaaaaataagcaggaactttccttctacagtattcctgaatttgacgaatggaaaaaacatatagaaaaccagaaagcctggaaaataaagtactataaaggattgggtactagtacagctaaagaagcaaaggaatattttgctgatatggaaaggcatcgcatcttgtttagatatgctggtcctgaagatgatgctgccattaccttggcatttagtaagaagaagattgatgacagaaaagaatggttaacaaattttatggaagaccggagacagcgtaggctacatggcttaccagagcaatttttatatggtactgcaacaaagcatttgacttataatgatttcatcaacaaggaattgattctcttctcaaactcagacaatgaaagatctataccatctcttgttgatggctttaaacctggccagcggaaagttttatttacctgtttcaagaggaatgataaacgtgaagtaaaagttgcccagttggctggctctgttgctgagatgtcggcttatcatcatggagaacaagcattgatgatgactattgtgaatttggctcagaactttgtgggaagtaacaacattaacttgcttcagcctattggtcagtttggaactcggcttcatggtggcaaagatgctgcaagccctcgttatattttcacaatgttaagcactttagcaaggctactttttcctgctgtggatgacaacctccttaagttcctttatgatgataatcaacgtgtagagcctgagtggtatattcctataattcccatggttttaataaatggtgctgagggcattggtactggatgggcttgtaaactacccaactatgatgctagggaaattgtgaacaatgtcagacgaatgctagatggcctggatcctcatcccatgcttccaaactacaaaaactttaaaggcacgattcaagaacttggtcaaaaccagtatgcagtcagtggtgaaatatttgtagtggacagaaacacagtagaaattacagagcttccagttagaacttggacacaggtatataaagaacaggttttagaacctatgctaaatggaacagataaaacaccagcattaatttctgattataaagaatatcatactgacacaactgtgaaatttgtggtgaaaatgactgaagagaaactagcacaagcagaagctgctggactgcataaagtttttaaacttcaaactactcttacttgtaattccatggtactttttgatcatatgggatgtctgaagaaatatgaaactgtgcaagacattctgaaagaattctttgatttacgattaagttattacggtttacgtaaggagtggcttgtgggaatgttgggagcagaatctacaaagcttaacaatcaagcccgtttcattttagagaagatacaagggaaaattactatagagaataggtcaaagaaagatttgattcaaatgttagtccagagaggttatgaatctgacccagtgaaagcctggaaagaagcacaagaaaaggcagcagaagaggatgaaacacaaaaccagcatgatgatagttcctccgattcaggaactccttcaggcccagattttaattatattttaaatatgtctctgtggtctcttactaaagaaaaagttgaagaactgattaaacagagagaygcaaaagggcgagaggtcaatgatcttaaaagaaaatctccttcagatctttggaaagaggatttagcggcatttgttgaagaactggatgtagtggaatctcaagaacgagaagatgttctggctggaatgtctggaaaagcaattaaaggtaaagttggcaaacctaaggtgaagaaactccagttggaagagacaatgccctcaccttatggcagaagaataattcctgaaattacagcyatgaaggcagatgccagcaaaaagttgctgaagaagaagaagggtgatcttgatactgcagcagtaaaagtggaatttgatgaagaattcagtggagcaccagtagaaggtgcaggagaagaggcattgactccatcagttcctataaataaaggtcccaaacctaagagggagaagaaggagcctggtaccagagtgagaaaaacacctrcatcatctggtaaacctagtgcaaagaaagtgaagaaacggaatccttggtcagatgatgaatccaagtcagaaagtgatttggaagaaacagaacctgtggttattccaagagattctttgcttaggagagcagcagccgaaagacctaaatacacatttgatttctcagaagaagaggatgatgatgctgatgatgatgatgatgacaataatgatttagaggaattgaaagttaaagcatctcccataacaaatgatggggaagatgaatttgttccttcagatgggttagataaagatgaatatacattttcaccaggcaaatcaaaagccactccagaaaaatctttgcatgacaaaaaaagtcaggattttggaaatctcttctcatttccttcatattctcagaagtcagaagatgattcagctaaatttgacagtaatgaagaagattctgcttctgttttttcaccatcatttggtctgaaacagacagataaagttccaagtaaaacggtagctgctaaaaagggaaaaccgtcttcagatacagtccctaagcccaagagagccccaaaacagaagaaagtagtagaggctgtaaactctgactcggattcagaatttggcattccaaagaagactacaacaccaaaaggtaaaggccgaggggcaaagaaaaggaaagcatctggctctgaaaatgaaggcgattataaccctggcaggaaaacatccaaaacaacaagcaagaaacygaagaagacatcttttgatcaggattcagatgtggacatcttcccctcagacttccctactgagccaccttctctgccacgaaccggtcgggctaggaaagaagtaaaatatttygcagagtctgatgaagaagawgatgtgcccaaagagcacaaacatttttcaacaaatakcttgtgttgtccttttgtcttctctgtctcagacttttgtacatctggcttattttaatgtgatgatgtaattgacggttttttattattgtggtaggccttttaacattttgttcttacacatacagttttatgctcttttttactcattgaaatgtcacgtactgtctgattggcttgtagaattgttatagactgccgtgcattagcacagattttaattgtcatggttacaaactacagacctgctttttgaaatgaaatttaaacattaaaaatggaactgtg

SEQ ID NO: 5507 - DNA, 6443 bp, Homo sapiens
gtgcggtgttatgccggacaagagggaggtgaccgtggcggcggcggyggcggctctgtttattgtccctctcggtgtgtgtgtgtgaggaaatcggggctgcagcgaggctaaggctgcctttgaagcagcggcggcgaccgggacgactactctggcgactcgagtggctggccttcgcggagtgtgagaaggacaaggcacctctgcgtcctcgccacgtccgagcgcctcgggctccccggccgccctcgcggctcgcacgcccgggcttcagcccggcctgcagcggcgcccgcgggcgggcgagaaggcaacgccgccgctcggccgccgccggtcgctccctgctttctcctcagccgccgcgctaggcccgggcgacgcggacgccgcgcctcgagtttgagggcagccggcggcgcggcctcctcagcgggctcggctggacgtccgctccggatcttcgcgatggggcgcgggggtcggcgcggctaggagtgcggcgagtggagcggtgggtgcggagcggcggggcccagcggcccgcagggaggcgggagcggcggctgcggcctcagggcctgtgagctggaggcactcgccatggccaagtcgggtggctgcggcgcgggagccggcgtgggcggcggcaacggggcactgacctgggtgactctttttgatcagaacaatgctgcaaaaaaagaagagtcagaaactgccaacaaaaatgattcttcaaagaagttgtctgttgagagagtgtatcagaagaagacacaacttgaacacattcttcttcgtcctgatacatatattgggtcagtggagccattgacgcagttcatgtgggtgtatgatgaagatgtaggaatgaattgcagggaggttacctttgtgccaggtttatacaagatctttgatgaaattttggttaatgctgctgacaataaacagagggataagaacatgacttgtattaaagtttctattgatcctgaatctaacattataagcatttggaataatgggaaaggcattccagtagtagaacacaaggtrgagaaagtttatgttcctgctttaatttttggacagcttttaacatccagtaactatgatgatgatgagaaaaaagttacaggtggtcgtaatggttatggtgcaaaactttgtaatattttcagtacaaagtttacagtagaaacagcttgcaaagaatacaaacacagttttaagcagacatggatgaataatatgatgaagacttctgaagccaaaattaaacattttgatggtgaagattacacatgcataacattccaaccagatctgtccaaatttaagatggaaaaacttgacaaggatattgtggccctcatgactagaagggcatatgatttggctggttcgtgtagaggggtcaaggtcatgtttaatggaaagaaattgcctgtaaatggatttcgcagttatgtagatctttatgtgaaagacaaattggatgaaactggggtggccctgaaagttattcatgagcttgcaaatgaaagatgggatgtttgtctcacattgagtgaaaaaggattccagcaaatcagctttgtaaatagtattgcaactacaaaaggtggacggcacgtggattatgtggtagatcaagttgttggtaaactgattgaagtagttaagaaaaagaacaaagctggtgtatcagtgaaaccatttcaagtaaaaaaccatatatgggtttttattaattgccttattgaaaatccaacttttgattctcagactaaggaaaacatgactctgcagcccaaaagttttgggtctaaatgccagctgtcagaaaaattttttaaagcagcctctaattgtggcattgtagaaagtatcctgaactgggtgaaatttaaggctcagactcagctgaataagaagtgttcatcagtaaaatacagtaaaatcaaaggtattcccaaactggatgatgctaatgatgctggtggtaaacattccctggagtgtacactgatattaacagagggagactctgccaaatcactggctgtgtctggattaggtgtgattggacgagacagatacggagtttttccactcaggggcaaaattcttaatgtacgggaagcttctcataaacagatcatggaaaatgctgaaataaataatattattaaaatagttggtctacaatataagaaaagttacgatgatgcagaatctctgaaaaccttacgctatggaaagattatgattatgaccgatcaggatcaagatggttctcacataaaaggcctgcttattaatttcatccatcacaattggccatcacttttgaagcatggttttcttgaagagttcattactcctattgtaaaggcaagcaaaaataagcaggaactttccttctacagtattcctgaatttgacgaatggaaaaaacatatagaaaaccagaaagcctggaaaataaagtactataaaggattgggtactagtacagctaaagaagcaaaggaatattttgctgatatggaaaggcatcgcatcttgtttagatatgctggtcctgaagatgatgctgccattaccttggcatttagtaagaagaagattgatgacagaaaagaatggttaacaaattttatggaagaccggagacagcgtaggctacatggcttaccagagcaatttttatatggtactgcaacaaagcatttgacttataatgatttcatcaacaaggaattgattctcttctcaaactcagacaatgaaagatctataccatctcttgttgatggctttaaacctggccagcggaaagttttatttacctgtttcaagaggaatgataaacgtgaagtaaaagttgcccagttggctggctctgttgctgagatgtcggcttatcatcatggagaacaagcattgatgatgactattgtgaatttggctcagaactttgtgggaagtaacaacattaacttgcttcagcctattggtcagtttggaactcggcttcatggtggcaaagatgctgcaagccctcgttatattttcacaatgttaagcactttagcaaggctactttttcctgctgtggatgacaacctccttaagttcctttatgatgataatcaacgtgtagagcctgagtggtatattcctataattcccatggttttaataaatggtgctgagggcattggtactggatgggcttgtaaactacccaactatgatgctagggaaattgtgaacaatgtcagacgaatgctagatggcctggatcctcatcccatgcttccaaactacaaaaactttaaaggcacgattcaagaacttggtcaaaaccagtatgcagtcagtggtgaaatatttgtagtggacagaaacacagtagaaattacagagcttccagttagaacttggacacaggtatataaagaacaggttttagaacctatgctaaatggaacagataaaacaccagcattaatttctgattataaagaatatcatactgacacaactgtgaaatttgtggtgaaaatgactgaagagaaactagcacaagcagaagctgctggactgcataaagtttttaaacttcaaactactcttacttgtaattccatggtactttttgatcatatgggatgtctgaagaaatatgaaactgtgcaagacattctgaaagaattctttgatttacgattaagttattacggtttacgtaaggagtggcttgtgggaatgttgggagcagaatctacaaagcttaacaatcaagcccgtttcattttagagaagatacaagggaaaattactatagagaataggtcaaagaaagatttgattcaaatgttagtccagagaggttatgaatctgacccagtgaaagcctggaaagaagcacaagaaaaggcagcagaagaggatgaaacacaaaaccagcatgatgatagttcctccgattcaggaactccttcaggcccagattttaattatattttaaatatgtctctgtggtctcttactaaagaaaaagttgaagaactgattaaacagagagaygcaaaagggcgagaggtcaatgatcttaaaagaaaatctccttcagatctttggaaagaggatttagcggcatttgttgaagaactggatgtagtggaatctcaagaacgagaagatgttctggctggaatgtctggaaaagcaattaaaggtaaagttggcaaacctaaggtgaagaaactccagttggaagagacaatgccctcaccttatggcagaagaataattcctgaaattacagcyatgaaggcagatgccagcaaaaagttgctgaagaagaagaagggtgatcttgatactgcagcagtaaaagtggaatttgatgaagaattcagtggagcaccagtagaaggtgcaggagaagaggcattgactccatcagttcctataaataaaggtcccaaacctaagagggagaagaaggagcctggtaccagagtgagaaaaacacctrcatcatctggtaaacctagtgcaaagaaagtgaagaaacggaatccttggtcagatgatgaatccaagtcagaaagtgatttggaagaaacagaacctgtggttattccaagagattctttgcttaggagagcagcagccgaaagacctaaatacacatttgatttctcagaagaagaggatgatgatgctgatgatgatgatgatgacaataatgatttagaggaattgaaagttaaagcatctcccataacaaatgatggggaagatgaatttgttccttcagatgggttagataaagatgaatatacattttcaccaggcaaatcaaaagccactccagaaaaatctttgcatgacaaaaaaagtcaggattttggaaatctcttctcatttccttcatattctcagaagtcagaagatgattcagctaaatttgacagtaatgaagaagattctgcttctgttttttcaccatcatttggtctgaaacagacagataaagttccaagtaaaacggtagctgctaaaaagggaaaaccgtcttcagatacagtccctaagcccaagagagccccaaaacagaagaaagtagtagaggctgtaaactctgactcggattcagaatttggcattccaaagaagactacaacaccaaaaggtaaaggccgaggggcaaagaaaaggaaagcatctggctctgaaaatgaaggcgattataaccctggcaggaaaacatccaaaacaacaagcaagaaacygaagaagacatcttttgatcaggattcagatgtggacatcttcccctcagacttccctactgagccaccttctctgccacgaaccggtcgggctaggaaagaagtaaaatatttygcagagtctgatgaagaagawgatgatgttgattttgcaatgtttaattaagtgcccaaagagcacaaacatttttcaacaaatakcttgtgttgtccttttgtcttctctgtctcagacttttgtacatctggcttattttaatgtgatgatgtaattgacggttttttattattgtggtaggccttttaacattttgttcttacacatacagttttatgctcttttttactcattgaaatgtcacgtactgtctgattggcttgtagaattgttatagactgccgtgcattagcacagattttaattgtcatggttacaaactacagacctgctttttgaaatgaaatttaaacattaaaaatggaactgtgttctctgtctctttactgaagataaaggtgtagtaaaagctcccacacacctttaaaataaatatattttattctttgccmggagactccatggaaaaaggtaaacagtatatgaacatagaaagcattgttaaacaaacaatctcaatgtacaaacagagccagtgaaagtacatcacagacttgctaatatatcaaaaaaaaaaaattccactagtgcttaaatgagaactaagaaactgacacttgtatctgttaaccactctaccacagctttcactctgcttcatagtgattgaacaaggtcaaaggaggcagattctatgcctgtttctttgggagttgttaatattaattagccccttggcatcaagaaggctggaaaaaaaaatcccaatatcaggcatgaatcaggaaggacactagagttacatggtccaggtggtagaccagcctgctaattatcccatgaaatttccctaatggcttgtgaacaagtaaacaaaaacttaacactgaaaagtgtttctgccttggaggctatcattactgtaaaaaaattttttttaactaactgtgtagttatgtcattaaacaagtaataaaccacttttaatttaaagtgacattaac

SEQ ID NO: 5508 - DNA, 6428 bp, Homo sapiens
gtgcggtgttatgccggacaagagggaggtgaccgtggcggcggcggyggcggctctgtttattgtccctctcggtgtgtgtgtgtgaggaaatcggggctgcagcgaggctaaggctgcctttgaagcagcggcggcgaccgggacgactactctggcgactcgagtggctggccttcgcggagtgtgagaaggacaaggcacctctgcgtcctcgccacgtccgagcgcctcgggctccccggccgccctcgcggctcgcacgcccgggcttcagcccggcctgcagcggcgcccgcgggcgggcgagaaggcaacgccgccgctcggccgccgccggtcgctccctgctttctcctcagccgccgcgctaggcccgggcgacgcggacgccgcgcctcgagtttgagggcagccggcggcgcggcctcctcagcgggctcggctggacgtccgctccggatcttcgcgatggggcgcgggggtcggcgcggctaggagtgcggcgagtggagcggtgggtgcggagcggcggggcccagcggcccgcagggaggcgggagcggcggctgcggcctcagggcctgtgagctggaggcactcgccatggccaagtcgggtggctgcggcgcgggagccggcgtgggcggcggcaacggggcactgacctgggtgaacaatgctgcaaaaaaagaagagtcagaaactgccaacaaaaatgattcttcaaagaagttgtctgttgagagagtgtatcagaagaagacacaacttgaacacattcttcttcgtcctgatacatatattgggtcagtggagccattgacgcagttcatgtgggtgtatgatgaagatgtaggaatgaattgcagggaggttacctttgtgccaggtttatacaagatctttgatgaaattttggttaatgctgctgacaataaacagagggataagaacatgacttgtattaaagtttctattgatcctgaatctaacattataagcatttggaataatgggaaaggcattccagtagtagaacacaaggtrgagaaagtttatgttcctgctttaatttttggacagcttttaacatccagtaactatgatgatgatgagaaaaaagttacaggtggtcgtaatggttatggtgcaaaactttgtaatattttcagtacaaagtttacagtagaaacagcttgcaaagaatacaaacacagttttaagcagacatggatgaataatatgatgaagacttctgaagccaaaattaaacattttgatggtgaagattacacatgcataacattccaaccagatctgtccaaatttaagatggaaaaacttgacaaggatattgtggccctcatgactagaagggcatatgatttggctggttcgtgtagaggggtcaaggtcatgtttaatggaaagaaattgcctgtaaatggatttcgcagttatgtagatctttatgtgaaagacaaattggatgaaactggggtggccctgaaagttattcatgagcttgcaaatgaaagatgggatgtttgtctcacattgagtgaaaaaggattccagcaaatcagctttgtaaatagtattgcaactacaaaaggtggacggcacgtggattatgtggtagatcaagttgttggtaaactgattgaagtagttaagaaaaagaacaaagctggtgtatcagtgaaaccatttcaagtaaaaaaccatatatgggtttttattaattgccttattgaaaatccaacttttgattctcagactaaggaaaacatgactctgcagcccaaaagttttgggtctaaatgccagctgtcagaaaaattttttaaagcagcctctaattgtggcattgtagaaagtatcctgaactgggtgaaatttaaggctcagactcagctgaataagaagtgttcatcagtaaaatacagtaaaatcaaaggtattcccaaactggatgatgctaatgatgctggtggtaaacattccctggagtgtacactgatattaacagagggagactctgccaaatcactggctgtgtctggattaggtgtgattggacgagacagatacggagtttttccactcaggggcaaaattcttaatgtacgggaagcttctcataaacagatcatggaaaatgctgaaataaataatattattaaaatagttggtctacaatataagaaaagttacgatgatgcagaatctctgaaaaccttacgctatggaaagattatgattatgaccgatcaggatcaagatggttctcacataaaaggcctgcttattaatttcatccatcacaattggccatcacttttgaagcatggttttcttgaagagttcattactcctattgtaaaggcaagcaaaaataagcaggaactttccttctacagtattcctgaatttgacgaatggaaaaaacatatagaaaaccagaaagcctggaaaataaagtactataaaggattgggtactagtacagctaaagaagcaaaggaatattttgctgatatggaaaggcatcgcatcttgtttagatatgctggtcctgaagatgatgctgccattaccttggcatttagtaagaagaagattgatgacagaaaagaatggttaacaaattttatggaagaccggagacagcgtaggctacatggcttaccagagcaatttttatatggtactgcaacaaagcatttgacttataatgatttcatcaacaaggaattgattctcttctcaaactcagacaatgaaagatctataccatctcttgttgatggctttaaacctggccagcggaaagttttatttacctgtttcaagaggaatgataaacgtgaagtaaaagttgcccagttggctggctctgttgctgagatgtcggcttatcatcatggagaacaagcattgatgatgactattgtgaatttggctcagaactttgtgggaagtaacaacattaacttgcttcagcctattggtcagtttggaactcggcttcatggtggcaaagatgctgcaagccctcgttatattttcacaatgttaagcactttagcaaggctactttttcctgctgtggatgacaacctccttaagttcctttatgatgataatcaacgtgtagagcctgagtggtatattcctataattcccatggttttaataaatggtgctgagggcattggtactggatgggcttgtaaactacccaactatgatgctagggaaattgtgaacaatgtcagacgaatgctagatggcctggatcctcatcccatgcttccaaactacaaaaactttaaaggcacgattcaagaacttggtcaaaaccagtatgcagtcagtggtgaaatatttgtagtggacagaaacacagtagaaattacagagcttccagttagaacttggacacaggtatataaagaacaggttttagaacctatgctaaatggaacagataaaacaccagcattaatttctgattataaagaatatcatactgacacaactgtgaaatttgtggtgaaaatgactgaagagaaactagcacaagcagaagctgctggactgcataaagtttttaaacttcaaactactcttacttgtaattccatggtactttttgatcatatgggatgtctgaagaaatatgaaactgtgcaagacattctgaaagaattctttgatttacgattaagttattacggtttacgtaaggagtggcttgtgggaatgttgggagcagaatctacaaagcttaacaatcaagcccgtttcattttagagaagatacaagggaaaattactatagagaataggtcaaagaaagatttgattcaaatgttagtccagagaggttatgaatctgacccagtgaaagcctggaaagaagcacaagaaaaggcagcagaagaggatgaaacacaaaaccagcatgatgatagttcctccgattcaggaactccttcaggcccagattttaattatattttaaatatgtctctgtggtctcttactaaagaaaaagttgaagaactgattaaacagagagaygcaaaagggcgagaggtcaatgatcttaaaagaaaatctccttcagatctttggaaagaggatttagcggcatttgttgaagaactggataaagtggaatctcaagaacgagaagatgttctggctggaatgtctggaaaagcaattaaaggtaaagttggcaaacctaaggtgaagaaactccagttggaagagacaatgccctcaccttatggcagaagaataattcctgaaattacagcyatgaaggcagatgccagcaaaaagttgctgaagaagaagaagggtgatcttgatactgcagcagtaaaagtggaatttgatgaagaattcagtggagcaccagtagaaggtgcaggagaagaggcattgactccatcagttcctataaataaaggtcccaaacctaagagggagaagaaggagcctggtaccagagtgagaaaaacacctrcatcatctggtaaacctagtgcaaagaaagtgaagaaacggaatccttggtcagatgatgaatccaagtcagaaagtgatttggaagaaacagaacctgtggttattccaagagattctttgcttaggagagcagcagccgaaagacctaaatacacatttgatttctcagaagaagaggatgatgatgctgatgatgatgatgatgacaataatgatttagaggaattgaaagttaaagcatctcccataacaaatgatggggaagatgaatttgttccttcagatgggttagataaagatgaatatacattttcaccaggcaaatcaaaagccactccagaaaaatctttgcatgacaaaaaaagtcaggattttggaaatctcttctcatttccttcatattctcagaagtcagaagatgattcagctaaatttgacagtaatgaagaagattctgcttctgttttttcaccatcatttggtctgaaacagacagataaagttccaagtaaaacggtagctgctaaaaagggaaaaccgtcttcagatacagtccctaagcccaagagagccccaaaacagaagaaagtagtagaggctgtaaactctgactcggattcagaatttggcattccaaagaagactacaacaccaaaaggtaaaggccgaggggcaaagaaaaggaaagcatctggctctgaaaatgaaggcgattataaccctggcaggaaaacatccaaaacaacaagcaagaaacygaagaagacatcttttgatcaggattcagatgtggacatcttcccctcagacttccctactgagccaccttctctgccacgaaccggtcgggctaggaaagaagtaaaatatttygcagagtctgatgaagaagawgatgatgttgattttgcaatgtttaattaagtgcccaaagagcacaaacatttttcaacaaatakcttgtgttgtccttttgtcttctctgtctcagacttttgtacatctggcttattttaatgtgatgatgtaattgacggttttttattattgtggtaggccttttaacattttgttcttacacatacagttttatgctcttttttactcattgaaatgtcacgtactgtctgattggcttgtagaattgttatagactgccgtgcattagcacagattttaattgtcatggttacaaactacagacctgctttttgaaatgaaatttaaacattaaaaatggaactgtgttctctgtctctttactgaagataaaggtgtagtaaaagctcccacacacctttaaaataaatatattttattctttgccmggagactccatggaaaaaggtaaacagtatatgaacatagaaagcattgttaaacaaacaatctcaatgtacaaacagagccagtgaaagtacatcacagacttgctaatatatcaaaaaaaaaaaattccactagtgcttaaatgagaactaagaaactgacacttgtatctgttaaccactctaccacagctttcactctgcttcatagtgattgaacaaggtcaaaggaggcagattctatgcctgtttctttgggagttgttaatattaattagccccttggcatcaagaaggctggaaaaaaaaatcccaatatcaggcatgaatcaggaaggacactagagttacatggtccaggtggtagaccagcctgctaattatcccatgaaatttccctaatggcttgtgaacaagtaaacaaaaacttaacactgaaaagtgtttctgccttggaggctatcattactgtaaaaaaattttttttaactaactgtgtagttatgtcattaaacaagtaataaaccacttttaatttaaagtgacattaac

SEQ ID NO: 5509 - DNA, 2685 bp, Homo sapiens
ggccccgggatgtgagtgccgcggggcgagggcgggggtgggctcccaggggtcccggtgggcgggcgcgctagggcgagggcggggacggccgggcgggcgcgccaggctacacacaacccagctgtaccagcatgtgccagagacacgctggccaatcgtgtactcgccgcgctacaacatcaccttcatgggcctggagaagctgcatccctttgatgccggaaaatggggcaaagtgatcaatttcctaaaagaagagaagcttctgtctgacagcatgctggtggaggcgcgggaggcctcggaggaggacctgctggtggtgcacacgaggcgctatcttaatgagctcaagggcaatgggcatgagcgagacttcatggacgacaagcgtgtgtacatcatggatgtctacaaccgccacatctacccaggggaccgctttgccaagcaggccatcaggcggaaggtggagctggagtggggcacagaggatgatgagtacctggataaggtggagaggaacatcaagaaatccctccaggagcacctgcccgacgtggtggtatacaatgcaggcaccgacatcctcgagggggaccgccttggggggctgtccatcagcccagcgggcatcgtgaagcgggatgagctggtgttccggatggtccgtggccgccgggtgcccatccttatggtgacctcaggcgggtaccagaagcgcacagcccgcatcattgctgactccatacttaatctgtttggcctggggctcattgggcctgagtcacccagcgtctccgcacagaactcagacacaccgctgcttccccctgcagtgccctgacccttgctgccctgcctgtcacgtggccctgcctatccgccccttagtgctttttgttttctaacctcatggggtggtggaggcagccttcagtgagcatggaggggcagggccatccctggctggggcctggagctggcccttcctctacttttccctgctggaagccagaagggcttgaggcctctatgggtgggggcagaaggcagagcctgtgtcccagggggacccacacgaagtcaccagcccataggtccagggaggcaggcagttaactgagaattggagaggacaggctaggtcccaggcacagcgagggccctgggcttggggtgttctggttttgagaacggcagacccaggtcggagtgaggaagcttccacctccatcctgactaggcctgcatcctaactgggcctccctccctccccttggtcatgggatttgctgccctctttgccccagagctgaagagctataggcactggtgtggatggcccaggaggtgctggagctaggtctccaggtgggcctggttcccaggcagcaggtgggaaccctgggcctggatgtgaggggcggtcaggaaggggtacaggtgggttccctcatctggagttccccctcaataaagcaaggtctggacctgccttcccaggcccttctgtgggggtgaaggtggggaaggcctgcggcgcccagatcactgccttagcagtagtcttgcctgttcagtgyaaggggcaggttttggggggaggaattcttagcgcaaggacgggcctcagccctgtcgcctccagggggccgctgacccaggtggggagagggcagaagaagggtgggggacgtgggcaggccaggctcacaggtggaaatcagggatgcagggtggtgcccaagccaggtcctgcaggaacccaggcccagggagggacccagacactggtgaggcggggcaggggttcctggagagagggcagcgaggatctctatcctggcctggggattatgaacataggtagccggggcagggccctgggtgggactgtggcctccactggcctcaccaaagtgcctgggccccaatccttctccatgcccaggggccccaggtgggccagacctctggcctgttcctcagccctactcatggggacattcagggacctccaggaagtgggcgggggagcatccacccctgctagccggcagctgtggccctgatcaaatcaggggctggggagggaaagtgggtccattgaggtggccctgctccatcagccccctacgggacttgtgttcattacagtgagggggtgctcccactgtctcccggcctccctaatgctccctctgctgcagggagaagggttccaagatcacaaaatgtcaacaatgctggcctcctggaccagaccccgaggctctaacaatgcactctgagatccctacccttgccgttggtctctgtcgctgactcgaggcacctaacatccattcacacccaacacaggccagcgacttctggggctcagccacagacatggtttgtcactgttgagcttctgttcctagagaatcctagaggcttgattggcccaggctgctgtgtgtgctggaggcaaagaatccctacctcctaggggtgaaaggaaatgaaaatggaaagttcttgtagcgcaaggcctgacatgggtagctgctcaataaatgctagtgtgttatttcatcttctgagtcctgtggagttggtaatgattcccatttcacagatgaggaaactgaggcttggcaggggtgagaaatttgccccaggccacacctcccagca

SEQ ID NO: 5510 - DNA, 2898 bp, Homo sapiens
ttcctgcgggcaggctctctgtgtcgcaacactggcggggcgggccaaatcggccagagctctgcccccagaggacgcggctaagcccgggggcgtgtcctgggctggccccacccgcgccccgccccgccccgcccggtcgcggagctgcggccagctttgggagggccggccccgggatgctacacacaacccagctgtaccagcatgtgccagagacacgctggccaatcgtgtactcgccgcgctacaacatcaccttcatgggcctggagaagctgcatccctttgatgccggaaaatggggcaaagtgatcaatttcctaaaagaagagaagcttctgtctgacagcatgctggtggaggcgcgggaggcctcggaggaggacctgctggtggtgcacacgaggcgctatcttaatgagctcaagggggtggcttccaccactgctccagcgaccgtggcgggggcttctgtgcctatgcggacatcacgctcgccatcaagtttctgtttgagcgtgtggagggcatctccagggctaccatcattgatcttgatgcccatcagggcaatgggcatgagcgagacttcatggacgacaagcgtgtgtacatcatggatgtctacaaccgccacatctacccaggggaccgctttgccaagcaggccatcaggcggaaggtggagctggagtggggcacagaggatgatgagtacctggataaggtggagaggaacatcaagaaatccctccaggagcacctgcccgacgtggtggtatacaatgcaggcaccgacatcctcgagggggaccgccttggggggctgtccatcagcccagcgggcatcgtgaagcgggatgagctggtgttccggatggtccgtggccgccgggtgcccatccttatggtgacctcaggcgggtaccagaagcgcacagcccgcatcattgctgactccatacttaatctgtttggcctggggctcattgggcctgagtcacccagcgtctccgcacagaactcagacacaccgctgcttccccctgcagtgccctgacccttgctgccctgcctgtcacgtggccctgcctatccgccccttagtgctttttgttttctaacctcatggggtggtggaggcagccttcagtgagcatggaggggcagggccatccctggctggggcctggagctggcccttcctctacttttccctgctggaagccagaagggcttgaggcctctatgggtgggggcagaaggcagagcctgtgtcccagggggacccacacgaagtcaccagcccataggtccagggaggcaggcagttaactgagaattggagaggacaggctaggtcccaggcacagcgagggccctgggcttggggtgttctggttttgagaacggcagacccaggtcggagtgaggaagcttccacctccatcctgactaggcctgcatcctaactgggcctccctccctccccttggtcatgggatttgctgccctctttgccccagagctgaagagctataggcactggtgtggatggcccaggaggtgctggagctaggtctccaggtgggcctggttcccaggcagcaggtgggaaccctgggcctggatgtgaggggcggtcaggaaggggtacaggtgggttccctcatctggagttccccctcaataaagcaaggtctggacctgccttcccaggcccttctgtgggggtgaaggtggggaaggcctgcggcgcccagatcactgccttagcagtagtcttgcctgttcagtgyaaggggcaggttttggggggaggaattcttagcgcaaggacgggcctcagccctgtcgcctccagggggccgctgacccaggtggggagagggcagaagaagggtgggggacgtgggcaggccaggctcacaggtggaaatcagggatgcagggtggtgcccaagccaggtcctgcaggaacccaggcccagggagggacccagacactggtgaggcggggcaggggttcctggagagagggcagcgaggatctctatcctggcctggggattatgaacataggtagccggggcagggccctgggtgggactgtggcctccactggcctcaccaaagtgcctgggccccaatccttctccatgcccaggggccccaggtgggccagacctctggcctgttcctcagccctactcatggggacattcagggacctccaggaagtgggcgggggagcatccacccctgctagccggcagctgtggccctgatcaaatcaggggctggggagggaaagtgggtccattgaggtggccctgctccatcagccccctacgggacttgtgttcattacagtgagggggtgctcccactgtctcccggcctccctaatgctccctctgctgcagggagaagggttccaagatcacaaaatgtcaacaatgctggcctcctggaccagaccccgaggctctaacaatgcactctgagatccctacccttgccgttggtctctgtcgctgactcgaggcacctaacatccattcacacccaacacaggccagcgacttctggggctcagccacagacatggtttgtcactgttgagcttctgttcctagagaatcctagaggcttgattggcccaggctgctgtgtgtgctggaggcaaagaatccctacctcctaggggtgaaaggaaatgaaaatggaaagttcttgtagcgcaaggcctgacatgggtagctgctcaataaatgctagtgtgttatttcatcttctgagtcctgtggagttggtaatgattcccatttcacagatgaggaaactgaggcttggcaggggtgagaaatttgccccaggccacacctcccagca

SEQ ID NO: 5511 - DNA, 1879 bp, Homo sapiens
ggccccgggatgtgagtgccgcggggcgagggcgggggtgggctcccaggggtcccggtgggcgggcgcgctagggcgagggcggggacggccgggcgggcgcgccaggctacacacaacccagctgtaccagcatgtgccagagacacgctggccaatcgtgtactcgccgcgctacaacatcaccttcatgggcctggagaagctgcatccctttgatgccggaaaatggggcaaagtgatcaatttcctaaaagaagagaagcttctgtctgacagcatgctggtggaggcgcgggaggcctcggaggaggacctgctggtggtgcacacgaggcgctatcttaatgagctcaagtggtcctttgctgttgctaccatcacagaaatcccccccgttatcttcctccccaacttccttgtgcagaggaaggtgctgaggccccttcggacccagacaggaggaaccataatggcggggaagctggctgtggagcgaggctgggccatcaacgtggggggtggcttccaccactgctccagcgaccgtggcgggggcttctgtgcctatgcggacatcacgctcgccatcaagtttctgtttgagcgtgtggagggcatctccagggctaccatcattgatcttgatgcccatcaggtgagtgccctgcaggggctggactcttaggggacctgccacccccagttccagaatcttcccggggcaggagagtctccctcctcatgtccccacggctctcacggcttctgtcttctgtctctcgggctacaaatgcagggtctgtctttgtcactctgtccaggacagcgggtcctcctcattgctcccgagggtcctccctccctcctcctgactgcccccacatgaggctcttcctgaagcccactctgatgggactgctctcgtgtgcagagctctgctgtgggtccccattgcttatgaataatttggggcactgccccctgcccagagctgctgagcactggccacctgcccctcaggcggatgcccacacacatggcttggctcgggcacctggggtcaccatttaagaactcggcgcctagggagtaaagtgtcaaagcagagggttacctcctcctcaggacccctaatgaggccagtgcctctggtcagacagggaggggacccagtgggctccggaaggcacccccctgcaccattactgctgtggctttgtgctagttggggccctgccttgggttcttgcgaccccgaactcctgagccaggtcacatgtggacagtcctttacrgtttgcttttcacatccctgatcccaaccagtcccaccacagacttgagagggtggcagagcgggatttcttcctctgatagggaacctaagagcactgggcttgctcaagcccatgctagaaggtgtcggggcctggttttaaggttgaatcccagctctgccccttaacagtcatgagacctgctgcccccgagagcaggccgtgctgccctggcaratggggagtttcctgagrggtgggtgggtggcagagccccagccttgcctagggcacctacccgagagcggctactgtgacctccccacagggcaatgggcatgagcgagacttcatggacgacaagcgtgtgtacatcatggatgtctacaaccgccacatctacccaggggaccgctttgccaagcgtaagctgctgcccctaccctcatcttgggtgtgtccttgtggatgaggctctctcctgagtgtctcctgtctgctaggccctgcagaagccactgcagtggttcatagcatccctgtgaggtgatcctttccattttacagatgaggaaaccgagacctggagaagtcactcg

SEQ ID NO: 5512 - DNA, 3058 bp, Homo sapiens
ttcctgcgggcaggctctctgtgtcgcaacactggcggggcgggccaaatcggccagagctctgcccccagaggacgcggctaagcccgggggcgtgtcctgggctggccccacccgcgccccgccccgccccgcccggtcgcggagctgcggccagctttgggagggccggccccgggatgctacacacaacccagctgtaccagcatgtgccagagacacgctggccaatcgtgtactcgccgcgctacaacatcaccttcatgggcctggagaagctgcatccctttgatgccggaaaatggggcaaagtgatcaatttcctaaaagaagagaagcttctgtctgacagcatgctggtggaggcgcgggaggcctcggaggaggacctgctggtggtgcacacgaggcgctatcttaatgagctcaagtggtcctttgctgttgctaccatcacagaaatcccccccgttatcttcctccccaacttccttgtgcagaggaaggtgctgaggccccttcggacccagacaggaggaaccataatggcggggaagctggctgtggagcgaggctgggccatcaacgtggggggtggcttccaccactgctccagcgaccgtggcgggggcttctgtgcctatgcggacatcacgctcgccatcaagtttctgtttgagcgtgtggagggcatctccagggctaccatcattgatcttgatgcccatcagggcaatgggcatgagcgagacttcatggacgacaagcgtgtgtacatcatggatgtctacaaccgccacatctacccaggggaccgctttgccaagcaggccatcaggcggaaggtggagctggagtggggcacagaggatgatgagtacctggataaggtggagaggaacatcaagaaatccctccaggagcacctgcccgacgtggtggtatacaatgcaggcaccgacatcctcgagggggaccgccttggggggctgtccatcagcccagcgggcatcgtgaagcgggatgagctggtgttccggatggtccgtggccgccgggtgcccatccttatggtgacctcaggcgggtaccagaagcgcacagcccgcatcattgctgactccatacttaatctgtttggcctggggctcattgggcctgagtcacccagcgtctccgcacagaactcagacacaccgctgcttccccctgcagtgccctgacccttgctgccctgcctgtcacgtggccctgcctatccgccccttagtgctttttgttttctaacctcatggggtggtggaggcagccttcagtgagcatggaggggcagggccatccctggctggggcctggagctggcccttcctctacttttccctgctggaagccagaagggcttgaggcctctatgggtgggggcagaaggcagagcctgtgtcccagggggacccacacgaagtcaccagcccataggtccagggaggcaggcagttaactgagaattggagaggacaggctaggtcccaggcacagcgagggccctgggcttggggtgttctggttttgagaacggcagacccaggtcggagtgaggaagcttccacctccatcctgactaggcctgcatcctaactgggcctccctccctccccttggtcatgggatttgctgccctctttgccccagagctgaagagctataggcactggtgtggatggcccaggaggtgctggagctaggtctccaggtgggcctggttcccaggcagcaggtgggaaccctgggcctggatgtgaggggcggtcaggaaggggtacaggtgggttccctcatctggagttccccctcaataaagcaaggtctggacctgccttcccaggcccttctgtgggggtgaaggtggggaaggcctgcggcgcccagatcactgccttagcagtagtcttgcctgttcagtgyaaggggcaggttttggggggaggaattcttagcgcaaggacgggcctcagccctgtcgcctccagggggccgctgacccaggtggggagagggcagaagaagggtgggggacgtgggcaggccaggctcacaggtggaaatcagggatgcagggtggtgcccaagccaggtcctgcaggaacccaggcccagggagggacccagacactggtgaggcggggcaggggttcctggagagagggcagcgaggatctctatcctggcctggggattatgaacataggtagccggggcagggccctgggtgggactgtggcctccactggcctcaccaaagtgcctgggccccaatccttctccatgcccaggggccccaggtgggccagacctctggcctgttcctcagccctactcatggggacattcagggacctccaggaagtgggcgggggagcatccacccctgctagccggcagctgtggccctgatcaaatcaggggctggggagggaaagtgggtccattgaggtggccctgctccatcagccccctacgggacttgtgttcattacagtgagggggtgctcccactgtctcccggcctccctaatgctccctctgctgcagggagaagggttccaagatcacaaaatgtcaacaatgctggcctcctggaccagaccccgaggctctaacaatgcactctgagatccctacccttgccgttggtctctgtcgctgactcgaggcacctaacatccattcacacccaacacaggccagcgacttctggggctcagccacagacatggtttgtcactgttgagcttctgttcctagagaatcctagaggcttgattggcccaggctgctgtgtgtgctggaggcaaagaatccctacctcctaggggtgaaaggaaatgaaaatggaaagttcttgtagcgcaaggcctgacatgggtagctgctcaataaatgctagtgtgttatttcatcttctgagtcctgtggagttggtaatgattcccatttcacagatgaggaaactgaggcttggcaggggtgagaaatttgccccaggccacacctcccagca

SEQ ID NO: 5513 - DNA, 3015 bp, Homo sapiens
ttcctgcgggcaggctctctgtgtcgcaacactggcggggcgggccaaatcggccagagctctgcccccagaggacgcggctaagcccgggggcgtgtcctgggctggccccacccgcgccccgccccgccccgcccggtcgcggagctgcggccagctttgggagggccggccccgggatgctacacacaacccagctgtaccagcatgtgccagagacacgctggccaatcgtgtactcgccgcgctacaacatcaccttcatgggcctggagaagctgcatccctttgatgccggaaaatggggcaaagtgatcaatttcctaaaagaagagaagcttctgtctgacagcatgctggtggaggcgcgggaggcctcggaggaggacctgctggtggtgcacacgaggcgctatcttaatgagctcaagtggtcctttgctgttgctaccatcacagaaatcccccccgttatcttcctccccaacttccttgtgcagaggaaggtgctgaggccccttcggacccagacaggaggaaccataatgggggtggcttccaccactgctccagcgaccgtggcgggggcttctgtgcctatgcggacatcacgctcgccatcaagtttctgtttgagcgtgtggagggcatctccagggctaccatcattgatcttgatgcccatcagggcaatgggcatgagcgagacttcatggacgacaagcgtgtgtacatcatggatgtctacaaccgccacatctacccaggggaccgctttgccaagcaggccatcaggcggaaggtggagctggagtggggcacagaggatgatgagtacctggataaggtggagaggaacatcaagaaatccctccaggagcacctgcccgacgtggtggtatacaatgcaggcaccgacatcctcgagggggaccgccttggggggctgtccatcagcccagcgggcatcgtgaagcgggatgagctggtgttccggatggtccgtggccgccgggtgcccatccttatggtgacctcaggcgggtaccagaagcgcacagcccgcatcattgctgactccatacttaatctgtttggcctggggctcattgggcctgagtcacccagcgtctccgcacagaactcagacacaccgctgcttccccctgcagtgccctgacccttgctgccctgcctgtcacgtggccctgcctatccgccccttagtgctttttgttttctaacctcatggggtggtggaggcagccttcagtgagcatggaggggcagggccatccctggctggggcctggagctggcccttcctctacttttccctgctggaagccagaagggcttgaggcctctatgggtgggggcagaaggcagagcctgtgtcccagggggacccacacgaagtcaccagcccataggtccagggaggcaggcagttaactgagaattggagaggacaggctaggtcccaggcacagcgagggccctgggcttggggtgttctggttttgagaacggcagacccaggtcggagtgaggaagcttccacctccatcctgactaggcctgcatcctaactgggcctccctccctccccttggtcatgggatttgctgccctctttgccccagagctgaagagctataggcactggtgtggatggcccaggaggtgctggagctaggtctccaggtgggcctggttcccaggcagcaggtgggaaccctgggcctggatgtgaggggcggtcaggaaggggtacaggtgggttccctcatctggagttccccctcaataaagcaaggtctggacctgccttcccaggcccttctgtgggggtgaaggtggggaaggcctgcggcgcccagatcactgccttagcagtagtcttgcctgttcagtgyaaggggcaggttttggggggaggaattcttagcgcaaggacgggcctcagccctgtcgcctccagggggccgctgacccaggtggggagagggcagaagaagggtgggggacgtgggcaggccaggctcacaggtggaaatcagggatgcagggtggtgcccaagccaggtcctgcaggaacccaggcccagggagggacccagacactggtgaggcggggcaggggttcctggagagagggcagcgaggatctctatcctggcctggggattatgaacataggtagccggggcagggccctgggtgggactgtggcctccactggcctcaccaaagtgcctgggccccaatccttctccatgcccaggggccccaggtgggccagacctctggcctgttcctcagccctactcatggggacattcagggacctccaggaagtgggcgggggagcatccacccctgctagccggcagctgtggccctgatcaaatcaggggctggggagggaaagtgggtccattgaggtggccctgctccatcagccccctacgggacttgtgttcattacagtgagggggtgctcccactgtctcccggcctccctaatgctccctctgctgcagggagaagggttccaagatcacaaaatgtcaacaatgctggcctcctggaccagaccccgaggctctaacaatgcactctgagatccctacccttgccgttggtctctgtcgctgactcgaggcacctaacatccattcacacccaacacaggccagcgacttctggggctcagccacagacatggtttgtcactgttgagcttctgttcctagagaatcctagaggcttgattggcccaggctgctgtgtgtgctggaggcaaagaatccctacctcctaggggtgaaaggaaatgaaaatggaaagttcttgtagcgcaaggcctgacatgggtagctgctcaataaatgctagtgtgttatttcatcttctgagtcctgtggagttggtaatgattcccatttcacagatgaggaaactgaggcttggcaggggtgagaaatttgccccaggccacacctcccagca

SEQ ID NO: 5514 - DNA, 2492 bp, Homo sapiens
tccacacggtaggctacacacaacccagctgtaccagcatgtgccagagacacgctggccaatcgtgtactcgccgcgctacaacatcaccttcatgggcctggagaagctgcatccctttgatgccggaaaatggggcaaagtgatcaatttcctaaaagaagagaagcttctgtctgacagcatgctggtggaggcgcgggaggcctcggaggaggacctgctggtggtgcacacgaggcgctatcttaatgagctcaagaggccatcaggcggaaggtggagctggagtggggcacagaggatgatgagtacctggataaggtggagaggaacatcaagaaatccctccaggagcacctgcccgacgtggtggtatacaatgcaggcaccgacatcctcgagggggaccgccttggggggctgtccatcagcccagcgggcatcgtgaagcgggatgagctggtgttccggatggtccgtggccgccgggtgcccatccttatggtgacctcaggcgggtaccagaagcgcacagcccgcatcattgctgactccatacttaatctgtttggcctggggctcattgggcctgagtcacccagcgtctccgcacagaactcagacacaccgctgcttccccctgcagtgccctgacccttgctgccctgcctgtcacgtggccctgcctatccgccccttagtgctttttgttttctaacctcatggggtggtggaggcagccttcagtgagcatggaggggcagggccatccctggctggggcctggagctggcccttcctctacttttccctgctggaagccagaagggcttgaggcctctatgggtgggggcagaaggcagagcctgtgtcccagggggacccacacgaagtcaccagcccataggtccagggaggcaggcagttaactgagaattggagaggacaggctaggtcccaggcacagcgagggccctgggcttggggtgttctggttttgagaacggcagacccaggtcggagtgaggaagcttccacctccatcctgactaggcctgcatcctaactgggcctccctccctccccttggtcatgggatttgctgccctctttgccccagagctgaagagctataggcactggtgtggatggcccaggaggtgctggagctaggtctccaggtgggcctggttcccaggcagcaggtgggaaccctgggcctggatgtgaggggcggtcaggaaggggtacaggtgggttccctcatctggagttccccctcaataaagcaaggtctggacctgccttcccaggcccttctgtgggggtgaaggtggggaaggcctgcggcgcccagatcactgccttagcagtagtcttgcctgttcagtgyaaggggcaggttttggggggaggaattcttagcgcaaggacgggcctcagccctgtcgcctccagggggccgctgacccaggtggggagagggcagaagaagggtgggggacgtgggcaggccaggctcacaggtggaaatcagggatgcagggtggtgcccaagccaggtcctgcaggaacccaggcccagggagggacccagacactggtgaggcggggcaggggttcctggagagagggcagcgaggatctctatcctggcctggggattatgaacataggtagccggggcagggccctgggtgggactgtggcctccactggcctcaccaaagtgcctgggccccaatccttctccatgcccaggggccccaggtgggccagacctctggcctgttcctcagccctactcatggggacattcagggacctccaggaagtgggcgggggagcatccacccctgctagccggcagctgtggccctgatcaaatcaggggctggggagggaaagtgggtccattgaggtggccctgctccatcagccccctacgggacttgtgttcattacagtgagggggtgctcccactgtctcccggcctccctaatgctccctctgctgcagggagaagggttccaagatcacaaaatgtcaacaatgctggcctcctggaccagaccccgaggctctaacaatgcactctgagatccctacccttgccgttggtctctgtcgctgactcgaggcacctaacatccattcacacccaacacaggccagcgacttctggggctcagccacagacatggtttgtcactgttgagcttctgttcctagagaatcctagaggcttgattggcccaggctgctgtgtgtgctggaggcaaagaatccctacctcctaggggtgaaaggaaatgaaaatggaaagttcttgtagcgcaaggcctgacatgggtagctgctcaataaatgctagtgtgttatttcatcttctgagtcctgtggagttggtaatgattcccatttcacagatgaggaaactgaggcttggcaggggtgagaaatttgccccaggccacacctcccagca

SEQ ID NO: 5515 - DNA, 1224 bp, Homo sapiens
gtgtcagtcttgctctgtcctacagggctgcyggcaatgggggggcctggccccggcccctgtgaggaccccgcgggtgctgggggagcaggtgcagggggctccgagcccctggtgactgtcaccgtgcagtgcgccttcacagtggccctgagggcacgaagaggagccgacctgtccagcctgcgggcactgctgggccaagccctccctcaccaggcccagcttgggcaactcagttacctagccccaggtgaggacgggcactgggtccccatccccgaggaggagtcgctgcagagggcctggcaggacgcagctgcctgccccagggggctgcagctgcagtgcaggggagccgggggtcggccggtcctctaccaggtggtggcccagcacagctactccgcccaggggccagaggacctgggcttccgacagggggacacggtggacgtcctgtgtgaaggtagggtgggcatggcccttcccaggcagcaccgtggtgcccggggtgtggggggcttagagctcggcctgtgctgtgagcagacgtggcacccagaggccacgcctgggtaacgccctgcagagccygatgtcccccttgcagtggaccaggcatggctggagggccactgtgacggccgcatcggcatcttccccaagtgcttcgtggtccccgccggccctyggatgtcaggagcccccggccrcctgccccgatcccagcagggagatcagccctaatgatgctgtgtccatgatgcttttaataaaaacaacccccactgcagtctcaccctccaagtgggkgtgggaggccgggctggcccagcagaagcccccaggcctggactccatccatctgctcagacaacagcagggagagcgggggtccaggtggggcagctccctcccttccacccctctccgcccctcctgaggccccatcaggagcaggacccctgtgcctccgtggtcttgccctgtttgcaggcagcatgtggccctgcagtcacacagcctggagacaccacgagtcctggcggcctgtgtgcagaaaggcacctacggccctggaagcccagttgcggaaggaggttgggggagggacgccgggaggggaggtcatgcagcctctgtggccagcaccaccctgacggtgccctggaggtggctgtcacctgaccgtgggcagagccacagagcaaggccccacgg

SEQ ID NO: 5516 - DNA, 1096 bp, Homo sapiens
gtgtcagtcttgctctgtcctacagggctgcyggcaatgggggggcctggccccggcccctgtgaggaccccgcgggtgctgggggagcaggtgcagggggctccgagcccctggtgactgtcaccgtgcagtgcgccttcacagtggccctgagggcacgaagaggagccgacctgtccagcctgcgggcactgctgggccaagccctccctcaccaggcccagcttgggcaactcagttacctagccccaggtgaggacgggcactgggtccccatccccgaggaggagtcgctgcagagggcctggcaggacgcagctgcctgccccagggggctgcagctgcagtgcaggggagccgggggtcggccggtcctctaccaggtggtggcccagcacagctactccgcccaggggccagaggacctgggcttccgacagggggacacggtggacgtcctgtgtgaagagccygatgtcccccttgcagtggaccaggcatggctggagggccactgtgacggccgcatcggcatcttccccaagtgcttcgtggtccccgccggccctyggatgtcaggagcccccggccrcctgccccgatcccagcagggagatcagccctaatgatgctgtgtccatgatgcttttaataaaaacaacccccactgcagtctcaccctccaagtgggkgtgggaggccgggctggcccagcagaagcccccaggcctggactccatccatctgctcagacaacagcagggagagcgggggtccaggtggggcagctccctcccttccacccctctccgcccctcctgaggccccatcaggagcaggacccctgtgcctccgtggtcttgccctgtttgcaggcagcatgtggccctgcagtcacacagcctggagacaccacgagtcctggcggcctgtgtgcagaaaggcacctacggccctggaagcccagttgcggaaggaggttgggggagggacgccgggaggggaggtcatgcagcctctgtggccagcaccaccctgacggtgccctggaggtggctgtcacctgaccgtgggcagagccacagagcaaggccc

SEQ ID NO: 5517 - DNA, 1077 bp, Homo sapiens
gtgtcagtcttgctctgtcctacagggctgcyggcaatgggggggcctggccccggcccctgtgaggaccccgcgggtgctgggggagcaggtgcagggggctccgagcccctggtgactgtcaccgtgcagtgcgccttcacagtggccctgagggcacgaagaggagccgacctgtccagcctgcgggcactgctgggccaagccctccctcaccaggcccagcttgggcaactcagttacctagccccaggtgaggacgggcactgggtccccatccccgaggaggagtcgctgcagagggcctggcaggacgcagctgcctgccccagggggctgcagctgcagtgcaggggagccgggggtcggccggtcctctaccaggtggtggcccagcacagctactccgcccaggggccagaggacctgggcttccgacagggggacacggtggacgtcctgtgtgaagtggaccaggcatggctggagggccactgtgacggccgcatcggcatcttccccaagtgcttcgtggtccccgccggccctyggatgtcaggagcccccggccrcctgccccgatcccagcagggagatcagccctaatgatgctgtgtccatgatgcttttaataaaaacaacccccactgcagtctcaccctccaagtgggkgtgggaggccgggctggcccagcagaagcccccaggcctggactccatccatctgctcagacaacagcagggagagcgggggtccaggtggggcagctccctcccttccacccctctccgcccctcctgaggccccatcaggagcaggacccctgtgcctccgtggtcttgccctgtttgcaggcagcatgtggccctgcagtcacacagcctggagacaccacgagtcctggcggcctgtgtgcagaaaggcacctacggccctggaagcccagttgcggaaggaggttgggggagggacgccgggaggggaggtcatgcagcctctgtggccagcaccaccctgacggtgccctggaggtggctgtcacctgaccgtgggcagagccacagagcaaggcccca

SEQ ID NO: 5518 - DNA, 4464 bp, Homo sapiens
gaaaccttacagaaacatgaagccctcaaccatctgctactcagttattcggggctgacggcggcttctagaacatccaggtgttctgcagatgcgagaactcatcctgtagtcaccagatggagtcccaaacagccaagcagatgtaaggcctgtgctgtggctctgaggccctgaatacagaagggtcactttcttagtggccaaagagcagttgttgacattgatgtctaattattgaacacgaccagtcattttactgagctgcrgtgaggaaacactgaccatagaagatcaagccaaatgagggattgcaaatttcctgattcttttgaattaggattccagatgggggcctcatttctacagcccccaacattcctatagccgttatcactgccatcaccactgccaccagcatcttcttgcagattccacccctgctccccagagacttcctgctttgaaagtgagcagaaaggaagctctcagaaaaatctctagtggtggctgccgtcgctccagacaatcggaatcctgccttcaccaccatgggctggctttttctaaaggttttgttggygggagtgagtttctcaggatttctttatcctcttgtggatttttgcatcagtggraaaacaagaggacagaagccaaactttgtgattattttggccgatgacatggggtggggtgacctgggagcaaactgggcagaaacaaaggacactgccaaccttgataagatggcttcggagggaatgaggtttgtggatttccatgcagctgcctccacctgctcaccctcccgggcttccttgctcaccggccggcttggccttcgcaatggagtcacacgcaactttgcagtcacttctgtgggaggccttccgctcaacgagaccaccttggcagaggtgctgcagcaggcgggttacgtcactgggataataggcaaatggcatcttggacaccacggctcttatcaccccaacttccgtggttttgattactactttggaatcccatatagccatgatatgggctgtactgatactccaggctacaaccaccctccttgtccagcgtgtccacagggtgatggaccatcaaggaaccttcaaagagactgttacactgacgtggccctccctctttatgaaaacctcaacattgtggagcagccggtgaacttgagcagccttgcccagaagtatgctgagaaagcaacccagttcatccagcgtgcaagcascagcgggaggcccttcctgctctatgtggctctggcccacatgcacgtgcccttaccygtgactcagctaccagcagcgccacggggcagaagcctgtatggtgcagggctcygggagatggacagtctggtgggccagatcaaggacaaagttgaccacacagtgaaggaaaacacattcctctggtttacaggagacaatggcccgtgggctcagaagtgtgagctagcgggcagtgtgggtcccttcactggattttggcaaactcgtcaagggggaagtccagccaagcagacgacctgggaaggagggcaccgggtcccagcactggcttactggcctggcagagttccagttaatgtcaccagcactgccttgttaagcgtgctggacatttttccractgtggtagccctggcccaggccagcttacctcaaggacggcrctttgatggtgtggacgtctccgaggtgctctttggcyggtcacagcctgggcacagggtgctgttccaccccaacagyggggcagctggagagtttggagccctgcagactgtccgcctggagcgttacaaggccttctacattaccggtggagccagggcgtgtgatgggagcayggggcctgagctgcagcataagtttcctctgattttcaacctggaagacgataccgcagaagctgtgcccctagaaagaggtggtgcggagtaccaggctgtgctgcccgaggtcagaaaggttcttgcagacgtcctccaagacaytgccaaygacaacatctccagcgcagattacactcaggacccttcagtaactccctgctgtaatccctaccaaattgcctgccgctgtcaagccgcataacagaccaatttttattccacraggaggagtacctggaaattaggcaagtttgcttccaaatttcatttttaccctctttacaaacacacgctttagtttagtcttggagtttagttttggagttagccttgcatatcccttctgtatcctgtccctcctccacgccgacccgagagcagctgagctgcgctggctctgggcagggagtgtgccttaatgggaagcacacgggctttggagtcaggcacaggtgccagctccagcttttgaacttgggcaattgtttaacctaacctgcaagttgattttgagggttaaataaaggcatacatgaaaatgcctggcaaattacctgacacagagcagacattcaatacattttagtttccttgtttctctggttcccagtttctctggtcattttggtgtaaatccattctaattagtatttagggcagagcttctctctcttttctctttttttccttccacaaaccagtgtactcactggtctccatctttaatatgcaaacaaatcacctgggatcttgtgagaatccggattccgtctcagtagggctcgagtagatcctgaaatcctacatttctatcaaacaatgccttgaggagcacagatttagaccaaagttaggtcgttttccagatctcagagcagacgagtccatggataagtctgtggcccaatccccttcctctccttttaagggtgaaatgactgcatttaaaagaagttaaagagttcctcctgtcccctataaccacaaggaaacaaaaaaatatataaaaacctcaaaaatgcattgccatgattttattattagtgtccaaaatgggactcccaagtaataaatgatttattccagccacagccaaaaaagactttgcctggctaaaagagtctctctctaagtatgtaatatacaagaaatacaattcaaagagatgttcctataagtacattttttacacggcatatatttaaaaaggakgccccttttaatataaaattccggttatataccaatatggttaattagcatttacactatagtttgaacgtattttaaatagcatgatgtgtatacaatgtctcccgcgcccattggcaaccagggtcgtgggaagcttggtgaggagttaaccaggtcctgtggtttaagcagtggagcacccgggattcctgcccccctttctgctcacacaattgcactccattcttccgccttccttgttttctccaaaaccacctgataggggggatgtcctgatttctgaggtgtgcttctcatcatgactgcttcgttttgcccttctgatttccacggcacaagattatctaccaaaatcaaaacagaatggccttactcttctcaggaagaggctggtaggcaggtgcattatcaacaggtctgtgcccatgcagagtgagcagggagaggctgggcactgtggaatttttctgtctgaactcgctcatggccacagaatggtcacccagcttatttaggtgtagacaagtatgacacagttctagaaaatactgactataaaaatgtctctgtgtgtgtgtgtatgtatttatatgtatatgtatatatttttaaaaggctcatcttacttgtaaacatggactgctcaatcactattaaaaagtcagtttaggctgggcgcggtggctcacgcctgtaatcccagaactttgggaggctgaggtgggtggatcactaggtcaggagtttgagaccagcctggccaacatggtgaaaccccatcgctactaaaaaatacaaaaattagccgggcatgstggcgctcacctgtaatcccagctactcgggaggctgaggcaggagagaatcgcttgaaccggggaggtggaggctgcagtgagccgagatcgcaccactgcactccagcctgggygatggagcaagactccatctcaaaaaaaaaaaagtcagtttaggctgggcgcagtggctcacacctgtaatcccagcactttaggaggctgaggggggtgatcacctgaggtcaggagtttgagaccagcctggccaacatggtgaaatcctgtctctactaaaaatacaaaatttagctgggcatggtagcatgcctgaaaccccagctacttgggaggctgaggcactagaatcacttgaacctaggaggtggaggttgcagtgagtggagatcacgccaacacattctagcctgagggacagagtgagactctatcatctcaaaaaaaaaaaaaaaaaaaaaaagggaaggtcagtttatacccttgggcctgatttcctgactcttg

SEQ ID NO: 5519 - DNA, 2393 bp, Homo sapiens
cgcgcgccgtcccacgtggacctgagccgcgccggtcgcgcgcccgccagcctgccgcctgggctgggggtcacgaaaggaaaccttacagaaacatgaagccctcaaccatctgctactcagttattcggggctgacggcggcttctagaacatccaggtgttctgcagatgcgagaactcatcctgtagtcaccagatggagtcccaaacagccaagcagatgtaaggcctgtgctgtggctctgaggccctgaatacagaagggtcactttcttagtggccaaagagcagttgttgacattgatgtctaattattgaacacgaccagtcattttactgagctgcrgtgaggaaacactgaccatagaagatcaagccaaatgagggattgcaaatttcctgattcttttgaattaggattccagatgggggcctcatttctacagcccccaacattcctatagccgttatcactgccatcaccactgccaccagcatcttcttgcagattccacccctgctccccagagacttcctgctttgaaagtgagcagaaaggaagctctcagaaaaatctctagtggtggctgccgtcgctccagacaatcggaatcctgccttcaccaccatgggctggctttttctaaaggttttgttggygggagtgagtttctcaggatttctttatcctcttgtggatttttgcatcagtggraaaacaagaggacagaagccaaactttgtgattattttggccgatgacatggggtggggtgacctgggagcaaactgggcagaaacaaaggacactgccaaccttgataagatggcttcggagggaatgaggtttgtggatttccatgcagctgcctccacctgctcaccctcccgggcttccttgctcaccggccggcttggccttcgcaatggagtcacacgcaactttgcagtcacttctgtgggaggccttccgctcaacgagaccaccttggcagaggtgctgcagcaggcgggttacgtcactgggataataggcaaatggcatcttggacaccacggctcttatcaccccaacttccgtggttttgattactactttggaatcccatatagccatgatatgggctgtactgatactccaggctacaaccaccctccttgtccagcgtgtccacagggtgatggaccatcaaggaaccttcaaagagactgttacactgacgtggccctccctctttatgaaaacctcaacattgtggagcagccggtgaacttgagcagccttgcccagaagtatgctgagaaagcaacccagttcatccagcgtgcaagcascagcgggaggcccttcctgctctatgtggctctggcccacatgcacgtgcccttaccygtgactcagctaccagcagcgccacggggcagaagcctgtatggtgcagggctcygggagatggacagtctggtgggccagatcaaggacaaagttgaccacacagtgaaggaaaacacattcctctggtttacaggagacaatggcccgtgggctcagaagtgtgagctagcgggcagtgtgggtcccttcactggattttggcaaactcgtcaagggggaagtccagccaagcagacgacctgggaaggagggcaccgggtcccagcactggcttactggcctggcagagttccagttaatgtcaccagcactgccttgttaagcgtgctggacatttttccractgtggtagccctggcccaggccagcttacctcaaggacggcrctttgatggtgtggacgtctccgaggtgctctttggcyggtcacagcctgggcacagggtgctgttccaccccaacagyggggcagctggagagtttggagccctgcagactgtccgcctggagcgttacaaggccttctacattaccggtggagccagggcgtgtgatgggagcayggggcctgagctgcagcataagtttcctctgattttcaacctggaagacgataccgcagaagctgtgcccctagaaagaggtggtgcggagtaccaggctgtgctgcccgaggtcagaaaggttcttgcagacgtcctccaagacaytgccaaygacaacatctccagcgcagattacactcaggacccttcagtaactccctgctgtaatccctaccaaattgcctgccgctgtcaagccgcataacagaccaatttttattccacraggaggagtacctggaaattaggcaaggagaagaaacaactggctcatgcccagcttcctggcactgaatgggcacacaggcctcaggacaaactttcttactggttcttcaattaagcacctccccttttcctttttaccccaaataaatgatctgcacaagg

SEQ ID NO: 5520 - DNA, 4543 bp, Homo sapiens
cgcgcgccgtcccacgtggacctgagccgcgccggtcgcgcgcccgccagcctgccgcctgggctgggggtcacgaaaggaaaccttacagaaacatgaagccctcaaccatctgctactcagttattcggggctgacggcggcttctagaacatccaggtgttctgcagatgcgagaactcatcctgtagtcaccagatggagtcccaaacagccaagcagatgtaaggcctgtgctgtggctctgaggccctgaatacagaagggtcactttcttagtggccaaagagcagttgttgacattgatgtctaattattgaacacgaccagtcattttactgagctgcrgtgaggaaacactgaccatagaagatcaagccaaatgagggattgcaaatttcctgattcttttgaattaggattccagatgggggcctcatttctacagcccccaacattcctatagccgttatcactgccatcaccactgccaccagcatcttcttgcagattccacccctgctccccagagacttcctgctttgaaagtgagcagaaaggaagctctcagaaaaatctctagtggtggctgccgtcgctccagacaatcggaatcctgccttcaccaccatgggctggctttttctaaaggttttgttggygggagtgagtttctcaggatttctttatcctcttgtggatttttgcatcagtggraaaacaagaggacagaagccaaactttgtgattattttggccgatgacatggggtggggtgacctgggagcaaactgggcagaaacaaaggacactgccaaccttgataagatggcttcggagggaatgaggtttgtggatttccatgcagctgcctccacctgctcaccctcccgggcttccttgctcaccggccggcttggccttcgcaatggagtcacacgcaactttgcagtcacttctgtgggaggccttccgctcaacgagaccaccttggcagaggtgctgcagcaggcgggttacgtcactgggataataggcaaatggcatcttggacaccacggctcttatcaccccaacttccgtggttttgattactactttggaatcccatatagccatgatatgggctgtactgatactccaggctacaaccaccctccttgtccagcgtgtccacagggtgatggaccatcaaggaaccttcaaagagactgttacactgacgtggccctccctctttatgaaaacctcaacattgtggagcagccggtgaacttgagcagccttgcccagaagtatgctgagaaagcaacccagttcatccagcgtgcaagcascagcgggaggcccttcctgctctatgtggctctggcccacatgcacgtgcccttaccygtgactcagctaccagcagcgccacggggcagaagcctgtatggtgcagggctcygggagatggacagtctggtgggccagatcaaggacaaagttgaccacacagtgaaggaaaacacattcctctggtttacaggagacaatggcccgtgggctcagaagtgtgagctagcgggcagtgtgggtcccttcactggattttggcaaactcgtcaagggggaagtccagccaagcagacgacctgggaaggagggcaccgggtcccagcactggcttactggcctggcagagttccagttaatgtcaccagcactgccttgttaagcgtgctggacatttttccractgtggtagccctggcccaggccagcttacctcaaggacggcrctttgatggtgtggacgtctccgaggtgctctttggcyggtcacagcctgggcacagggtgctgttccaccccaacagyggggcagctggagagtttggagccctgcagactgtccgcctggagcgttacaaggccttctacattaccggtggagccagggcgtgtgatgggagcayggggcctgagctgcagcataagtttcctctgattttcaacctggaagacgataccgcagaagctgtgcccctagaaagaggtggtgcggagtaccaggctgtgctgcccgaggtcagaaaggttcttgcagacgtcctccaagacaytgccaaygacaacatctccagcgcagattacactcaggacccttcagtaactccctgctgtaatccctaccaaattgcctgccgctgtcaagccgcataacagaccaatttttattccacraggaggagtacctggaaattaggcaagtttgcttccaaatttcatttttaccctctttacaaacacacgctttagtttagtcttggagtttagttttggagttagccttgcatatcccttctgtatcctgtccctcctccacgccgacccgagagcagctgagctgcgctggctctgggcagggagtgtgccttaatgggaagcacacgggctttggagtcaggcacaggtgccagctccagcttttgaacttgggcaattgtttaacctaacctgcaagttgattttgagggttaaataaaggcatacatgaaaatgcctggcaaattacctgacacagagcagacattcaatacattttagtttccttgtttctctggttcccagtttctctggtcattttggtgtaaatccattctaattagtatttagggcagagcttctctctcttttctctttttttccttccacaaaccagtgtactcactggtctccatctttaatatgcaaacaaatcacctgggatcttgtgagaatccggattccgtctcagtagggctcgagtagatcctgaaatcctacatttctatcaaacaatgccttgaggagcacagatttagaccaaagttaggtcgttttccagatctcagagcagacgagtccatggataagtctgtggcccaatccccttcctctccttttaagggtgaaatgactgcatttaaaagaagttaaagagttcctcctgtcccctataaccacaaggaaacaaaaaaatatataaaaacctcaaaaatgcattgccatgattttattattagtgtccaaaatgggactcccaagtaataaatgatttattccagccacagccaaaaaagactttgcctggctaaaagagtctctctctaagtatgtaatatacaagaaatacaattcaaagagatgttcctataagtacattttttacacggcatatatttaaaaaggakgccccttttaatataaaattccggttatataccaatatggttaattagcatttacactatagtttgaacgtattttaaatagcatgatgtgtatacaatgtctcccgcgcccattggcaaccagggtcgtgggaagcttggtgaggagttaaccaggtcctgtggtttaagcagtggagcacccgggattcctgcccccctttctgctcacacaattgcactccattcttccgccttccttgttttctccaaaaccacctgataggggggatgtcctgatttctgaggtgtgcttctcatcatgactgcttcgttttgcccttctgatttccacggcacaagattatctaccaaaatcaaaacagaatggccttactcttctcaggaagaggctggtaggcaggtgcattatcaacaggtctgtgcccatgcagagtgagcagggagaggctgggcactgtggaatttttctgtctgaactcgctcatggccacagaatggtcacccagcttatttaggtgtagacaagtatgacacagttctagaaaatactgactataaaaatgtctctgtgtgtgtgtgtatgtatttatatgtatatgtatatatttttaaaaggctcatcttacttgtaaacatggactgctcaatcactattaaaaagtcagtttaggctgggcgcggtggctcacgcctgtaatcccagaactttgggaggctgaggtgggtggatcactaggtcaggagtttgagaccagcctggccaacatggtgaaaccccatcgctactaaaaaatacaaaaattagccgggcatgstggcgctcacctgtaatcccagctactcgggaggctgaggcaggagagaatcgcttgaaccggggaggtggaggctgcagtgagccgagatcgcaccactgcactccagcctgggygatggagcaagactccatctcaaaaaaaaaaaagtcagtttaggctgggcgcagtggctcacacctgtaatcccagcactttaggaggctgaggggggtgatcacctgaggtcaggagtttgagaccagcctggccaacatggtgaaatcctgtctctactaaaaatacaaaatttagctgggcatggtagcatgcctgaaaccccagctacttgggaggctgaggcactagaatcacttgaacctaggaggtggaggttgcagtgagtggagatcacgccaacacattctagcctgagggacagagtgagactctatcatctcaaaaaaaaaaaaaaaaaaaaaaagggaaggtcagtttatacccttgggcctgatttcctgactcttg

SEQ ID NO: 5521 - DNA, 1851 bp, Homo sapiens
gcgggcgggctgctgaggtggctgtcgccgggccgcggacgctcccccgggcggggttgagtcggcgctcagctgcttctctttcaaccaggactgcacatccctagcaaytggaactaaagccgggtataagctgttttctctgagttctgtggagcagctggatcaagtccacggaagcaatgaaatcccggacgtctacatcgtggagcgcctcttctccagcagcctggtggtggtagtcagtcacacaaaaccacggcagatgaacgtgtatcacttcaagaaaggcacagagatctgtaattacagctactccagcaacatcttgtccataaggctgaaccggcaaaggctgctggtttgcctagaagagtccatttatattcacaacattaaagacatgaagctgttgaagaccctcctggatattcctgcaaacccaacaggtctatgtgctctctctatcaaccattccaattcttacctggcctatcctggaagcctgacttcaggggagattgtgctttatgatggaaactccctgaaaacagtctgcactattgctgcccatgagggaacactagctgccatcaccttcaatgcctcaggctccaaactagcaagtgcgtctgaaaaaggcacagtcatccgggtgttctctgtccctgatgggcaaaagctctatgagttccggagagggatgaaaaggtatgtgacaatcagctctctagtgttcagtatggattcacaattcctctgcgcctccagtaacaccgagacggtacacatcttcaagctggaacaggtcaccaacagtcgaccagaagagccttcgacctggagtggctacatgggaaagatgtttatggctgctaccaactacctccctacccaggtgtcagacatgatgcatcaggacagggcttttgccactgcacrcttgaacttctccggacagaggaacatctgtaccctctcaacgatccagaagttgccacggctgctagttgcgtcatccagtggacacctttatatgtacaatttggatcctcaggatggaggagagtgtgtcttaatcaaaacccacagcttgcttggctcaggaacaacagaagagaataaagaaaatgacctcagaccttccttacctcagtcttatgcagcgaccgtagccagaccaagtgcatcttcagcctccacggtgccaggttattctgaggacggcggggcgctgcgaggagaagttattcctgaacatgagtttgcgacgggaccagtgtgtcttgatgatgagaatgagtttcctcctataatcttgtgccgtggaaatcagaagggcaaaacgaagcagtcatgatgagaagcacacctcagaaatcaggacatcccccctatcaggtggttttggagaaaacaaggaaggcggaagaatggagtgcaattgtgtgagcagaaaggggggcaggaatcccgggtgctccactgcttaaaccacaggacctggttaactcctcaccaagcttcccacgaccctggttgccaatgggcgcgggagacattgtatacacatcatgctatttaaaatacgttcaaactatagtgtaaatgctaattaaccatattggtatataaccggaattttatattaaaaggggcmtcctttttaaatatatgccgtgtaaaaaatgtacttataggaacatctctttgaattgtatttcttgtatattacatacttagagagagactcttttagccaggcaaagtcttttttggctgtggctggaataaatcatttattacttgggagtcccattttggacactaataataaaatcatggcaatgc

SEQ ID NO: 5522 - DNA, 1924 bp, Homo sapiens
gaccggcgacccggcccgtggagccggcgcgggcgggctgctgaggtggctgtcgccggctccgagctgcggcttcccgggccgagcccccgatggaggccgaggccgcggacgctcccccgggcggggttgagtcggcgctcagctgcttctctttcaaccaggactgcacatccctagcaaytggaactaaagccgggtataagctgttttctctgagttctgtggagcagctggatcaagtccacggaagcaatgaaatcccggacgtctacatcgtggagcgcctcttctccagcagcctggtggtggtagtcagtcacacaaaaccacggcagatgaacgtgtatcacttcaagaaaggcacagagatctgtaattacagctactccagcaacatcttgtccataaggctgaaccggcaaaggctgctggtttgcctagaagagtccatttatattcacaacattaaagacatgaagctgttgaagaccctcctggatattcctgcaaacccaacaggtctatgtgctctctctatcaaccattccaattcttacctggcctatcctggaagcctgacttcaggggagattgtgctttatgatggaaactccctgaaaacagtctgcactattgctgcccatgagggaacactagctgccatcaccttcaatgcctcaggctccaaactagcaagtgcgtctgaaaaaggcacagtcatccgggtgttctctgtccctgatgggcaaaagctctatgagttccggagagggatgaaaaggtatgtgacaatcagctctctagtgttcagtatggattcacaattcctctgcgcctccagtaacaccgagacggtacacatcttcaagctggaacaggtcaccaacagtcgaccagaagagccttcgacctggagtggctacatgggaaagatgtttatggctgctaccaactacctccctacccaggtgtcagacatgatgcatcaggacagggcttttgccactgcacrcttgaacttctccggacagaggaacatctgtaccctctcaacgatccagaagttgccacggctgctagttgcgtcatccagtggacacctttatatgtacaatttggatcctcaggatggaggagagtgtgtcttaatcaaaacccacagcttgcttggctcaggaacaacagaagagaataaagaaaatgacctcagaccttccttacctcagtcttatgcagcgaccgtagccagaccaagtgcatcttcagcctccacggtgccaggttattctgaggacggcggggcgctgcgaggagaagttattcctgaacatgagtttgcgacgggaccagtgtgtcttgatgatgagaatgagtttcctcctataatcttgtgccgtggaaatcagaagggcaaaacgaagcagtcatgatgagaagcacacctcagaaatcaggacatcccccctatcaggtggttttggagaaaacaaggaaggcggaagaatggagtgcaattgtgtgagcagaaaggggggcaggaatcccgggtgctccactgcttaaaccacaggacctggttaactcctcaccaagcttcccacgaccctggttgccaatgggcgcgggagacattgtatacacatcatgctatttaaaatacgttcaaactatagtgtaaatgctaattaaccatattggtatataaccggaattttatattaaaaggggcmtcctttttaaatatatgccgtgtaaaaaatgtacttataggaacatctctttgaattgtatttcttgtatattacatacttagagagagactcttttagccaggcaaagtcttttttggctgtggctggaataaatcatttattacttgggagtcccattttggacactaataataaaatcatggcaatgc

SEQ ID NO: 5523 - DNA, 769 bp, Homo sapiens
gcggcaggagggaagatggcggacgaggagaagctgccgcccggctgggagaagcgcatgagccgcagctcaggccgagtgtactacttcaaccacatcactaacgccagccartgggagcggcccagcggcaacagcagcagtggtggcaaaaacgggcagggggagcctgccagggtccgctgctcgcacctgctggtgaagcacagccagtcacggcggccctcgtcctggcggcaggagaagatcacccggaccaaggaggaggccctggagctgatcaacggctacatccagaagatcaagtcgggagaggaggactttgagtctctggcctcacagttcagcgactgcagctcagccaaggccaggggagacctgggtgccttcagcagaggtcagatgcagaagccatttgaagacgcctcgtttgcgctgcggacgggggagatgagcgggcccgtgttcacggattccggcatccacatcatcctccgcactgagtgagggkggggagcccaggcctggcctcggggcagggcagggcggctaggccggccagctcccccttgcccgccagccagtggccgaaccccccactccctgccaccgtcacacagtgctggaggcagactcgagggccgaattgtttctagttaggccacgctcctctgttcagtcgcaaaggtgaacactcatgcggcccagccatgggccctctgagcaactgtgcagcaccctttcacccccaattaaacccagaaccmct

SEQ ID NO: 5524 - DNA, 992 bp, Homo sapiens
gcggcaggagggaagatggcggacgaggagaagctgccgcccggctgggagaagcgcatgagccgcagctcaggccgagtgtactacttcaaccacatcactaacgccagccartgggagcggcccagcggcaacagcagcagtggtggcaaaaacgggcagggggagcctgccagggtccgctgctcgcacctgctggtgaagcacagccagtcacggcggccctcgtcctggcggcaggagaagatcacccggaccaaggaggaggccctggagctgatcaacggctacatccagaagatcaagtcgggagaggaggactttgagtctctggcctcacagttcagcgactgcagctcagccaaggccaggggagacctgggtgccttcagcagaggtcagatgcagaagccatttgaagacgcctcgtttgcgctgcggacgggggagatgagcgggcccgtgttcacggattccggcatccacatcatcctccgcactgagtgagggkggggagcccaggcctggcctcggggcagggcagggcggctaggccggccagctcccccttgcccgccagccagtggccgaaccccccactccctgccaccgtcacacagtatttattgttcccacaatggctgggagggggcccttccagattgggggccctggggtccccactccctgtccatccccagttggggctgcgaccgccagattctcccttaaggaattgacttcagcaggggtgggaggctcccagacccagggcagtgtggtgggaggggtgttccaaagagaaggcctggtcagcagagccgccccgtgtccccccaggtgctggaggcagactcgagggccgaattgtttctagttaggccacgctcctctgttcagtcgcaaaggtgaacactcatgcggcccagccatgggccctctgagcaactgtgcagcaccctttcacccccaattaaacccagaaccmctgc

SEQ ID NO: 5525 - DNA, 5628 bp, Homo sapiens
ctccgcgtggggggggtgtgtgcccgccttgcgcatgcgtgttccctgggcatggccggctccgttccatccttctgcacagggtatcgcctctctccgtttggtacatcccctcctcccccacgcccggactggggtggtagacgccgcctccgctcatcgcccctccccatcggtttccgcgcgaaaagccggggcgcctgcgctgccgccgccgcgtctgctgaagcctccgagatgccggcgcgtaccgccccagcccgggtgcccacactggccgtcccggccatctcgctgcccgacgatgtccgcaggcggctcaaagatttggaaagagacagcttaacagaaaaggaatgtgtgaaggagaaattgaatctcttgcacgaatttctgcaaacagaaataaagaatcagttatgtgacttggaaaccaaattacrtaaagaagaattatccgaggagggctacctggctaaagtcaaatcccttttaaataaagatttgtccttggagaacggtgctcatgcttacaaccgggaagtgaatggacgtctagaaaacgggaaccaagcaagaagtgaagcccgtagagtgggaatggcagatgccaacagcccccccaaacccctttccaaacctcgcacgcccaggaggagcaagtccgatggagaggctaagcctgaaccttcacctagccccaggattacaaggaaaagcaccaggcaaaccaccatcacatctcattttgcaaagggccctgycaaacggaaacctcaggaagagtctgaaagagccaaatcggatgagtccatcaaggaagaagacaaagaccaggatgagaagagacgtagagttacatccagagaacgagttgctagaccgcttcctgcagaagaacctgaaagagcaaaatcaggaacgcgcactgaaaaggaagaagaaagagatgaaaaagaagaaaagagactccgaagtcaaaccaaagaaccaacacccaaacagaaactgaaggaggagccggacagagaagccagggcaggcgtgcaggctgacgaggacgaagatggagacgagaaagatgagaagaagcacagaagtcaacccaaagatctagctgccaaacggaggcccgaagaaaaagaacctgaaaaagtaaatccacagrtttctgatgaaaaagacgaggatgaaaaggaggagaagagacgcaaaacgacccccaaagaaccaacggagaaaaaaatggctcgcgccaaaacagtcatgaactccaagacccaccctcccaagtgcattcagtgcgggcagtacctggacgaccctgacctcaaatatgggcagcacccaccagacgcggtggatgagccacagatgctgacaaatgagaagctgtccatctttgatgccaacgagtctggctttgagagttatgaggcgcttccccagcacaaactgacctgcttcagtgtgtactgtaagcacggtcacctgtgtcccatcgacaccggcctcatcgagaagaatatcgaactcttcttttctggttcagcaaaaccaatctatgatgatgacccrtctcttgaaggtggtgttaatggcaaaaatcttggccccataaatgaatggtggatcactggctttgatggaggtgaaaaggccctcatcggcttcagcacctcatttgccgaatacattctgatggatcccagtcccgagtatgcgcccatatttgggctgatgcaggagaagatctacatcagcaagattgtggtggagttcctgcagagcaattccgactcgacctatgaggacctgatmaacaagatcgagaccacggttcctccttctggcctcaacttgaaccgcttcacagaggactccctcctgcgacacgcgcagtttgtggtggagcaggtggagagttatgacgaggccggggacagtgatgagcagcccatcttcctgacrccctgcatgcgggacctgatcaagctggctggggtcacgctgggacagaggcgagcccaggcgaggcggcagaccatcaggcattctaccagggagaaggacaggggacccacgaaagccaccaccaccaagctggtctaccagatcttcgatactttcttcgcagagcaaattgaaaaggatgacagagaagacaaggagaacgcctttaagcgccggcgatgtggcgtctgtgaggtgtgtcagcagcctgagtgtgggaaatgtaaagcctgcaaggacatggttaaatttggtggcagtggacggagcaagcaggcttgccaagagcggaggtgtcccaatatggccatgaaggaggcagatgacgatgaggaagtcgatgataacatcccagagatgccgtcacccaaaaaaatgcaccaggggaagaagaagaaacagaacaagaatcgcatctcttgggtcggagaagccgtcaagactgatgggaagaagagttactataagaaggtgtgcattgatgcggaaaccctggaagtgggggactgtgtctctgttattccagatgattcctcaaaaccgctgtatctagcaagggtcacggcgctgtgggaggacagcagcaacgggcagatgtttcacgcccactggttctgcgctgggacagacacagtcctcggggccacgtcggaccctctggagctgttcttggtggatgaatgtgaggacatgcagctttcatatatccacagcaaagtgaaagtcatctacaaagccccctccgaaaactgggccatggagggaggcatggatcccgagtccctgctggagggggacgacrggaagacctacttctaccagctgtggtatgatcaagactacgcgagattcgagtcccctccaaaaayccagccaacagaggacaacaagttcaaattctgtgtgagctgtgcccgtctggctgagatgaggcaaaaagaaatccccagggtcctggagcagctcgaggacctggatagccgggtcctctactactcagccaccaagaacggcatcctgtaccgagttggtgatggtgtgtacctgccccctgaggccttcacgttcaacatcaagctgtccagtcccgtgaaacgcccacggaaggagcccgtggatgaggacctgtacccagagcactaccggaaatactccgactacatcaaaggcagcaacctggatgcccctgagccctaccgaattggccggatcaaagagatcttctgtcccaagaagagcaacggcaggcccaatgagactgacatcaaaatccgggtcaacaagttctacaggcctgagaacacccacaagtccactccagcgagctaccacgcagacatcaacctgctctactggagcgacgaggaggccgtggtggacttcaaggctgtgcagggccgctgcaccgtggagtatggggaggacctgcccgagtgcgtccaggtgtactccatgggcggccccaaccgcttctacttcctcgaggcctataatgcaaagagcaaaagctttgaagatcctcccaaccatgcccgtagccctggaaacaaagggaagggcaagggaaaagggaagggcaagcccaagtcccaagcctgtgagccgagcgagccagagatagagatcaagctgcccaagctgcggaccctggatgtgttttctggctgcggggggttgtcggagggattccaccaagcaggcatctctgacacgctgtgggccatcgagatgtgggaccctgcggcccaggcgttccggctgaacaaccccggctccacagtgttcacagaggactgcaacatcctgctgaagctggtcatggctggggagacyaccaactcccgcggccagcggctgccccagaagggagacgtggagatgctgtgcggcgggccgccctgccagggcttcagcggcatgaaccgcttcaattcgcgcacctactccaagttcaaaaactctctggtggtttccttcctcagctactgcgactactaccggccccggttcttcctcctggagaatgtcaggaactttgtctccttcaagcgctccatggtcctgaagctcaccctccgctgcctggtccgcatgggctatcagtgcaccttcggcgtgctgcaggccggtcagtacggcgtggcccagactaggaggcgggccatcatcctggccgcggcccctggagagaagctccctctgttcccggagccactgcacgtgtttgctccccgggcctgccagctgagcgtggtggtggatgacaagaagtttgtgagcaacataaccaggttgagctcgggtcctttccggaccatcacggtgcgagacacgatgtccgacctgccggaggtgcggaatggagcctcggcactggagatctcctacaacggggagcctcagtcctggttccagaggcagctccggggcgcacagtaccagcccatcctcagggaccacatctgtaaggacatgagtgcattggtggctgcccgcatgcggcacatccccttggccccagggtcagactggcgcgatctgccyaacatcgaggtgcggctctcagacggcaccatggccaggaagctgcggtatacccaccatgacaggaagaacggccgcagcagctctggggccctccgtggggtctgctcctgcgtggaagccggcaaagcctgcgaccccgcagccaggcagttcaacaccctcatcccctggtgcctgccccacaccgggaaccggcacaaccactgggctggcctctatggaaggctcgagtgggacggcttcttcagcacaaccgtcaccaaccccgagcccatgggcaagcagggccgcgtgctccacccagagcagcaccgtgtggtgagcgtgcgggagtgtgcccgctcccagggcttccctgacacctaccggctcttcggcaacatcctggacaagcaccggcaggtgggcaatgccgtgccaccgcccctggccaaagccattggcttggagatcaagctttgtatgttggccaaagcccgagagagtgcctcagctaaaataaaggaggaggaagctgctaaggactagttctgccctccggtacatggtgtttgtggccttggctgacatgaagctgttgtgtgaggttygcttatcaactaatgatttagtgatcaaattgtgcagtactttgtgcattctggattttaaaagttttttattatgcattatatcaaatctaccactgtatgagtggaaattaagactttatgtagtttttatatgttgtaatatttcttcwaataaatctctcctataaaccaccctgggtgggtattcgtgatttgcacgggacttctggctgaggtcagacaggaacaagctcttccatgctgaaggcgacccacgtggagtttgaagctagcacgtttgaagctagacactccgtgtgtctgtctgtgtttgttcagaactgagtcacgtgagttgatccccatgacatgcaaatggaacttgctagtgtagcttccaggaaagccttttaaaggaagtcttggctggccttccccgtggctggtaggccttctttggtctgaagtgggttgtgatgcctggcagtggagcagc

SEQ ID NO: 5526 - DNA, 5752 bp, Homo sapiens
ctccgcgtggggggggtgtgtgcccgccttgcgcatgcgtgttccctgggcatggccggctccgttccatccttctgcacagggtatcgcctctctccgtttggtacatcccctcctcccccacgcccggactggggtggtagacgccgcctccgctcatcgcccctccccatcggtttccgcgcgaaaagccggggcgcctgcgctgccgccgccgcgtctgctgaagcctccgagatgccggcgcgtaccgccccagcccgggtgcccacactggccgtcccggccatctcgctgcccgacgatgtccgcaggcggctcaaagatttggaaagagacagcttaacagaaaaggaatgtgtgaaggagaaattgaatctcttgcacgaatttctgcaaacagaaataaagaatcagttatgtgacttggaaaccaaattacrtaaagaagaattatccgaggagggctacctggctaaagtcaaatcccttttaaataaagatttgtccttggagaacggtgctcatgcttacaaccgggaagtgaatggacgtctagaaaacgggaaccaagcaagaagtgaagcccgtagagtgggaatggcagatgccaacagcccccccaaacccctttccaaacctcgcacgcccaggaggagcaagtccgatggagaggctaagcctgaaccttcacctagccccaggattacaaggaaaagcaccaggcaaaccaccatcacatctcattttgcaaagggccctgycaaacggaaacctcaggaagagtctgaaagagccaaatcggatgagtccatcaaggaagaagacaaagaccaggatgagaagagacgtagagttacatccagagaacgagttgctagaccgcttcctgcagaagaacctgaaagagcaaaatcaggaacgcgcactgaaaaggaagaagaaagagatgaaaaagaagaaaagagactccgaagtcaaaccaaagaaccaacacccaaacagaaactgaaggaggagccggacagagaagccagggcaggcgtgcaggctgacgaggacgaagatggagacgagaaagatgagaagaagcacagaagtcaacccaaagatctagctgccaaacggaggcccgaagaaaaagaacctgaaaaagtaaatccacagrtttctgatgaaaaagacgaggatgaaaaggaggagaagagacgcaaaacgacccccaaagaaccaacggagaaaaaaatggctcgcgccaaaacagtcatgaactccaagacccaccctcccaagtgcattcagtgcgggcagtacctggacgaccctgacctcaaatatgggcagcacccaccagacgcggtggatgagccacagatgctgacaaatgagaagctgtccatctttgatgccaacgagtctggctttgagagttatgaggcgcttccccagcacaaactgacctgcttcagtgtgtactgtaagcacggtcacctgtgtcccatcgacaccggcctcatcgagaagaatatcgaactcttcttttctggttcagcaaaaccaatctatgatgatgacccrtctcttgaaggtggtgttaatggcaaaaatcttggccccataaatgaatggtggatcactggctttgatggaggtgaaaaggccctcatcggcttcagcacctcatttgccgaatacattctgatggatcccagtcccgagtatgcgcccatatttgggctgatgcaggagaagatctacatcagcaagattgtggtggagttcctgcagagcaattccgactcgacctatgaggacctgatmaacaagatcgagaccacggttcctccttctggcctcaacttgaaccgcttcacagaggactccctcctgcgacacgcgcagtttgtggtggagcaggtggagagttatgacgaggccggggacagtgatgagcagcccatcttcctgacrccctgcatgcgggacctgatcaagctggctggggtcacgctgggacagaggcgagcccaggcgaggcggcagaccatcaggcattctaccagggagaaggacaggggacccacgaaagccaccaccaccaagctggtctaccagatcttcgatactttcttcgcagagcaaattgaaaaggatgacagagaagacaaggagaacgcctttaagcgccggcgatgtggcgtctgtgaggtgtgtcagcagcctgagtgtgggaaatgtaaagcctgcaaggacatggttaaatttggtggcagtggacggagcaagcaggcttgccaagagcggaggtgtcccaatatggccatgaaggaggcagatgacgatgaggaagtcgatgataacatcccagagatgccgtcacccaaaaaaatgcaccaggggaagaagaagaaacagaacaagaatcgcatctcttgggtcggagaagccgtcaagactgatgggaagaagagttactataagaaggtgtgcattgatgcggaaaccctggaagtgggggactgtgtctctgttattccagatgattcctcaaaaccgctgtatctagcaagggtcacggcgctgtgggaggacagcagcaacgggcagatgtttcacgcccactggttctgcgctgggacagacacagtcctcggggccacgtcggaccctctggagctgttcttggtggatgaatgtgaggacatgcagctttcatatatccacagcaaagtgaaagtcatctacaaagccccctccgaaaactgggccatggagggaggcatggatcccgagtccctgctggagggggacgacrggaagacctacttctaccagctgtggtatgatcaagactacgcgagattcgagtcccctccaaaaayccagccaacagaggacaacaagttcaaattctgtgtgagctgtgcccgtctggctgagatgaggcaaaaagaaatccccagggtcctggagcagctcgaggacctggatagccgggtcctctactactcagccaccaagaacggcatcctgtaccgagttggtgatggtgtgtacctgccccctgaggccttcacgttcaacatcaagctgtccagtcccgtgaaacgcccacggaaggagcccgtggatgaggacctgtacccagagcactaccggaaatactccgactacatcaaaggcagcaacctggatgcccctgagccctaccgaattggccggatcaaagagatcttctgtcccaagaagagcaacggcaggcccaatgagactgacatcaaaatccgggtcaacaagttctacaggcctgagaacacccacaagtccactccagcgagctaccacgcagacatcaacctgctctactggagcgacgaggaggccgtggtggacttcaaggctgtgcagggccgctgcaccgtggagtatggggaggacctgcccgagtgcgtccaggtgtactccatgggcggccccaaccgcttctacttcctcgaggcctataatgcaaagagcaaaagctttgaagatcctcccaaccatgcccgtagccctggaaacaaagggaagggcaagggaaaagggaagggcaagcccaagtcccaagcctgtgagccgagcgagccagagatagagatcaagctgcccaagctgcggaccctggatgtgttttctggctgcggggggttgtcggagggattccaccaagcaggcatctctgacacgctgtgggccatcgagatgtgggaccctgcggcccaggcgttccggctgaacaaccccggctccacagtgttcacagaggactgcaacatcctgctgaagctggtcatggctggggagacyaccaactcccgcggccagcggctgccccagaagggagacgtggagatgctgtgcggcgggccgccctgccagggcttcagcggcatgaaccgcttcaattcgcgcacctactccaagttcaaaaactctctggtggtttccttcctcagctactgcgactactaccggccccggttcttcctcctggagaatgtcaggaactttgtctccttcaagcgctccatggtcctgaagctcaccctccgctgcctggtccgcatgggctatcagtgcaccttcggcgtgctgcaggccggtcagtacggcgtggcccagactaggaggcgggccatcatcctggccgcggcccctggagagaagctccctctgttcccggagccactgcacgtgtttgctccccgggcctgccagctgagcgtggtggtggatgacaagaagtttgtgagcaacataaccaggttgagctcgggtcctttccggaccatcacggtgcgagacacgatgtccgacctgccggaggtgcggaatggagcctcggcactggagatctcctacaacggggagcctcagtcctggttccagaggcagctccggggcgcacagtaccagcccatcctcagggaccacatctgtaaggacatgagtgcattggtggctgcccgcatgcggcacatccccttggccccagggtcagactggcgcgatctgccyaacatcgaggtgcggctctcagacggcaccatggccaggaagctgcggtatacccaccatgacaggaagaacggccgcagcagctctggggccctccgtggggtctgctcctgcgtggaagccggcaaagcctgcgaccccgcagccaggcagttcaacaccctcatcccctggtgcctgccccacaccgggaaccggcacaaccactgggctggcctctatggaaggctcgagtgggacggcttcttcagcacaaccgtcaccaaccccgagcccatgggcaagcagggccgcgtgctccacccagagcagcaccgtgtggtgagcgtgcgggagtgtgcccgctcccagggcttccctgacacctaccggctcttcggcaacatcctggacaagcaccggcaggtgggcaatgccgtgccaccgcccctggccaaagccattggcttggagatcaagctttgtatgttggccaaagcccgagagagtgcctcagctaaaataaaggaggaggaagctgctaaggactagttctgccctcccgtcacccctgtttctggcaccaggaatccccaacatgcactgatgttgtgtttttaacatgtcaatctgtccgttcacatgtgtggtacatggtgtttgtggccttggctgacatgaagctgttgtgtgaggttygcttatcaactaatgatttagtgatcaaattgtgcagtactttgtgcattctggattttaaaagttttttattatgcattatatcaaatctaccactgtatgagtggaaattaagactttatgtagtttttatatgttgtaatatttcttcwaataaatctctcctataaaccaccctgggtgggtattcgtgatttgcacgggacttctggctgaggtcagacaggaacaagctcttccatgctgaaggcgacccacgtggagtttgaagctagcacgtttgaagctagacactccgtgtgtctgtctgtgtttgttcagaactgagtcacgtgagttgatccccatgacatgcaaatggaacttgctagtgtagcttccaggaaagccttttaaaggaagtcttggctggccttccccgtggctggtaggccttctttggtctgaagtgggttgtgatgcctggcagtggagcagccatcctgtgaccatgaggcagagctctgtgctgcaactg

SEQ ID NO: 5527 - DNA, 1714 bp, Homo sapiens
tgtctatagtaggtgcggagaagaaatgtttggcagatgaagaaaatgaggtgcagagaggatttaagagattctctcttactgcctgttcagggtcagtccagaattgagggtctccgggggagggcagaggctttgccctgcaggggatctgtgggagggggttaggagggagcagatgagcccaggatgaatggtcagagtcaggtgctgcccggcggaggtcacgagtccagggaggggatcaacatggccgctgcaccccggactgtgttgatctccggctgctcatcaggaattggtctggaacttgcagtgcaactggcccatgaccccaagaagcgctaccaggtcgtggccaccatgagggacctggggaagaaggagacactggaggcagctgctggggaggctctggggcagaccctcaccgtggcccagctggacgtgtgcagtgatgagtcggtggcccagtgtctcagctgyatccagggagaagtggacgtgctggtgaataatgctggaatgggcctggtggggcccctggaggggctcagccttgctgccatgcagaatgtctttgacaccaactttttcggagctgtccgtctcgtcaaagctgtgcttccaggcatgaagaggaggcggcagggccabatygtggtgatcagcagtgtcatgggcctgcagggtgtcatcttcaacgaygtctatgcagcttccaagttcgccctggagggattcttcgaaagcctcgctatccagctgctgcagttcaacatcttcatctccctggtggagccaggccccgtggtcaccgagtttgaggggaagcttctggcgcaggtttctayggctgagttcccaggcactgaccctgagaccctgcactacttccgggacctctatctcccagcctccaggaagctgttttgctccgtgggacagaacccacaggacgtggttcaggccattgtcaacgtcatcagctcgactcgaccacccctgcgccgacagaccaacatccgctactcrccgctgaccacgctyaaaaccgtggattcctctggcagcctgtatgtgcgaacgacccaccgcctcctcttccgctgtccacgcctcctcaaccttggccttcaatgtctgtcctgcggctgcctcccaacgcgggtgcggccaagatgagcagaacagagcttcacgatccccatccctgaacaaccagacctcttcattccacatctaattcaaaggatgaacagactcttcatttattcattctgcaaactccccctcccctcctctgtgcctagacatggctagaatcccagaagggcctttattttcaggcatagactcctctgtggtcacagctggagcacagagagggaccctgggaacttggcctgggaagcccagagyaggaagccacagctgtctctgggaaagcaagggaggcttcctggaggaagcggcattgttatgagccttgaaggaagagacagactctgctacattcaacctcgtgacttcatgatcctgggcctgagaayacaggaatgattcatagcccaccccccacctccatgcatacaccagagctctgtggaccaaggggwcattcctggtcacacactccatcagcaaaatgtatttgagcacacaccagcaatgtatgtatattttttccattaaatatatatttataaccaca

SEQ ID NO: 5528 - DNA, 4487 bp, Homo sapiens
atgcgctccggtgcagcgccccgggcccggccccggccccctgccctggcactgccccccacgggccccgagtccctgacccacttccccttcagcgatgaggacacccgtcggcaccctccgggcagatctgtcagcttygaggcagagaatgggccgacaccatctcctggccgcagccccctggactcgcaggcgagcccaggactcgtgctgcacgccggggcggccaccagccagcgccgggagtccttcctgtaccgctcagacagcgactatgacatgtcacccaagaccatgtcccggaactcatcggtcaccagcgaggcgcacgctgaagacctcatcgtaacaccatttgctcaggtgctggccagcctccggagcgtccgtagcaacttctcactcctgaccaatgtgcccgttcccagtaacaagcggtccccgctgggcggccccacccctgtctgcaaggccacgctgtcagaagaaacgtgtcagcagttggcccgggagactctggaggagctggactggtgtctggagcagctggagaccatgcagacctatcgctctgtcagcgagatggcctcgcacaagttcaaaaggatgttgaaccgtgagctcacacacctgtcagaaatgagcaggtcyggaaaccaggtctcagagtacatttccacaacattcctggacaaacagaatgaagtggagatcccatcacccacgatgaaggaacgagaaaaacagcaagcgccgcgaccaagaccctcccagccgcccccgccccctgtaccacacttacagcccatgtcccaaatcacagggttgaaaaagttgatgcatagtaacagcctgaacaactctaacattccccgatttggggtgaagaccgatcaagaagagctcctggcccaagaactggagaacctgaacaagtggggcctgaacatcttttgcgtgtcggattacgctggaggccgctcactcacctgcatcatgtacatgatattccaggagcgggacctgctgaagaaattccgcatccctgtggacacgatggtgacatacatgctgacgctggaggatcactaccacgctgacgtggcctaccataacagcctgcacgcagctgacgtgctgcagtccacccacgtactgctggccacgcctgcactagatgcagtgttcacggacctggagattctcgccgccctcttcgcggctgccatccacgatgtggatcaccctggggtctccaaccagttcctcatcaacaccaattcggagctggcgctcatgtacaacgatgagtcggtgctcgagaatcaccacctggccgtgggcttcaagctgctgcaggaggacaactgcgacatcttccagaacctcagcaagcgccagcggcagagcctacgcaagatggtcatcgacatggtgctggccacggacatgtccaagcacatgaccctcctggctgacctgaagaccatggtggagaccaagaaagtgaccagctcaggggtcctcctgctagataactactccgaccgcatccaggtcctccggaacatggtgcactgtgccgacctcagcaaccccaccaagccgctggagctgtaccgccagtggacagaccgcatcatggccgagttcttccagcagggtgaccgagagcgcgagcgtggcatggaaatcagccccatgtgtgacaagcacactgcctccgtggagaagtctcaggtgggttttattgactacattgtgcacccattgtgggagacctgggcggaccttgtccacccagatgcccaggagatcttggacactttggaggacaaccgggactggtactacagcgccatccggcagagcccatctccgccacccgaggaggagtcaagggggccaggccacccacccctgcctgacaagttccagtttgagctgacgctggaggaggaagaggaggaagaaatatcaatggcccagataccgtgcacagcccaagrggcattgactgmgcagggattgtcaggagtcgaggaagctctggatgcaaccatagcctgggaggcatccccggcccaggagtcgttggaagttatggcacaggaagcatccctggaggccgagctggaggcagtgtatttgacacagcaggcacagtccacaggcagtgcacctgtggctccggatgagttctcgtcccgggaggaattcgtggttgctgtaagcyacagcagcccctctgccctggctcttcaaagcccccttctccctgcttggaggaccctgtctgtttcagagcatgccccgggcctcccgggcctcccctccacggcggccgaggtggaggcccaacgagagcaccaggctgccaagagggcttgcagtgcctgcgcagggacatttggggaggacacatccgcactcccagctcctggtggcggggggtcaggtggagaccctacctgatccccagacctctgtccctgttcccctccactcctcccctcactcccctgctcccccgaccacctcctcctctgcctcaaagactcttgtcctcttgtccctcctgagaaaaaagaaaacgaaaagtggggtttttttctgttttctttttttcccctttccccctgcccccacccacggggcctttttttggaggtgggggctggggaatgaggggctgaggtcccggaagggattttatttttttgaattttaattgtaacatttttagaaaaagaacaaaaaaagaaaaaaaaaagaaagaaacacagcaactgtagatgctcctgttcctggttcccgctttccacttccaaatccctcccctcaccttcccccactgccccccaagttccaggctcagtcttccagccgcctggggagtctctacctgggcccaagcaggtgtggggcctccttctgggcttttcttctgaatttagaggatttctagaacgtggtcaggaatagccattctaggcggggctggggccagggtggggggcagtcactgtgggaggtcccagctccagcccccctctggtttgctgcctcctctcccctctaaaaaagtcttccgcttgattttgcacaatcccggcgatactcctggcgatactgactagaaagtcagggagctgggggagctgttcactttaggatacgggggtggtatggaagggagcrttcacaccgccagcctcgggcctgggatttgaggagggccctagacctcctccactctccatcccctttcccttccactttgggttcactttgaattttctccgttttttggggcagtggctctgatccactcacccccccgccccccgccccacttctagctgcttctcctcttgtttctgccttaataattcccacggccacaggcaagggggttgcagtggccgcctgcaccttggatgaggcagggccaggcgcccagaacccccatcctggccgcacccccctttccagggtcctccggaccccaccttccacactctgatcacagcccccctaccttttgccctaggaggaagcaataatggtgtataccctcattctcattcctgggcagcccttccttccaccctggcaccaaaataatttctcctccatccgtaccttgccgagcctctccctctcccccagctagtccctgagcaatacggcagacagatgcaagaccatttttctccaagccatgggggactgtttggaaggaaagccccctctctccctcctcccctcgccctcggcctggttctgcagctggaccgacctcattcatcgcctgccccctacccaattctgagcacacggtactgtagcccccagttcctccctagccttccatccctctgtccaccccagggggaggtaaccccgcactcacactcccttgatgctgtctgtacagggttcatattttgtagcgaaagtcgtttttgtcccagccggcgatcggagtgggccttttctttctttttgttcattctttacctttttttcttttctttctttcttttttgtacatactgtaaggttggtttgtaaattattctacggaggcaaaaagggaaaataaaaacttgcccttccctggctgacccagtcgggaaggtagggaaggaggtctcccgttgggagagtctctgttcctgctgtattatacaaactgtaccatagtcctgggaaaagggtggactcaccgctgttgttttatgggaagtcgtgtcatcctaggggttggggctgggcagagcctgtcccctccccccttctccaggagccagggggtgactggagagacagacccacccccaagcagggctcctctccccagggtgagcacaggacctctgtaagctgcttgtgtattgtccactttgacgatcagtcattcggtccgttgatcaataatccttcgatcttgtctccaattaaaccgaggctttcaccga

SEQ ID NO: 5529 - DNA, 4592 bp, Homo sapiens
atggcgcggccgcgcggcctaggccgcatcccggagctgcaactggtggccttcccggtggcggtggcggctgaggacgaggcgttcctgcccgagcccctggccccgcgcgcgccccgccgcccgcgttcgccgccctcctcgcccgtcttcttcgccagcccgtccccaactttccgcagacgccttcggcttctccgcagctgccaggatttgggccgccaggcttgggctggggctggcttygaggcagagaatgggccgacaccatctcctggccgcagccccctggactcgcaggcgagcccaggactcgtgctgcacgccggggcggccaccagccagcgccgggagtccttcctgtaccgctcagacagcgactatgacatgtcacccaagaccatgtcccggaactcatcggtcaccagcgaggcgcacgctgaagacctcatcgtaacaccatttgctcaggtgctggccagcctccggagcgtccgtagcaacttctcactcctgaccaatgtgcccgttcccagtaacaagcggtccccgctgggcggccccacccctgtctgcaaggccacgctgtcagaagaaacgtgtcagcagttggcccgggagactctggaggagctggactggtgtctggagcagctggagaccatgcagacctatcgctctgtcagcgagatggcctcgcacaagttcaaaaggatgttgaaccgtgagctcacacacctgtcagaaatgagcaggtcyggaaaccaggtctcagagtacatttccacaacattcctggacaaacagaatgaagtggagatcccatcacccacgatgaaggaacgagaaaaacagcaagcgccgcgaccaagaccctcccagccgcccccgccccctgtaccacacttacagcccatgtcccaaatcacagggttgaaaaagttgatgcatagtaacagcctgaacaactctaacattccccgatttggggtgaagaccgatcaagaagagctcctggcccaagaactggagaacctgaacaagtggggcctgaacatcttttgcgtgtcggattacgctggaggccgctcactcacctgcatcatgtacatgatattccaggagcgggacctgctgaagaaattccgcatccctgtggacacgatggtgacatacatgctgacgctggaggatcactaccacgctgacgtggcctaccataacagcctgcacgcagctgacgtgctgcagtccacccacgtactgctggccacgcctgcactagatgcagtgttcacggacctggagattctcgccgccctcttcgcggctgccatccacgatgtggatcaccctggggtctccaaccagttcctcatcaacaccaattcggagctggcgctcatgtacaacgatgagtcggtgctcgagaatcaccacctggccgtgggcttcaagctgctgcaggaggacaactgcgacatcttccagaacctcagcaagcgccagcggcagagcctacgcaagatggtcatcgacatggtgctggccacggacatgtccaagcacatgaccctcctggctgacctgaagaccatggtggagaccaagaaagtgaccagctcaggggtcctcctgctagataactactccgaccgcatccaggtcctccggaacatggtgcactgtgccgacctcagcaaccccaccaagccgctggagctgtaccgccagtggacagaccgcatcatggccgagttcttccagcagggtgaccgagagcgcgagcgtggcatggaaatcagccccatgtgtgacaagcacactgcctccgtggagaagtctcaggtgggttttattgactacattgtgcacccattgtgggagacctgggcggaccttgtccacccagatgcccaggagatcttggacactttggaggacaaccgggactggtactacagcgccatccggcagagcccatctccgccacccgaggaggagtcaagggggccaggccacccacccctgcctgacaagttccagtttgagctgacgctggaggaggaagaggaggaagaaatatcaatggcccagataccgtgcacagcccaagrggcattgactgmgcagggattgtcaggagtcgaggaagctctggatgcaaccatagcctgggaggcatccccggcccaggagtcgttggaagttatggcacaggaagcatccctggaggccgagctggaggcagtgtatttgacacagcaggcacagtccacaggcagtgcacctgtggctccggatgagttctcgtcccgggaggaattcgtggttgctgtaagcyacagcagcccctctgccctggctcttcaaagcccccttctccctgcttggaggaccctgtctgtttcagagcatgccccgggcctcccgggcctcccctccacggcggccgaggtggaggcccaacgagagcaccaggctgccaagagggcttgcagtgcctgcgcagggacatttggggaggacacatccgcactcccagctcctggtggcggggggtcaggtggagaccctacctgatccccagacctctgtccctgttcccctccactcctcccctcactcccctgctcccccgaccacctcctcctctgcctcaaagactcttgtcctcttgtccctcctgagaaaaaagaaaacgaaaagtggggtttttttctgttttctttttttcccctttccccctgcccccacccacggggcctttttttggaggtgggggctggggaatgaggggctgaggtcccggaagggattttatttttttgaattttaattgtaacatttttagaaaaagaacaaaaaaagaaaaaaaaaagaaagaaacacagcaactgtagatgctcctgttcctggttcccgctttccacttccaaatccctcccctcaccttcccccactgccccccaagttccaggctcagtcttccagccgcctggggagtctctacctgggcccaagcaggtgtggggcctccttctgggcttttcttctgaatttagaggatttctagaacgtggtcaggaatagccattctaggcggggctggggccagggtggggggcagtcactgtgggaggtcccagctccagcccccctctggtttgctgcctcctctcccctctaaaaaagtcttccgcttgattttgcacaatcccggcgatactcctggcgatactgactagaaagtcagggagctgggggagctgttcactttaggatacgggggtggtatggaagggagcrttcacaccgccagcctcgggcctgggatttgaggagggccctagacctcctccactctccatcccctttcccttccactttgggttcactttgaattttctccgttttttggggcagtggctctgatccactcacccccccgccccccgccccacttctagctgcttctcctcttgtttctgccttaataattcccacggccacaggcaagggggttgcagtggccgcctgcaccttggatgaggcagggccaggcgcccagaacccccatcctggccgcacccccctttccagggtcctccggaccccaccttccacactctgatcacagcccccctaccttttgccctaggaggaagcaataatggtgtataccctcattctcattcctgggcagcccttccttccaccctggcaccaaaataatttctcctccatccgtaccttgccgagcctctccctctcccccagctagtccctgagcaatacggcagacagatgcaagaccatttttctccaagccatgggggactgtttggaaggaaagccccctctctccctcctcccctcgccctcggcctggttctgcagctggaccgacctcattcatcgcctgccccctacccaattctgagcacacggtactgtagcccccagttcctccctagccttccatccctctgtccaccccagggggaggtaaccccgcactcacactcccttgatgctgtctgtacagggttcatattttgtagcgaaagtcgtttttgtcccagccggcgatcggagtgggccttttctttctttttgttcattctttacctttttttcttttctttctttcttttttgtacatactgtaaggttggtttgtaaattattctacggaggcaaaaagggaaaataaaaacttgcccttccctggctgacccagtcgggaaggtagggaaggaggtctcccgttgggagagtctctgttcctgctgtattatacaaactgtaccatagtcctgggaaaagggtggactcaccgctgttgttttatgggaagtcgtgtcatcctaggggttggggctgggcagagcctgtcccctccccccttctccaggagccagggggtgactggagagacagacccacccccaagcagggctcctctccccagggtgagcacaggacctctgtaagctgcttgtgtattgtccactttgacgatcagtcattcggtccgttgatcaataatccttcgatcttgtctccaattaaaccgaggctttcaccga

SEQ ID NO: 5530 - DNA, 5677 bp, Homo sapiens
cagatgttaccatttattaaatatttactgagtgccagacactattctgttcaatatggtttgatctcatttcattctcacatggaccctrtagggaatatcattccatttcamagaaaagaaactgaggctcacagagtttaagacactgacccatggccgcacagcaataatcttcagcgcctgggtgccaaggtaaagtaagccagcctctccctcccccaagcatttcagacaaggatcggtggctgcagagcgcacccgtcttcgggaacggcgtctgtgtccctgtctgtctgyttctatttccacacgtccctgtctgtctccacgcgcctctgcctgtgcgtcccccatctgtgcccaagccgccgtctctctgcgcccggcccccgcacatcggagctatttcgggtttaaggcttaaaagcccaacagctcggaggagacgcttcctccggcagatgcgtttggcttggtcttgtakgaggccctggccctgccgacatggccaccgcagtcccaacggcgcgctaggttggcgagatgaagaggagtcgcagtgccctgtccgtggcagggaccggggacgagaggtcgagggagacccccgaatccgaccgtgccaacatgctgggggccgacctgcgtcgccctcgccgccgcctctcgtccggtcctggcctgggctgggcccagcctgagccctcggaccctggggtccctctgccgccacggcccaccaccctgccgctgctgatcccaccgcggatttccatcaccagggccgagaacgacagcagagctccaggcgccgaaaggaagctgcagagcccggcccgggggcgattggcccgcagcgcccccgggtctgtccccggggcgccatggccctaccscggccgggcgcacccgcggggccctgggctcgctggcttgcgcgcagctgagcggggtgtaggttggaagggccagggccccctggggcgcaagtgggggccggcgccatggaacccccgaccgtcccctcggaaaggagcctgtctctgtcactgcccgggccccgggagggccaggccaccctgaagcctcccccgcagcacctgtggcggcagcctcggacccccatccgtatccagcagcgcggctactccgacagcgcggagcgcgccgagcgggagcggcagccgcaccggcccatagagcgcgccgatgccatggacaccagcgaccggcccggcctgcgcacgacccgcatgtcctggccctcgtccttccatggcactggcaccggcagcggcggcgcgggcggaggcagcagcaggcgcttygaggcagagaatgggccgacaccatctcctggccgcagccccctggactcgcaggcgagcccaggactcgtgctgcacgccggggcggccaccagccagcgccgggagtccttcctgtaccgctcagacagcgactatgacatgtcacccaagaccatgtcccggaactcatcggtcaccagcgaggcgcacgctgaagacctcatcgtaacaccatttgctcaggtgctggccagcctccggagcgtccgtagcaacttctcactcctgaccaatgtgcccgttcccagtaacaagcggtccccgctgggcggccccacccctgtctgcaaggccacgctgtcagaagaaacgtgtcagcagttggcccgggagactctggaggagctggactggtgtctggagcagctggagaccatgcagacctatcgctctgtcagcgagatggcctcgcacaagttcaaaaggatgttgaaccgtgagctcacacacctgtcagaaatgagcaggtcyggaaaccaggtctcagagtacatttccacaacattcctggacaaacagaatgaagtggagatcccatcacccacgatgaaggaacgagaaaaacagcaagcgccgcgaccaagaccctcccagccgcccccgccccctgtaccacacttacagcccatgtcccaaatcacagggttgaaaaagttgatgcatagtaacagcctgaacaactctaacattccccgatttggggtgaagaccgatcaagaagagctcctggcccaagaactggagaacctgaacaagtggggcctgaacatcttttgcgtgtcggattacgctggaggccgctcactcacctgcatcatgtacatgatattccaggagcgggacctgctgaagaaattccgcatccctgtggacacgatggtgacatacatgctgacgctggaggatcactaccacgctgacgtggcctaccataacagcctgcacgcagctgacgtgctgcagtccacccacgtactgctggccacgcctgcactagatgcagtgttcacggacctggagattctcgccgccctcttcgcggctgccatccacgatgtggatcaccctggggtctccaaccagttcctcatcaacaccaattcggagctggcgctcatgtacaacgatgagtcggtgctcgagaatcaccacctggccgtgggcttcaagctgctgcaggaggacaactgcgacatcttccagaacctcagcaagcgccagcggcagagcctacgcaagatggtcatcgacatggtgctggccacggacatgtccaagcacatgaccctcctggctgacctgaagaccatggtggagaccaagaaagtgaccagctcaggggtcctcctgctagataactactccgaccgcatccaggtcctccggaacatggtgcactgtgccgacctcagcaaccccaccaagccgctggagctgtaccgccagtggacagaccgcatcatggccgagttcttccagcagggtgaccgagagcgcgagcgtggcatggaaatcagccccatgtgtgacaagcacactgcctccgtggagaagtctcaggtgggttttattgactacattgtgcacccattgtgggagacctgggcggaccttgtccacccagatgcccaggagatcttggacactttggaggacaaccgggactggtactacagcgccatccggcagagcccatctccgccacccgaggaggagtcaagggggccaggccacccacccctgcctgacaagttccagtttgagctgacgctggaggaggaagaggaggaagaaatatcaatggcccagataccgtgcacagcccaagrggcattgactgmgcagggattgtcaggagtcgaggaagctctggatgcaaccatagcctgggaggcatccccggcccaggagtcgttggaagttatggcacaggaagcatccctggaggccgagctggaggcagtgtatttgacacagcaggcacagtccacaggcagtgcacctgtggctccggatgagttctcgtcccgggaggaattcgtggttgctgtaagcyacagcagcccctctgccctggctcttcaaagcccccttctccctgcttggaggaccctgtctgtttcagagcatgccccgggcctcccgggcctcccctccacggcggccgaggtggaggcccaacgagagcaccaggctgccaagagggcttgcagtgcctgcgcagggacatttggggaggacacatccgcactcccagctcctggtggcggggggtcaggtggagaccctacctgatccccagacctctgtccctgttcccctccactcctcccctcactcccctgctcccccgaccacctcctcctctgcctcaaagactcttgtcctcttgtccctcctgagaaaaaagaaaacgaaaagtggggtttttttctgttttctttttttcccctttccccctgcccccacccacggggcctttttttggaggtgggggctggggaatgaggggctgaggtcccggaagggattttatttttttgaattttaattgtaacatttttagaaaaagaacaaaaaaagaaaaaaaaaagaaagaaacacagcaactgtagatgctcctgttcctggttcccgctttccacttccaaatccctcccctcaccttcccccactgccccccaagttccaggctcagtcttccagccgcctggggagtctctacctgggcccaagcaggtgtggggcctccttctgggcttttcttctgaatttagaggatttctagaacgtggtcaggaatagccattctaggcggggctggggccagggtggggggcagtcactgtgggaggtcccagctccagcccccctctggtttgctgcctcctctcccctctaaaaaagtcttccgcttgattttgcacaatcccggcgatactcctggcgatactgactagaaagtcagggagctgggggagctgttcactttaggatacgggggtggtatggaagggagcrttcacaccgccagcctcgggcctgggatttgaggagggccctagacctcctccactctccatcccctttcccttccactttgggttcactttgaattttctccgttttttggggcagtggctctgatccactcacccccccgccccccgccccacttctagctgcttctcctcttgtttctgccttaataattcccacggccacaggcaagggggttgcagtggccgcctgcaccttggatgaggcagggccaggcgcccagaacccccatcctggccgcacccccctttccagggtcctccggaccccaccttccacactctgatcacagcccccctaccttttgccctaggaggaagcaataatggtgtataccctcattctcattcctgggcagcccttccttccaccctggcaccaaaataatttctcctccatccgtaccttgccgagcctctccctctcccccagctagtccctgagcaatacggcagacagatgcaagaccatttttctccaagccatgggggactgtttggaaggaaagccccctctctccctcctcccctcgccctcggcctggttctgcagctggaccgacctcattcatcgcctgccccctacccaattctgagcacacggtactgtagcccccagttcctccctagccttccatccctctgtccaccccagggggaggtaaccccgcactcacactcccttgatgctgtctgtacagggttcatattttgtagcgaaagtcgtttttgtcccagccggcgatcggagtgggccttttctttctttttgttcattctttacctttttttcttttctttctttcttttttgtacatactgtaaggttggtttgtaaattattctacggaggcaaaaagggaaaataaaaacttgcccttccctggctgacccagtcgggaaggtagggaaggaggtctcccgttgggagagtctctgttcctgctgtattatacaaactgtaccatagtcctgggaaaagggtggactcaccgctgttgttttatgggaagtcgtgtcatcctaggggttggggctgggcagagcctgtcccctccccccttctccaggagccagggggtgactggagagacagacccacccccaagcagggctcctctccccagggtgagcacaggacctctgtaagctgcttgtgtattgtccactttgacgatcagtcattcggtccgttgatcaataatccttcgatcttgtctccaattaaaccgaggctttcaccga

SEQ ID NO: 5531 - DNA, 4589 bp, Homo sapiens
gcgcggccgcgcggcctaggccgcatcccggagctgcaactggtggccttcccggtggcggtggcggctgaggacgaggcgttcctgcccgagcccctggccccgcgcgcgccccgccgcccgcgttcgccgccctcctcgcccgtcttcttcgccagcccgtccccaactttccgcagacgccttcggcttctccgcagctgccaggatttgggccgccaggcttgggctggggctggcttygaggcagagaatgggccgacaccatctcctggccgcagccccctggactcgcaggcgagcccaggactcgtgctgcacgccggggcggccaccagccagcgccgggagtccttcctgtaccgctcagacagcgactatgacatgtcacccaagaccatgtcccggaactcatcggtcaccagcgaggcgcacgctgaagacctcatcgtaacaccatttgctcaggtgctggccagcctccggagcgtccgtagcaacttctcactcctgaccaatgtgcccgttcccagtaacaagcggtccccgctgggcggccccacccctgtctgcaaggccacgctgtcagaagaaacgtgtcagcagttggcccgggagactctggaggagctggactggtgtctggagcagctggagaccatgcagacctatcgctctgtcagcgagatggcctcgcacaagttcaaaaggatgttgaaccgtgagctcacacacctgtcagaaatgagcaggtcyggaaaccaggtctcagagtacatttccacaacattcctggacaaacagaatgaagtggagatcccatcacccacgatgaaggaacgagaaaaacagcaagcgccgcgaccaagaccctcccagccgcccccgccccctgtaccacacttacagcccatgtcccaaatcacagggttgaaaaagttgatgcatagtaacagcctgaacaactctaacattccccgatttggggtgaagaccgatcaagaagagctcctggcccaagaactggagaacctgaacaagtggggcctgaacatcttttgcgtgtcggattacgctggaggccgctcactcacctgcatcatgtacatgatattccaggagcgggacctgctgaagaaattccgcatccctgtggacacgatggtgacatacatgctgacgctggaggatcactaccacgctgacgtggcctaccataacagcctgcacgcagctgacgtgctgcagtccacccacgtactgctggccacgcctgcactagatgcagtgttcacggacctggagattctcgccgccctcttcgcggctgccatccacgatgtggatcaccctggggtctccaaccagttcctcatcaacaccaattcggagctggcgctcatgtacaacgatgagtcggtgctcgagaatcaccacctggccgtgggcttcaagctgctgcaggaggacaactgcgacatcttccagaacctcagcaagcgccagcggcagagcctacgcaagatggtcatcgacatggtgctggccacggacatgtccaagcacatgaccctcctggctgacctgaagaccatggtggagaccaagaaagtgaccagctcaggggtcctcctgctagataactactccgaccgcatccaggtcctccggaacatggtgcactgtgccgacctcagcaaccccaccaagccgctggagctgtaccgccagtggacagaccgcatcatggccgagttcttccagcagggtgaccgagagcgcgagcgtggcatggaaatcagccccatgtgtgacaagcacactgcctccgtggagaagtctcaggtgggttttattgactacattgtgcacccattgtgggagacctgggcggaccttgtccacccagatgcccaggagatcttggacactttggaggacaaccgggactggtactacagcgccatccggcagagcccatctccgccacccgaggaggagtcaagggggccaggccacccacccctgcctgacaagttccagtttgagctgacgctggaggaggaagaggaggaagaaatatcaatggcccagataccgtgcacagcccaagrggcattgactgmgcagggattgtcaggagtcgaggaagctctggatgcaaccatagcctgggaggcatccccggcccaggagtcgttggaagttatggcacaggaagcatccctggaggccgagctggaggcagtgtatttgacacagcaggcacagtccacaggcagtgcacctgtggctccggatgagttctcgtcccgggaggaattcgtggttgctgtaagcyacagcagcccctctgccctggctcttcaaagcccccttctccctgcttggaggaccctgtctgtttcagagcatgccccgggcctcccgggcctcccctccacggcggccgaggtggaggcccaacgagagcaccaggctgccaagagggcttgcagtgcctgcgcagggacatttggggaggacacatccgcactcccagctcctggtggcggggggtcaggtggagaccctacctgatccccagacctctgtccctgttcccctccactcctcccctcactcccctgctcccccgaccacctcctcctctgcctcaaagactcttgtcctcttgtccctcctgagaaaaaagaaaacgaaaagtggggtttttttctgttttctttttttcccctttccccctgcccccacccacggggcctttttttggaggtgggggctggggaatgaggggctgaggtcccggaagggattttatttttttgaattttaattgtaacatttttagaaaaagaacaaaaaaagaaaaaaaaaagaaagaaacacagcaactgtagatgctcctgttcctggttcccgctttccacttccaaatccctcccctcaccttcccccactgccccccaagttccaggctcagtcttccagccgcctggggagtctctacctgggcccaagcaggtgtggggcctccttctgggcttttcttctgaatttagaggatttctagaacgtggtcaggaatagccattctaggcggggctggggccagggtggggggcagtcactgtgggaggtcccagctccagcccccctctggtttgctgcctcctctcccctctaaaaaagtcttccgcttgattttgcacaatcccggcgatactcctggcgatactgactagaaagtcagggagctgggggagctgttcactttaggatacgggggtggtatggaagggagcrttcacaccgccagcctcgggcctgggatttgaggagggccctagacctcctccactctccatcccctttcccttccactttgggttcactttgaattttctccgttttttggggcagtggctctgatccactcacccccccgccccccgccccacttctagctgcttctcctcttgtttctgccttaataattcccacggccacaggcaagggggttgcagtggccgcctgcaccttggatgaggcagggccaggcgcccagaacccccatcctggccgcacccccctttccagggtcctccggaccccaccttccacactctgatcacagcccccctaccttttgccctaggaggaagcaataatggtgtataccctcattctcattcctgggcagcccttccttccaccctggcaccaaaataatttctcctccatccgtaccttgccgagcctctccctctcccccagctagtccctgagcaatacggcagacagatgcaagaccatttttctccaagccatgggggactgtttggaaggaaagccccctctctccctcctcccctcgccctcggcctggttctgcagctggaccgacctcattcatcgcctgccccctacccaattctgagcacacggtactgtagcccccagttcctccctagccttccatccctctgtccaccccagggggaggtaaccccgcactcacactcccttgatgctgtctgtacagggttcatattttgtagcgaaagtcgtttttgtcccagccggcgatcggagtgggccttttctttctttttgttcattctttacctttttttcttttctttctttcttttttgtacatactgtaaggttggtttgtaaattattctacggaggcaaaaagggaaaataaaaacttgcccttccctggctgacccagtcgggaaggtagggaaggaggtctcccgttgggagagtctctgttcctgctgtattatacaaactgtaccatagtcctgggaaaagggtggactcaccgctgttgttttatgggaagtcgtgtcatcctaggggttggggctgggcagagcctgtcccctccccccttctccaggagccagggggtgactggagagacagacccacccccaagcagggctcctctccccagggtgagcacaggacctctgtaagctgcttgtgtattgtccactttgacgatcagtcattcggtccgttgatcaataatccttcgatcttgtctccaattaaaccgaggctttcaccga

SEQ ID NO: 5532 - DNA, 4292 bp, Homo sapiens
cacacgcacacacacgggtgcacacacagagctccgcagcctcctcctgggacccttgccctgcccccctcccatgggcacggaccccccaccgcctccacccactgccgcgggggggcccgttggggcccagggctggcgggccatgtaaccagggctgctgctgggagcgcggaggggaagggagcccccagccctgctgggccggcccaggcccctccgcggctcccccttccactacccacctgcccggcaccccctccccagtggttgttaaccccgggactccccaagcccagcctctgtgtgcagcagccccaggcgggctaagtctccaagatgcccttggtggatttcttctgcgagacctgctctaagccttggctggtgggctggtgggaccagttcaaaaggatgttgaaccgtgagctcacacacctgtcagaaatgagcaggtcyggaaaccaggtctcagagtacatttccacaacattcctggacaaacagaatgaagtggagatcccatcacccacgatgaaggaacgagaaaaacagcaagcgccgcgaccaagaccctcccagccgcccccgccccctgtaccacacttacagcccatgtcccaaatcacagggttgaaaaagttgatgcatagtaacagcctgaacaactctaacattccccgatttggggtgaagaccgatcaagaagagctcctggcccaagaactggagaacctgaacaagtggggcctgaacatcttttgcgtgtcggattacgctggaggccgctcactcacctgcatcatgtacatgatattccaggagcgggacctgctgaagaaattccgcatccctgtggacacgatggtgacatacatgctgacgctggaggatcactaccacgctgacgtggcctaccataacagcctgcacgcagctgacgtgctgcagtccacccacgtactgctggccacgcctgcactagatgcagtgttcacggacctggagattctcgccgccctcttcgcggctgccatccacgatgtggatcaccctggggtctccaaccagttcctcatcaacaccaattcggagctggcgctcatgtacaacgatgagtcggtgctcgagaatcaccacctggccgtgggcttcaagctgctgcaggaggacaactgcgacatcttccagaacctcagcaagcgccagcggcagagcctacgcaagatggtcatcgacatggtgctggccacggacatgtccaagcacatgaccctcctggctgacctgaagaccatggtggagaccaagaaagtgaccagctcaggggtcctcctgctagataactactccgaccgcatccaggtcctccggaacatggtgcactgtgccgacctcagcaaccccaccaagccgctggagctgtaccgccagtggacagaccgcatcatggccgagttcttccagcagggtgaccgagagcgcgagcgtggcatggaaatcagccccatgtgtgacaagcacactgcctccgtggagaagtctcaggtgggttttattgactacattgtgcacccattgtgggagacctgggcggaccttgtccacccagatgcccaggagatcttggacactttggaggacaaccgggactggtactacagcgccatccggcagagcccatctccgccacccgaggaggagtcaagggggccaggccacccacccctgcctgacaagttccagtttgagctgacgctggaggaggaagaggaggaagaaatatcaatggcccagataccgtgcacagcccaagrggcattgactgmgcagggattgtcaggagtcgaggaagctctggatgcaaccatagcctgggaggcatccccggcccaggagtcgttggaagttatggcacaggaagcatccctggaggccgagctggaggcagtgtatttgacacagcaggcacagtccacaggcagtgcacctgtggctccggatgagttctcgtcccgggaggaattcgtggttgctgtaagcyacagcagcccctctgccctggctcttcaaagcccccttctccctgcttggaggaccctgtctgtttcagagcatgccccgggcctcccgggcctcccctccacggcggccgaggtggaggcccaacgagagcaccaggctgccaagagggcttgcagtgcctgcgcagggacatttggggaggacacatccgcactcccagctcctggtggcggggggtcaggtggagaccctacctgatccccagacctctgtccctgttcccctccactcctcccctcactcccctgctcccccgaccacctcctcctctgcctcaaagactcttgtcctcttgtccctcctgagaaaaaagaaaacgaaaagtggggtttttttctgttttctttttttcccctttccccctgcccccacccacggggcctttttttggaggtgggggctggggaatgaggggctgaggtcccggaagggattttatttttttgaattttaattgtaacatttttagaaaaagaacaaaaaaagaaaaaaaaaagaaagaaacacagcaactgtagatgctcctgttcctggttcccgctttccacttccaaatccctcccctcaccttcccccactgccccccaagttccaggctcagtcttccagccgcctggggagtctctacctgggcccaagcaggtgtggggcctccttctgggcttttcttctgaatttagaggatttctagaacgtggtcaggaatagccattctaggcggggctggggccagggtggggggcagtcactgtgggaggtcccagctccagcccccctctggtttgctgcctcctctcccctctaaaaaagtcttccgcttgattttgcacaatcccggcgatactcctggcgatactgactagaaagtcagggagctgggggagctgttcactttaggatacgggggtggtatggaagggagcrttcacaccgccagcctcgggcctgggatttgaggagggccctagacctcctccactctccatcccctttcccttccactttgggttcactttgaattttctccgttttttggggcagtggctctgatccactcacccccccgccccccgccccacttctagctgcttctcctcttgtttctgccttaataattcccacggccacaggcaagggggttgcagtggccgcctgcaccttggatgaggcagggccaggcgcccagaacccccatcctggccgcacccccctttccagggtcctccggaccccaccttccacactctgatcacagcccccctaccttttgccctaggaggaagcaataatggtgtataccctcattctcattcctgggcagcccttccttccaccctggcaccaaaataatttctcctccatccgtaccttgccgagcctctccctctcccccagctagtccctgagcaatacggcagacagatgcaagaccatttttctccaagccatgggggactgtttggaaggaaagccccctctctccctcctcccctcgccctcggcctggttctgcagctggaccgacctcattcatcgcctgccccctacccaattctgagcacacggtactgtagcccccagttcctccctagccttccatccctctgtccaccccagggggaggtaaccccgcactcacactcccttgatgctgtctgtacagggttcatattttgtagcgaaagtcgtttttgtcccagccggcgatcggagtgggccttttctttctttttgttcattctttacctttttttcttttctttctttcttttttgtacatactgtaaggttggtttgtaaattattctacggaggcaaaaagggaaaataaaaacttgcccttccctggctgacccagtcgggaaggtagggaaggaggtctcccgttgggagagtctctgttcctgctgtattatacaaactgtaccatagtcctgggaaaagggtggactcaccgctgttgttttatgggaagtcgtgtcatcctaggggttggggctgggcagagcctgtcccctccccccttctccaggagccagggggtgactggagagacagacccacccccaagcagggctcctctccccagggtgagcacaggacctctgtaagctgcttgtgtattgtccactttgacgatcagtcattcggtccgttgatcaataatccttcgatcttgtctccaattaaaccgaggctttcaccga

SEQ ID NO: 5533 - DNA, 4096 bp, Homo sapiens
tatgatccatcctgttgggacttgattcgttcctcaaattttcaatttaccgtaaacaaaggggacgcgcgctgacccggaagtgaaagctggaacccggccggagtagctctgagcgccggctgtgaggaaggaggttctgggcaagctatagccatggctgtggctgtagccatggcgggagccttaatcgggtcggagccaggccccgcggaagaacttgccaaactcgagtacctgtctttggtgtcaaaggtttgcactgagctggacaatcacttggggatcaacgacaaggaccttgctgaatttgtgatcagtcttgctgagaaaaataccacctttgatacttttaaggcttctctcgtcaaaaatggtgcagaatttacggattctcttattagtaacttgctgcgtctcatacaaaccatgcggcctccagcgaagccttccactagcaaagatccagttgttaaacctaaaacagaaaaagaaaagctgaaggaactcttcccagtcctttgccaaccggacaacccttctgttcggaccatgttggatgaagatgatgtgaaagttgctgtggatgtcctgaaagaactggaagctttaatgcccagcgcagcaggccaggagaagcaaagagatgctgaacaccgggacaggacaaagaagaagaagcggagtcgaagccgagatcgaaaccgagatcgagacagagatagggaacgaaaccgagatagagaccacaagcggagacaccgatcccgctctcgatcacgttccaggacccgggagaggaataaagtgaagtctagatatcggtccaggagcaggagtcagagtccccccaaagaccggaaggaccgggacaaatatggagagcggaatctggatagatggcgggataagcatgtggaccgccctcctccagaagagcccaccattggtgacatttataatggcaaagttaccagcatcatgcagtttggttgctttgtgcagctggaaggactaaggaagcggtgggaaggcctggtgcacatctctgagctccggcgggagggtcgtgtggccaatgtagctgatgtcgtgagcaaaggccagagggtcaaagtcaaagtgctgtccttcactgggaccaagaccagcctgagcatgaaggatgtggatcaagagactggagaagatctaaacccaaatagacggcgaaatcttgtcggggagaccaatgaggagacctcaatgcggaatcctgatagacccactcacttgtcccttgtcagtgctcctgaagtagaggacgactcactggaacgcaagcgcctcacccgaatctctgacccagagaagtgggagatcaaacagatgattgctgccaatgtcctttccaaagaagaatttccagactttgatgaagagactggcattctccctaaggtggatgatgaagaagatgaggaccttgagattgaattggttgaggaagagcctccattcctgagagggcacactaagcaaagcatggacatgagccccattaaaattgtcaagaacccagacggctccctctcccaagcagcaatgatgcagagtgccttggccaaagaaaggcgggaactcaaacaggcccagcgggaagctgagatggattctattcccatgggactcaacaaacactgggttgaccctctgcctgatgcggaaggcagacagattgctgccaacatgaggggtattgggatgatgcccaatgatattcctgagtggaagaagcatgcctttgggggcaacaaagcctcttacggaaaaaagacccagatgtcaatccttgagcagagggagagcctgcccatctacaaactgaaggagcaattggtccaggccgtccatgacaatcagatcctgattgtcattggtgagacaggatctggaaagacaacacagatcacccagtacctggcggaggcaggctacacttccaggggcaagattgggtgtacccagcccagaagagtggcagctatgtcggtggccaaaagagtgtcagaggagtttggttgttgcttaggccaagaggtgggctacaccattcgatttgaggactgcactagccctgaaacagtcatcaagtacatgacagatgggatgttgcttagagagtgcttgattgaccctgacctcactcagtacgcgatcatcatgttggacgaggcacatgagaggacaattcacactgatgtgctctttggattgttgaaaaagacagttcagaaacggcaggacatgaagctgattgtcacctcagccaccttggatgcagtgaagttttctcaatacttctatgaagctcccattttcaccatcccaggtcgaacatatccagtggaaatactgtacacaaaggaacctgagacagattatctggatgccagcctgattactgttatgcagattcatttaacagaaccaccaggtgatatcctggtcttcctgactggtcaggaagaaattgatactgcttgtgagatcctgtatgaaagaatgaaatccctgggacctgatgttccagagttaattatcctcccagtgtactctgctcttcccagtgagatgcagacccgaatctttgacccagctccaccaggcagcagaaaggctcaggcaaagcaacgagctggcagagctgggagaacaggcccagggaagtgttacaggttgtacacagaacgtgcctaccgagatgaaatgctgaccaccaacgtgccggaaatccagagaaccaacttagcaagcacagtgctgtcactcaaggccatgggtatcaatgatctgctgtcctttgatttcatggatgccccacctatggaaactttgatcacagccatggagcagctgtacacactgggggccctggatgacgagggcctgctcactcgcttgggccgccggatggcagagttccctctggagccaatgctatgcaaaatgctcatcatgtctgtgcatctgggctgcagtgaggaaatgctgaccattgtatccatgctgtctgtgcagaacrtcttctataggcccaaggataaacaagcccttgcagatcagaagaaggccaaattccaccagactgaaggggaccacctcaccctgctagctgtgtacaactcctggaagaacaacaagttctccaacccatggtgctatgagaactttatccaggstcgttccctgcgccgggcccaggacattcgcaagcagatgttaggcataatggacagacacaagctggatgttgtttcctgtggcaagtccacagtccgagtgcagaaggccatctgcagtgggttcttccgtaatgctgccaagaaagacccgcaggagggttaccggacactgatcgaccagcaggtggtctatatccatccttccagtgccctcttcaacagacagccagaatgggtggtgtaccatgagctggtgctcaccaccaaggaatacatgcgtgaagttaccaccatcgaccctcggtggcttgtggagtttgccccagccttcttcaaggtctcagacccaactaagctaagcaaacagaagaagcaacagcgtcttgaacccttgtacaaccgctatgaggaacccaatgcctggagaatatctcgagctttccgacggcgctgaaaggcaagattgttcctttgcctctccagcagcagtagccagggcttggacttatcgatgacaggctggtcctgaggatacagctgtcccgtgactgactgtcttaactgagcattttctcaactcgactctcatttcttccctgctgcaccccaagtccttgggcccagttgggagctcatatctaacacagagacacattgcatcaacttcaagaaagggacaatttgtgcagctccaggatgggaaggtggagtgggtgagcatcttgtgcagggacatggtgagtgccctgatgycccagctagcaggagctactgtgctcatctaaagtgtttgccccacttcccaccccgtctccagcccctgtactttggcttgacctcgtggaaatatttattttcttaaggaaacaaaa

SEQ ID NO: 5534 - DNA, 4237 bp, Homo sapiens
tatgatccatcctgttgggacttgattcgttcctcaaattttcaatttaccgtaaacaaaggggacgcgcgctgacccggaagtgaaagctggaacccggccggagtagctctgagcgccggctgtgaggaaggaggttctgggcaagctatagccatggctgtggctgtagccatggcgggagccttaatcgggtcggagccaggccccgcggaagaacttgccaaactcgagtacctgtctttggtgtcaaaggtttgcactgagctggacaatcacttggggatcaacgacaaggaccttgctgaatttgtgatcagtcttgctgagaaaaataccacctttgatacttttaaggcttctctcgtcaaaaatggtgcagaatttacggattctcttattagtaacttgctgcgtctcatacaaaccatgcggcctccagcgaagccttccactagcaaagatccagttgttaaacctaaaacagaaaaagaaaagctgaaggaactcttcccagtcctttgccaaccggacaacccttctgttcggaccatgttggatgaagatgatgtgaaagttgctgtggatgtcctgaaagaactggaagctttaatgcccagcgcagcaggccaggagaagcaaagagatgctgaacaccgggacaggacaaagaagaagaagcggagtcgaagccgagatcgaaaccgagatcgagacagagatagggaacgaaaccgagatagagaccacaagcggagacaccgatcccgctctcgatcacgttccaggacccgggagaggaataaagtgaagtctagatatcggtccaggagcaggagtcagagtccccccaaagaccggaaggaccgggacaaatatggagagcggaatctggatagatggcgggataagcatgtggaccgccctcctccagaagagcccaccattggtgacatttataatggcaaagttaccagcatcatgcagtttggttgctttgtgcagctggaaggactaaggaagcggtgggaaggcctggtgcacatctctgagctccggcgggagggtcgtgtggccaatgtagctgatgtcgtgagcaaaggccagagggtcaaagtcaaagtgctgtccttcactgggaccaagaccagcctgagcatgaaggatgtggatcaagagactggagaagatctaaacccaaatagacggcgaaatcttgtcggggagaccaatgaggagacctcaatgcggaatcctgatagacccactcacttgtcccttgtcagtgctcctgaagtagaggacgactcactggaacgcaagcgcctcacccgaatctctgacccagagaagtgggagatcaaacagatgattgctgccaatgtcctttccaaagaagaatttccagactttgatgaagagactggcattctccctaaggtggatgatgaagaagatgaggaccttgagattgaattggttgaggaagagcctccattcctgagagggcacactaagcaaagcatggacatgagccccattaaaattgtcaagaacccagacggctccctctcccaagcagcaatgatgcagagtgccttggccaaagaaaggcgggaactcaaacaggcccagcgggaagctgagatggattctattcccatgggactcaacaaacactgggttgaccctctgcctgatgcggaaggcagacagattgctgccaacatgaggggtattgggatgatgcccaatgatattcctgagtggaagaagcatgcctttgggggcaacaaagcctcttacggaaaaaagacccagatgtcaatccttgagcagagggagagcctgcccatctacaaactgaaggagcaattggtccaggccgtccatgacaatcagatcctgattgtcattggtgagacaggatctggaaagacaacacagatcacccagtacctggcggaggcaggctacacttccaggggcaagattgggtgtacccagcccagaagagtggcagctatgtcggtggccaaaagagtgtcagaggagtttggttgttgcttaggccaagaggtgggctacaccattcgatttgaggactgcactagccctgaaacagtcatcaagtacatgacagatgggatgttgcttagagagtgcttgattgaccctgacctcactcagtacgcgatcatcatgttggacgaggcacatgagaggacaattcacactgatgtgctctttggattgttgaaaaagacagttcagaaacggcaggacatgaagctgattgtcacctcagccaccttggatgcagtgaagttttctcaatacttctatgaagctcccattttcaccatcccaggtcgaacatatccagtggaaatactgtacacaaaggaacctgagacagattatctggatgccagcctgattactgttatgcagattcatttaacagaaccaccaggtgatatcctggtcttcctgactggtcaggaagaaattgatactgcttgtgagatcctgtatgaaagaatgaaatccctgggacctgatgttccagagttaattatcctcccagtgtactctgctcttcccagtgagatgcagacccgaatctttgacccagctccaccaggcagcagaaaggttgtgattgccaccaatatcgcagagacatcgctgactattgatggtatctactatgtggtggacccaggattcgtgaaacagaaagtttacaattccaagacagggattgaccagctcgtggtgacgcctatttctcaggctcaggcaaagcaacgagctggcagagctgggagaacaggcccagggaagtgttacaggttgtacacagaacgtgcctaccgagatgaaatgctgaccaccaacgtgccggaaatccagagaaccaacttagcaagcacagtgctgtcactcaaggccatgggtatcaatgatctgctgtcctttgatttcatggatgccccacctatggaaactttgatcacagccatggagcagctgtacacactgggggccctggatgacgagggcctgctcactcgcttgggccgccggatggcagagttccctctggagccaatgctatgcaaaatgctcatcatgtctgtgcatctgggctgcagtgaggaaatgctgaccattgtatccatgctgtctgtgcagaacrtcttctataggcccaaggataaacaagcccttgcagatcagaagaaggccaaattccaccagactgaaggggaccacctcaccctgctagctgtgtacaactcctggaagaacaacaagttctccaacccatggtgctatgagaactttatccaggstcgttccctgcgccgggcccaggacattcgcaagcagatgttaggcataatggacagacacaagctggatgttgtttcctgtggcaagtccacagtccgagtgcagaaggccatctgcagtgggttcttccgtaatgctgccaagaaagacccgcaggagggttaccggacactgatcgaccagcaggtggtctatatccatccttccagtgccctcttcaacagacagccagaatgggtggtgtaccatgagctggtgctcaccaccaaggaatacatgcgtgaagttaccaccatcgaccctcggtggcttgtggagtttgccccagccttcttcaaggtctcagacccaactaagctaagcaaacagaagaagcaacagcgtcttgaacccttgtacaaccgctatgaggaacccaatgcctggagaatatctcgagctttccgacggcgctgaaaggcaagattgttcctttgcctctccagcagcagtagccagggcttggacttatcgatgacaggctggtcctgaggatacagctgtcccgtgactgactgtcttaactgagcattttctcaactcgactctcatttcttccctgctgcaccccaagtccttgggcccagttgggagctcatatctaacacagagacacattgcatcaacttcaagaaagggacaatttgtgcagctccaggatgggaaggtggagtgggtgagcatcttgtgcagggacatggtgagtgccctgatgycccagctagcaggagctactgtgctcatctaaagtgtttgccccacttcccaccccgtctccagcccctgtactttggcttgacctcgtggaaatatttattttcttaaggaaacaaaa

SEQ ID NO: 5535 - DNA, 4288 bp, Homo sapiens
tatgatccatcctgttgggacttgattcgttcctcaaattttcaatttaccgtaaacaaaggggacgcgcgctgacccggaagtgaaagctggaacccggccggagtagctctgagcgccggctgtgaggaaggaggttctgggcaagctatagccatggctgtggctgtagccatggcgggagccttaatcgggtcggagccaggccccgcggaagaacttgccaaactcgagtacctgtctttggtgtcaaaggtttgcactgagctggacaatcacttggggatcaacgacaaggaccttgctgaatttgtgatcagtcttgctgagaaaaataccacctttgatacttttaaggcttctctcgtcaaaaatggtgcagaatttacggattctcttattagtaacttgctgcgtctcatacaaaccatgcggcctccagcgaagccttccactagcaaagatccagttgttaaacctaaaacagaaaaagaaaagctgaaggaactcttcccagtcctttgccaaccggacaacccttctgttcggaccatgttggatgaagatgatgtgaaagttgctgtggatgtcctgaaagaactggaagctttaatgcccagcgcagcaggccaggagaagcaaagagatgctgaacaccgggacaggacaaagaagaagaagcggagtcgaagccgagatcgaaaccgagatcgagacagagatagggaacgaaaccgagatagagaccacaagcggagacaccgatcccgctctcgatcacgttccaggacccgggagaggaataaagtgaagtctagatatcggtccaggagcaggagtcagagtccccccaaagaccggaaggaccgggacaaatatggagagcggaatctggatagatggcgggataagcatgtggaccgccctcctccagaagagcccaccattggtgacatttataatggcaaagttaccagcatcatgcagtttggttgctttgtgcagctggaaggactaaggaagcggtgggaaggcctggtgcacatctctgagctccggcgggagggtcgtgtggccaatgtagctgatgtcgtgagcaaaggccagagggtcaaagtcaaagtgctgtccttcactgggaccaagaccagcctgagcatgaaggatgtggatcaagagactggagaagatctaaacccaaatagacggcgaaatcttgtcggggagaccaatgaggagacctcaatgcggaatcctgatagacccactcacttgtcccttgtcagtgctcctgaagtagaggacgactcactggaacgcaagcgcctcacccgaatctctgacccagagaagtgggagatcaaacagatgattgctgccaatgtcctttccaaagaagaatttccagactttgatgaagagactggcattctccctaaggtggatgatgaagaagatgaggaccttgagattgaattggttgaggaagagcctccattcctgagagggcacactaagcaaagcatggacatgagccccattaaaattgtcaagaacccagacggctccctctcccaagcagcaatgatgcagagtgccttggccaaagaaaggcgggaactcaaacaggcccagcgggaagctgagatggattctattcccatgggactcaacaaacactgggttgaccctctgcctgatgcggaaggcagacagattgctgccaacatgaggggtattgggatgatgcccaatgatattcctgagtggaagaagcatgcctttgggggcaacaaagcctcttacggaaaaaagacccagatgtcaatccttgagcagagggagagcctgcccatctacaaactgaaggagcaattggtccaggccgtccatgacaatcagatcctgattgtcattggtgagacaggatctggaaagacaacacagatcacccagtacctggcggaggcaggctacacttccaggggcaagattgggtgtacccagcccagaagagtggcagctatgtcggtggccaaaagagtgtcagaggagtttggttgttgcttaggccaagaggtgggctacaccattcgatttgaggactgcactagccctgaaacagtcatcaagtacatgacagatgggatgttgcttagagagtgcttgattgaccctgacctcactcagtacgcgatcatcatgttggacgaggcacatgagaggacaattcacactgatgtgctctttggattgttgaaaaagacagttcagaaacggcaggacatgaagctgattgtcacctcagccaccttggatgcagtgaagttttctcaatacttctatgaagctcccattttcaccatcccaggtcgaacatatccagtggaaatactgtacacaaaggaacctgagacagattatctggatgccagcctgattactgttatgcagattcatttaacagaaccaccaggtgatatcctggtcttcctgactggtcaggaagaaattgatactgcttgtgagatcctgtatgaaagaatgaaatccctgggacctgatgttccagagttaattatcctcccagtgtactctgctcttcccagtgagatgcagacccgaatctttgacccagctccaccaggcagcagaaaggttgtgattgccaccaatatcgcagagacatcgctgactattgatggtatctactatgtggtggacccaggattcgtgaaacagaaagtttacaattccaagacagggattgaccagctcgtggtgacgcctatttctcaggctcaggcaaagcaacgagctggcagagctgggagaacaggcccagggaagtgttacaggttgtacacagaacgtgcctaccgagatgaaatgctgaccaccaacgtgccggaaatccagagaaccaacttagcaagcacagtgctgtcactcaaggccatgggtatcaatgatctgctgtcctttgatttcatggatgccccacctatggaaactttgatcacagccatggagcagctgtacacactgggggccctggatgacgagggcctgctcactcgcttgggccgccggatggcagagttccctctggagccaatgctatgcaaaatgctcatcatgtctgtgcatctgggctgcagtgaggaaatgctgaccattgtatccatgctgtctgtgcagaacrtcttctataggcccaaggataaacaagcccttgcagatcagaagaaggccaaattccaccagactgaaggggaccacctcaccctgctagctgtgtacaactcctggaagaacaacaagttctccaacccatggtgctatgagaactttatccaggstcgttccctgcgccgggcccaggacattcgcaagcagatgttaggcataatggacagacacaagctggatgttgtttcctgtggcaagtccacagtccgagtgcagaaggccatctgcagtgggttcttccgtaatgctgccaagaaagacccgcaggagggttaccggacactgatcgaccagcaggtggtctatatccatccttccagtgccctcttcaacagacagccagaatgggtggtgtaccatgagctggtgctcaccaccaaggaatacatgcgtgaagttaccaccatcgaccctcggtggcttgtggagtttgccccagccttcttcaaggtctcagacccaactaagctaagcaaacagaagaagcaacagcgtcttgaacccttgtacaaccgctatgaggaacccaatgcctggagaatatctcgagctttccgacggcgctgaaaggcaagattgttcctttgcctctccagcagcagtagccagggcttggacttatcgatgacaggctggtcctgaggatacagctgtcccgtgactgactgtcttaactgagcattttctcaactcgactctcatttcttccctgctggtaaaatagaaacagggatttaaacctggctttggcaagagcctgcagcctccatcaccccaagtccttgggcccagttgggagctcatatctaacacagagacacattgcatcaacttcaagaaagggacaatttgtgcagctccaggatgggaaggtggagtgggtgagcatcttgtgcagggacatggtgagtgccctgatgycccagctagcaggagctactgtgctcatctaaagtgtttgccccacttcccaccccgtctccagcccctgtactttggcttgacctcgtggaaatatttattttcttaaggaaac

SEQ ID NO: 5536 - DNA, 2497 bp, Homo sapiens
ggtctgatcttcctgcggctgaaccgcccggctgagccgacattgccggcgtcttggcgattcggcccgacgagctccgctttcgctacagcatggtggcctactggagacaggctggactcagctacatccgatactcccagatctgtgcaaaagcagtgagagatgcmctgaagacagaattcaaagcaaatgctgaraagacttctggcagcaacgtaaaaattgtgaaagtaaagaaggaataatctgtaagttatggatttatttagaagaacagttgcatcttaagtttttggagcaccataaagatcaaaataattttagttttgggttctattcattttttagtcagtgtatttggaagttagttattgggatggtataatttaaagcatgcaggttatagaagtcccctggcctaataaaaagaaagtcttcttgggccctgacaagcagaagtaattggcacattgattttcagttcatttagcaatgcttaggtagagagccatcgtatttgaattaaacctgtttcatttgtctgcacaaatcaaataatttggaggatgaactccccacttgtataattgcaattggagttacataacagtccaagagcatgaaaaactacagttctttacatttttatttcccccacaaccactaatgttctcacaaatcactacttcccgaacataataactacaggcacaggcaagggtcctgctgttgtatcaagcaataaaatctgcaagaccccgcagcgaatactgttttgctaatttattatgctttcagagggtttggttcattttacttttccaaagatgttggtgatgtaaagttaaattctcgtgaaataraaaggtctgtacagttgataagtgtagacttttgtgttccacattataaaagtggtttgatctctaaagtactttcttgacattgttatttcaaaagtaggcaaggcaaattatcagagagatgtttttcagatttaatttttcttgttttgcttttaaaaagcttcagacccataatagcacagaaatgtgataaatattaatcctttggcagcttatggttatgagcaattttacttattggaactgtctcccctaagcacttttcattttcattttgaattagtaaatattttattacaagtctggagatgcagtgttttgaatttagccctttttctaggggctctctgtctaatctcataattctgagtaatgagacctggttttatgttgggtkgttttgttttaacagtaagctaacagaaaatcatttagcctcactcggctcagagctgccagactgcatctaatgctgagattttgcaaagtcctgggggtcaggaagtagtgtccgatccccttaaacaaagcattagcccctctctgttatgcccttcagggttacagaccccacctcattagcacaaggagatgttagtgtcttttaaaggcaaagtagtttctttattctgggagagtgtttacttttactcagcaggaaaatgcctgcttgactaagcctgtgtacttgaaccagcactttttacatctgagccacggcaatgtgaatgatagccacagttatacagttcactataaggaagttatttcttatattcatgttgagtttttaagaaaacacagagaactagccagcaacttgcattttctttttcctcctagaccctgactaaagcttgaaatgctacatttccaaggtgaagatgtgtgggcacatgttatggcagattgaaaaggatctcattccatgggaaaaaaaaaaatcctgtcttgttcataaattgacaatgtcaataaattgaaatatggttcactgttactcttgattttagtttgtgagactttttcattttctttaaaggaactgtctgcacagctgcatgattatggccatgtgaaccagggtttcttaaaagcaggggaagccagatttaatatttagtgaccaaagggatacagaaagcattttgaaaatgtctcaaaatagttgtttcatgacattaattggtgatcaaaattatctgctgtcattgaggcttcgtagtcccttatttttgaattgttgtcatgtcagaataatgacatggttatcagtaacaaatggaaataattattaaatactaaaagtgtagattagaagaagaaatactaaattgtacttgttttgtattgtgcacttaaagcctatagataagaacggttacagaatttaagcacaaagtgtttttcacattgttttgtaaatgaatctttatactctggtagcatttctcataggaaatgaggcaaagctattgaataacttgctcattgagttgatggccaaactgaaattaaaacctaggagttttgactgcaagtctgggacacggtgaccacaacagcagtttcgtggtatttccatagtgattcattcattcattatttagggatgaaaaattgttgca

SEQ ID NO: 5537 - DNA, 2269 bp, Homo sapiens
ggtctgatcttcctgcggctgaaccgcccggctgagccgacattgccggcgtcttggcgattcggcccgacgagctccgctttcgctacagcatggtggcctactggagacaggctggactcagctacatccgatactcccagatctgtgcaaaagcagtgagagatgcmctgaagacagaattcaaagcaaatgctgaraagacttctggcagcaacgtaaaaattgtgaaagtaaagaaggaataatctaccctgactaaagcttgaaatgctacatttccaaggtgaagatgtgtgggcacatgttatggcagattgaaaaggatctcattccatgggaaaaaaaaaaatcctgtcttgttcataaattgacaatgtcaataaattgaaatatggttcactgttactcttgattttagtttgtgagactttttcattttctttaaaggaactgtctgcacagctgcatgattatggccatgtgaaccagggtttcttaaaagcaggggaagccagatttaatatttagtgaccaaagggatacagaaagcattttgaaaatgtctcaaaatagttgtttcatgacattaattggtgatcaaaattatctgctgtcattgaggcttcgtagtcccttatttttgaattgttgtcatgtcagaataatgacatggttatcagtaacaaatggaaataattattaaatactaaaagtgtagattagaagaagaaatactaaattgtacttgttttgtattgtgcacttaaagcctatagataagaacggttacagaatttaagcacaaagtgtttttcacattgttttgtaaatgaatctttatactctggtagcatttctcataggaaatgaggcaaagctattgaataacttgctcattgagttgatggccaaactgaaattaaaacctaggagttttgactgcaagtctgggacacggtgaccacaacagcagtttcgtggtatttccatagtgattcattcattcattatttagggatgaaaaattgttgcaagttatgtttttatctttctttgaaacttgaaagggcttgggcaagtaaaacaccattgcaaagttaactgcctgattttaactgtttttggagactggagaaataaatttgaactggaaattttgamacaccattctaggatcagttctcacatggtacttaagctcacaatgatttatcagggccactgtcagcaatgccgaggataagccgaaaagaacatctttgttctcggcttctgggaatgacttattgtcccgacacttgacctgtaggttttactgaattctcagcacagagcgagcagggaggcagagccrattgagtggaagagggtgcctctggaaamcagcaggttaggagcccttggagtcctccgcctcggagctgtcatcctgctgttggcaagttagggcacctcagttcagtgctgtggcccccaagattaaggtactaggaagtatcctccattacagggaacaggaataaatgaatcaaaaagctatcgggcctttttgacatgggacgaataaagtaactaataggcaaaggggctaaatgatttccagtcaagtaattagagataagtcatttattaaggaggcagatggggtattattggtatatagatggcatagtagattgctagtatattggtagattattggtatatagatggtatgttaaggaggcagatggggtattactggtatatagatggtatggtagattggtagtatattggcagattattggtatatggtatgttgaggcagatggggtattactggtatatagatggcatagtagattggtagtatattggtagattattggtatagagatggtatattattaaggaggcagatggggtaattagaggtgagacttagggacagggcttgtgatatggaaaggagtgaagtcactgagtaaaagacaagtttactgtcagcagagattcttagaggctcttttctccgtgattaaaaaaaaatcctaaaccagtagtataataaacttcctgcctccagcagtgctgggtagctggcaggatgactgtgcccagtgatgaggtgaccccagtcagaccaacttaatgagtatcccactaaytagttggatgatgtttgaagctgtcagttaatctcttagttcacatcgttcttgtgagcaaagtgaaggaatcggataagctctaaatttcggtgatgctgctgctctgagagacc

SEQ ID NO: 5538 - DNA, 1047 bp, Homo sapiens
ggtctgatcttcctgcggctgaaccgcccggctgagccgacattgccggcgtcttggcgattcggcccgacgagctccgctttcgctacagcatggtggcctactggagacaggctggactcagctacatccgatactcccagatctgtgcaaaagcagtgagagatgcmctgaagacagaattcaaagcaaatgctgaraagacttctggcagcaacgtaaaaattgtgaaagtaaagaaggaataatctaccctgactaaagcttgaaatgctacatttccaaggtttgggaagtaaagcaccagaggaagcatgtgtaaatccttgtataatcgcaggctgtaagtctttagcatctcaggaagttactaacttcaaactaagtatataggtagagtttcttactaaatctagtgcttcttgaaccacaagtagaaagcatttaaaacatgaatgttgttttgtgttttttgaagtttgtaaatagaagacttgttgatgatccgatggcaaggtatttttctcttggtatgtattttagttatttcctcgtgatgcataagtgaaaagagtgaagtttctcagaatgagcaactgtcatccatctacctgctattttattattgctgattacaaaagcaaatcaagagatgagaacccagttgcctgcaagtaaatatttactgcattgagggtcggagcattttcccattaccggttatccatggatcaaatagtgtatctcagtggtaattctagagggccattaaaaccctgatggtgctggaagagatggcagtgctgcatgtcagaaataggtaaactgtaattaagaagttacagatgatttgattacgctcttgtgtatttggtcctgttataatgtgagcagattaaaatcatgtagtgcttaaagctatgtcattatgcaaacatttatggcaacttctgcaaattaatttgaactgtaaaagttccctaatgagacgatgtcctccataactgagaaggacactgcagccattgctgcttaattcctgcattt

SEQ ID NO: 5539 - DNA, 699 bp, Homo sapiens
atggcccagccccctttgcccttgtccatcaaaggtgccgccagcatgtctgacaaactgccctacaaagttgctgacatcggcctggccacctggggacacaaggccctagacattgtggagaatggatgccgggaacatgcagtggctgtctttgccgaggctggcatgccagtgttcacctggaagggcaaaatgaaagaggggtacccgtggtgcattgaacagacactgtacttcaaggacgggcccctcaacatgattctggatgatgggggtgaccttaccaacmtcatccacaccaaatgrcaccaagtggaccaagacgtgatgattgccagcaaggtagcagtggtagcaggctatggtgrtgtgggcaagggctgtgcccaggccttgcagggttttggggcctgcrtaatcatcaccgagactgaccccatcagtgcactgcaggctgccatggaaggctatgaggtgaccaccatggacgaggcctgtcaggagggcaacatctttgtcaccaccacaacctgtgtcaatatcatccttggccggcactttgagcagatgaaggatgatgccatcttatgtaatactgaacaatttgacgtggagatcgatgtcagctttgtggggagtaactccttcaaccagctgaacgtgaaattgaccaagctaactgagaagcaagcccag

SEQ ID NO: 5540 - DNA, 594 bp, Homo sapiens
atgtctgacaaactgccctacaaagttgctgacatcggcctggccacctggggacacaaggccctagacattgtggagaatggatgccggctgcagcatcttctccacccaggaacatgcagtggctgtctttgccgaggctggcatgccagtgttcacctggaagggcaaaatgaaagaggggtacccgtggtgcattgaacagacactctcatgtcgggcatctgaggcatctctgaggagaccaaaaccggggtccacaacctacacaagatgatggccagtgcaatcctgaaggtgcctaccatcaacgtcaatgactccgtcaccaagagcaaaatttgacaacctctatggctgccaggagtcccttatagatgrcaccaagtggaccgtgatggtgcagattgcgctgtggacccacccagacaagtaccccattggggttcacttcctgcccaagwagctggatgaggcagtggctgaggcgcccccctgggcaagctgaacgtgaaattgaccaagctaactgagaagcaagcccagtagctgagcacgtcccgtgatggccccttcaagccggatcactactgc

SEQ ID NO: 5541 - DNA, 1576 bp, Homo sapiens
atgtctgacaaactgccctacaaagttgctgacatcggcctggccacctggggacacaaggccctagacattgtggagaatggatgccgggtttgatgggcatgcaggagctttactcggcctccaggccactgaagggtgcctgcattgctgactgcctgcaaataactgtggagacggccatcctcattgagacccttttctccctgggtgttcaggagcagtggtctagctgcagcatcttctccacccaggaacatgcagtggctgtctttgccgaggctggcatgccagtgttcacctggaagggcaaaatgaaagaggggtacccgtggtgcattgaacagacactgtacttcaaggacgggcccctcaacatgattctggatgatgggggtgaccttaccaacmtcatccacaccaagtacgtacccacagctcatgtcgggcatctgaggcatctctgaggagaccaaaaccggggtccacaacctacacaagatgatggccagtgcaatcctgaaggtgcctaccatcaacgtcaatgactccgtcaccaagagcaaaatttgacaacctctatggctgccaggagtcccttatagatgrcaccaagtggaccaagacgtgatgattgccagcaaggtagcagtggtagcaggctatggtgrtgtgggcaagggctgtgcccaggccttgcagggttttggggcctgcrtaatcatcaccgagactgaccccatcagtgcactgcaggctgccatggaaggctatgaggtgaccaccatggacgaggcctgtcaggagggcaacatctttgtcaccaccacaacctgtgtcaatatcatccttggccggcactttgagcagatgaaggatgatgccatcttatgtaatactgaacaatttgacgtggagatcgatgtcaggtgcctcaacaacaatgctgtggagaaggcaaacatcaagcccaggcggactggtactggctgaagaatgggtgccacatcatcgtgctggctgagggttggctggtcaacctgggctgtgctatgggccgccccagctttgtggggagtaactccttcaaccaggtgatggtgcagattgcgctgtggacccacccagacaagtaccccattggggttcacttcctgcccaagwagctggatgaggcagtggctgaggcgcccccctgggcaagctgaacgtgaaattgaccaagctaactgagaagcaagcccagtagctgagcacgtcccgtgatggccccttcaagccggatcactactgctgctgagagtcaggcctgcccttcactttccagctgctgtccttgctcaggccccgcctcttctccctaagagcaaatggcaccaactttgtgattggttggttagtgtcccccatcgatggggctggtcactcagtttttggcctctgctgcatccctaacactatatcaagtgtggcggggaaattgagaggcccctcctcaagccctggtcatgatggaggtacaagggaggcatccacaaggaaccatgagttgagtggtcttggaactgctcactaa

SEQ ID NO: 5542 - DNA, 1858 bp, Homo sapiens
aggcgtctgttctcggcagcggcacagcgaggtcggcagcggcacagcgaggtcggcagcggcacagcgaggtcggcagcggcacagcgaggtcggcagcggcagcgaggtcggcacggcgcgcgctgtgctcttccgcggactctgaatcatggcgaccacggccacgatggcgacctcgggctcggcgcgaaagcggctgctcaaagaggaagacatgactaaagtggaattcgagaccagcgaggaggtggatgtgacccccacgttcgacaccatgggcctgcgggaggacctgctgcggggcatctacgcttacggttttgaaaaaccatcagcaatccagcaacgagcaatcaagcagatcatcaaagggagagatgtcatcgcacagtctcagtccggcacaggaaaaacagccaccttcagtatctcagtcctccagtgtttggatattcaggttcgtgaaactcaagctttgatcttggctcccacaagagagttggctgtgcagatccagaaggggctgcttgctctcggtgactacatgaatgtccagtgccatgcctgcattggaggcaccaatgttggcgaggacatcaggaagctggattacggacagcatgttgtygcgggcactccagggcgtgtttttgatatgattcgtcgcagaagcctaaggacacgtgctatcaaaatgttggttttggatgaagctgatgaaatgttgaataaaggtttcaaagagcagatttacgatgtatacaggtacctgcctccagccacacaggtggttctcatcagtgccacgctgccacacgagattctggagatgaccaacaagttcatgaccgacccaatccgcatcttggtgaaacgtgatgaattgactctggaaggcatcaagcaatttttcgtggcagtggagagggaagagtggaaatttgacactctgtgtgacctctacgacacactgaccatcactcaggcggtcatcttctgcaacaccaaaagaaargtggactggctgacggagaaaatgagggaagccaacttcactgtatcctcaatgcatggagacatgccccagaaagagcgggagtccatcatgaaggagttccggtcgggcgccagccgagtgcttatttctacagatgtctgggccagggggttggatgtccctcaggtgtccctcatcattaactatgatctccctaataacagagaattgtacatacacagaattgggagatcaggtcgatacggccggaagggtgtggccattaactttgtaaagaatgacgacatccgcatcctcagagatatcgagcagtactattccactcagattgatgagatgccgatgaacgttgctgatcttatctgaagcagcagatcagtgggatgagggagactgttcacctgctgtgtactcctgtttggaagtatttagatccagattctacttaatggggtttatatggactttcttctcataaatggcctgccgtctcccttcctttgaagaggatatggggattctgctctcttttcttatttacatgtaaataatacattgttctaagtctttttcattaaaaatttaaaacttttcccataaactctatacttctaaggtgccaccaccttctctagtaacttactgtgtagtcttgggtcatttcactcacttttctttttttcttttctttttcttttttttttttgagacagtctccctctgttgcccaggcaggagcgcagtggcgtgatctcctctcaccgcaagctccacttcctgggttcatgccattctcctacctcagcctcccacgtagctgggagtacaggcggccgc

SEQ ID NO: 5543 - DNA, 1922 bp, Homo sapiens
cacgtctctcgctttcgcatacttaaggcgtctgttctcggcagcggcacagcgaggtcggcagcggcacagcgaggtcggcagcggcacagcgaggtcggcagcggcacagcgaggtcggcagcggcagcgaggtcggcagcggcacagcgaggtcggcagcggcagcgaggtcggcagcggcgcgcgctgtgctcttccgcggactctgaatcatggcgaccacggccacgatggcgacctcgggctcggcgcgaaagcggctgctcaaagaggaagacatgactaaagtggaattcgagaccagcgaggaggtggatgtgacccccacgttcgacaccatgggcctgcgggaggacctgctgcggggcatctacgcttacggttttgaaaaaccatcagcaatccagcaacgagcaatcaagcagatcatcaaagggagagatgtcatcgcacagtctcagtccggcacaggaaaaacagccaccttcagtatctcagtcctccagtgtttggatattcaggttcgtgaaactcaagctttgatcttggctcccacaagagagttggctgtgcagatccagaaggggctgcttgctctcggtgactacatgaatgtccagtgccatgcctgcattggaggcaccaatgttggcgaggacatcaggaagctggattacggacagcatgttgtygcgggcactccagggcgtgtttttgatatgattcgtcgcagaagcctaaggacacgtgctatcaaaatgttggttttggatgaagctgatgaaatgttgaataaaggtttcaaagagcagatttacgatgtatacaggtacctgcctccagccacacaggtggttctcatcagtgccacgctgccacacgagattctggagatgaccaacaagttcatgaccgacccaatccgcatcttggtgaaacgtgatgaattgactctggaaggcatcaagcaatttttcgtggcagtggagagggaagagtggaaatttgacactctgtgtgacctctacgacacactgaccatcactcaggcggtcatcttctgcaacaccaaaagaaargtggactggctgacggagaaaatgagggaagccaacttcactgtatcctcaatgcatggagacatgccccagaaagagcgggagtccatcatgaaggagttccggtcgggcgccagccgagtgcttatttctacagatgtctgggccagggggttggatgtccctcaggtgtccctcatcattaactatgatctccctaataacagagaattgtacatacacagaattgggagatcaggtcgatacggccggaagggtgtggccattaactttgtaaagaatgacgacatccgcatcctcagagatatcgagcagtactattccactcagattgatgagatgccgatgaacgttgctgatcttatctgaagcagcagatcagtgggatgagggagactgttcacctgctgtgtactcctgtttggaagtatttagatccagattctacttaatggggtttatatggactttcttctcataaatggcctgccgtctcccttcctttgaagaggatatggggattctgctctcttttcttatttacatgtaaataatacattgttctaagtctttttcattaaaaatttaaaacttttcccataaactctatacttctaaggtgccaccaccttctctagtaacttactgtgtagtcttgggtcatttcactcacttttctttttttcttttctttttcttttttttttttgagacagtctccctctgttgcccaggcaggagcgcagtggcgtgatctcctctcaccgcaagctccacttcctgggttcatgccattctcctacctcagcctcccacgtagctgggagtacaggcggccgc

SEQ ID NO: 5544 - DNA, 3177 bp, Homo sapiens
ccggggtcggggcagggggcggggccgagcgggagaccagagagccggagccggatcccgatcccgagtccgagccgccgccgccatgagctgccccgtgcccgcctgctgcgcgctgctgctagtcctggggctctgccgggcgcgtccccggaacgcactgctgctcctcgcggatgrcggaggctttgagagtggcgcgtacaacaacagcrccatcgccaccccgcacctggacgccttggcccgccgcagcctcctctttcgcaatgccttcacctsggtcagcagctgctctcccagccgcgccagcctcctcmctggcctgccccagyatcrgaatgggatgtacrggctgcaccaggacgtgcaccacttcaactccttcgacaaggtgcggagcctgccgctgctgctcagccaagctggtgtgcgcacaggcatcatcrggaagaagcacgtggggccggagaccgtgtacccgtttgactttgcgtacayggaggagaatggctccgtccyccaggtggggyrgaacatcactagaattaagctgctcgtccggaaattcctgcagactcaggatgaccggcctttcttcctctacgtcgccttccacgacccccacygctgtgggcactcccagccccagtacggaaccttstgtgagaagtttggcaacggagagagcggcatgggtcstatcccagactggaccccccaggcctacgacccactggacgtgctggtgccttacttygtccscaacaccccggcagcccgagccgacctggccgctcagtacaccaccgtcggccrcatggaccaaggagttggactggtgctccaggagctgcgtgacgccggtgtcctgaacgacacactggtgatcttcacgtccracaacgggatccccttccccagcggcaggaccaacctgtmctggycgggcactgctgaayccttactggtgtcayccccggagcacccaaaacgctggggccaagtcagcgaggcctacgtgagcctcctagacctcacgcccrccakcttggattggttctcgatcccgtaccccagctacgccatctttggctcgaagaccatccacctcactggccggtccctcctgccggcgctggagsccragcccctctgggccaccrtctttggcagsyagagccaccacdaggtcaccatrtccyaccccatgyrctccgtgcrgcaccggcacttccgcckcrtgcacaamctcaacttcaagatkccctttcccatcgaccaggacttctacgtctcacccaccttccaggacctcctgaaccgcaccacagctggtcagcccacgggctggtacaaggacctccgtcattactactacyrggcgcgctgggagctctacgaccggagccgggacccccacragacccagaacctggccaccgacccgcrctttgctcagcttctggagatgcttcgggaccagctggccaagtggcagtgggagacccacgacccctgggtgtgcgcccccgacggcktcctggaggagaagctctctccccagtgccagcccctccacaatgagctgtgaccatcccaggaggcctgtgcacacatcccaggcatgtcccagacacatcccacacgtgtccgtgtggccggccagcctggggagtagtggcaacagcccttccgtccacactcccatccaaggagggttcttccttcctgtggggtcactcttgccattgcctggagggggaccagagcatgtgaccagagcatgtgcccagcccctccaccaccaggggcactgccgtcatggcaggggacacagttgtccttgtgtctgaaccatgtcccagcacgggaattctagacatacgtggtctgcggacagggcagygcccccagcccatgacaagggagtcttgttttctggcttggtttggggacctgcaaatgggaggcctgaggccctcttcaggctttggcagccacagatacttctgaacccttcacagagagcaggcaggggcttcggtgccgcgtgggcagtacgcaggtcccaccgacactcacctgggagcacggcgcctggctcttaccagcgtctggcctagaggaagcctttgagcgacctttgggcaggtttctgcttcttctgttttgccccatggtcaagtccctgttccccaggcaggtttcagctgattggcagcaggctccctgagtgatgagcttgaacctgtggtgtttctgggcagaagcttatcttttttgagagtgtccgaagatgaaggcatggcgatgcccgtcctctggcttgggttaattcttcggtgacactggcattgctgggtggtgatgcccgtcctctggcttgggttaattcttcggtgacactggcgttgctgggtggcratgcccrtcctctgscttgggytaattcttcggtgacactggcgttgctgggtggcgatgcccgtcctctggcttgggttaattcttggatgacgtcggcgttgctgggagaatgtgccgttcctgccctgcctccacccacctcgggagcagaagcccggcctggacacccctcggcctggacacccctcgaaggagagggcgcttccttgagtaggtgggctccccttgcccttccctccctatcactccatactggggtgggctggaggaggccacaggccagctattgtaaaagctttttattttagtaaaatatacagaagttctttttctgaactcatttatgatgataccaacctgaattctagaacagcttcctgattcttggacactgctgtcaaaatgacattcagtctgcaacagccccaggaggcaggggcaaggccaggtgctggcggacctgggtcctccccgagccctgaaggtggagtaaagatgtttggcccaagaagggctggggtgcaaagccaggtcaggggaaggcagagtccgctgggccttgtacgggggtactggtgccaggcttctctgggacacccccaccgaacaggcacaggggccacggggcacagacccactgaaagtaccgtctccaccacgcagaggctttatttacaagtaaacacactggtctctgtaaactggagttcctgaggcatcgcagcctcagaagctgagaaaaggtgg

SEQ ID NO: 5545 - DNA, 3039 bp, Homo sapiens
cgcgggcccagaggcggggcgagcgcgcgcggggcggaagtcggccaccttcctccgtcccggccgttagcccagccaagcccagccaagcccagccaagccccgccgatcgcgggcaccggagccagccccgcagcggaaaagcacatctcccaggatcctgagagagcttgaaccagaccactgtggacacggtggccacccgtcaccactacccttcccaaggggagacgaggagcaagtaggcttgagggaaaagctgcacaggactcgtgtcttgaaatgtctaagacgcatgtcagaaatgcaggagcctaacccagaggaagtggagactcctttactgcacatctgtctgctccaggccaggcactgttctaggagccaggatacagaggtggagacagaaacaaacaaaccgataactgtatacaatactctaacgtcagagggaccacagagcaccagcctgcatggaacttccttcctcactcagcttyccacgttgccagctgggacaggggagatggagtaattttgctgtggaaagacttcacgtcttgccgaatgaaagtcccgcctgtctgtcacgctgrtgcccgtgcagctgtctgagcacccggaatggaatgagtctatgcactccctccggatcagtgtggggggccttcctgtgctggcgtccatgaccaaggccgcggacccccgcttccgcccccgctggaaggtgatcctgacgttctttgtgggtgctgccatcctctggctgctctgctcccaccgcccggcccccggcaggccccccacccacaatgcacacaactggaggctcggccaggcgcccgccaactggtacaatgacacctaccccctgtctcccccacaaaggacaccggctgggattcggtatcgaatcgcagttatcgcagacctggacacagagtcaagggcccaagaggaaaacaccyggttcagttacctgaaaaagggctacctgaccctgtcagacagtggggacaaggtggccgtggaatgggacaaagaccatggggtyctggagtcccacctggcggagaaggggagaggcatggagctatccgacctgattgttttcaatgggaaactctactccgtggatgaccggacgggggtcgtctaccagatcgaaggcagcaaagccgtgccctgggtgattctgtccgacggcgacggcaccgtggagaaaggcttcaaggccgaatggctggcagtgaaggacgagcgtctgtacgtgggcggcctgggcaaggagtggacgaccactacgggtgatgtggtgaacgagaacccggagtgggtgaaggtggtgggctacaagggcagcgtggaccacgagaactgggtgtccaactacaacgccctgcgggctgctgccggcatccagccgccaggctacctcatccatgagtctgcctgctggagtgacacgctgcagcgctggttcttcctgccgcgccgcgccagccaggagcgctacagcgagaaggacgacgagcgcaagggcgccaacctgctgctgagcrcctcccctgacttcggcgacatcgctgtgagccacgtcggggcggtggtccccactcacggcttctcgtccttcaagttcatccccaayaccgacgaccagatcattgtggccctcaaatccgaggaggacagcggcagagtcgcctcctacatcatggccttcacrctggacgggcgcttcctgttgccggagaccaagatcgraagcgtgaaatacgaaggcatcgagttcatttaactcaaaacrgaaacactgagcaaggccatcaggactcagcttttatccagtcccgggccccatagtggtgcgggcactggacccccgggccccacggaggccgcggtctgaactgctttccatgctgccatctggtggtgatttcggtcacttcaggcattgactcaaggcctgcctaactggctgggtcgtttcttccatccgacctcgtttcttttctttcctatgttcttttgttcagtgaatatccctagagctcctaccatatgtcaggccctatgcctcaccctgagaacgcagtgagcatgaggtggacctgtttgctgggaaccccaggtcacccccttttcttcctactctgtgcctggagcatcatgtccacccctgcagatccttggaaaagaaaatgtttatgttgcagggtattgcatggtcacgagtgagggcaggcccctggggacacatctgcccacagctgcacaggccagggcgcaggcacatctgttggttctcaggcctcagataaaaccatctccgcatcatatggccagtgaccgctttctcccttcaagaaaattctgtggctgtgcagtactttgaagttttaattattaacctgctttaattaaagcagtttcctttcttataaagtggaatcaccaaatcttatcacacagagcacagtcctgtagttacccagcccgctccagcagtgcgggagattgtaaggaagcggtggcggctggtgaagcaagtctcacatgtcggygttcttggccaatggatacaaagataaagaaaatgttgcctttttctaggaactgtcagaaatcctcatgcctttcaagacttctgtgaatgacttgaattttttattccctgcctagggtctgtgaacgaggcctgtctcttccctggggtttctttccatggcctttatttctcctcttccagtgggagttttgcaggctcttctctgtggaaacttcacgagcgttggctgggcctcggcttcgctggagtgtactccagggtgaaggcagagtgggatttgagacccaggtagtggaggaagcgaaggaagtgaacgctraatgtgacgcatttctgaagagctcagctgtcaccgggcatagcctggaagccccaagtctgttctgactttgcctggctgtctccttgacccgcctcctagatcattgtccttgatgtccaggctgggtcatttaaaatagaga

SEQ ID NO: 5546 - DNA, 4741 bp, Homo sapiens
ggtgaggccgaggtgactgcagagcggctcgcgagggttttggactgataaagcaatggaagccactgaagagctttaagatgaggatggcatggagggaagataagtcacataatcagttctgtgatatgagcaacaatggaccagaagattttatctctagcagcagaaaaaacagcagacaaactgcaagaatttcttcaaaccctgagagaaggtgatttgactaatctccttcagaatcaagcagtgaaaggaaaagttgctggagcactcctgagagccatcttcaaaggttccccctgctctgaggaagctggaacacttaggagacgtaagatatacacttgttgtatccagttggtggaatcgggggatttgcagaaagaaatagygtctgagatcataggattactgatgctggaggctcaccattttccaggaccattattggttgaattagccaatgagtttattagtgctgtcagagaaggcagcctagtgaatggaaaatctttggagttactacctatcattctcactgccctggctacgaaaaaggaaaatctggcttatggaaaaggtgtactgagtggggaagaatgtaagaaacagttgattaacaccctgtgttctggcagggatgtccctctgactgcagaagaggtggaatttgtggtggaaaaagcattgagcatgttctccaagatgaatcttcaagaaataccacctttggtctatcagcttctggttctctcctccaagggaagcagaaagagtgttttggaaggaatcatagccttcttcagtgcactagataagcagcacaatgaggaacagagtggtgacgagctattggatgttgtcactgtgccatcaggtgaacttcgtcatgtggaaggcaccattattctacacattgtgtttgccatcaaattggactatgaactaggcagagaactcgtgaaacacttaaaggtaggacagcaaggagattccaataataacttaagtcccttcagcattgctcttcttctgtctgtaacaagaatacaaagatttcaggaccaggtgcttgatcttttaaagacttcggttgtaaagagctttaaggatcttcaactcctccaaggctcaaaatttcttcagaatctagttcctcatagatcttatgtttcaaccatgatcttggaagtagtgaagaatagcgttcatagctgggaccatgttactcagggcctcgtagaacttggtttcattttgatggattcataygggccaaagaaggttcttgatggaaaaactattgaaaccagcccaagtctttctagaatgccaaaccagcatgcatgtaagctcggagctaatatcctgttggaaacttttaagatccatgagatgatcagacaagaaattttggarcaggtcctcaacagggttgttaccagagcatcttctcccatcagtcatttcttagacctgctttcaaatatcgtcatgtatgcacccttagttcttcaaagttgttcttctaaagtcacagaagcttttgactatttgtcctttctgccccttcagactgtacaaaggctgcttaaggcagtgcagccccttctcaaagtcagcatgtcaatgagagactgcttgatacttgtccttcggaaagctatgtttgccaaccagcttgatgcccgaaaatctgcagttgctgggtttttgctgctcctgaagaactttaaagttttaggcagcctgtcatcctctcagtgcagtcagtctstcagtgtcagtcaggttcatgtggatgttcacagccattacaattctgtcgccaatgaaactttttgccttgagatcatggatagtttgaggagatgcttaagccagcaagctgatgttcgactcatgctttatgaggggttttatgatgttcttcgaaggaactctcagctggctaattcagtcatgcaaactctgctctcacagttaaaacagttctatgagccaaaacctgatctgctgcctcctctgaaattagaagcttgtattctgacccaaggagataagatctctctacaagaaccactggattatctgctgtgttgtattcagcattgtttggcytggtataagaatacagtcatacccttamagcagggagaggaggaagaggaggaggaagaggcattctacgaagacctagatgatatattggagtccattactaatagaatgattaagagtgagctggaagactttgaactggataaatcagcagatttttctcagagcaccagtattggcataaaaaataatatctstgcttttcttgtgatgggagtttgtgaggttttaatagaatacaatttctccataagtagtttcagtaagaataggtttgaggacattctgagcttatttatgtgttacaaaaaactctctgacattcttaatgaaaaagckggtaaagccaaaactaaaatggccaacaagacaagtgatagtcttttgtccatgaaatttgtgtccagtcttctcactgctcttttcagagtcttgctatggagatacacttcaattcctacttcagtggaagagtcgggaaagaaagagaaaggaaagagcatctcactgctgtgcttggagggtttacagaaaatattcagtgctgtgcaacagttctatcagcccaagattcagcagtttctcagagctctggatgtcacagataaggaaggagaagagagagaagatgcagatgtcagtgtcactcagagaacagcattccagatccggcaatttcagaggtccttgttgaatttacttagcagtcaagaggaagattttaatagcaaagaagccctcctgctagtcacggttcttaccagtttgtccaagttactggagccctcctctcctcagtttgtgcagatgttatcctggacatcaaagatttgcaaggaaaacagccgggaggatgccttgttttgcaagagcttgatgaacttgctcttcagcytgcatgtttcgtataagagtcctgtcattctgctgcgtgacttgtcccaggatatccacgggcatctgggagatatagaccaggatgtagaggtggagaaaacaaaccactttgcaatagtgaatttgagaacggctgcccccactgtctgtttacttgttctgagtcaggccgagaaggttctagaagaagtggactggctaatcaccaagcttaagggacaagtgagccaagaaaccttatcagaagaggcctcttctcaggcaaccctaccaaatcagcctgttgagaaagctatcatcatgcaactgggaactctgcttacatttttccacgagctggtgcagacagctctgccatcaggcagctgtgtggacaccttgttaaaggacttgkgcaaaatgtacaccacacttacagcccttgtcagatattatctccaggtgtgtcagagctccggaggaattccaaaaaatatggaaaagctggtgaagctgtctggttctcatctgacccccctgtgttattctttcatttcttacgtacagaataagagtaagagcctgaactatacgggagagaaaaaggagaaacctgctgccgttgccacagccatggccagagttcttcgggaaaccaagccaatccctaacctcatctttgccatagaacagtatgaaaaatttctcatccacctttctaagaagtccaaggtgaacctgatgcagcacatgaagctcagyacctcacgagacttcaagatcaaaggaaacatcctagacatggttcttcgagaggatggygaagatgaaaatgaagagggcactgcatcagagcatgggggacagaacaaagaaccagccaagaagaaaagraaaaaataaatgaaatgcctgagttaatgtgaactttggggcttctgcttcatttttacccaacaagcaacaatgccccttgtcctgtagtccacaccgatgttggcatcttggttctgaacccactgaattcaactgcaccttcagttagaaggaatcttcttggcaggtcctgctactgaaaaatggctggccttaggcaagcccttttgcaaaaagcacagctgaaagcctgagtttgggagcctgcaccaccccgatgaagctccaygggagcaaatacagagcctccaggcagtgctatggtccaggmtggcttcgtttttccaargagcctttggtgagttcaattatctggtaaatatccagcgcttcacctgaaagayagtgsaaattggttaggatgccacctcaagaactgtaactgagagctcagaagtgagcaaagkagcttaatgctaaggtcaaaaggagartgaaaggttgagaacaattgccacgaacggtaatgttacatgttaggagggtctgttttctttttatataagtgtgtcttagatatattttaaatagaaaataagctttctgatttacttgtttggtatttaaagcacagtttgtttttctgtcacctatagagtgcaagaatgcactctatagaataaatymtctttaaacatttcttctgtggttgaagtasgggacaggtacaggtagaatatttgaagctctgctgccttcatttytgaaacatcatatcacattcactctggacacagggcaccttataaactgaaattagcctagaatatagcctgagtcaagagtggattctctggggccccar

SEQ ID NO: 5547 - DNA, 4729 bp, Homo sapiens
ggtaacggaagtgtggcggcgttgggttgagcgggctttttggaagtttgtggcggaggtgaggccgaggtgactgcagagcggctcgcgagagtctccctctgttgccaggctggagtgcagtggcgcgatctcggctcactgcaacctccgcctcctgagttcaagtgattctcctgcctcagcctcacaagtagctgggactacagggttttggactgataaagcaatggaagccactgaagagctttaagatgaggatggcatggagggaagataagtcacataatcagttctgtgatatgagcaacaatggaccagaagattttatctctagcagcagaaaaaacagcagacaaactgcaagaatttcttcaaaccctgagagaaggtgatttgactaatctccttcagaatcaagcagtgaaaggaaaagttgctggagcactcctgagagccatcttcaaaggaccattattggttgaattagccaatgagtttattagtgctgtcagagaaggcagcctagtgaatggaaaatctttggagttactacctatcattctcactgccctggctacgaaaaaggaaaatctggcttatggaaaaggtgtactgagtggggaagaatgtaagaaacagttgattaacaccctgtgttctggcagggatgtccctctgactgcagaagaggtggaatttgtggtggaaaaagcattgagcatgttctccaagatgaatcttcaagaaataccacctttggtctatcagcttctggttctctcctccaagggaagcagaaagagtgttttggaaggaatcatagccttcttcagtgcactagataagcagcacaatgaggaacagagtggtgacgagctattggatgttgtcactgtgccatcaggtgaacttcgtcatgtggaaggcaccattattctacacattgtgtttgccatcaaattggactatgaactaggcagagaactcgtgaaacacttaaaggtaggacagcaaggagattccaataataacttaagtcccttcagcattgctcttcttctgtctgtaacaagaatacaaagatttcaggaccaggtgcttgatcttttaaagacttcggttgtaaagagctttaaggatcttcaactcctccaaggctcaaaatttcttcagaatctagttcctcatagatcttatgtttcaaccatgatcttggaagtagtgaagaatagcgttcatagctgggaccatgttactcagggcctcgtagaacttggtttcattttgatggattcataygggccaaagaaggttcttgatggaaaaactattgaaaccagcccaagtctttctagaatgccaaaccagcatgcatgtaagctcggagctaatatcctgttggaaacttttaagatccatgagatgatcagacaagaaattttggarcaggtcctcaacagggttgttaccagagcatcttctcccatcagtcatttcttagacctgctttcaaatatcgtcatgtatgcacccttagttcttcaaagttgttcttctaaagtcacagaagcttttgactatttgtcctttctgccccttcagactgtacaaaggctgcttaaggcagtgcagccccttctcaaagtcagcatgtcaatgagagactgcttgatacttgtccttcggaaagctatgtttgccaaccagcttgatgcccgaaaatctgcagttgctgggtttttgctgctcctgaagaactttaaagttttaggcagcctgtcatcctctcagtgcagtcagtctstcagtgtcagtcaggttcatgtggatgttcacagccattacaattctgtcgccaatgaaactttttgccttgagatcatggatagtttgaggagatgcttaagccagcaagctgatgttcgactcatgctttatgaggggttttatgatgttcttcgaaggaactctcagctggctaattcagtcatgcaaactctgctctcacagttaaaacagttctatgagccaaaacctgatctgctgcctcctctgaaattagaagcttgtattctgacccaaggagataagatctctctacaagaaccactggataaatcagcagatttttctcagagcaccagtattggcataaaaaataatatctstgcttttcttgtgatgggagtttgtgaggttttaatagaatacaatttctccataagtagtttcagtaagaataggtttgaggacattctgagcttatttatgtgttacaaaaaactctctgacattcttaatgaaaaagckggtaaagccaaaactaaaatggccaacaagacaagtgatagtcttttgtccatgaaatttgtgtccagtcttctcactgctcttttcaggtccagcaatgagtttatgcgctatgcagtgaatgtagctctgcagaargtacagcagctaaaggaaacagggcatgtgagtggccctgatggccaaaacccagaaaagatctttcagaacctctgtgacataactcgagtcttgctatggagatacacttcaattcctacttcagtggaagagtcgggaaagaaagagaaaggaaagagcatctcactgctgtgcttggagggtttacagaaaatattcagtgctgtgcaacagttctatcagcccaagattcagcagtttctcagagctctggatgtcacagataaggaaggagaagagagagaagatgcagatgtcagtgtcactcagagaacagcattccagatccggcaatttcagaggtccttgttgaatttacttagcagtcaagaggaagattttaatagcaaagaagccctcctgctagtcacggttcttaccagtttgtccaagttactggagccctcctctcctcagtttgtgcagatgttatcctggacatcaaagatttgcaaggaaaacagccgggaggatgccttgttttgcaagagcttgatgaacttgctcttcagcytgcatgtttcgtataagagtcctgtcattctgctgcgtgacttgtcccaggatatccacgggcatctgggagatatagaccaggatgtagaggtggagaaaacaaaccactttgcaatagtgaatttgagaacggctgcccccactgtctgtttacttgttctgagtcaggccgagaaggttctagaagaagtggactggctaatcaccaagcttaagggacaagtgagccaagaaaccttatcagaagaggcctcttctcaggcaaccctaccaaatcagcctgttgagaaagctatcatcatgcaactgggaactctgcttacatttttccacgagctggtgcagacagctctgccatcaggcagctgtgtggacaccttgttaaaggacttgkgcaaaatgtacaccacacttacagcccttgtcagatattatctccaggtgtgtcagagctccggaggaattccaaaaaatatggaaaagctggtgaagctgtctggttctcatctgacccccctgtgttattctttcatttcttacgtacagaataagagtaagagcctgaactatacgggagagaaaaaggagaaacctgctgccgttgccacagccatggccagagttcttcgggaaaccaagccaatccctaacctcatctttgccatagaacagtatgaaaaatttctcatccacctttctaagaagtccaaggtgaacctgatgcagcacatgaagctcagyacctcacgagacttcaagatcaaaggaaacatcctagacatggttcttcgagaggatggygaagatgaaaatgaagagggcactgcatcagagcatgggggacagaacaaagaaccagccaagaagaaaagraaaaaataaatgaaatgcctgagttaatgtgaactttggggcttctgcttcatttttacccaacaagcaacaatgccccttgtcctgtagtccacaccgatgttggcatcttggttctgaacccactgaattcaactgcaccttcagttagaaggaatcttcttggcaggtcctgctactgaaaaatggctggccttaggcaagcccttttgcaaaaagcacagctgaaagcctgagtttgggagcctgcaccaccccgatgaagctccaygggagcaaatacagagcctccaggcagtgctatggtccaggmtggcttcgtttttccaargagcctttggtgagttcaattatctggtaaatatccagcgcttcacctgaaagayagtgsaaattggttaggatgccacctcaagaactgtaactgagagctcagaagtgagcaaagkagcttaatgctaaggtcaaaaggagartgaaaggttgagaacaattgccacgaacggtaatgttacatgttaggagggtctgttttctttttatataagtgtgtcttagatatattttaaatagaaaataagctttctgatttacttgtttggtatttaaagcacagtttgtttttctgtcacctatagagtgcaagaatgcactctatagaataaatymtctttaaacatttcttctgtggttgaagtasgggacaggtacaggtagaatatttgaagctctgctgccttcatttytgaaacatcatatcacattcactctggacacagggcaccttataaactgaaattagcctagaatatagcctgagtcaagagtggattctctggggccccar

SEQ ID NO: 5548 - DNA, 4768 bp, Homo sapiens
ggtaacggaagtgtggcggcgttgggttgagcgggctttttggaagtttgtggcggaggtgaggccgaggtgactgcagagcggctcgcgagagtctccctctgttgccaggctggagtgcagtggcgcgatctcggctcactgcaacctccgcctcctgagttcaagtgattctcctgcctcagcctcacaagtagctgggactacagggttttggactgataaagcaatggaagccactgaagagctttaagatgaggatggcatggagggaagataagtcacataatcagttctgtgatatgagcaacaatggaccagaagattttatctctagcagcagaaaaaacagcagacaaactgcaagaatttcttcaaaccctgagagaaggtgatttgactaatctccttcagaatcaagcagtgaaaggaaaagttgctggagcactcctgagagccatcttcaaaggaccattattggttgaattagccaatgagtttattagtgctgtcagagaaggcagcctagtgaatggaaaatctttggagttactacctatcattctcactgccctggctacgaaaaaggaaaatctggcttatggaaaaggtgtactgagtggggaagaatgtaagaaacagttgattaacaccctgtgttctggcagggatgtccctctgactgcagaagaggtggaatttgtggtggaaaaagcattgagcatgttctccaagatgaatcttcaagaaataccacctttggtctatcagcttctggttctctcctccaagggaagcagaaagagtgttttggaaggaatcatagccttcttcagtgcactagataagcagcacaatgaggaacagagtggtgacgagctattggatgttgtcactgtgccatcaggtgaacttcgtcatgtggaaggcaccattattctacacattgtgtttgccatcaaattggactatgaactaggcagagaactcgtgaaacacttaaaggtaggacagcaaggagattccaataataacttaagtcccttcagcattgctcttcttctgtctgtaacaagaatacaaagatttcaggaccaggtgcttgatcttttaaagacttcggttgtaaagagctttaaggatcttcaactcctccaaggctcaaaatttcttcagaatctagttcctcatagatcttatgtttcaaccatgatcttggaagtagtgaagaatagcgttcatagctgggaccatgttactcagggcctcgtagaacttggtttcattttgatggattcataygggccaaagaaggttcttgatggaaaaactattgaaaccagcccaagtctttctagaatgccaaaccagcatgcatgtaagctcggagctaatatcctgttggaaacttttaagatccatgagatgatcagacaagaaattttggarcaggtcctcaacagggttgttaccagagcatcttctcccatcagtcatttcttagacctgctttcaaatatcgtcatgtatgcacccttagttcttcaaagttgttcttctaaagtcacagaagcttttgactatttgtcctttctgccccttcagactgtacaaaggctgcttaaggcagtgcagccccttctcaaagtcagcatgtcaatgagagactgcttgatacttgtccttcggaaagctatgtttgccaaccagcttgatgcccgaaaatctgcagttgctgggtttttgctgctcctgaagaactttaaagttttaggcagcctgtcatcctctcagtgcagtcagtctstcagtgtcagtcaggttcatgtggatgttcacagccattacaattctgtcgccaatgaaactttttgccttgagatcatggatagtttgaggagatgcttaagccagcaagctgatgttcgactcatgctttatgaggggttttatgatgttcttcgaaggaactctcagctggctaattcagtcatgcaaactctgctctcacagttaaaacagttctatgagccaaaacctgatctgctgcctcctctgaaattagaagcttgtattctgacccaaggagataagatctctctacaagaaccactggattatctgctgtgttgtattcagcattgtttggcytggtataagaatacagtcatacccttamagcagggagaggaggaagaggaggaggaagaggcattctacgaagacctagatgatatattggagtccattactaatagaatgattaagagtgagctggaagactttgaactggataaatcagcagatttttctcagagcaccagtattggcataaaaaataatatctstgcttttcttgtgatgggagtttgtgaggttttaatagaatacaatttctccataagtagtttcagtaagaataggtttgaggacattctgagcttatttatgtgttacaaaaaactctctgacattcttaatgaaaaagckggtaaagccaaaactaaaatggccaacaagacaagtgatagtcttttgtccatgaaatttgtgtccagtcttctcactgctcttttcagagtcttgctatggagatacacttcaattcctacttcagtggaagagtcgggaaagaaagagaaaggaaagagcatctcactgctgtgcttggagggtttacagaaaatattcagtgctgtgcaacagttctatcagcccaagattcagcagtttctcagagctctggatgtcacagataaggaaggagaagagagagaagatgcagatgtcagtgtcactcagagaacagcattccagatccggcaatttcagaggtccttgttgaatttacttagcagtcaagaggaagattttaatagcaaagaagccctcctgctagtcacggttcttaccagtttgtccaagttactggagccctcctctcctcagtttgtgcagatgttatcctggacatcaaagatttgcaaggaaaacagccgggaggatgccttgttttgcaagagcttgatgaacttgctcttcagcytgcatgtttcgtataagagtcctgtcattctgctgcgtgacttgtcccaggatatccacgggcatctgggagatatagaccaggatgtagaggtggagaaaacaaaccactttgcaatagtgaatttgagaacggctgcccccactgtctgtttacttgttctgagtcaggccgagaaggttctagaagaagtggactggctaatcaccaagcttaagggacaagtgagccaagaaaccttatcagaagaggcctcttctcaggcaaccctaccaaatcagcctgttgagaaagctatcatcatgcaactgggaactctgcttacatttttccacgagctggtgcagacagctctgccatcaggcagctgtgtggacaccttgttaaaggacttgkgcaaaatgtacaccacacttacagcccttgtcagatattatctccaggtgtgtcagagctccggaggaattccaaaaaatatggaaaagctggtgaagctgtctggttctcatctgacccccctgtgttattctttcatttcttacgtacagaataagagtaagagcctgaactatacgggagagaaaaaggagaaacctgctgccgttgccacagccatggccagagttcttcgggaaaccaagccaatccctaacctcatctttgccatagaacagtatgaaaaatttctcatccacctttctaagaagtccaaggtgaacctgatgcagcacatgaagctcagyacctcacgagacttcaagatcaaaggaaacatcctagacatggttcttcgagaggatggygaagatgaaaatgaagagggcactgcatcagagcatgggggacagaacaaagaaccagccaagaagaaaagraaaaaataaatgaaatgcctgagttaatgtgaactttggggcttctgcttcatttttacccaacaagcaacaatgccccttgtcctgtagtccacaccgatgttggcatcttggttctgaacccactgaattcaactgcaccttcagttagaaggaatcttcttggcaggtcctgctactgaaaaatggctggccttaggcaagcccttttgcaaaaagcacagctgaaagcctgagtttgggagcctgcaccaccccgatgaagctccaygggagcaaatacagagcctccaggcagtgctatggtccaggmtggcttcgtttttccaargagcctttggtgagttcaattatctggtaaatatccagcgcttcacctgaaagayagtgsaaattggttaggatgccacctcaagaactgtaactgagagctcagaagtgagcaaagkagcttaatgctaaggtcaaaaggagartgaaaggttgagaacaattgccacgaacggtaatgttacatgttaggagggtctgttttctttttatataagtgtgtcttagatatattttaaatagaaaataagctttctgatttacttgtttggtatttaaagcacagtttgtttttctgtcacctatagagtgcaagaatgcactctatagaataaatymtctttaaacatttcttctgtggttgaagtasgggacaggtacaggtagaatatttgaagctctgctgccttcatttytgaaacatcatatcacattcactctggacacagggcaccttataaactgaaattagcctagaatatagcctgagtcaagagtggattctctggggccccar

SEQ ID NO: 5549 - DNA, 4836 bp, Homo sapiens
ggtgaggccgaggtgactgcagagcggctcgcgagggttttggactgataaagcaatggaagccactgaagagctttaagatgaggatggcatggagggaagataagtcacataatcagttctgtgatatgagcaacaatggaccagaagattttatctctagcagcagaaaaaacagcagacaaactgcaagaatttcttcaaaccctgagagaaggtgatttgactaatctccttcagaatcaagcagtgaaaggaaaagttgctggagcactcctgagagccatcttcaaaggttccccctgctctgaggaagctggaacacttaggagacgtaagatatacacttgttgtatccagttggtggaatcgggggatttgcagaaagaaatagygtctgagatcataggattactgatgctggaggctcaccattttccaggaccattattggttgaattagccaatgagtttattagtgctgtcagagaaggcagcctagtgaatggaaaatctttggagttactacctatcattctcactgccctggctacgaaaaaggaaaatctggcttatggaaaaggtgtactgagtggggaagaatgtaagaaacagttgattaacaccctgtgttctggcaggtgggatcagcaatatgtaatccaactcacctccatgttcaaggatgtccctctgactgcagaagaggtggaatttgtggtggaaaaagcattgagcatgttctccaagatgaatcttcaagaaataccacctttggtctatcagcttctggttctctcctccaagggaagcagaaagagtgttttggaaggaatcatagccttcttcagtgcactagataagcagcacaatgaggaacagagtggtgacgagtaggacagcaaggagattccaataataacttaagtcccttcagcattgctcttcttctgtctgtaacaagaatacaaagatttcaggaccaggtgcttgatcttttaaagacttcggttgtaaagagctttaaggatcttcaactcctccaaggctcaaaatttcttcagaatctagttcctcatagatcttatgtttcaaccatgatcttggaagtagtgaagaatagcgttcatagctgggaccatgttactcagggcctcgtagaacttggtttcattttgatggattcataygggccaaagaaggttcttgatggaaaaactattgaaaccagcccaagtctttctagaatgccaaaccagcatgcatgtaagctcggagctaatatcctgttggaaacttttaagatccatgagatgatcagacaagaaattttggarcaggtcctcaacagggttgttaccagagcatcttctcccatcagtcatttcttagacctgctttcaaatatcgtcatgtatgcacccttagttcttcaaagttgttcttctaaagtcacagaagcttttgactatttgtcctttctgccccttcagactgtacaaaggctgcttaaggcagtgcagccccttctcaaagtcagcatgtcaatgagagactgcttgatacttgtccttcggaaagctatgtttgccaaccagcttgatgcccgaaaatctgcagttgctgggtttttgctgctcctgaagaactttaaagttttaggcagcctgtcatcctctcagtgcagtcagtctstcagtgtcagtcaggttcatgtggatgttcacagccattacaattctgtcgccaatgaaactttttgccttgagatcatggatagtttgaggagatgcttaagccagcaagctgatgttcgactcatgctttatgaggggttttatgatgttcttcgaaggaactctcagctggctaattcagtcatgcaaactctgctctcacagttaaaacagttctatgagccaaaacctgatctgctgcctcctctgaaattagaagcttgtattctgacccaaggagataagatctctctacaagaaccactggattatctgctgtgttgtattcagcattgtttggcytggtataagaatacagtcatacccttamagcagggagaggaggaagaggaggaggaagaggcattctacgaagacctagatgatatattggagtccattactaatagaatgattaagagtgagctggaagactttgaactggataaatcagcagatttttctcagagcaccagtattggcataaaaaataatatctstgcttttcttgtgatgggagtttgtgaggttttaatagaatacaatttctccataagtagtttcagtaagaataggtttgaggacattctgagcttatttatgtgttacaaaaaactctctgacattcttaatgaaaaagckggtaaagccaaaactaaaatggccaacaagacaagtgatagtcttttgtccatgaaatttgtgtccagtcttctcactgctcttttcagggatagtatccaaagccaccaagaaagcctttctgttctcaggtccagcaatgagtttatgcgctatgcagtgaatgtagctctgcagaargtacagcagctaaaggaaacagggcatgtgagtggccctgatggccaaaacccagaaaagatctttcagaacctctgtgacataactcgagtcttgctatggagatacacttcaattcctacttcagtggaagagtcgggaaagaaagagaaaggaaagagcatctcactgctgtgcttggagggtttacagaaaatattcagtgctgtgcaacagttctatcagcccaagattcagcagtttctcagagctctggatgtcacagataaggaaggagaagagagagaagatgcagatgtcagtgtcactcagagaacagcattccagatccggcaatttcagaggtccttgttgaatttacttagcagtcaagaggaagattttaatagcaaagaagccctcctgctagtcacggttcttaccagtttgtccaagttactggagccctcctctcctcagtttgtgcagatgttatcctggacatcaaagatttgcaaggaaaacagccgggaggatgccttgttttgcaagagcttgatgaacttgctcttcagcytgcatgtttcgtataagagtcctgtcattctgctgcgtgacttgtcccaggatatccacgggcatctgggagatatagaccaggatgtagaggtggagaaaacaaaccactttgcaatagtgaatttgagaacggctgcccccactgtctgtttacttgttctgagtcaggccgagaaggttctagaagaagtggactggctaatcaccaagcttaagggacaagtgagccaagaaaccttatcagaagaggcctcttctcaggcaaccctaccaaatcagcctgttgagaaagctatcatcatgcaactgggaactctgcttacatttttccacgagctggtgcagacagctctgccatcaggcagctgtgtggacaccttgttaaaggacttgkgcaaaatgtacaccacacttacagcccttgtcagatattatctccaggtgtgtcagagctccggaggaattccaaaaaatatggaaaagctggtgaagctgtctggttctcatctgacccccctgtgttattctttcatttcttacgtacagaataagagtaagagcctgaactatacgggagagaaaaaggagaaacctgctgccgttgccacagccatggccagagttcttcgggaaaccaagccaatccctaacctcatctttgccatagaacagtatgaaaaatttctcatccacctttctaagaagtccaaggtgaacctgatgcagcacatgaagctcagyacctcacgagacttcaagatcaaaggaaacatcctagacatggttcttcgagaggatggygaagatgaaaatgaagagggcactgcatcagagcatgggggacagaacaaagaaccagccaagaagaaaagraaaaaataaatgaaatgcctgagttaatgtgaactttggggcttctgcttcatttttacccaacaagcaacaatgccccttgtcctgtagtccacaccgatgttggcatcttggttctgaacccactgaattcaactgcaccttcagttagaaggaatcttcttggcaggtcctgctactgaaaaatggctggccttaggcaagcccttttgcaaaaagcacagctgaaagcctgagtttgggagcctgcaccaccccgatgaagctccaygggagcaaatacagagcctccaggcagtgctatggtccaggmtggcttcgtttttccaargagcctttggtgagttcaattatctggtaaatatccagcgcttcacctgaaagayagtgsaaattggttaggatgccacctcaagaactgtaactgagagctcagaagtgagcaaagkagcttaatgctaaggtcaaaaggagartgaaaggttgagaacaattgccacgaacggtaatgttacatgttaggagggtctgttttctttttatataagtgtgtcttagatatattttaaatagaaaataagctttctgatttacttgtttggtatttaaagcacagtttgtttttctgtcacctatagagtgcaagaatgcactctatagaataaatymtctttaaacatttcttctgtggttgaagtasgggacaggtacaggtagaatatttgaagctctgctgccttcatttytgaaacatcatatcacattcactctggacacagggcaccttataaactgaaattagcctagaatatagcctgagtcaagagtggattctctggggccccar

SEQ ID NO: 5550 - DNA, 4708 bp, Homo sapiens
gtaacggaagtgtggcggcgttgggttgagcgggctttttggaagtttgtggcggagttctgtgatatgagcaacaatggaccagaagattttatctctagcagcagaaaaaacagcagacaaactgcaagaatttcttcaaaccctgagagaagttgactaatctccttcagaatcaagcagtgaaaggaaaagttgctggagcactcctgagagccatcttcaaaggttccccctgctctgaggaagctggaacacttaggagacgtaagatatacacttgttgtatccagttggtggaatcgggggatttgcagaaagaaatagygtctgagatcataggattactgatgctggaggctcaccattttccaggaccattattggttgaattagccaatgagtttattagtgctgtcagagaaggcagcctagtgaatggaaaatctttggagttactacctatcattctcactgccctggctacgaaaaaggaaaatctggcttatggaaaaggtgtactgagtggggaagaatgtaagaaacagttgattaacaccctgtgttctggcaggtgggatcagcaatatgtaatccaactcacctccatgttcaaggatgtccctctgactgcagaagaggtggaatttgtggtggaaaaagcattgagcatgttctccaagatgaatcttcaagaaataccacctttggtctatcagcttctggttctctcctccaagggaagcagaaagagtgttttggaaggaatcatagccttcttcagtgcactagataagcagcacaatgaggaacagagtggtgacgagctattggatgttgtcactgtgccatcaggtgaacttcgtcatgtggaaggcaccattattctacacattgtgtttgccatcaaattggactatgaactaggcagagaactcgtgaaacacttaaaggtaggacagcaaggagattccaataataacttaagtcccttcagcattgctcttcttctgtctgtaacaagaatacaaagatttcaggaccaggtgcttgatcttttaaagacttcggttgtaaagagctttaaggatcttcaactcctccaaggctcaaaatttcttcagaatctagttcctcatagatcttatgtttcaaccatgatcttggaagtagtgaagaatagcgttcatagctgggaccatgttactcagggcctcgtagaacttggtttcattttgatggattcataygggccaaagaaggttcttgatggaaaaactattgaaaccagcccaagtctttctagaatgccaaaccagcatgcatgtaagctcggagctaatatcctgttggaaacttttaagatccatgagatgatcagacaagaaattttggarcaggtcctcaacagggttgttaccagagcatcttctcccatcagtcatttcttagacctgctttcaaatatcgtcatgtatgcacccttagttcttcaaagttgttcttctaaagtcacagaagcttttgactatttgtcctttctgccccttcagactgtacaaaggctgcttaaggcagtgcagccccttctcaaagtcagcatgtcaatgagagactgcttgatacttgtccttcggaaagctatgtttgccaaccagcttgatgcccgaaaatctgcagttgctgggtttttgctgctcctgaagaactttaaagttttaggcagcctgtcatcctctcagtgcagtcagtctstcagtgtcagtcaggttcatgtggatgttcacagccattacaattctgtcgccaatgaaactttttgccttgagatcatggatagtttgaggagatgcttaagccagcaagctgatgttcgactcatgctttatgaggggttttatgatgttcttcgaaggaactctcagctggctaattcagtcatgcaaactctgctctcacagttaaaacagttctatgagccaaaacctgatctgctgcctcctctgaaattagaagcttgtattctgacccaaggagataagatctctctacaagaaccactggattatctgctgtgttgtattcagcattgtttggcytggtataagaatacagtcatacccttamagcagggagaggaggaagaggaggaggaagaggcattctacgaagacctagatgatatattggagtccattactaatagaatgattaagagtgagctggaagactttgaactggataaatcagcagatttttctcagagcaccagtattggcataaaaaataatatctstgcttttcttgtgatgggagtttgtgaggttttaatagaatacaatttctccataagtagtttcagtaagaataggtttgaggacattctgagcttatttatgtgttacaaaaaactctctgacattcttaatgaaaaagckggtaaagccaaaactaaaatggccaacaagacaagtgatagtcttttgtccatgaaatttgtgtccagtcttctcactgctcttttcagggatagtatccaaagccaccaagaaagcctttctgttctcaggtccagcaatgagtttatgcgctatgcagtgaatgtagctctgcagaargtacagcagctaaaggaaacagggcatgtgagtggccctgatggccaaaacccagaaaagatctttcagaacctctgtgacataactcgagtcttgctatggagatacacttcaattcctacttcagtggaagagtcgggaaagaaagagaaaggaaagagcatctcactgctgtgcttggagggtttacagaaaatattcagtgctgtgcaacagttctatcagcccaagattcagcagtttctcagagctctggatgtcacagataaggaaggagaagagagagaagatgcagatgtcagtgtcactcagagaacagcattccagatccggcaatttcagaggtccttgttgaatttacttagcagtcaagaggaagattttaatagcaaagaagccctcctgctagtcacggttcttaccagtttgtccaagttactggagccctcctctcctcagtttgtgcagatgttatcctggacatcaaagatttgcaaggaaaacagccgggaggatgccttgttttgcaagagcttgatgaacttgctcttcagcytgcatgtttcgtataagagtcctgtcattctgctgcgtgacttgtcccaggatatccacgggcatctgggagatatagaccaggatgtagaggtggagaaaacaaaccactttgcaatagtgaatttgagaacggctgcccccactgtctgtttacttgttctgagtcaggccgagaaggttctagaagaagtggactggctaatcaccaagcttaagggacaagtgagccaagaaaccttatcagtatctccaggtgtgtcagagctccggaggaattccaaaaaatatggaaaagctggtgaagctgtctggttctcatctgacccccctgtgttattctttcatttcttacgtacagaataagagtaagagcctgaactatacgggagagaaaaaggagaaacctgctgccgttgccacagccatggccagagttcttcgggaaaccaagccaatccctaacctcatctttgccatagaacagtatgaaaaatttctcatccacctttctaagaagtccaaggtgaacctgatgcagcacatgaagctcagyacctcacgagacttcaagatcaaaggaaacatcctagacatggttcttcgagaggatggygaagatgaaaatgaagagggcactgcatcagagcatgggggacagaacaaagaaccagccaagaagaaaagraaaaaataaatgaaatgcctgagttaatgtgaactttggggcttctgcttcatttttacccaacaagcaacaatgccccttgtcctgtagtccacaccgatgttggcatcttggttctgaacccactgaattcaactgcaccttcagttagaaggaatcttcttggcaggtcctgctactgaaaaatggctggccttaggcaagcccttttgcaaaaagcacagctgaaagcctgagtttgggagcctgcaccaccccgatgaagctccaygggagcaaatacagagcctccaggcagtgctatggtccaggmtggcttcgtttttccaargagcctttggtgagttcaattatctggtaaatatccagcgcttcacctgaaagayagtgsaaattggttaggatgccacctcaagaactgtaactgagagctcagaagtgagcaaagkagcttaatgctaaggtcaaaaggagartgaaaggttgagaacaattgccacgaacggtaatgttacatgttaggagggtctgttttctttttatataagtgtgtcttagatatattttaaatagaaaataagctttctgatttacttgtttggtatttaaagcacagtttgtttttctgtcacctatagagtgcaagaatgcactctatagaataaatymtctttaaacatttcttctgtggttgaagtasgggacaggtacaggtagaatatttgaagctctgctgccttcatttytgaaacatcatatcacattcactctggacacagggcaccttataaactgaaattagcctagaatatagcctgagtcaagagtggattctctggggccccar

SEQ ID NO: 5551 - DNA, 4554 bp, Homo sapiens
ccagcgaagcggaccggccgggtggaggccacacgctaccccgaggctgcgtaggccgcgcgaagggggacgccgtgccgtgggcctggggtcgggggagcagcagaccgggaagcaccgtgaggaccgaggatttggggtggaaggcaggcatggtcaaacccatttcactgacaggagagcagagacaggacgtgtctctctccacgtyttccagccagtaaaagaagccaagctggagcccaaagccaggtgttctgactcccagcgtgggggtccctgcaccaaccatgagccscctgctctggaggaaggtggccggcgccaccgtcgggccagggycggttccagctccggggcgctgggtctccagctccgtccccgcgtccgaccccagcgacgggcagcggcggcggcagcagcagcagcagcagcagcagcagcagcaacagcagcctcagcagccgcaagtgctatcctcggagggcgggcagctgcggcacaacccattggacatccagatgctctcgagagggctgcacgagcaaatcttcgggcaaggaggggagatgcctggcgaggccgcggtgcgccgcagcgtcgagcacctgcagaagcacgggctctgggggcagccagccgtgcccttgcccgacgtggagctgcgcctgccgcccctctacggggacaacctggaccagcacttccgcctcctggcccagaagcagagcctgccctacctggaggcggccaacttgctgttgcaggcccagctgcccccgaagcccccggcttgggcctgggcggagggctggacccggtacggccccgagggggaggccgtacccgtggccatccccgaggagcgggccctggtgttcgacgtggaggtctgcttggcagagggaacttgccccacattggcggtggccatatccccctcggcctggtattcctggtgcagccagcggctggtggaagagcgttactcttggaccagccagctgtcgccggctgacctcatccccctggaggtccctaytggtgccagcagccccacccagagagactggcaggagcagttagtggtggggcacaatgtttcctttgaccgagctcatatcagggagcagtacctgatycagggttcccgcatgcgtttcctggacaccatgagcatgcacatggccatctcagggckaagcagcttccagckcagtctgtggatagcagccaagcagggcaaacacaaggtccagycccccacaaagcaaggccagaagtcccagaggaaagccagaagaggcccagcgatctcatcctgggactggctggacatcagcagtgtcaacagtctggcagaggtgcacagactttatgtaggggggcctcccttagagaaggagcctcgagaactgtttgtgaagggcaccatgaaggacattcgtgagaacttccaggacctgatgcagtactgtgcccaggacgtgtgggccacccatgaggttttccagcagcagctaccgctcttcttggagaggtgtccccacccagtgactctggccggcatgctggagatgggtgtctcctacctgcctgtyaaccagaactgggagcgttacctggcagaggcacagggcacttatgaggagctccagcgggagatgaagaagtcrttgatggatctggccaatgatgcctgccagctgctctcaggagagaggtacaaagaagacccctggctctgggacctggagtgggacctgcaagaatttaagcagaagaaagctaagaaggtgaagaaggaaccagccacagccagcaagttgcccatcgagggggctggggcccctggtgatcccatggatcaggaagacctcggcccctgcagtgaggaggaggagtttcaacaagatgtcatggccygcgcctgcttgcagaagctgaaggggaccacagagctcctgcccaagcggccccagcaccttcctggacaccctggatggtaccggaagctctgcccccggctagacgaccctgcatggaccccgggccccagcctcctcagcctgcagatgcgggtcacacctaaactcatggcacttacctgggatggcttccctctgcactaytcagagcgtcatggctggggctacttggtgcctgggcggcgggacaacctggccaagctgccgacaggtaccaccctggagtcagctggggtggtctgcccctacagagccatcgagtccctgtacaggaagcaytgtctcraacaggggaagcwgcagctgatgccccaggaggccggcctggcggaggagttcctgctcactgacaatagtgccatatggcaaacggtagaagaactggattacttagaagtggaggctgaggcmaagatggagaacttgcgagctgcagtgccaggtcaacccctagctctgactgcccgtggtggccccaaggacacccagcccagctatcaccatggcaatggaccttacaacgacgtggacatccctggctgctggtttttcaagytgcctcacaaggatggtaatagctgtaatgtgggaagcccctttgccaaggacttcctgcccaagatggaggatggcaccctgcaggctggcccaggaggtgccagtgggccccgtgctctggaaatcaacaaaatgatttctttctggaggaacgcccataaacgtatcagctcccagatggtggtgtggctgcccaggtcagctctgccccgtgctgtgatcaggcaccccgactrtgatgaggaaggcctctatggggccatcctgccccaagtggtgactgccrgcaccatcactcgccgggctgtggagcccacatggctcaccgccagcaatgcccggcctgaccgagtaggcagtgagttgaaagccatggtgcaggccccacctggctacacccttgtgggtgctgatgtggactcccaagagctgtggattgcagctgtgcttggagacgcccactttgccggcatgcatggctgcacagcctttgggtggatgacactgcagggcaggaagagcaggggcactgatctacacagtaagacagccactactgtgggcatcagccrtgagcatgccaaaatcttcaactacggccgcatctrtggtkctgggcagccctttgctgagcgcttactaatgcagtttaaccaccggctcacacagcaggaggcagctgagaaggcccagcagatgtaygctgccaccaagggcctccgctggtatcggctgtcggatgagggcgagtggctggtgagggagttgaacctcccagtggacaggactgagggtggctggatttccctgcaggatctgcgcaaggtccagagagaaactgcaaggaagtcacagtggaagaagtgggaggtggttgctgaacgggcatggaaggggggcacagagtcagaaatgttcaataagcttgagagcattgctacgtctgacataccacgtaccccggtgctgggctgctgcatcagccgagccctggagccctcggctgtccaggaagagtttatgaccagccgtgtgaattgggtggtacagagctctgctgttgactacttacacctcatgcttgtggccatgaagtggctgtttgaagagtttgccatagatgggcgcttctgcatcagcatccatgaygaggttcgctacctggtgygggrggaggacygctaccgcgctgccctggccttgcagatcaccaacctcttgaccagtaaaattcctagttcatatggatgaattaaatattaccgttccatgttgatctgccactcagaaccagtttgggaaccatgatctatcctgattattgggtgcatgttygcctacaagctgggtctgaatgacttgccccagtyagtcgcctttttcagtgcagtcgatattgaccgstgcctcaggaaggaagtgaccatggattgtaaaacmccttccaacccaactgggatggaaaggagatacgggattccccagggtgaagcgctggatatttaccagataattgaactcaccaaaggctcyttggaaaaacgaagccakcctggaccatagcactgcctggaggctctgtatttgctcccrtggagcttcatcggggtggtgcaggctcccaaactcaggctttcagctgtgctttttgcaaaagggcttgcctaaggccagccatttttcagtagcaggacctgccaagaagattccttctaactgaaggtgcagttgaattcagtgggttcagaaccaagatgccaacatcggtgtggactacaggacaaggggcattgttgcttgttgggtaaaaatgaagcagaagccccaaagttcacattaactcaggcatttcatttattttttycttttcttcttggctggttctttgttctgtcccccatgctctgatgcagtgccctagaaggggaaagaattaatgctctaacgtgataaacctgctccaaggcagtggaaataaaaagaaggaaaaaaaagactctatcttctc

SEQ ID NO: 5552 - DNA, 4438 bp, Homo sapiens
gaagcggaccggccgggtggaggccacacgctaccccgaggctgcgtaggccgcgcgaagggggacgccgtgccgtgggcctggggtcgggggagcagcagaccgggaagcaccgatttggggtggaaggcaggcatggtcaaacccatttcactgacaggagagcagagacaggacgtgtctctctccacgtyttccagccagtaaaagaagccaagctggagcccaaagccaggtgttctgactcccagcgtgggggtccctgcaccaaccatgagccscctgctctggaggaaggtggccggcgccaccgtcgggccagggycggttccagctccggggcgctgggtctccagctccgtccccgcgtccgaccccagcgacgggcagcggcggcggcagcagcagcagcagcagcagcagcagcagcaacagcagcctcagcagccgcaagtgctatcctcggagggcgggcagctgcggcacaacccattggacatccagatgctctcgagagggctgcacgagcaaatcttcgggcaaggaggggagatgcctggcgaggccgcggtgcgccgcagcgtcgagcacctgcagaagcacgggctctgggggcagccagccgtgcccttgcccgacgtggagctgcgcctgccgcccctctacggggacaacctggaccagcacttccgcctcctggcccagaagcagagcctgccctacctggaggcggccaacttgctgttgcaggcccagctgcccccgaagcccccggcttgggcctgggcggagggctggacccggtacggccccgagggggaggccgtacccgtggccatccccgaggagcgggccctggtgttcgacgtggaggtctgcttggcagagggaacttgccccacattggcggtggccatatccccctcggcctggtattcctggtgcagccagcggctggtggaagagcgttactcttggaccagccagctgtcgccggctgacctcatccccctggaggtccctaytggtgccagcagccccacccagagagactggcaggagcagttagtggtggggcacaatgtttcctttgaccgagctcatatcagggagcagtacctgatycagggttcccgcatgcgtttcctggacaccatgagcatgcacatggccatctcagggckaagcagcttccagckcagtctgtggatagcagccaagcagggcaaacacaaggtccagycccccacaaagcaaggccagaagtcccagaggaaagccagaagaggcccagcgatctcatcctgggactggctggacatcagcagtgtcaacagtctggcagaggtgcacagactttatgtaggggggcctcccttagagaaggagcctcgagaactgtttgtgaagggcaccatgaaggacattcgtgagaacttccaggacctgatgcagtactgtgcccaggacgtgtgggccacccatgaggttttccagcagcagctaccgctcttcttggagaggtgtccccacccagtgactctggccggcatgctggagatgggtgtctcctacctgcctgtyaaccagaactgggagcgttacctggcagaggcacagggcacttatgaggagctccagcgggagatgaagaagtcrttgatggatctggccaatgatgcctgccagctgctctcaggagagaggtacaaagaagacccctggctctgggacctggagtgggacctgcaagaatttaagcagaagaaagctaagaaggtgaagaaggaaccagccacagccagcaagttgcccatcgagggggctggggcccctggtgatcccatggatcaggaagacctcggcccctgcagtgaggaggaggagtttcaacaagatgtcatggccygcgcctgcttgcagaagctgaaggggaccacagagctcctgcccaagcggccccagcaccttcctggacaccctggatggtaccggaagctctgcccccggctagacgaccctgcatggaccccgggccccagcctcctcagcctgcagatgcgggtcacacctaaactcatggcacttacctgggatggcttccctctgcactaytcagagcgtcatggctggggctacttggtgcctgggcggcgggacaacctggccaagctgccgacaggtaccaccctggagtcagctggggtggtctgcccctacagagccatcgagtccctgtacaggaagcaytgtctcraacaggggaagcwgcagctgatgccccaggaggccggcctggcggaggagttcctgctcactgacaatagtgccatatggcaaacggtagaagaactggattacttagaagtggaggctgaggcmaagatggagaacttgcgagctgcagtgccaggtcaacccctagctctgactgcccgtggtggccccaaggacacccagcccagctatcaccatggcaatggaccttacaacgacgtggacatccctggctgctggtttttcaagytgcctcacaaggatggtaatagctgtaatgtgggaagcccctttgccaaggacttcctgcccaagatggaggatggcaccctgcaggctggcccaggaggtgccagtgggccccgtgctctggaaatcaacaaaatgatttctttctggaggaacgcccataaacgtatcagctcccagatggtggtgtggctgcccaggtcagctctgccccgtgctgtgatcaggcaccccgactrtgatgaggaaggcctctatggggccatcctgccccaagtggtgactgccrgcaccatcactcgccgggctgtggagcccacatggctcaccgccagcaatgcccggcctgaccgagtaggcagtgagttgaaagccatggtgcaggccccacctggctacacccttgtgggtgctgatgtggactcccaagagctgtggattgcagctgtgcttggagacgcccactttgccggcatgcatggctgcacagcctttgggtggatgacactgcagggcaggaagagcaggggcactgatctacacagtaagacagccactactgtgggcatcagccrtgagcatgccaaaatcttcaactacggccgcatctrtggtkctgggcagccctttgctgagcgcttactaatgcagtttaaccaccggctcacacagcaggaggcagctgagaaggcccagcagatgtaygctgccaccaagggcctccgctggtatcggctgtcggatgagggcgagtggctggtgagggagttgaacctcccagtggacaggactgagggtggctggatttccctgcaggatctgcgcaaggtccagagagaaactgcaaggaagtcacagtggaagaagtgggaggtggttgctgaacgggcatggaaggggggcacagagtcagaaatgttcaataagcttgagagcattgctacgtctgacataccacgtaccccggtgctgggctgctgcatcagccgagccctggagccctcggctgtccaggaagagtttatgaccagccgtgtgaattgggtggtacagagctctgctgttgactacttacacctcatgcttgtggccatgaagtggctgtttgaagagtttgccatagatgggcgcttctgcatcagcatccatgaygaggttcgctacctggtgygggrggaggacygctaccgcgctgccctggccttgcagatcaccaacctcttgaccaggtgcatgttygcctacaagctgggtctgaatgacttgccccagtyagtcgcctttttcagtgcagtcgatattgaccgstgcctcaggaaggaagtgaccatggattgtaaaacmccttccaacccaactgggatggaaaggagatacgggattccccagggtgaagcgctggatatttaccagataattgaactcaccaaaggctcyttggaaaaacgaagccakcctggaccatagcactgcctggaggctctgtatttgctcccrtggagcttcatcggggtggtgcaggctcccaaactcaggctttcagctgtgctttttgcaaaagggcttgcctaaggccagccatttttcagtagcaggacctgccaagaagattccttctaactgaaggtgcagttgaattcagtgggttcagaaccaagatgccaacatcggtgtggactacaggacaaggggcattgttgcttgttgggtaaaaatgaagcagaagccccaaagttcacattaactcaggcatttcatttattttttycttttcttcttggctggttctttgttctgtcccccatgctctgatgcagtgccctagaaggggaaagaattaatgctctaacgtgataaacctgctccaaggcagtggaaataaaaagaaggaaaaaaaagactctatcttctc
